United States Patent Application Publication US 2024/0327476 A1 - sequence listing, part 81

SEQ ID NO: 153954 - DNA, 2619 bp, synthetic construct
  misc_feature 1..2619: note = Description of Artificial Sequence: Synthetic coding sequence
  source 1..2619: mol_type = other DNA
atgacagccccctggaggcggctgcggagcctggtgtgggagtactgggccggcctgctggtgtgtgccttctggatcccagacagccggggcatgccccacgtgatccgcatcggcggcatctttgaatatgcagatggccccaatgcccaggtgatgaatgctgaggagcacgccttccgcttcagcgccaacatcatcaacagaaacagaaccctgctgcccaacaccaccctgacctatgacatccagaggatccacttccatgacagctttgaggccaccaagaaggcctgtgaccagctggccctgggcgtggtggccatcttcggccccagccagggcagctgcaccaatgctgtgcagagcatctgcaatgccctggaggtgccccacatccagctgcgctggaagcaccaccccctggacaacaaggacaccttctacgtgaacctgtacccagactatgccagcctgagccacgccatcctggacctggtgcagtacctgaagtggaggtctgccaccgtggtgtatgatgacagcacaggcctcatccggctgcaggagctgatcatggcccccagccgctacaacatccggctgaagatccggcagctgcccatcgacagtgatgacagccggcccctgctgaaggagatgaagaggggccgggagttccgcatcatctttgactgcagccacaccatggccgcccagatcctgaagcaggccatggccatgggcatgatgacagagtactaccacttcatcttcaccaccctggacctgtatgccctggacctggagccctaccgctacagcggcgtgaacctgaccggcttccgcatcctgaatgtggacaacccccacgtgtctgccatcgtggagaagtggagcatggagcggctgcaggccgcccccaggtctgagagcggcctgctggatggagtgatgatgacagatgctgccctgctgtatgatgctgtgcacatcgtgtctgtgtgctaccagagggccccccagatgacagtgaacagcctgcagtgccaccgccacaaggcctggaggtttggaggccgcttcatgaacttcatcaaggaggcccagtgggagggcctgaccggccgcatcgtgttcaacaagaccagcggcctgaggacagactttgacctggacatcatcagcctgaaggaggatggcctggagaaggtgggcgtgtggagccctgcagatggcctgaacatcacagaggtggccaagggccggggccccaacgtgacagacagcctgaccaacagaagcctgattgtgaccaccgtgctggaggagccctttgtgatgttcaggaagagtgacaggaccctgtatggaaatgacagatttgagggctactgcatcgacctgctgaaggagctggcccacatcctgggcttctcctatgagatccggctggtggaggatggcaagtatggagcccaggatgacaagggccagtggaatggcatggtgaaggagctgattgaccacaaggctgacctggccgtggcccccctgaccatcacccacgtgcgggagaaggccatcgacttcagcaagcccttcatgaccctgggcgtgtccatcctgtacaggaagcccaacggcaccaaccccagcgtcttctccttcctgaaccccctgagcccagacatctggatgtatgtgctgctggcctacctgggcgtgtcctgtgtgctgtttgtgattgcccgcttcagcccctatgagtggtatgatgcccacccctgcaaccctggcagcgaggtggtggagaacaacttcaccctgctgaacagcttctggtttggcatgggcagcctgatgcagcagggcagcgagctgatgcccaaggccctgagcacccgcatcatcggcggcatctggtggttcttcaccctcatcatcatcagcagctacacagccaacctggccgccttcctgactgtggagaggatggagagccccatcgacagcgcagatgacctggccaagcagaccaagattgaatatggagctgtgaaggatggagccaccatgaccttcttcaagaagagcaagatcagcacctttgagaagatgtgggccttcatgagcagcaagcccagcgccctggtgaagaacaatgaggagggcatccagagggccctgacagctgactatgccctgctgatggagagcaccaccattgaatatgtgacccagaggaactgcaacctgacccagatcggcggcctgattgacagcaagggctatggaattggcacccccatgggcagcccctacagagacaagatcaccatcgccatcctgcagctgcaggaggaggacaagctgcacatcatgaaggagaagtggtggaggggcagcggctgcccagaggaggagaacaaggaggccagcgccctgggcatccagaagattggaggcatcttcatcgtgctggccgccggcctggtgctgtctgtgctggtggccgtgggggagtttgtgtacaagctgaggaagacagctgagcgggagcaggtgtccctgcgggcctggagcctgcacaggatgggaaatggagacagcaggtag

SEQ ID NO: 153955 - DNA, 2871 bp, synthetic construct
  misc_feature 1..2871: note = Description of Artificial Sequence: Synthetic coding sequence
  source 1..2871: mol_type = other DNA
atgccccgggtgtctgcccccctggtgctgctgcctgcctggctggtgatggtggcctgcagcccccacagcctgagaattgctgccatcctggatgaccccatggagtgcagcagaggagagcggctgagcatcaccctggccaagaaccgcatcaacagagcccctgagcggctgggcaaggccaaggtggaggtggacatctttgagctgctgcgggacagtgaatatgaaacagctgagaccatgtgccagatcctgcccaagggcgtggtggccgtgctgggccccagcagcagccctgccagcagcagcatcatcagcaacatctgtggggagaaggaggtgccccacttcaaggtggcccctgaggagtttgtgaagttccagttccagcgcttcaccaccctgaacctgcaccccagcaacacagacatctctgtggccgtggccggcatcctgaacttcttcaactgcaccacagcctgcctgatctgtgccaaggccgagtgcctgctgaacctggagaagctgctgcggcagttcctgatcagcaaggacaccctgtctgtgaggatgctggatgacacccgggaccccacccccctgctgaaggagatcagagatgacaagacagccaccatcatcatccacgccaatgcctccatgagccacaccatcctgctgaaggctgctgagctgggcatggtgtctgcctactacacctacatcttcaccaacctggagttcagcctgcagaggatggacagcctggtggatgacagagtgaacatcctgggcttcagcatcttcaaccagagccacgccttcttccaggagtttgcccagagcctgaaccagagctggcaggagaactgtgaccacgtgcccttcaccggccctgccctgagcagcgccctgctgtttgatgctgtgtatgctgtggtgacagctgtgcaggagctgaacagaagccaggagattggagtgaagcccctgagctgtggcagcgcccagatctggcagcacggcaccagcctgatgaactacctgaggatggtggagctggagggcctgaccggccacatcgagttcaacagcaagggccagaggagcaactatgccctgaagatcctgcagttcaccagaaatggcttccggcagatcggccagtggcacgtggccgagggcctgtccatggacagccacctgtatgccagcaacatcagtgacaccctcttcaacaccaccctggtggtgaccaccatcctggagaacccctacctgatgctgaagggcaaccaccaggagatggagggcaatgacagatatgagggcttctgtgtggacatgctgaaggagctggccgagatcctgcgcttcaactacaagatccggctggtgggagatggagtgtatggagtgcctgaggccaacggcacctggacaggcatggtgggggagctgattgccaggaaggctgacctggccgtggccggcctgaccatcacagctgagcgggagaaggtgattgacttcagcaagcccttcatgaccctgggcatcagcatcctgtacagagtgcacatgggcaggaagccaggctacttctccttcctggaccccttcagccctggggtgtggctgttcatgctgctggcctacctggccgtgtcctgtgtgctcttcctggtggcccggctgaccccctatgagtggtacagcccccacccctgtgcccagggccgctgcaacctgctggtgaaccagtacagcctgggcaacagcctgtggttccctgtgggcggcttcatgcagcagggcagcaccatcgccccccgggccctgagcacccgctgtgtgtctggagtgtggtgggccttcaccctcatcatcatcagcagctacacagccaacctggccgccttcctgactgtgcagaggatggatgtgcccattgaatctgtggatgacctggccgaccagacagccattgaatatggcaccatccatggaggcagctccatgaccttcttccagaacagccgctaccagacctaccagaggatgtggaactacatgtacagcaagcagcccagcgtgtttgtgaagagcacagaggagggcatcgcccgggtgctgaacagcaactatgccttcctgctggagagcaccatgaatgagtactaccggcagaggaactgcaacctgacccagatcggcggcctgctggacaccaagggctatggaattggcatgcctgtgggctctgtgttcagagatgaatttgacctggccatcctgcagctgcaggagaacaaccggctggagatcctgaagaggaagtggtgggagggcggcaagtgccccaaggaggaggaccaccgggccaagggcctgggcatggagaacattggaggcatctttgtggtgctgatctgtggcctgattgtggccatcttcatggccatgctggagttcctgtggaccctgcggcacagcgaggccacagaggtgtctgtgtgccaggagatggtgacagagctgcggagcatcatcctgtgccaggacagcatccaccccaggagaagaagagctgctgtgcccccacccaggcctcccatccctgaggagcggcggccccggggcacagccaccctgagcaatggcaagctgtgtggggccggggagccagaccagctggcccagaggctggcccaggaggccgccctggtggcccggggctgcacccacatccgggtgtgcccagagtgccgccgcttccagggcctgcgggcccggcccagccctgcccggtctgaggagagcctggagtgggagaagaccaccaacagcagcgagcctgagtag

SEQ ID NO: 153956 - DNA, 2871 bp, synthetic construct; identical to SEQ ID NO: 153955
  misc_feature 1..2871: note = Description of Artificial Sequence: Synthetic coding sequence
  source 1..2871: mol_type = other DNA

SEQ ID NO: 153957 - DNA, 2943 bp, synthetic construct
  misc_feature 1..2943: note = Description of Artificial Sequence: Synthetic coding sequence
  source 1..2943: mol_type = other DNA
atgcctgctgagctgctgctgctgctgattgtggcctttgccagccccagctgccaggtgctgagcagcctgaggatggccgccatcctggatgaccagacagtgtgtggccgcggggagcggctggccctggccctggcccgggagcagatcaatggcatcatcgaggtgcctgccaaggcccgggtggaggtggacatctttgagctgcagagggacagccagtatgagaccacagacaccatgtgccagatcctgcccaagggcgtggtgtctgtgctgggccccagcagcagccctgccagcgccagcacagtgagccacatctgtggggagaaggagatcccccacatcaaggtgggccctgaggagaccccccggctgcagtacctgcgctttgcctctgtgtccctgtaccccagcaatgaagatgtgtccctggccgtgagccgcatcctgaagagcttcaactaccccagcgccagcctcatctgtgccaaggcagaatgtctgctgcggctggaggagctggtgcggggcttcctgatcagcaaggagaccctgtctgtgaggatgctggatgacagccgggaccccacccccctgctgaaggagatcagagatgacaaggtgtccaccatcatcattgatgccaatgccagcatcagccacctgatcctgaggaaggccagcgagctgggcatgaccagcgccttctacaagtacatcctgaccaccatggacttccccatcctgcacctggatggcatcgtggaggacagcagcaacatcctgggcttctccatgttcaacaccagccaccccttctacccagagtttgtgcgcagcctgaacatgtcctggagggagaactgtgaggccagcacctacctgggccctgccctgtctgctgccctgatgtttgatgctgtgcacgtggtggtgtctgctgtgcgggagctgaacagaagccaggagattggagtgaagcccctggcctgcaccagcgccaacatctggccccacggcaccagcctgatgaactacctgaggatggtggagtatgatggcctgaccggccgggtggagttcaacagcaagggccagaggaccaactacaccctgcgcatcctggagaagagccggcagggccaccgggagattggagtgtggtacagcaacagaaccctggccatgaatgccaccaccctggacatcaacctgagccagaccctggccaacaagaccctggtggtgaccaccatcctggagaacccctacgtgatgaggcggcccaacttccaggccctgtctggaaatgaaagatttgagggcttctgtgtggacatgctgcgggagctggccgagctgctgcgcttccgctaccgcctgcggctggtggaggatggcctgtatggagcccctgagcccaacggctcctggacaggcatggtgggggagctgatcaacaggaaggctgacctggccgtggccgccttcaccatcacagctgagcgggagaaggtgattgacttcagcaagcccttcatgaccctgggcatcagcatcctgtacagagtgcacatgggcaggaagccaggctacttctccttcctggaccccttcagccctgctgtgtggctgttcatgctgctggcctacctggccgtgtcctgtgtgctcttcctggccgcccggctgagcccctatgagtggtacaacccccacccctgcctgcgggcccggccccacatcctggagaaccagtacaccctgggcaacagcctgtggttccctgtgggcggcttcatgcagcagggcagcgagatcatgccccgggccctgagcacccgctgtgtgtctggagtgtggtgggccttcaccctcatcatcatcagcagctacacagccaacctggccgccttcctgactgtgcagaggatggaggtgcctgtggagagcgcagatgacctggccgaccagaccaacatcgagtatggcaccatccatgctggcagcaccatgaccttcttccagaacagccgctaccagacctaccagaggatgtggaactacatgcagagcaagcagcccagcgtgtttgtgaagagcacagaggagggcatcgcccgggtgctgaacagccgctatgccttcctgctggagagcaccatgaatgagtaccaccggcggctgaactgcaacctgacccagattggaggcctgctggacaccaagggctacggcatcggcatgcccctgggcagccccttcagagatgagatcaccctggccatcctgcagctgcaggagaacaaccggctggagatcctgaagaggaagtggtgggagggcggccgctgccccaaggaggaggaccaccgggccaagggcctgggcatggagaacatcggcggcatcttcatcgtgctgatctgtggcctcatcatcgctgtgtttgtggccgtgatggagttcatctggagcaccaggagatctgctgagagcgaggaggtgtctgtgtgccaggagatgctgcaggagctgcggcatgctgtgtcctgcaggaagaccagccgcagcagaagaagaagaagacctgggggccccagccgggccctgctgagcctgcgggctgtgcgggagatgaggctgagcaatggcaagctgtacagcgctggagctggaggagatgctggcagcgcccatggaggcccccagaggctgctggatgatcctggccccccatctggggcccggcctgctgcccccaccccctgcacccacgtgcgggtgtgccaggagtgccgccgcatccaggccctgcgggccagcggggccggggccccaccccggggcctgggcgtgcctgctgaggccaccagccccccccggccccggcccggccctgctggcccccgggagctggccgagcatgaatag

SEQ ID NO: 153958 - DNA, 2946 bp, synthetic construct
  misc_feature 1..2946: note = Description of Artificial Sequence: Synthetic coding sequence
  source 1..2946: mol_type = other DNA
atgcctgctgagctgctgctgctgctgattgtggcctttgccagccccagctgccaggtgctgagcagcctgaggatggccgccatcctggatgaccagacagtgtgtggccgcggggagcggctggccctggccctggcccgggagcagatcaatggcatcatcgaggtgcctgccaaggcccgggtggaggtggacatctttgagctgcagagggacagccagtatgagaccacagacaccatgtgccagatcctgcccaagggcgtggtgtctgtgctgggccccagcagcagccctgccagcgccagcacagtgagccacatctgtggggagaaggagatcccccacatcaaggtgggccctgaggagaccccccggctgcagtacctgcgctttgcctctgtgtccctgtaccccagcaatgaagatgtgtccctggccgtgagccgcatcctgaagagcttcaactaccccagcgccagcctcatctgtgccaaggcagaatgtctgctgcggctggaggagctggtgcggggcttcctgatcagcaaggagaccctgtctgtgaggatgctggatgacagccgggaccccacccccctgctgaaggagatcagagatgacaaggtgtccaccatcatcattgatgccaatgccagcatcagccacctgatcctgaggaaggccagcgagctgggcatgaccagcgccttctacaagtacatcctgaccaccatggacttccccatcctgcacctggatggcatcgtggaggacagcagcaacatcctgggcttctccatgttcaacaccagccaccccttctacccagagtttgtgcgcagcctgaacatgtcctggagggagaactgtgaggccagcacctacctgggccctgccctgtctgctgccctgatgtttgatgctgtgcacgtggtggtgtctgctgtgcgggagctgaacagaagccaggagattggagtgaagcccctggcctgcaccagcgccaacatctggccccacggcaccagcctgatgaactacctgaggatggtggagtatgatggcctgaccggccgggtggagttcaacagcaagggccagaggaccaactacaccctgcgcatcctggagaagagccggcagggccaccgggagattggagtgtggtacagcaacagaaccctggccatgaatgccaccaccctggacatcaacctgagccagaccctggccaacaagaccctggtggtgaccaccatcctggagaacccctacgtgatgaggcggcccaacttccaggccctgtctggaaatgaaagatttgagggcttctgtgtggacatgctgcgggagctggccgagctgctgcgcttccgctaccgcctgcggctggtggaggatggcctgtatggagcccctgagcccaacggctcctggacaggcatggtgggggagctgatcaacaggaaggctgacctggccgtggccgccttcaccatcacagctgagcgggagaaggtgattgacttcagcaagcccttcatgaccctgggcatcagcatcctgtacagagtgcacatgggcaggaagccaggctacttctccttcctggaccccttcagccctgctgtgtggctgttcatgctgctggcctacctggccgtgtcctgtgtgctcttcctggccgcccggctgagcccctatgagtggtacaacccccacccctgcctgcgggcccggccccacatcctggagaaccagtacaccctgggcaacagcctgtggttccctgtgggcggcttcatgcagcagggcagcgagatcatgccccgggccctgagcacccgctgtgtgtctggagtgtggtgggccttcaccctcatcatcatcagcagctacacagccaacctggccgccttcctgactgtgcagaggatggaggtgcctgtggagagcgcagatgacctggccgaccagaccaacatcgagtatggcaccatccatgctggcagcaccatgaccttcttccagaacagccgctaccagacctaccagaggatgtggaactacatgcagagcaagcagcccagcgtgtttgtgaagagcacagaggagggcatcgcccgggtgctgaacagccgctatgccttcctgctggagagcaccatgaatgagtaccaccggcggctgaactgcaacctgacccagattggaggcctgctggacaccaagggctacggcatcggcatgcccctgggcagccccttcagagatgagatcaccctggccatcctgcagctgcaggagaacaaccggctggagatcctgaagaggaagtggtgggagggcggccgctgccccaaggaggaggaccaccgggccaagggcctgggcatggagaacatcggcggcatcttcatcgtgctgatctgtggcctcatcatcgctgtgtttgtggccgtgatggagttcatctggagcaccaggagatctgctgagagcgaggagaccccagccctgcaccctgctgcctgccagtgcagcgccctgggccccaggacccccctgaaggagcccagcatgctgctggtgaaggtgcccagcaccagggtgcaggtggccttcagcaggaccagcctgcggcaggtgtgccccttcctgctgcagcaccagctgagcagcctgtactggatccaggccaccaacgtgcagatctgctgccacttcagcagcctgaagcccagcccagacctgaccttcccccccagccaccggcccctgagcagcctgctcttcaccgccctggccgctgtgggcggcctgcctgatgccagcagcttcttcttcccccccatcagcagctgcccccccctgcagagcggcatcggcccctgccacagcacagaggccaccctggtgaccagcaacttccacgtgtag

SEQ ID NO: 153959 - DNA, 1077 bp, synthetic construct
  misc_feature 1..1077: note = Description of Artificial Sequence: Synthetic coding sequence
  source 1..1077: mol_type = other DNA
tgatgggccttcaccctcatcatcatcagcagctacacagccaacctggccgccttcctgactgtgcagaggatggaggtgcctgtggagagcgcagatgacctggccgaccagaccaacattgaatatggcaccatccacgccggcagcaccatgaccttcttccagaacagccgctaccagacctaccagaggatgtggaactacatgcagagcaagcagcccagcgtgtttgtgaagagcacagaggagggcatcgcccgggtgctgaacagccgctatgccttcctgctggagagcaccatgaatgagtaccaccggcggctgaactgcaacctgacccagatcggcggcctgctggacaccaagggctatggaattggcatgcccctgggcagccccttcagagatgagatcaccctggccatcctgcagctgcaggagaacaaccggctggagatcctgaagaggaagtggtgggagggcggccgctgccccaaggaggaggaccaccgggccaagggcctgggcatggagaacattggaggcatcttcatcgtgctgatctgtggcctcatcatcgctgtgtttgtggccgtgatggagttcatctggagcacccggcgctctgctgagagcgaggagaccccagccctgcaccctgctgcctgccagtgcagcgccctgggccccaggacccccctgaaggagcccagcatgctgctggtgaaggtgcccagcaccagggtgcaggtggccttcagcaggaccagcctgcggcaggtgtgccccttcctgctgcagcaccagctgagcagcctgtactggatccaggccaccaacgtgcagatctgctgccacttcagcagcctgaagcccagcccagacctgaccttcccccccagccaccggcccctgagcagcctgctcttcaccgccctggccgctgtgggcggcctgcctgatgccagcagcttcttcttcccccccatcagcagctgcccccccctgcagagcggcatcggcccctgccacagcacagaggccaccctggtgaccagcaacttccacgtgtag

SEQ ID NO: 153960 - DNA, 2769 bp, synthetic construct
  misc_feature 1..2769: note = Description of Artificial Sequence: Synthetic coding sequence
  source 1..2769: mol_type = other DNA
atgagcaccatgaggctgctgaccctggccctgctcttcagctgcagcgtggcccgggccgcctgtgaccccaagatcgtgaacattggagctgtgctgagcaccaggaagcatgagcagatgttccgggaggccgtgaaccaggccaacaagagacatggctcctggaagatccagctgaatgccacctctgtgacccacaagcccaatgccatccagatggccctgtctgtgtgtgaggacctgatcagcagccaggtgtatgccatcctggtgagccacccccccaccccaaatgaccacttcacccccacccctgtgtcctacacagctggcttctaccgcatccctgtgctgggcctgaccaccaggatgagcatctacagcgacaagagcatccacctgtccttcctgaggacagtgcccccctacagccaccagagctctgtgtggtttgagatgatgagggtgtacagctggaaccacatcatcctgctggtgtctgatgaccacgagggccgggccgcccagaagaggctggagaccctgctggaggagcgggagagcaaggccgagaaggtgctgcagtttgatcctggcaccaagaatgtgacagccctgctgatggaggccaaggagctggaggcccgggtcatcatcctgagcgcctctgaagatgatgctgccaccgtgtacagagctgctgccatgctgaacatgactggaagtggctacgtgtggctggtgggggagcgggagatctctggaaatgccctgcgctatgccccagatggcatcctgggcctgcagctgatcaatggcaagaatgaaagtgcccacatcagtgatgctgtgggcgtggtggcccaggccgtgcatgagctgctggagaaggagaacatcacagaccccccccggggctgtgtgggcaacaccaacatctggaagacaggccccctcttcaagagggtgctgatgagcagcaaatatgcagatggagtgacaggccgggtggagttcaatgaagatggagacaggaagtttgccaactacagcatcatgaacctgcagaacaggaagctggtgcaggtgggcatctacaacggcacccacgtgatccccaatgacaggaagatcatctggccaggaggagaaacagagaagccccggggctaccagatgagcacccggctgaagatcgtgaccatccaccaggagccctttgtgtatgtgaagcccaccctgagtgatggcacctgcaaggaggagttcaccgtgaatggagaccctgtgaagaaggtgatctgcaccggccccaatgacaccagccctggcagccccaggcacacagtgccccagtgctgctacggcttctgcatcgacctgctgatcaagctggcccggaccatgaacttcacctatgaggtgcacctggtggctgatggcaagtttggcacccaggagcgggtgaacaacagcaacaagaaggagtggaatggcatgatgggagagctgctgagcggccaggccgacatgattgtggcccccctgaccatcaacaatgaaagagcccagtacatcgagttcagcaagcccttcaagtaccagggcctgaccatcctggtgaagaaggagatccccaggagcaccctggacagcttcatgcagcccttccagagcaccctgtggctgctggtgggcctgtctgtgcacgtggtggccgtgatgctgtacctgctggaccgcttcagccccttcggccgcttcaaggtgaacagcgaggaggaggaggaggatgccctgaccctgagcagcgccatgtggttctcctggggcgtgctgctgaacagcggcattggagagggcgcccccaggagcttcagcgcccgcatcctgggcatggtgtgggccggctttgccatgatcatcgtggccagctacacagccaacctggccgccttcctggtgctggacaggcctgaggagcgcatcaccggcatcaatgacccccggctgaggaaccccagcgacaagttcatctatgccaccgtgaagcagagctctgtggacatctacttccggcggcaggtggagctgagcaccatgtaccgccacatggagaagcacaactatgaatctgctgctgaggccatccaggccgtgcgggacaacaagctgcacgccttcatctgggacagcgctgtgctggagtttgaggccagccagaagtgtgacctggtgaccactggagagctgttcttccgcagcggcttcggcatcggcatgaggaaggacagcccctggaagcagaatgtgtccctgagcatcctgaagagccatgaaaatggcttcatggaggacctggacaagacctgggtgcgctaccaggagtgtgacagccgcagcaatgccccagccaccctgacctttgagaacatggccggggtcttcatgctggtggccggcggcatcgtggccggcatcttcctgatcttcattgaaattgcctacaagaggcacaaggatgcccggaggaagcagatgcagctggcctttgctgctgtgaatgtgtggaggaagaacctgcaggacaggaagagcggccgggcagagccagaccccaagaagaaggccaccttccgggccatcaccagcaccctggccagcagcttcaagagaagaagaagcagcaaggacacccagtaccaccccacagacatcaccggccccctgaacctgagtgaccccagcgtgtccacagtggtgtag

SEQ ID NO: 153961 - DNA, 2730 bp, synthetic construct
  misc_feature 1..2730: note = Description of Artificial Sequence: Synthetic coding sequence
  source 1..2730: mol_type = other DNA
atgagcaccatgaggctgctgaccctggccctgctcttcagctgcagcgtggcccgggccgcctgtgaccccaagatcgtgaacattggagctgtgctgagcaccaggaagcatgagcagatgttccgggaggccgtgaaccaggccaacaagagacatggctcctggaagatccagctgaatgccacctctgtgacccacaagcccaatgccatccagatggccctgtctgtgtgtgaggacctgatcagcagccaggtgtatgccatcctggtgagccacccccccaccccaaatgaccacttcacccccacccctgtgtcctacacagctggcttctaccgcatccctgtgctgggcctgaccaccaggatgagcatctacagcgacaagagcatccacctgtccttcctgaggacagtgcccccctacagccaccagagctctgtgtggtttgagatgatgagggtgtacagctggaaccacatcatcctgctggtgtctgatgaccacgagggccgggccgcccagaagaggctggagaccctgctggaggagcgggagagcaaggccgagaaggtgctgcagtttgatcctggcaccaagaatgtgacagccctgctgatggaggccaaggagctggaggcccgggtcatcatcctgagcgcctctgaagatgatgctgccaccgtgtacagagctgctgccatgctgaacatgactggaagtggctacgtgtggctggtgggggagcgggagatctctggaaatgccctgcgctatgccccagatggcatcctgggcctgcagctgatcaatggcaagaatgaaagtgcccacatcagtgatgctgtgggcgtggtggcccaggccgtgcatgagctgctggagaaggagaacatcacagaccccccccggggctgtgtgggcaacaccaacatctggaagacaggccccctcttcaagagggtgctgatgagcagcaaatatgcagatggagtgacaggccgggtggagttcaatgaagatggagacaggaagtttgccaactacagcatcatgaacctgcagaacaggaagctggtgcaggtgggcatctacaacggcacccacgtgatccccaatgacaggaagatcatctggccaggaggagaaacagagaagccccggggctaccagatgagcacccggctgaagatcgtgaccatccaccaggagccctttgtgtatgtgaagcccaccctgagtgatggcacctgcaaggaggagttcaccgtgaatggagaccctgtgaagaaggtgatctgcaccggccccaatgacaccagccctggcagccccaggcacacagtgccccagtgctgctacggcttctgcatcgacctgctgatcaagctggcccggaccatgaacttcacctatgaggtgcacctggtggctgatggcaagtttggcacccaggagcgggtgaacaacagcaacaagaaggagtggaatggcatgatgggagagctgctgagcggccaggccgacatgattgtggcccccctgaccatcaacaatgaaagagcccagtacatcgagttcagcaagcccttcaagtaccagggcctgaccatcctggtgaagaaggagatccccaggagcaccctggacagcttcatgcagcccttccagagcaccctgtggctgctggtgggcctgtctgtgcacgtggtggccgtgatgctgtacctgctggaccgcttcagccccttcggccgcttcaaggtgaacagcgaggaggaggaggaggatgccctgaccctgagcagcgccatgtggttctcctggggcgtgctgctgaacagcggcattggagagggcgcccccaggagcttcagcgcccgcatcctgggcatggtgtgggccggctttgccatgatcatcgtggccagctacacagccaacctggccgccttcctggtgctggacaggcctgaggagcgcatcaccggcatcaatgacccccggctgaggaaccccagcgacaagttcatctatgccaccgtgaagcagagctctgtggacatctacttccggcggcaggtggagctgagcaccatgtaccgccacatggagaagcacaactatgaatctgctgctgaggccatccaggccgtgcgggacaacaagctgcacgccttcatctgggacagcgctgtgctggagtttgaggccagccagaagtgtgacctggtgaccactggagagctgttcttccgcagcggcttcggcatcggcatgaggaaggacagcccctggaagcagaatgtgtccctgagcatcctgaagagccatgaaaatggcttcatggaggacctggacaagacctgggtgcgctaccaggagtgtgacagccgcagcaatgccccagccaccctgacctttgagaacatggccggggtcttcatgctggtggccggcggcatcgtggccggcatcttcctgatcttcattgaaattgcctacaagaggcacaaggatgcccggaggaagcagatgcagctggcctttgctgctgtgaatgtgtggaggaagaacctgcaggtgggccaggccaccctgcggggcctggtgccccgggcccggcccggccacggccccccacccagccccaaggctgtggccctggccctggccctggtgggccgcactggagcccggagccacggccagggccagtggtag

SEQ ID NO: 153962 - DNA, 2832 bp, synthetic construct
  misc_feature 1..2832: note = Description of Artificial Sequence: Synthetic coding sequence
  source 1..2832: mol_type = other DNA
atgagcaccatgaggctgctgaccctggccctgctcttcagctgcagcgtggcccgggccgcctgtgaccccaagatcgtgaacattggagctgtgctgagcaccaggaagcatgagcagatgttccgggaggccgtgaaccaggccaacaagagacatggctcctggaagatccagctgaatgccacctctgtgacccacaagcccaatgccatccagatggccctgtctgtgtgtgaggacctgatcagcagccaggtgtatgccatcctggtgagccacccccccaccccaaatgaccacttcacccccacccctgtgtcctacacagctggcttctaccgcatccctgtgctgggcctgaccaccaggatgagcatctacagcgacaagagcatccacctgtccttcctgaggacagtgcccccctacagccaccagagctctgtgtggtttgagatgatgagggtgtacagctggaaccacatcatcctgctggtgtctgatgaccacgagggccgggccgcccagaagaggctggagaccctgctggaggagcgggagagcaagagcaagaagaggaactatgagaacctggaccagctgtcctatgacaacaagaggggccccaaggccgagaaggtgctgcagtttgaccccggcaccaagaatgtgacagccctgctgatggaggccaaggagctggaggcccgggtcatcatcctgagcgcctctgaagatgatgctgccaccgtgtacagagctgctgccatgctgaacatgacaggcagcggctacgtgtggctggtgggggagcgggagatctctggaaatgccctgcgctatgccccagatggcatcctgggcctgcagctgatcaacgggaagaatgaaagtgcccacatcagtgatgctgtgggcgtggtggcccaggccgtgcatgagctgctggagaaggagaacatcacagatcctccccggggctgtgtgggcaacaccaacatctggaagacaggccccctcttcaagagggtgctgatgagcagcaaatatgcagatggagtgacaggccgggtggagttcaatgaagatggagacaggaagtttgccaactacagcatcatgaacctgcagaacaggaagctggtgcaggtgggcatctacaacggcacccacgtgatccccaatgacaggaagatcatctggccaggaggagaaacagagaagccccggggctaccagatgagcacccggctgaagatcgtgaccatccaccaggagccctttgtgtatgtgaagcccaccctgagtgatggcacctgcaaggaggagttcaccgtgaatggagaccctgtgaagaaggtgatctgcaccggccccaatgacaccagccctggcagccccaggcacacagtgccccagtgctgctacggcttctgcatcgacctgctgatcaagctggcccggaccatgaacttcacctatgaggtgcacctggtggctgatggcaagtttggcacccaggagcgggtgaacaacagcaacaagaaggagtggaatggcatgatgggagagctgctgagcggccaggccgacatgattgtggcccccctgaccatcaacaatgaaagagcccagtacatcgagttcagcaagcccttcaagtaccagggcctgaccatcctggtgaagaaggagatccccaggagcaccctggacagcttcatgcagcccttccagagcaccctgtggctgctggtgggcctgtctgtgcacgtggtggccgtgatgctgtacctgctggaccgcttcagccccttcggccgcttcaaggtgaacagcgaggaggaggaggaggatgccctgaccctgagcagcgccatgtggttctcctggggcgtgctgctgaacagcggcatcggggagggcgcccccaggagcttcagcgcccgcatcctgggcatggtgtgggccggctttgccatgatcatcgtggccagctacacagccaacctggccgccttcctggtgctggacaggcctgaggagcgcatcaccggcatcaatgacccccggctgaggaaccccagcgacaagttcatctatgccaccgtgaagcagagctctgtggacatctacttccggcggcaggtggagctgagcaccatgtaccgccacatggagaagcacaactatgagagcgctgctgaggccatccaggccgtgcgggacaacaagctgcacgccttcatctgggacagcgctgtgctggagtttgaggccagccagaagtgtgacctggtgaccaccggggagctgttcttccgcagcggctttggaattggcatgaggaaggacagcccctggaagcagaatgtgtccctgagcatcctgaagagccatgaaaatggcttcatggaggacctggacaagacctgggtgcgctaccaggagtgtgacagccgcagcaatgccccagccaccctgacctttgagaacatggccggggtcttcatgctggtggccggcggcatcgtggccggcatcttcctgatcttcatcgagatcgcctacaagaggcacaaggatgcccggaggaagcagatgcagctggcctttgctgctgtgaatgtgtggaggaagaacctgcaggacaggaagagcggccgggcagagccagaccccaagaagaaggccaccttccgggccatcaccagcaccctggccagcagcttcaagagaagaagaagcagcaaggacacccagtaccaccccacagacatcaccggccccctgaacctgagtgaccccagcgtgtccacagtggtgtag

SEQ ID NO: 153963 - DNA, 2769 bp, synthetic construct
  misc_feature 1..2769: note = Description of Artificial Sequence: Synthetic coding sequence
  source 1..2769: mol_type = other DNA
atgagcaccatgaggctgctgaccctggccctgctcttcagctgcagcgtggcccgggccgcctgtgaccccaagatcgtgaacattggagctgtgctgagcaccaggaagcatgagcagatgttccgggaggccgtgaaccaggccaacaagagacatggctcctggaagatccagctgaatgccacctctgtgacccacaagcccaatgccatccagatggccctgtctgtgtgtgaggacctgatcagcagccaggtgtatgccatcctggtgagccacccccccaccccaaatgaccacttcacccccacccctgtgtcctacacagctggcttctaccgcatccctgtgctgggcctgaccaccaggatgagcatctacagcgacaagagcatccacctgtccttcctgaggacagtgcccccctacagccaccagagctctgtgtggtttgagatgatgagggtgtacagctggaaccacatcatcctgctggtgtctgatgaccacgagggccgggccgcccagaagaggctggagaccctgctggaggagcgggagagcaagagcaagaagaggaactatgagaacctggaccagctgtcctatgacaacaagaggggccccaaggccgagaaggtgctgcagtttgaccccggcaccaagaatgtgacagccctgctgatggaggccaaggagctggaggcccgggtcatcatcctgagcgcctctgaagatgatgctgccaccgtgtacagagctgctgccatgctgaacatgacaggcagcggctacgtgtggctggtgggggagcgggagatctctggaaatgccctgcgctatgccccagatggcatcctgggcctgcagctgatcaacgggaagaatgaaagtgcccacatcagtgatgctgtgggcgtggtggcccaggccgtgcatgagctgctggagaaggagaacatcacagatcctccccggggctgtgtgggcaacaccaacatctggaagacaggccccctcttcaagagggtgctgatgagcagcaaatatgcagatggagtgacaggccgggtggagttcaatgaagatggagacaggaagtttgccaactacagcatcatgaacctgcagaacaggaagctggtgcaggtgggcatctacaacggcacccacgtgatccccaatgacaggaagatcatctggccaggaggagaaacagagaagccccggggctaccagatgagcacccggctgaagatcgtgaccatccaccaggagccctttgtgtatgtgaagcccaccctgagtgatggcacctgcaaggaggagttcaccgtgaatggagaccctgtgaagaaggtgatctgcaccggccccaatgacaccagccctggcagccccaggcacacagtgccccagtgctgctacggcttctgcatcgacctgctgatcaagctggcccggaccatgaacttcacctatgaggtgcacctggtggctgatggcaagtttggcacccaggagcgggtgaacaacagcaacaagaaggagtggaatggcatgatgggagagctgctgagcggccaggccgacatgattgtggcccccctgaccatcaacaatgaaagagcccagtacatcgagttcagcaagcccttcaagtaccagggcctgaccatcctggtgaagaaggagatccccaggagcaccctggacagcttcatgcagcccttccagagcaccctgtggctgctggtgggcctgtctgtgcacgtggtggccgtgatgctgtacctgctggaccgcttcagccccttcggccgcttcaaggtgaacagcgaggaggaggaggaggatgccctgaccctgagcagcgccatgtggttctcctggggcgtgctgctgaacagcggcatcggggagggcgcccccaggagcttcagcgcccgcatcctgggcatggtgtgggccggctttgccatgatcatcgtggccagctacacagccaacctggccgccttcctggtgctggacaggcctgaggagcgcatcaccggcatcaatgacccccggctgaggaaccccagcgacaagttcatctatgccaccgtgaagcagagctctgtggacatctacttccggcggcaggtggagctgagcaccatgtaccgccacatggagaagcacaactatgagagcgctgctgaggccatccaggccgtgcgggacaacaagctgcacgccttcatctgggacagcgctgtgctggagtttgaggccagccagaagtgtgacctggtgaccaccggggagctgttcttccgcagcggctttggaattggcatgaggaaggacagcccctggaagcagaatgtgtccctgagcatcctgaagagccatgaaaatggcttcatggaggacctggacaagacctgggtgcgctaccaggagtgtgacagccgcagcaatgccccagccaccctgacctttgagaacatggccggggtcttcatgctggtggccggcggcatcgtggccggcatcttcctgatcttcatcgagatcgcctacaagaggcacaaggatgcccggaggaagcagatgcagctggcctttgctgctgtgaatgtgtggaggaagaacctgcagagcactggaggcggccgcggggccctgcagaaccagaaggacacagtgctgccccggcgggccatcgagcgggaggagggccagctgcagctgtgcagccgccaccgggagagctag

SEQ ID NO: 153964 - DNA, 2721 bp, synthetic construct
  misc_feature 1..2721: note = Description of Artificial Sequence: Synthetic coding sequence
  source 1..2721: mol_type = other DNA
atgagcaccatgaggctgctgaccctggccctgctcttcagctgcagcgtggcccgggccgcctgtgaccccaagatcgtgaacattggagctgtgctgagcaccaggaagcatgagcagatgttccgggaggccgtgaaccaggccaacaagagacatggctcctggaagatccagctgaatgccacctctgtgacccacaagcccaatgccatccagatggccctgtctgtgtgtgaggacctgatcagcagccaggtgtatgccatcctggtgagccacccccccaccccaaatgaccacttcacccccacccctgtgtcctacacagctggcttctaccgcatccctgtgctgggcctgaccaccaggatgagcatctacagcgacaagagcatccacctgtccttcctgaggacagtgcccccctacagccaccagagctctgtgtggtttgagatgatgagggtgtacagctggaaccacatcatcctgctggtgtctgatgaccacgagggccgggccgcccagaagaggctggagaccctgctggaggagcgggagagcaagagcaagaagaggaactatgagaacctggaccagctgtcctatgacaacaagaggggccccaaggccgagaaggtgctgcagtttgaccccggcaccaagaatgtgacagccctgctgatggaggccaaggagctggaggcccgggtcatcatcctgagcgcctctgaagatgatgctgccaccgtgtacagagctgctgccatgctgaacatgacaggcagcggctacgtgtggctggtgggggagcgggagatctctggaaatgccctgcgctatgccccagatggcatcctgggcctgcagctgatcaacgggaagaatgaaagtgcccacatcagtgatgctgtgggcgtggtggcccaggccgtgcatgagctgctggagaaggagaacatcacagatcctccccggggctgtgtgggcaacaccaacatctggaagacaggccccctcttcaagagggtgctgatgagcagcaaatatgcagatggagtgacaggccgggtggagttcaatgaagatggagacaggaagtttgccaactacagcatcatgaacctgcagaacaggaagctggtgcaggtgggcatctacaacggcacccacgtgatccccaatgacaggaagatcatctggccaggaggagaaacagagaagccccggggctaccagatgagcacccggctgaagatcgtgaccatccaccaggagccctttgtgtatgtgaagcccaccctgagtgatggcacctgcaaggaggagttcaccgtgaatggagaccctgtgaagaaggtgatctgcaccggccccaatgacaccagccctggcagccccaggcacacagtgccccagtgctgctacggcttctgcatcgacctgctgatcaagctggcccggaccatgaacttcacctatgaggtgcacctggtggctgatggcaagtttggcacccaggagcgggtgaacaacagcaacaagaaggagtggaatggcatgatgggagagctgctgagcggccaggccgacatgattgtggcccccctgaccatcaacaatgaaagagcccagtacatcgagttcagcaagcccttcaagtaccagggcctgaccatcctggtgaagaaggagatccccaggagcaccctggacagcttcatgcagcccttccagagcaccctgtggctgctggtgggcctgtctgtgcacgtggtggccgtgatgctgtacctgctggaccgcttcagccccttcggccgcttcaaggtgaacagcgaggaggaggaggaggatgccctgaccctgagcagcgccatgtggttctcctggggcgtgctgctgaacagcggcatcggggagggcgcccccaggagcttcagcgcccgcatcctgggcatggtgtgggccggctttgccatgatcatcgtggccagctacacagccaacctggccgccttcctggtgctggacaggcctgaggagcgcatcaccggcatcaatgacccccggctgaggaaccccagcgacaagttcatctatgccaccgtgaagcagagctctgtggacatctacttccggcggcaggtggagctgagcaccatgtaccgccacatggagaagcacaactatgagagcgctgctgaggccatccaggccgtgcgggacaacaagctgcacgccttcatctgggacagcgctgtgctggagtttgaggccagccagaagtgtgacctggtgaccaccggggagctgttcttccgcagcggctttggaattggcatgaggaaggacagcccctggaagcagaatgtgtccctgagcatcctgaagagccatgaaaatggcttcatggaggacctggacaagacctgggtgcgctaccaggagtgtgacagccgcagcaatgccccagccaccctgacctttgagaacatggccggggtcttcatgctggtggccggcggcatcgtggccggcatcttcctgatcttcatcgagatcgcctacaagaggcacaaggatgcccggaggaagcagatgcagctggcctttgctgctgtgaatgtgtggaggaagaacctgcagcagtaccaccccacagacatcaccggccccctgaacctgagtgaccccagcgtgtccacagtggtgtag

SEQ ID NO: 153965 - DNA, 2817 bp, synthetic construct
  misc_feature 1..2817: note = Description of Artificial Sequence: Synthetic coding sequence
  source 1..2817: mol_type = other DNA
atgagcaccatgaggctgctgaccctggccctgctcttcagctgcagcgtggcccgggccgcctgtgaccccaagatcgtgaacattggagctgtgctgagcaccaggaagcatgagcagatgttccgggaggccgtgaaccaggccaacaagagacatggctcctggaagatccagctgaatgccacctctgtgacccacaagcccaatgccatccagatggccctgtctgtgtgtgaggacctgatcagcagccaggtgtatgccatcctggtgagccacccccccaccccaaatgaccacttcacccccacccctgtgtcctacacagctggcttctaccgcatccctgtgctgggcctgaccaccaggatgagcatctacagcgacaagagcatccacctgtccttcctgaggacagtgcccccctacagccaccagagctctgtgtggtttgagatgatgagggtgtacagctggaaccacatcatcctgctggtgtctgatgaccacgagggccgggccgcccagaagaggctggagaccctgctggaggagcgggagagcaaggccgagaaggtgctgcagtttgatcctggcaccaagaatgtgacagccctgctgatggaggccaaggagctggaggcccgggtcatcatcctgagcgcctctgaagatgatgctgccaccgtgtacagagctgctgccatgctgaacatgactggaagtggctacgtgtggctggtgggggagcgggagatctctggaaatgccctgcgctatgccccagatggcatcctgggcctgcagctgatcaatggcaagaatgaaagtgcccacatcagtgatgctgtgggcgtggtggcccaggccgtgcatgagctgctggagaaggagaacatcacagaccccccccggggctgtgtgggcaacaccaacatctggaagacaggccccctcttcaagagggtgctgatgagcagcaaatatgcagatggagtgacaggccgggtggagttcaatgaagatggagacaggaagtttgccaactacagcatcatgaacctgcagaacaggaagctggtgcaggtgggcatctacaacggcacccacgtgatccccaatgacaggaagatcatctggccaggaggagaaacagagaagccccggggctaccagatgagcacccggctgaagatcgtgaccatccaccaggagccctttgtgtatgtgaagcccaccctgagtgatggcacctgcaaggaggagttcaccgtgaatggagaccctgtgaagaaggtgatctgcaccggccccaatgacaccagccctggcagccccaggcacacagtgccccagtgctgctacggcttctgcatcgacctgctgatcaagctggcccggaccatgaacttcacctatgaggtgcacctggtggctgatggcaagtttggcacccaggagcgggtgaacaacagcaacaagaaggagtggaatggcatgatgggagagctgctgagcggccaggccgacatgattgtggcccccctgaccatcaacaatgaaagagcccagtacatcgagttcagcaagcccttcaagtaccagggcctgaccatcctggtgaagaaggagatccccaggagcaccctggacagcttcatgcagcccttccagagcaccctgtggctgctggtgggcctgtctgtgcacgtggtggccgtgatgctgtacctgctggaccgcttcagccccttcggccgcttcaaggtgaacagcgaggaggaggaggaggatgccctgaccctgagcagcgccatgtggttctcctggggcgtgctgctgaacagcggcattggagagggcgcccccaggagcttcagcgcccgcatcctgggcatggtgtgggccggctttgccatgatcatcgtggccagctacacagccaacctggccgccttcctggtgctggacaggcctgaggagcgcatcaccggcatcaatgacccccggctgaggaaccccagcgacaagttcatctatgccaccgtgaagcagagctctgtggacatctacttccggcggcaggtggagctgagcaccatgtaccgccacatggagaagcacaactatgaatctgctgctgaggccatccaggccgtgcgggacaacaagctgcacgccttcatctgggacagcgctgtgctggagtttgaggccagccagaagtgtgacctggtgaccactggagagctgttcttccgcagcggcttcggcatcggcatgaggaaggacagcccctggaagcagaatgtgtccctgagcatcctgaagagccatgaaaatggcttcatggaggacctggacaagacctgggtgcgctaccaggagtgtgacagccgcagcaatgccccagccaccctgacctttgagaacatggccggggtcttcatgctggtggccggcggcatcgtggccggcatcttcctgatcttcattgaaattgcctacaagaggcacaaggatgcccggaggaagcagatgcagctggcctttgctgctgtgaatgtgtggaggaagaacctgcaggacaggaagagcggccgggcagagccagaccccaagaagaaggccaccttccgggccatcaccagcaccctggccagcagcttcaagagaagaagaagcagcaaggacaccagcactggaggcggccgcggggccctgcagaaccagaaggacacagtgctgccccggcgggccatcgagcgggaggagggccagctgcagctgtgcagccgccaccgggagagctag

SEQ ID NO: 153966 - DNA, 4395 bp, synthetic construct
  misc_feature 1..4395: note = Description of Artificial Sequence: Synthetic coding sequence
  source 1..4395: mol_type = other DNA
atgggccgggtgggctactggaccctgctggtgctgcctgccctgctggtgtggaggggccctgcccccagcgctgctgctgagaagggccccccagccctgaacattgctgtgatgctgggccacagccatgatgtgacagagcgggagctgcggaccctgtggggccctgagcaggccgccggcctgcccctggatgtgaatgtggtggccctgctgatgaacagaacagaccccaagagcctcatcacccacgtgtgtgacctgatgtctggggcccgcatccacggcctggtgtttggagatgacacagaccaggaggccgtggcccagatgctggacttcatcagcagccacacctttgtgcccatcctgggcatccacggcggggcctccatgatcatggctgacaaggaccccaccagcaccttcttccagtttggagccagcatccagcagcaggccaccgtgatgctgaagatcatgcaggactatgactggcacgtgttcagcctggtgaccaccatcttccctggctaccgggagttcatcagctttgtgaagaccaccgtggacaacagctttgtgggctgggacatgcagaatgtcatcaccctggacaccagctttgaagatgccaagacccaggtgcagctgaagaagatccacagcagcgtcatcctgctgtactgcagcaaggatgaggccgtgctgatcctgtctgaggcccggagcctgggcctgaccggctatgacttcttctggatcgtgcccagcctggtgtctggcaacacagagctgatccccaaggagttccccagcggcctcatctctgtgtcctatgatgactgggactacagcctggaggcccgggtgagagatggcatcggcatcctgaccacagctgccagctccatgctggagaagttctcctacatccctgaggccaaggccagctgctacggccagatggagaggcctgaggtgcccatgcacaccctgcaccccttcatggtgaatgtgacctgggatggcaaggacctgtccttcacagaggagggctaccaggtgcacccccggctggtggtgattgtgctgaacaaggaccgggagtgggagaaggtgggcaagtgggagaaccacaccctgagcctgcggcatgctgtgtggccccgctacaagagcttcagtgactgtgagccagatgacaaccacctgagcatcgtgaccctggaggaggcccccttcgtcatcgtggaggacatcgaccccctgacagagacctgtgtgaggaacacagtgccctgcaggaagtttgtgaagatcaacaacagcaccaatgaaggcatgaatgtgaagaagtgctgcaagggcttctgcatcgacatcctgaagaagctgagcaggacagtgaagttcacctatgacctgtacctggtgaccaacgggaagcacggcaagaaggtgaacaacgtgtggaatggcatgattggagaggtggtgtaccagagagctgtgatggctgtgggcagcctgaccatcaatgaggagaggtctgaggtggtggacttctctgtgccctttgtggagaccggcatctctgtgatggtgagccgcagcaatggaacagtgagccccagcgccttcctggagcccttcagcgcctctgtgtgggtgatgatgtttgtgatgctgctgattgtgtctgccatcgctgtgtttgtgtttgagtacttcagccctgtgggctacaacagaaacctggccaagggcaaggcccctcatggccccagcttcaccatcggcaaggccatctggctgctgtggggcctggtgttcaacaacagcgtgcctgtgcagaaccccaagggcaccaccagcaagatcatggtgtctgtgtgggccttctttgctgtgatcttcctggccagctacacagccaacctggccgccttcatgatccaggaggagtttgtggaccaggtgacaggcctgagtgacaagaagttccagaggcctcatgactacagcccccccttccgcttcggcaccgtgcccaacggcagcacagagaggaacatccggaacaactacccctacatgcaccagtacatgaccaagttcaaccagaagggcgtggaggatgccctggtgtccctgaagacaggcaagctggatgccttcatctatgatgctgctgtgctgaactacaaggccggcagagatgagggctgcaagctggtgaccatcggcagcggctacatctttgccaccaccggctatggaattgccctgcagaagggcagcccctggaagaggcagattgacctggccctgctgcagtttgtgggagatggagagatggaggagctggagaccctgtggctgaccggcatctgccacaatgagaagaatgaggtgatgagcagccagctggacatcgacaacatggccggggtcttctacatgctggccgccgccatggccctgagcctcatcaccttcatctgggagcacctgttctactggaagctgcgcttctgcttcaccggggtgtgcagcgacaggcctggcctgctcttcagcatcagccggggcatctacagctgcatccacggcgtgcacatcgaggagaagaagaagagcccagacttcaacctgaccggcagccagagcaacatgctgaagctgctgcggagcgccaagaacatcagctccatgagcaacatgaacagcagcaggatggacagccccaagagagctgctgacttcatccagaggggcagcctcatcatggacatggtgtctgacaagggcaacctgatgtacagcgacaacagaagcttccagggcaaggagagcatctttggagacaacatgaatgagctgcagacctttgtggccaaccggcagaaggacaacctgaacaactacgtgttccagggccagcaccccctgaccctgaatgaaagcaaccccaacacagtggaggtggccgtgtccacagagagcaaggccaacagccggccccggcagctgtggaagaagtctgtggacagcatccggcaggacagcctgagccagaaccctgtgtcccagagagatgaggccacagctgagaacagaacccacagcctgaagagcccccgctacctgcctgaggagatggcccacagcgacatcagcgagaccagcaacagagccacctgccaccgggagccagacaacagcaagaaccacaagaccaaggacaacttcaagaggtctgtggccagcaagtaccccaaggactgcagcgaggtggagaggacctacctgaagaccaagagcagcagcccccgggacaagatctacaccattgatggagagaaggagcccggcttccacctggaccccccccagtttgtggagaatgtgaccctgcctgaaaatgtggacttcccagacccctaccaggaccccagcgagaacttcaggaagggggacagcaccctgcccatgaacagaaaccccctgcacaatgaggagggcctgagcaacaatgaccagtacaagctgtacagcaagcacttcaccctgaaggacaagggcagcccccacagcgagaccagcgagcgctaccggcagaacagcacccactgccgcagctgcctgagcaacatgcccacctacagcggccacttcaccatgaggagccccttcaagtgtgatgcctgcctgaggatgggcaacctgtatgacattgatgaggaccagatgctgcaggagactggaaatcctgccaccggggagcaggtgtaccagcaggactgggcccagaacaatgccctgcagctgcagaagaacaagctgcgcatcagccggcagcacagctatgacaacatcgtggacaagccccgggagctggacctgagccggcccagccgcagcatcagcctgaaggaccgggagcggctgctggagggcaacttctacggcagcctcttctctgtgcccagcagcaagctgagcggcaagaagagcagcctcttcccccagggcctggaggacagcaagaggagcaagagcctgctgcctgaccacaccagtgacaaccccttcctgcacagccacagagatgaccagaggctggtgattggccgctgccccagcgacccctacaagcacagcctgcccagccaggccgtgaatgacagctacctgcggagcagcctgcggagcacagccagctactgcagccgggacagccggggccacaatgatgtgtacatcagcgagcacgtgatgccctatgctgccaacaagaacaacatgtacagcaccccccgggtgctgaacagctgcagcaacagaagagtgtacaagaagatgcccagcattgaaagtgatgtgtag

SEQ ID NO: 153967 - DNA, 4395 bp, synthetic construct; identical to SEQ ID NO: 153966
  misc_feature 1..4395: note = Description of Artificial Sequence: Synthetic coding sequence
  source 1..4395: mol_type = other DNA

SEQ ID NO: 153968 - DNA, 4395 bp, synthetic construct; identical to SEQ ID NO: 153966
  misc_feature 1..4395: note = Description of Artificial Sequence: Synthetic coding sequence
  source 1..4395: mol_type = other DNA

SEQ ID NO: 153969 - DNA, 3846 bp, synthetic construct
  misc_feature 1..3846: note = Description of Artificial Sequence: Synthetic coding sequence
  source 1..3846: mol_type = other DNA
atgggccgggtgggctactggaccctgctggtgctgcctgccctgctggtgtggaggggccctgcccccagcgctgctgctgagaagggccccccagccctgaacattgctgtgatgctgggccacagccatgatgtgacagagcgggagctgcggaccctgtggggccctgagcaggccgccggcctgcccctggatgtgaatgtggtggccctgctgatgaacagaacagaccccaagagcctcatcacccacgtgtgtgacctgatgtctggggcccgcatccacggcctggtgtttggagatgacacagaccaggaggccgtggcccagatgctggacttcatcagcagccacacctttgtgcccatcctgggcatccacggcggggcctccatgatcatggctgacaaggaccccaccagcaccttcttccagtttggagccagcatccagcagcaggccaccgtgatgctgaagatcatgcaggactatgactggcacgtgttcagcctggtgaccaccatcttccctggctaccgggagttcatcagctttgtgaagaccaccgtggacaacagctttgtgggctgggacatgcagaatgtcatcaccctggacaccagctttgaagatgccaagacccaggtgcagctgaagaagatccacagcagcgtcatcctgctgtactgcagcaaggatgaggccgtgctgatcctgtctgaggcccggagcctgggcctgaccggctatgacttcttctggatcgtgcccagcctggtgtctggcaacacagagctgatccccaaggagttccccagcggcctcatctctgtgtcctatgatgactgggactacagcctggaggcccgggtgagagatggcatcggcatcctgaccacagctgccagctccatgctggagaagttctcctacatccctgaggccaaggccagctgctacggccagatggagaggcctgaggtgcccatgcacaccctgcaccccttcatggtgaatgtgacctgggatggcaaggacctgtccttcacagaggagggctaccaggtgcacccccggctggtggtgattgtgctgaacaaggaccgggagtgggagaaggtgggcaagtgggagaaccacaccctgagcctgcggcatgctgtgtggccccgctacaagagcttcagtgactgtgagccagatgacaaccacctgagcatcgtgaccctggaggaggcccccttcgtcatcgtggaggacatcgaccccctgacagagacctgtgtgaggaacacagtgccctgcaggaagtttgtgaagatcaacaacagcaccaatgaaggcatgaatgtgaagaagtgctgcaagggcttctgcatcgacatcctgaagaagctgagcaggacagtgaagttcacctatgacctgtacctggtgaccaacgggaagcacggcaagaaggtgaacaacgtgtggaatggcatgattggagaggtggtgtaccagagagctgtgatggctgtgggcagcctgaccatcaatgaggagaggtctgaggtggtggacttctctgtgccctttgtggagaccggcatctctgtgatggtgagccgcagcaatggaacagtgagccccagcgccttcctggagcccttcagcgcctctgtgtgggtgatgatgtttgtgatgctgctgattgtgtctgccatcgctgtgtttgtgtttgagtacttcagccctgtgggctacaacagaaacctggccaagggcaaggcccctcatggccccagcttcaccatcggcaaggccatctggctgctgtggggcctggtgttcaacaacagcgtgcctgtgcagaaccccaagggcaccaccagcaagatcatggtgtctgtgtgggccttctttgctgtgatcttcctggccagctacacagccaacctggccgccttcatgatccaggaggagtttgtggaccaggtgacaggcctgagtgacaagaagttccagaggcctcatgactacagcccccccttccgcttcggcaccgtgcccaacggcagcacagagaggaacatccggaacaactacccctacatgcaccagtacatgaccaagttcaaccagaagggcgtggaggatgccctggtgtccctgaagacaggcaagctggatgccttcatctatgatgctgctgtgctgaactacaaggccggcagagatgagggctgcaagctggtgaccatcggcagcggctacatctttgccaccaccggctatggaattgccctgcagaagggcagcccctggaagaggcagattgacctggccctgctgcagtttgtgggagatggagagatggaggagctggagaccctgtggctgaccggcatctgccacaatgagaagaatgaggtgatgagcagccagctggacatcgacaacatggccggggtcttctacatgctggccgccgccatggccctgagcctcatcaccttcatctgggagcacctgttctactggaagctgcgcttctgcttcaccggggtgtgcagcgacaggcctggcctgctcttcagcatcagccggggcatctacagctgcatccacggcgtgcacatcgaggagaagaagaagagcccagacttcaacctgaccggcagccagagcaacatgctgaagctgctgcggagcgccaagaacatcagctccatgagcaacatgaacagcagcaggatggacagccccaagagagctgctgacttcatccagaggggcagcctcatcatggacatggtgtctgacaagggcaacctgatgtacagcgacaacagaagcttccagggcaaggagagcatctttggagacaacatgaatgagctgcagacctttgtggccaaccggcagaaggacaacctgaacaactacgtgttccagggccagcaccccctgaccctgaatgaaagcaaccccaacacagtggaggtggccgtgtccacagagagcaaggccaacagccggccccggcagctgtggaagaagtctgtggacagcatccggcaggacagcctgagccagaaccctgtgtcccagagagatgaggccacagctgagaacagaacccacagcctgaagagcccccgctacctgcctgaggagatggcccacagcgacatcagcgagaccagcaacagagccacctgccaccgggagccagacaacagcaagaaccacaagaccaaggacaacttcaagaggtctgtggccagcaagtaccccaaggactgcagcgaggtggagaggacctacctgaagaccaagagcagcagcccccgggacaagatctacaccattgatggagagaaggagcccggcttccacctggaccccccccagtttgtggagaatgtgaccctgcctgaaaatgtggacttcccagacccctaccaggaccccagcgagaacttcaggaagggggacagcaccctgcccatgaacagaaaccccctgcacaatgaggagggcctgagcaacaatgaccagtacaagctgtacagcaagcacttcaccctgaaggacaagggcagcccccacagcgagaccagcgagcgctaccggcagaacagcacccactgccgcagctgcctgagcaacatgcccacctacagcggccacttcaccatgaggagccccttcaagtgtgatgcctgcctgaggatgggcaacctgtatgacattgatgaggaccagatgctgcaggagaccggcatgaccaatgcctggctgctgggagatgcccccaggaccctgaccaacacccgctgccaccccaggaggtag

SEQ ID NO: 153970 - DNA, 3375 bp, synthetic construct
  misc_feature 1..3375: note = Description of Artificial Sequence: Synthetic coding sequence
  source 1..3375: mol_type = other DNA
atgctgaagatcatgcaggactatgactggcacgtgttcagcctggtgaccaccatcttccctggctaccgggagttcatcagctttgtgaagaccaccgtggacaacagctttgtgggctgggacatgcagaatgtcatcaccctggacaccagctttgaagatgccaagacccaggtgcagctgaagaagatccacagcagcgtcatcctgctgtactgcagcaaggatgaagctgtgctgatcctgtctgaggcccggagcctgggcctgaccggctatgacttcttctggatcgtgcccagcctggtgtctggcaacacagagctgatccccaaggagttccccagcggcctcatctctgtgtcctatgatgactgggactacagcctggaggcccgggtgagagatggcatcggcatcctgaccacagctgccagctccatgctggagaagttctcctacatccctgaggccaaggccagctgctacggccagatggagaggcctgaggtgcccatgcacaccctgcaccccttcatggtgaatgtgacctgggatggcaaggacctgtccttcacagaggagggctaccaggtgcacccccggctggtggtgattgtgctgaacaaggaccgggagtgggagaaggtgggcaagtgggagaaccacaccctgagcctgcggcatgctgtgtggccccgctacaagagcttcagtgactgtgagccagatgacaaccacctgagcatcgtgaccctggaggaggccccctttgtgattgtggaggacatcgaccccctgacagagacctgtgtgaggaacacagtgccctgcaggaagtttgtgaagatcaacaacagcaccaatgaaggcatgaatgtgaagaagtgctgcaagggcttctgcatcgacatcctgaagaagctgagcaggacagtgaagttcacctatgacctgtacctggtgaccaacgggaagcacggcaagaaggtgaacaacgtgtggaatggcatgattggagaggtggtgtaccagagagctgtgatggctgtgggcagcctgaccatcaatgaggagaggtctgaggtggtggacttctctgtgccctttgtggagaccggcatctctgtgatggtgagccgcagcaatggcaccgtgagccccagcgccttcctggagcccttcagcgcctctgtgtgggtgatgatgtttgtgatgctgctgattgtgtctgccatcgctgtgtttgtgtttgagtacttcagccctgtgggctacaacagaaacctggccaagggcaaggccccccacggccccagcttcaccatcggcaaggccatctggctgctgtggggcctggtgttcaacaacagcgtgcctgtgcagaaccccaagggcaccaccagcaagatcatggtgtctgtgtgggccttctttgctgtgatcttcctggccagctacacagccaacctggccgccttcatgatccaggaggagtttgtggaccaggtgacaggcctgagtgacaagaagttccagaggcctcatgactacagcccccccttccgctttggaacagtgcccaacggcagcacagaaagaaacatccggaacaactacccctacatgcaccagtacatgaccaagttcaaccagaagggcgtggaggatgccctggtgtccctgaagacaggcaagctggatgccttcatctatgatgctgctgtgctgaactacaaggccggcagagatgagggctgcaagctggtgaccatcggcagcggctacatctttgccaccaccggctacggcatcgccctgcagaagggcagcccctggaagaggcagattgacctggccctgctgcagtttgtgggagatggagagatggaggagctggagaccctgtggctgaccggcatctgccacaatgagaagaatgaggtgatgagcagccagctggacatcgacaacatggccggggtcttctacatgctggccgccgccatggccctgagcctcatcaccttcatctgggagcacctgttctactggaagctgcgcttctgcttcaccggggtgtgcagcgaccggcccggcctgctcttcagcatcagccggggcatctacagctgcatccatggagtgcacatcgaggagaagaagaagagcccagacttcaacctgaccggcagccagagcaacatgctgaagctgctgcggagcgccaagaacatcagctccatgagcaacatgaacagcagcaggatggacagccccaagagagctgctgacttcatccagaggggcagcctcatcatggacatggtgtctgacaagggcaacctgatgtacagcgacaacagaagcttccagggcaaggagagcatctttggagacaacatgaatgagctgcagacctttgtggccaaccggcagaaggacaacctgaacaactacgtgttccagggccagcaccccctgaccctgaatgaaagcaaccccaacacagtggaggtggccgtgtccacagagagcaaggccaacagccggccccggcagctgtggaagaagtctgtggacagcatccggcaggacagcctgagccagaaccctgtgtcccagagagatgaggccacagcagaaaatagaacccacagcctgaagagcccccgctacctgcctgaggagatggcccacagcgacatcagcgagaccagcaacagagccacctgccaccgggagccagacaacagcaagaaccacaagaccaaggacaacttcaagaggtctgtggccagcaagtaccccaaggactgcagcgaggtggagaggacctacctgaagaccaagagcagcagcccccgggacaagatctacaccattgatggagagaaggagcccggcttccacctggaccccccccagtttgtggagaatgtgaccctgcctgaaaatgtggacttcccagacccctaccaggaccccagcgagaacttcagaaaaggagacagcaccctgcccatgaacagaaaccccctgcacaatgaggagggcctgagcaacaatgaccagtacaagctgtacagcaagcacttcaccctgaaggacaagggcagcccccacagcgagaccagcgagcgctaccggcagaacagcacccactgccgcagctgcctgagcaacatgcccacctacagcggccacttcaccatgaggagccccttcaagtgtgatgcctgcctgaggatgggcaacctgtatgacattgatgaggaccagatgctgcaggagaccggcatgaccaatgcctggctgctgggagatgcccccaggaccctgaccaacacccgctgccaccccaggaggtag

SEQ ID NO: 153971 - DNA, 4455 bp, synthetic construct
  misc_feature 1..4455: note = Description of Artificial Sequence: Synthetic coding sequence
  source 1..4455: mol_type = other DNA
atgaagcccagggctgagtgctgcagccccaagttctggctggtgctggccgtgctggccgtgtctggcagccgggcccggagccagaagagcccccccagcattggaattgctgtgatcctggtgggcaccagtgatgaggtggccatcaaggatgcccacgagaaggatgacttccaccacctgtctgtggtgccccgggtggagctggtggccatgaatgaaacagaccccaagagcatcatcacccgcatctgtgacctgatgtctgacaggaagatccagggcgtggtgtttgctgatgacacagaccaggaggccatcgcccagatcctggacttcatcagcgcccagaccctgacccccatcctgggcatccatggaggcagctccatgatcatggctgacaaggatgagagctccatgttcttccagtttggccccagcattgagcagcaggcctctgtgatgctgaacatcatggaggagtatgactggtacatcttcagcatcgtgaccacctacttccctggctaccaggactttgtgaacaagatccgcagcaccattgaaaattcctttgtgggctgggagctggaggaggtgctgctgctggacatgagcctggatgatggagacagcaagatccagaaccagctgaagaagctgcagagccccatcatcctgctgtactgcaccaaggaggaggccacctacatctttgaggtggccaacagcgtgggcctgaccggctacggctacacctggatcgtgcccagcctggtggccggggacacagacacagtgcctgctgagttccccaccggcctcatctctgtgtcctatgatgagtgggactatggcctgcctgcccgggtgagagatggcatcgccatcatcaccacagctgccagtgacatgctgtctgagcacagcttcatccctgagcccaagagcagctgctacaacacccatgagaagaggatctaccagagcaacatgctgaaccgctacctgatcaacgtgacctttgagggcaggaacctgtccttctctgaagatggctaccagatgcaccccaagctggtgatcatcctgctgaacaaggagaggaagtgggagcgggtgggcaagtggaaggacaagagcctgcagatgaagtactacgtgtggcccaggatgtgcccagagacagaggagcaggaggatgaccacctgagcatcgtgaccctggaggaggcccccttcgtcatcgtggagagcgtggaccccctgagcggcacctgcatgaggaacacagtgccctgccagaagagaattgtgacagagaacaagacagatgaggagcccggctacatcaagaagtgctgcaagggcttctgcatcgacatcctgaagaagatcagcaagtctgtgaagttcacctatgacctgtacctggtgaccaacgggaagcacggcaagaagatcaatggcacctggaatggcatgattggagaggtggtgatgaagagggcctacatggctgtgggcagcctgaccatcaatgaggagaggtctgaggtggtggacttctctgtgcccttcatcgagaccggcatctctgtgatggtgagccgcagcaatggcaccgtgagccccagcgccttcctggagcccttcagcgcagatgtgtgggtgatgatgtttgtgatgctgctgattgtgtctgctgtggccgtgtttgtgtttgagtacttcagccctgtgggctacaaccgctgcctggctgatggccgggagcccggcggccccagcttcaccatcggcaaggccatctggctgctgtggggcctggtgttcaacaacagcgtgcctgtgcagaaccccaagggcaccaccagcaagatcatggtgtctgtgtgggccttctttgctgtgatcttcctggccagctacacagccaacctggccgccttcatgatccaggaggagtatgtggaccaggtgtctggcctgagtgacaagaagttccagaggcccaatgacttcagcccccccttccgctttggaacagtgcccaacggcagcacagaaagaaacatccggaacaactatgcagagatgcacgcctacatgggcaagttcaaccagaggggcgtggatgatgccctgctgagcctgaagacaggcaagctggatgccttcatctatgatgctgctgtgctgaactacatggccggcagagatgagggctgcaagctggtgaccatcggcagcggcaaggtgtttgccagcacaggctacggcatcgccatccagaaggacagcggctggaagaggcaggtggacctggccatcctgcagctgtttggagatggagagatggaggagctggaggccctgtggctgaccggcatctgccacaatgagaagaatgaggtgatgagcagccagctggacatcgacaacatggccggggtcttctacatgctgggcgccgccatggccctgagcctcatcaccttcatctgtgagcacctgttctactggcagttccgccactgcttcatgggcgtgtgcagcggcaagccaggcatggtgttcagcatcagccggggcatctacagctgcatccatggagtggccatcgaggagcggcagagcgtgatgaacagccccacagccaccatgaacaacacccacagcaacatcctgcggctgctgaggacagccaagaacatggccaacctgagcggcgtgaatggcagcccccagagcgccctggacttcatccggcgggagagctctgtgtatgacatcagcgagcaccggcgctccttcacccacagcgactgcaagagctacaacaaccccccctgtgaggagaacctcttcagtgactacatcagcgaggtggagaggaccttcggcaacctgcagctgaaggacagcaatgtgtaccaggaccactaccaccaccaccaccggccccacagcatcggcagcgccagcagcattgatggcctgtatgactgtgacaacccccccttcaccacccagagccgcagcatcagcaagaagcccctggacatcggcctgcccagcagcaagcacagccagctgagtgacctgtatggcaagttctccttcaagagtgaccgctacagcggccatgatgacctgatccgcagtgatgtgtctgacatcagcacccacacagtgacctacggcaacatcgagggcaatgctgccaagaggaggaagcagcagtacaaggacagcctgaagaagaggcctgccagcgccaagagcagaagagaatttgatgaaattgagctggcctacagaagaagaccacccaggagcccagaccacaagcgctacttccgggacaaggagggcctgcgggacttctacctggaccagttccgcaccaaggagaacagcccccactgggagcacgtggacctgacagacatctacaaggagaggagtgatgacttcaagagggacagcgtgtctgggggcggcccctgcaccaacagaagccacatcaagcatggaactggagacaagcatggagtggtgtctggagtgcctgccccctgggagaagaacctgaccaacgtggagtgggaggacagaagtggcggcaacttctgccgcagctgccccagcaagctgcacaactacagcaccaccgtgacaggccagaacagcggccggcaggcctgcatccgctgtgaggcctgcaagaaggccggcaacctgtatgacatcagcgaggacaacagcctgcaggagctggaccagcctgctgcccctgtggccgtgaccagcaatgccagcaccaccaagtacccccagagccccaccaacagcaaggcccagaagaagaacagaaacaagctgcggcggcagcacagctatgacacctttgtggacctgcagaaggaggaggccgccctggcccccaggtctgtgtccctgaaggacaagggccgcttcatggatggcagcccctatgcccacatgtttgagatgtctgctggggagagcacctttgccaacaacaagagctctgtgcccacagctggccaccaccaccacaacaaccctgggggcggctacatgctgagcaagagcctgtacccagacagagtgacccagaaccccttcatccccacctttggagatgaccagtgcctgctgcacggcagcaagagctacttcttccggcagcccaccgtggccggggccagcaaggcccggccagacttccgggccctggtgaccaacaagcctgtggtgtctgccctgcatggagctgtgcctgcccgcttccagaaggacatctgcatcggcaaccagagcaacccctgtgtgcccaacaacaagaacccccgggccttcaacggcagcagcaatggccacgtgtatgagaagctgagcagcattgaaagtgatgtgtag

SEQ ID NO: 153972 - DNA, 3702 bp, synthetic construct
  misc_feature 1..3702: note = Description of Artificial Sequence: Synthetic coding sequence
  source 1..3702: mol_type = other DNA
atgggcggggccctgggccctgccctgctgctgaccagcctgtttggagcctgggccggcctgggccctggccagggcgagcagggcatgacagtggccgtggtgttcagcagcagcggccccccccaggcccagttccgggcccggctgaccccccagagcttcctggacctgcccctggagatccagcccctgactgtgggcgtgaacaccaccaaccccagcagcctgctgacccagatctgtggcctgctgggcgccgcccacgtgcatggaattgtgtttgaggacaacgtggacacagaagctgtggcccagatcctggacttcatcagcagccagacccacgtgcccatcctgagcatcagcggcggcagcgctgtggtgctgacccccaaggagcccggcagcgccttcctgcagctgggcgtgtccctggagcagcagctgcaggtgctcttcaaggtgctggaggagtatgactggagcgcctttgctgtgatcaccagcctgcaccctggccacgccctcttcctggagggcgtgcgggctgtggctgatgccagccacgtgtcctggaggctgctggatgtggtgaccctggagctgggccctgggggcccccgggcccggacccagaggctgctgcggcagctggatgcccctgtgtttgtggcctactgcagccgggaggaggccgaggtgctgtttgctgaggccgcccaggccggcctggtgggccctggccacgtgtggctggtgcccaacctggccctgggcagcacagatgcccccccagccaccttccctgtgggcctcatctctgtggtgacagagagctggaggctgagcctgcggcagaaggtgagagatggagtggccatcctggccctgggcgcccacagctactggaggcagcacggcaccctgcctgccccagctggggactgccgggtgcaccctggccctgtgtccccagcccgggaggccttctaccgccacctgctgaatgtgacctgggagggccgggacttctccttcagccctgggggctacctggtgcagcccaccatggtggtgattgccctgaacagacaccggctgtgggagatggtgggccgctgggagcacggcgtgctgtacatgaagtaccctgtgtggccccgctacagcgccagcctgcagcctgtggtggacagccgccacctgactgtggccaccctggaggagcggccctttgtgattgtggagagcccagaccccggcactggaggctgtgtgcccaacacagtgccctgccggcggcagagcaaccacaccttcagcagtggagatgtggccccctacaccaagctgtgctgcaagggcttctgcatcgacatcctgaagaagctggcccgggtggtgaagttctcctatgacctgtacctggtgaccaacgggaagcacggcaagagggtgcggggcgtgtggaatggcatgattggagaggtgtactacaagagagctgacatggccatcggcagcctgaccatcaatgaggagaggagtgaaattgtggacttctctgtgccctttgtggagaccggcatctctgtgatggtggcccggagcaatggaacagtgagccccagcgccttcctggagccctacagccctgctgtgtgggtgatgatgtttgtgatgtgcctgactgtggtggccatcaccgtcttcatgtttgagtacttcagccctgtgtcctacaaccagaacctgacccggggcaagaagagcggcggccctgccttcaccatcggcaagtctgtgtggctgctgtgggccctggtgttcaacaacagcgtgcccatcgagaacccccggggcaccaccagcaagatcatggtgctggtgtgggccttctttgctgtgatcttcctggccagctacacagccaacctggccgccttcatgatccaggagcagtacatcgacacagtgtctggcctgagtgacaagaagttccagaggccccaggaccagtacccacccttccgcttcggcaccgtgcccaacggcagcacagagaggaacatccgcagcaactacagagacatgcacacccacatggtgaagttcaaccagaggtctgtggaggatgccctgaccagcctgaagatgggcaagctggatgccttcatctatgatgctgctgtgctgaactacatggccggcaaggatgagggctgcaagctggtgaccatcggcagcggcaaggtgtttgccaccaccggctatggaattgccatgcagaaggacagccactggaagagggccatcgacctggccctgctgcagttcctgggagatggagagacccagaagctggagaccgtgtggctgagcggcatctgccagaatgagaagaatgaggtgatgagcagcaagctggacatcgacaacatggccggggtcttctacatgctgctggtggccatgggcctggccctgctggtgtttgcctgggagcacctggtgtactggaagctgcggcacagcgtgcccaacagcagccagctggacttcctgctggccttcagccggggcatctacagctgcttcagcggcgtgcagagcctggccagccccccccggcaggccagcccagacctgacagccagcagcgcccaggcctctgtgctgaagatgctgcaggccgcccgggacatggtgaccacagctggggtgagcagcagcctggaccgggccaccaggaccatcgagaactggggcggcggcagaagagcccccccacccagcccctgccccacccccaggagcggccccagcccctgcctgcccaccccagaccccccacctgagcccagccccaccggctggggccccccagatggcggccgggccgccctggtgcggcgggccccccagcccccaggccggccccccaccccaggcccccccctgagtgatgtgtcccgggtgtcccggcggcctgcctgggaggcccgctggcctgtgaggacaggccactgcggccgccacctgagcgccagcgagcggcccctgagccctgcccgctgccactacagcagcttccccagggctgacaggagcggccggcccttcctgcccctcttccctgagctggaggacctgcccctgctgggccctgagcagctggcccggcgggaggccctgctgcatgctgcctgggcccggggcagccggcccaggcatgccagcctgcccagctctgtggccgaggcctttgcccggcccagcagcctgcctgctggctgcaccggccctgcctgtgcccggccagatggccacagcgcctgccggcggctggcccaggcccagagcatgtgcctgcccatctaccgggaggcctgccaggagggggagcaggccggggccccagcctggcagcaccggcagcacgtgtgcctgcacgcccacgcccacctgcccttctgctggggcgctgtgtgcccccacctgcccccctgtgccagccacggctcctggctgagcggggcctggggccccctgggccaccggggccgcaccctgggcctgggcaccggctacagagattctgggggcctggatgagatcagccgggtggcccggggcacccagggcttccctggcccctgcacctggaggcgcatcagcagcctggagagcgaggtgtag

SEQ ID NO: 153973 - DNA, 2724 bp, synthetic construct
  misc_feature 1..2724: note = Description of Artificial Sequence: Synthetic coding sequence
  source 1..2724: mol_type = other DNA
cggggccagggcggggacaccaggagcaagggcacccggcagcctgagcccccaggggccagccgggaccctgcccggagctgctgggacccccctgtggacatgggcggggccctgggccctgccctgctgctgaccagcctgtttggagcctgggccggcctgggccctggccagggcgagcagggcatgacagtggccgtggtgttcagcagcagcggccccccccaggcccagttccgggcccggctgaccccccagagcttcctggacctgcccctggagatccagcccctgactgtgggcgtgaacaccaccaaccccagcagcctgctgacccagatctgtggcctgctgggcgccgcccacgtgcatggaattgtgtttgaggacaacgtggacacagaagctgtggcccagatcctggacttcatcagcagccagacccacgtgcccatcctgagcatcagcggcggcagcgctgtggtgctgacccccaaggagcccggcagcgccttcctgcagctgggcgtgtccctggagcagcagctgcaggtgctcttcaaggtgctggaggagtatgactggagcgcctttgctgtgatcaccagcctgcaccctggccacgccctcttcctggagggcgtgcgggctgtggctgatgccagccacgtgtcctggaggctgctggatgtggtgaccctggagctgggccctgggggcccccgggcccggacccagaggctgctgcggcagctggatgcccctgtgtttgtggcctactgcagccgggaggaggccgaggtgctgtttgctgaggccgcccaggccggcctggtgggccctggccacgtgtggctggtgcccaacctggccctgggcagcacagatgcccccccagccaccttccctgtgggcctcatctctgtggtgacagagagctggaggctgagcctgcggcagaaggtgagagatggagtggccatcctggccctgggcgcccacagctactggaggcagcacggcaccctgcctgccccagctggggactgccgggtgcaccctggccctgtgtccccagcccgggaggccttctaccgccacctgctgaatgtgacctgggagggccgggacttctccttcagccctgggggctacctggtgcagcccaccatggtggtgattgccctgaacagacaccggctgtgggagatggtgggccgctgggagcacggcgtgctgtacatgaagtaccctgtgtggccccgctacagcgccagcctgcagcctgtggtggacagccgccacctgactgtggccaccctggaggagcggccctttgtgattgtggagagcccagaccccggcactggaggctgtgtgcccaacacagtgccctgccggcggcagagcaaccacaccttcagcagtggagatgtggccccctacaccaagctgtgctgcaagggcttctgcatcgacatcctgaagaagctggcccgggtggtgaagttctcctatgacctgtacctggtgaccaacgggaagcacggcaagagggtgcggggcgtgtggaatggcatgattggagaggtgtactacaagagagctgacatggccatcggcagcctgaccatcaatgaggagaggagtgaaattgtggacttctctgtgccctttgtggagaccggcatctctgtgatggtggcccggagcaatggaacagtgagccccagcgccttcctggagccctacagccctgctgtgtgggtgatgatgtttgtgatgtgcctgactgtggtggccatcaccgtcttcatgtttgagtacttcagccctgtgtcctacaaccagaacctgacccggggcaagaagagcggcggccctgccttcaccatcggcaagtctgtgtggctgctgtgggccctggtgttcaacaacagcgtgcccatcgagaacccccggggcaccaccagcaagatcatggtgctggtgtgggccttctttgctgtgatcttcctggccagctacacagccaacctggccgccttcatgatccaggagcagtacatcgacacagtgtctggcctgagtgacaagaagttccagaggccccaggaccagtacccacccttccgcttcggcaccgtgcccaacggcagcacagagaggaacatccgcagcaactacagagacatgcacacccacatggtgaagttcaaccagaggtctgtggaggatgccctgaccagcctgaagatgggcaagctggatgccttcatctatgatgctgctgtgctgaactacatggccggcaaggatgagggctgcaagctggtgaccatcggcagcggcaaggtgtttgccaccaccggctatggaattgccatgcagaaggacagccactggaagagggccatcgacctggccctgctgcagttcctgggagatggagagacccagaagctggagaccgtgtggctgagcggcatctgccagaatgagaagaatgaggtgatgagcagcaagctggacatcgacaacatggccggggtcttctacatgctgctggtggccatgggcctggccctgctggtgtttgcctgggagcacctggtgtactggaagctgcggcacagcgtgcccaacagcagccagctggacttcctgctggccttcagccgggtgggcgcccaccccagcccccaccggcccaagttctag

SEQ ID NO: 153974 - DNA, 4011 bp, synthetic construct
  misc_feature 1..4011: note = Description of Artificial Sequence: Synthetic coding sequence
  source 1..4011: mol_type = other DNA
atgagaggagctgggggcccccggggcccccggggccctgccaagatgctgctgctgctggccctggcctgtgccagccccttccctgaggaggcccctggccctggaggagctgggggccctgggggcggcctgggcggggcccggcccctgaatgtggccctggtgttcagcggccctgcctatgctgctgaggccgcccggctgggccctgctgtggccgctgctgtgcgcagccctggcctggatgtgcggcctgtggccctggtgctgaatggaagtgaccccaggagcctggtgctgcagctgtgtgacctgctgagcggcctgcgggtgcatggagtggtgtttgaagatgacagccgggccccagctgtggcccccatcctggacttcctgagcgcccagaccagcctgcccatcgtggccgtgcatggaggagctgccctggtgctgacccccaaggagaagggcagcaccttcctgcagctgggcagcagcacagagcagcagctgcaggtgatctttgaggtgctggaggagtatgactggaccagctttgtggccgtgaccacccgggcccctggccaccgggccttcctgagctacatcgaggtgctgacagatggcagcctggtgggctgggagcacagaggagccctgaccctggaccctggagctggggaggccgtgctgagcgcccagctgcggtctgtgtctgcccagatccggctgctcttctgtgcccgggaggaggccgagcctgtgttccgggctgctgaggaggccggcctgaccggcagcggctacgtgtggttcatggtgggcccccagctggccggcggcggcggcagcggggcccctggagagccccccctgctgcctggaggagcccccctgcctgctggcctgtttgctgtgcgctctgctggctggagagatgacctggcccggcgggtggccgccggcgtggccgtggtggcccggggggcccaggccctgctgcgggactatggcttcctgcctgagctgggccatgactgccgggcccagaacagaacccacagaggagagagcctgcaccgctacttcatgaacatcacctgggacaacagagactacagcttcaatgaagatggcttcctggtgaaccccagcctggtggtgatcagcctgacccgggacaggacctgggaggtggtgggctcctgggagcagcagaccctgcggctgaagtaccccctgtggagccgctatggccgcttcctgcagcctgtggatgacacccagcacctgactgtggccaccctggaggagcggcccttcgtcatcgtggagcctgctgaccccatcagcggcacctgcatccgggacagcgtgccctgccgcagccagctgaacagaacccacagccccccaccagatgcccccaggcctgagaagcgctgctgcaagggcttctgcatcgacatcctgaagaggctggcccacaccatcggcttctcctatgacctgtacctggtgaccaacgggaagcacggcaagaagattgatggagtgtggaatggcatgattggagaggtgttctaccagagagctgacatggccatcggcagcctgaccatcaatgaggagaggagtgaaattgtggacttctctgtgccctttgtggagaccggcatctctgtgatggtggcccggagcaatggaacagtgagccccagcgccttcctggagccctacagccctgctgtgtgggtgatgatgtttgtgatgtgcctgactgtggtggccgtgaccgtcttcatctttgagtacctgagccctgtgggctacaacagaagcctggccaccgggaagaggcctgggggcagcaccttcaccatcggcaagagcatctggctgctgtgggccctggtgttcaacaacagcgtgcctgtggagaacccccggggcaccaccagcaagatcatggtgctggtgtgggccttctttgctgtgatcttcctggccagctacacagccaacctggccgccttcatgatccaggaggagtatgtggacacagtgtctggcctgagtgacaggaagttccagaggccccaggagcagtacccacccctgaagtttggcaccgtgcccaacggcagcacagagaagaacatccgcagcaactacccagacatgcacagctacatggtgcgctacaaccagccccgggtggaggaggccctgacccagctgaaggccggcaagctggatgccttcatctatgatgctgctgtgctgaactacatggccaggaaggatgagggctgcaagctggtgaccatcggcagcggcaaggtgtttgccaccaccggctatggaattgccctgcacaagggcagccgctggaagaggcccatcgacctggccctgctgcagttcctgggagatgatgaaattgagatgctggagcggctgtggctgagcggcatctgccacaatgacaagattgaggtgatgagcagcaagctggacatcgacaacatggccggggtcttctacatgctgctggtggccatgggcctgagcctgctggtgtttgcctgggagcacctggtgtactggaggctgcggcactgcctgggccccacccacaggatggacttcctgctggccttcagccggggcatgtacagctgctgcagcgctgaggccgcccctcctccagccaagcccccacctccaccccagcccctgcccagccctgcctacccagcccccaggcctgcccctggccctgccccctttgtgccccgggagcgggcctctgtggaccgctggaggaggaccaagggagctggccccccaggaggagctggcctggctgatggcttccaccgctactacggccccatcgagccccagggcctgggcctgggcctgggggaggcccgggccgcccccagaggagctgctggccggcccctgagccccccagctgcccagcccccccagaagcccccacccagctactttgccatcgtgcgggacaaggagcctgctgagcccccagctggggccttccctggcttccccagccccccagcccctcctgctgctgctgccacagctgtgggcccccccctgtgccgcctggcctttgaagatgagagccccccagccccagcccgctggcccaggagtgaccctgagagccagcccctgctgggccctggggccggcggggccggcggcaccggcggggccggcggcggggccccagctgcccccccaccctgccgggccgcccccccaccctgcccctacctggacctggagcccagccccagcgacagcgaggacagcgagagcctgggcggggccagcctgggcggcctggagccctggtggtttgctgacttcccctacccctatgcagagcggctgggccccccacctggccgctactggagcgtggacaagctgggcggctggagggctggctcctgggactacctgccccccaggagcggccctgctgcctggcactgccgccactgtgccagcctggagctgctgcccccacccaggcacctgagctgcagccatgatggcctggatggcggctggtgggcccctcctcctccaccctgggccgccggccccctgccccggcggcgggcccgctgtggctgccccaggagccacccccaccggccccgggccagccacaggaccccagctgctgctgccccccaccaccaccgccaccggcgggctgctgggggctgggacctgcccccaccagcccccaccagccgcagcctggaggacctgagcagctgccccagggctgccccagcccggcggctgaccggccccagcagacatgcccggcgctgcccccacgccgcccactggggcccccccctgcccacagccagccacagaagacacagaggaggagacctgggcacccggcggggcagcgcccacttcagcagcctggagagcgaggtgtag

SEQ ID NO: 153975 - DNA, 1116 bp, synthetic construct
  misc_feature 1..1116: note = Description of Artificial Sequence: Synthetic coding sequence
  source 1..1116: mol_type = other DNA
atgagccatgagaagagcttcctggtgtctggggacaactaccccccacccaaccctggctacccaggcggcccccagccccccatgccaccctatgcccagcccccctacccaggggccccctacccccagccccccttccagcccagcccctacggccagcccggctacccccacggccccagcccctacccccagggcggctacccccagggcccctacccccagggcggctacccccagggcccctacccccaggagggctacccccagggcccctacccccagggcggctacccccagggcccctacccccagagccccttcccccccaacccctacggccagccccaggtgtttcctggccaggaccctgacagcccccagcacggcaactaccaggaggagggcccccccagctactatgacaaccaggacttccctgccaccaactgggatgacaagagcatccggcaggccttcatcaggaaggtgttcctggtgctgaccctgcagctgtctgtgaccctgagcacagtgtctgtgttcacctttgtggccgaggtgaagggctttgtgagagaaaatgtgtggacctactacgtgtcctatgctgtgttcttcatcagcctcatcgtgctgagctgctgcggggacttccggaggaagcacccctggaacctggtggccctgtctgtgctgacagccagcctgagctacatggtgggcatgattgccagcttctacaacacagaagctgtgatcatggctgtgggcatcaccacagctgtgtgcttcaccgtggtgatcttctccatgcagaccaggtatgacttcaccagctgcatgggcgtgctgctggtgtccatggtggtgctcttcatctttgccatcctgtgcatcttcatccggaaccgcatcctggagatcgtgtatgccagcctgggcgccctgctcttcacctgcttcctggccgtggacacccagctgctgctgggcaacaagcagctgagcctgagccctgaggagtatgtgtttgctgccctgaacctgtacacagacatcatcaacatcttcctgtacatcctgaccatcatcggccgggccaaggagtag

SEQ ID NO: 153976 - DNA, 1116 bp, synthetic construct; identical to SEQ ID NO: 153975
  misc_feature 1..1116: note = Description of Artificial Sequence: Synthetic coding sequence
  source 1..1116: mol_type = other DNA

SEQ ID NO: 153977 - DNA, 825 bp, synthetic construct
  misc_feature 1..825: note = Description of Artificial Sequence: Synthetic coding sequence
  source 1..825: mol_type = other DNA
atgagccatgagaagagcttcctggtgtctggggacaactaccccccacccaaccctggctacccaggcggcccccagccccccatgccaccctatgcccagcccccctacccaggggccccctacccccagccccccttccagcccagcccctacggccagcccggctacccccacggccccagcccctacccccagggcggctacccccagggcccctacccccagggcggctacccccagggcccctacccccaggagggctacccccagggcccctacccccagggcggctacccccagggcccctacccccagagccccttcccccccaacccctacggccagccccaggtgtttcctggccaggaccctgacagcccccagcacggcaactaccaggaggagggcccccccagctactatgacaaccaggacttccctgccaccaactgggatgacaagagcatccggcaggccttcatcaggaaggtgttcctggtgctgaccctgcagctgtctgtgaccctgagcacagtgtctgtgttcacctttgtggccgaggtgaagggctttgtgagagaaaatgtgtggacctactacgtgtcctatgctgtgttcttcatcagcctcatcgtgctgagctgctgcggggacttccggaggaagcacccctggaacctggtggccctgtctgtgctgacagccagcctgagctacatggtgggcatgattgccagcttctacaacacagaagctgtgatcatggctgtgggcatcaccacagctgtgtgcttcaccgtggtgatcttctccatgcagtag

SEQ ID NO: 153978 - DNA, 306 bp, synthetic construct
  misc_feature 1..306: note = Description of Artificial Sequence: Synthetic coding sequence
  source 1..306: mol_type = other DNA
atgagccatgagaagagcttcctggtgtctggggacaactaccccccacccaaccctggctacccaggcggcccccagccccccatgccaccctatgcccagcccccctacccaggggccccctacccccagccccccttccagcccagcccctacggccagcccggctacccccacggccccagcccctacccccagggcggctacccccagggcccctacccccagggcggctacccccagggcccctacccccaggagggctacccccagggcccctacccccagggcggctacccccagtag

SEQ ID NO: 153979 - DNA, 1059 bp, synthetic construct
  misc_feature 1..1059: note = Description of Artificial Sequence: Synthetic coding sequence
  source 1..1059: mol_type = other DNA
atgagccatgagaagagcttcctggtgtctggggacaactaccccccaccctacccaggggccccctacccccagccccccttccagcccagcccctacggccagcccggctacccccacggccccagcccctacccccagggcggctacccccagggcccctacccccagggcggctacccccagggcccctacccccaggagggctacccccagggcccctacccccagggcggctacccccagggcccctacccccagagccccttcccccccaacccctacggccagccccaggtgtttcctggccaggaccctgacagcccccagcacggcaactaccaggaggagggccccccatcctactatgacaaccaggacttccctgccaccaactgggatgacaagagcatccggcaggccttcatcaggaaggtgttcctggtgctgaccctgcagctgtctgtgaccctgagcacagtgtctgtgttcacctttgtggccgaggtgaagggctttgtgcgggagaatgtgtggacctactacgtgtcctatgctgtgttcttcatcagcctgattgtgctgagctgctgcggggacttccggaggaagcacccctggaacctggtggccctgtctgtgctgacagccagcctgagctacatggtgggcatgattgccagcttctacaacacagaggccgtcatcatggctgtgggcatcaccacagctgtgtgcttcaccgtggtgatcttctccatgcagaccaggtatgacttcaccagctgcatgggcgtgctgctggtgtccatggtggtgctcttcatctttgccatcctgtgcatcttcatccggaaccgcatcctggagatcgtgtatgccagcctgggcgccctgctcttcacctgcttcctggccgtggacacccagctgctgctgggcaacaagcagctgagcctgagccctgaggagtatgtgtttgctgccctgaacctgtacacagacatcatcaacatcttcctgtacatcctgaccatcatcggccgggccaaggagtag

SEQ ID NO: 153980 - DNA, 3348 bp, synthetic construct
  misc_feature 1..3348: note = Description of Artificial Sequence: Synthetic coding sequence
  source 1..3348: mol_type = other DNA
atgaggcggctgagcctgtggtggctgctgagccgggtgtgcctgctgctgcccccaccctgtgccctggtgctggccggcgtgcccagcagcagcagccacccccagccctgccagatcctgaagagaattggacatgctgtgcgggtgggcgctgtgcacctgcagccctggaccacagccccccgggccgccagccgggccccagatgacagccgggccggggcccagagagatgagcctgagcccggcacccggcgcagccctgcccccagccctggggcccgctggctgggcagcaccctgcacggccggggccccccaggcagcaggaagccaggagagggcgcccgggcagaggccctgtggcccagagatgccctgctgtttgctgtggacaacctgaacagagtggagggcctgctgccctacaacctgagcctggaggtggtgatggccatcgaggccggcctgggggacctgcccctgctgcccttcagcagccccagcagcccctggagcagtgaccccttctccttcctgcagagcgtgtgccacacagtggtggtgcagggcgtgtctgccctgctggccttcccccagagccagggcgagatgatggagctggacctggtgtccctggtgctgcacatccctgtgatcagcatcgtgagacatgagttcccccgggagagccagaaccccctgcacctgcagctgagcctggagaacagcctgagcagtgatgctgatgtgacagtgtccatcctgaccatgaacaactggtacaacttcagcctgctgctgtgccaggaggactggaacatcacagacttcctgctgctgacccagaacaacagcaagttccacctgggcagcatcatcaacatcacagccaacctgcccagcacccaggacctgctgtccttcctgcagatccagctggagagcatcaagaacagcacccccaccgtggtgatgtttggctgtgacatggagagcatccgccgcatctttgagatcaccacccagtttggagtgatgcctcctgagctgcgctgggtgctgggggacagccagaatgtggaggagctgaggacagagggcctgcccctgggcctgattgcccacggcaagaccacccagagcgtgtttgagcactacgtgcaggatgccatggagctggtggcccgggctgtggccacagccaccatgatccagcctgagctggccctgatccccagcaccatgaactgcatggaggtggagaccaccaacctgaccagcggccagtacctgagccgcttcctggccaacaccaccttccggggcctgagcggcagcatccgggtgaagggcagcaccatcgtgtcctctgagaacaacttcttcatctggaacctgcagcacgaccccatgggcaagcccatgtggacccggctgggctcctggcagggcggcaagatcgtgatggactatggcatctggccagagcaggcccagaggcacaagacccacttccagcaccccagcaagctgcacctgcgggtggtgaccctgattgagcacccctttgtgttcacccgggaggtggatgatgagggcctgtgcccagctggccagctgtgcctggaccccatgaccaatgacagcagcaccctggacagcctcttcagcagcctgcacagcagcaatgacacagtgcccatcaagttcaagaagtgctgctacggctactgcatcgacctgctggagaagattgctgaggacatgaactttgattttgacctgtacatcgtgggagatggcaagtatggagcctggaagaatggccactggacaggcctggtgggggacctgctgcggggcacagcccacatggctgtgaccagcttcagcatcaacacagcccggagccaggtgattgacttcaccagccccttcttcagcaccagcctgggcatcctggtgaggacccgggacacagctgcccccatcggggccttcatgtggcccctgcactggaccatgtggctgggcatctttgtggccctgcacatcacagctgtgttcctgaccctgtatgagtggaagagccccttcggcctgacccccaagggcaggaacagaagcaaggtgttctccttcagcagcgccctgaacatctgctacgccctgctgtttggccgcacagtggccatcaagccacccaagtgctggacaggccgcttcctgatgaacctgtgggccatcttctgcatgttctgcctgagcacctacacagccaacctggccgctgtgatggtgggggagaagatctatgaggagctgagcggcatccatgaccccaagctgcaccaccccagccagggcttccgcttcggcaccgtgcgggagagcagcgcagaagattatgtgcggcagagcttccctgagatgcatgagtacatgaggcgctacaacgtgcctgccaccccagatggagtggagtacctgaagaatgaccctgagaagctggatgccttcatcatggacaaggccctgctggactatgaggtgtccattgatgctgactgcaagctgctgactgtgggcaagccctttgccatcgagggctatggaattggcctgccccccaacagccccctgacagccaacatcagcgagctgatcagccagtacaagagccacggcttcatggacatgctgcatgacaagtggtacagagtggtgccctgtgggaagaggagctttgctgtgacagagaccctgcagatgggcatcaagcacttcagcggcctgtttgtgctgctgtgcatcggcttcggcctgagcatcctgaccaccatcggggagcacatcgtgtaccgcctgctgctgccccgcatcaagaacaagagcaagctgcagtactggctgcacaccagccagaggctgcaccgggccatcaacaccagcttcatcgaggagaagcagcagcacttcaagaccaagagggtggagaagaggagcaatgtgggcccccggcagctgactgtgtggaacaccagcaacctgagccatgacaacagaaggaagtacatcttcagtgatgaggagggccagaaccagctgggcatccgcatccaccaggacatccccctgcccccaagaagaagagagctgcctgccctgcggaccaccaacgggaaggctgacagcctgaatgtgtccaggaacagcgtgatgcaggagctgtctgagctggagaagcagatccaggtgatccggcaggagctgcagctggccgtgtccaggaagacagagctggaggagtaccagaggaccagcaggacctgtgagagctag

SEQ ID NO: 153981 - DNA, 3585 bp, synthetic construct
  misc_feature 1..3585: note = Description of Artificial Sequence: Synthetic coding sequence
  source 1..3585: mol_type = other DNA
atggtgggcctgctgctcttcttcttccctgccatcttcctggaggtgtccctgctgcccaggagccctggcaggaaggtgctgctggccggggccagcagccagaggtctgtggccaggatggatggagatgtgatcattggagccctcttctctgtgcaccaccagcccccagctgagaaggtgcctgagaggaaatgtggggagatccgggagcagtatggcatccagagggtggaggccatgttccacaccctggacaagatcaatgctgaccctgtgctgctgcccaacatcaccctgggcagcgagatccgggacagctgctggcacagctctgtggccctggagcagagcattgagttcatccgggacagcctcatcagcatcagagatgagaaggatggcatcaaccgctgcctgcctgatggccagagcctgcccccaggccgcaccaagaagcccatcgccggggtcatcggccctggcagcagctctgtggccatccaggtgcagaacctgctgcagctgtttgacatcccccagatcgcctacagcgccaccagcattgacctgagtgacaagaccctgtacaagtacttcctgcgggtggtgcccagcgacaccctgcaggcccgggccatgctggacatcgtgaagcgctacaactggacctacgtgtctgctgtgcacacagagggcaactacggggagagcggcatggatgccttcaaggagctggccgcccaggagggcctgtgcatcgcccacagcgacaagatctacagcaatgctggggagaagagctttgaccggctgctgaggaagctgcgggagcggctgcccaaggcccgggtggtggtgtgcttctgtgagggcatgacagtgcggggcctgctgagcgccatgaggcggctgggcgtggtgggggagttcagcctgattggaagtgatggctgggccgacagagatgaggtgattgagggctatgaggtggaggccaatggaggcatcaccatcaagctgcagagccctgaggtgcgcagctttgatgactacttcctgaagctgcggctggacaccaacaccaggaacccctggttccctgagttctggcagcaccgcttccagtgccgcctgcccggccacctgctggagaaccccaacttcaagaggatctgcacaggaaatgaaagcctggaggagaactacgtgcaggacagcaagatgggcttcgtcatcaatgccatctatgccatggcccacggcctgcagaacatgcaccacgccctgtgccccggccacgtgggcctgtgtgatgccatgaagcccattgatggcagcaagctgctggacttcctgatcaagagcagcttcatcggcgtgtctggagaggaggtgtggtttgatgagaagggagatgcccctggccgctatgacatcatgaacctgcagtacacagaggccaacagatatgactatgtgcacgtgggcacctggcatgaaggagtgctgaacattgatgactacaagatccagatgaacaagtctggagtggtgcgctctgtgtgcagcgagccctgcctgaagggccagatcaaggtgatcaggaagggggaggtgtcctgctgctggatctgcacagcctgcaaggaaaatgaatatgtgcaggatgagttcacctgcaaggcctgtgacctgggctggtggcccaatgctgacctgaccggctgtgagcccatccctgtgcgctacctggagtggagcaacatcgagagcatcatcgccatcgccttcagctgcctgggcatcctggtgaccctgtttgtgaccctcatctttgtgctgtacagagacacccctgtggtgaagagcagcagccgggagctgtgctacatcatcctggccggcatcttcctgggctacgtgtgccccttcaccctgattgccaagcccaccaccaccagctgctacctgcagaggctgctggtgggcctgagcagcgccatgtgctacagcgccctggtgaccaagaccaaccgcatcgcccgcatcctggccggcagcaagaagaagatctgcaccaggaagccccgcttcatgtctgcctgggcccaggtgatcatcgccagcatcctgatctctgtgcagctgaccctggtggtgaccctcatcatcatggagccccccatgcccatcctgagctaccccagcatcaaggaggtgtacctgatctgcaacaccagcaacctgggcgtggtggcccccctgggctacaacggcctgctgatcatgagctgcacctactatgccttcaagaccagaaatgtgcctgccaacttcaatgaggccaagtacatcgccttcaccatgtacaccacctgcatcatctggctggcctttgtgcccatctacttcggcagcaactacaagatcatcaccacctgctttgctgtgtccctgtctgtgacagtggccctgggctgcatgttcacccccaagatgtacatcatcatcgccaagccagagagaaatgtgcgcagcgccttcaccaccagtgatgtggtgaggatgcacgtgggagatggcaagctgccctgccgcagcaacaccttcctgaacatcttccggaggaagaaggccggggctggaaatgccaacagcaatggcaagtctgtgtcctggagcgagcccggcggcggccaggtgcccaagggccagcacatgtggcaccggctgtctgtgcacgtgaagaccaatgaaacagcctgcaaccagacagctgtgatcaagcccctgaccaagagctaccagggcagcggcaagagcctgaccttcagtgacaccagcaccaagaccctgtacaacgtggaggaggaggaggatgcccagcccatccgcttcagccccccaggcagccccagcatggtggtgcaccggcgggtgcccagcgctgccaccaccccacccctgcccagccacctgacagctgaggagacccccctcttcctggccgagcccgccctgcccaagggcctgcccccacccctgcagcagcagcagcagcccccaccccagcagaagagcctgatggaccagctgcagggcgtggtgagcaacttcagcacagccatcccagacttccacgctgtgctggccggccctgggggccctggaaatggcctgcggagcctgtacccacctcctcctccaccccagcacctgcagatgctgcccctgcagctgagcacctttggagaggagctggtgagccccccagcagatgatgatgatgacagcgagcgcttcaagctgctgcaggagtatgtgtatgaacatgagcgggagggcaacacagaagaagatgagctggaggaggaggaggaggacctgcaggccgccagcaagctgaccccagatgacagccctgccctgaccccacccagccccttccgggacagcgtggccagcggcagctctgtgcccagcagccctgtgtctgagagcgtgctgtgcaccccacccaacgtgtcctatgccagcgtcatcctgcgggactacaagcagagcagcagcaccctgtag

SEQ ID NO: 153982 - DNA, 3585 bp, synthetic construct; identical to SEQ ID NO: 153981
  misc_feature 1..3585: note = Description of Artificial Sequence: Synthetic coding sequence
  source 1..3585: mol_type = other DNA

SEQ ID NO: 153983 - DNA, 2721 bp, synthetic construct
  misc_feature 1..2721: note = Description of Artificial Sequence: Synthetic coding sequence
  source 1..2721: mol_type = other DNA
atggtgggcctgctgctcttcttcttccctgccatcttcctggaggtgtccctgctgcccaggagccctggcaggaaggtgctgctggccggggccagcagccagaggtctgtggccaggatggatggagatgtgatcattggagccctcttctctgtgcaccaccagcccccagctgagaaggtgcctgagaggaaatgtggggagatccgggagcagtatggcatccagagggtggaggccatgttccacaccctggacaagatcaatgctgaccctgtgctgctgcccaacatcaccctgggcagcgagatccgggacagctgctggcacagctctgtggccctggagcagagcattgagttcatccgggacagcctcatcagcatcagagatgagaaggatggcatcaaccgctgcctgcctgatggccagagcctgcccccaggccgcaccaagaagcccatcgccggggtcatcggccctggcagcagctctgtggccatccaggtgcagaacctgctgcagctgtttgacatcccccagatcgcctacagcgccaccagcattgacctgagtgacaagaccctgtacaagtacttcctgcgggtggtgcccagcgacaccctgcaggcccgggccatgctggacatcgtgaagcgctacaactggacctacgtgtctgctgtgcacacagagggcaactacggggagagcggcatggatgccttcaaggagctggccgcccaggagggcctgtgcatcgcccacagcgacaagatctacagcaatgctggggagaagagctttgaccggctgctgaggaagctgcgggagcggctgcccaaggcccgggtggtggtgtgcttctgtgagggcatgacagtgcggggcctgctgagcgccatgaggcggctgggcgtggtgggggagttcagcctgattggaagtgatggctgggccgacagagatgaggtgattgagggctatgaggtggaggccaatggaggcatcaccatcaagctgcagagccctgaggtgcgcagctttgatgactacttcctgaagctgcggctggacaccaacaccaggaacccctggttccctgagttctggcagcaccgcttccagtgccgcctgcccggccacctgctggagaaccccaacttcaagaggatctgcacaggaaatgaaagcctggaggagaactacgtgcaggacagcaagatgggcttcgtcatcaatgccatctatgccatggcccacggcctgcagaacatgcaccacgccctgtgccccggccacgtgggcctgtgtgatgccatgaagcccattgatggcagcaagctgctggacttcctgatcaagagcagcttcatcggcgtgtctggagaggaggtgtggtttgatgagaagggagatgcccctggccgctatgacatcatgaacctgcagtacacagaggccaacagatatgactatgtgcacgtgggcacctggcatgaaggagtgctgaacattgatgactacaagatccagatgaacaagtctggagtggtgcgctctgtgtgcagcgagccctgcctgaagggccagatcaaggtgatcaggaagggggaggtgtcctgctgctggatctgcacagcctgcaaggaaaatgaatatgtgcaggatgagttcacctgcaaggcctgtgacctgggctggtggcccaatgctgacctgaccggctgtgagcccatccctgtgcgctacctggagtggagcaacatcgagagcatcatcgccatcgccttcagctgcctgggcatcctggtgaccctgtttgtgaccctcatctttgtgctgtacagagacacccctgtggtgaagagcagcagccgggagctgtgctacatcatcctggccggcatcttcctgggctacgtgtgccccttcaccctgattgccaagcccaccaccaccagctgctacctgcagaggctgctggtgggcctgagcagcgccatgtgctacagcgccctggtgaccaagaccaaccgcatcgcccgcatcctggccggcagcaagaagaagatctgcaccaggaagccccgcttcatgtctgcctgggcccaggtgatcatcgccagcatcctgatctctgtgcagctgaccctggtggtgaccctcatcatcatggagccccccatgcccatcctgagctaccccagcatcaaggaggtgtacctgatctgcaacaccagcaacctgggcgtggtggcccccctgggctacaacggcctgctgatcatgagctgcacctactatgccttcaagaccagaaatgtgcctgccaacttcaatgaggccaagtacatcgccttcaccatgtacaccacctgcatcatctggctggcctttgtgcccatctacttcggcagcaactacaagatcatcaccacctgctttgctgtgtccctgtctgtgacagtggccctgggctgcatgttcacccccaagatgtacatcatcatcgccaagccagagagaaatgtgcgcagcgccttcaccaccagtgatgtggtgaggatgcacgtgggagatggcaagctgccctgccgcagcaacaccttcctgaacatcttccggaggaagaaggccggggctggaaatgccaagaagaggcagcctgagttcagccccaccagccagtgccccagcgcccacgtgcagctgtag

SEQ ID NO: 153984 - DNA, 2721 bp, synthetic construct; identical to SEQ ID NO: 153983
  misc_feature 1..2721: note = Description of Artificial Sequence: Synthetic coding sequence
  source 1..2721: mol_type = other DNA

SEQ ID NO: 153985 - DNA, 2721 bp, synthetic construct; identical to SEQ ID NO: 153983
  misc_feature 1..2721: note = Description of Artificial Sequence: Synthetic coding sequence
  source 1..2721: mol_type = other DNA

SEQ ID NO: 153986 - DNA, 2619 bp, synthetic construct
  misc_feature 1..2619: note = Description of Artificial Sequence: Synthetic coding sequence
  source 1..2619: mol_type = other DNA
atgggcagcctgctggccctgctggccctgctgctgctgtggggcgctgtggccgagggccctgccaagaaggtgctgaccctggagggggacctggtgctgggcggcctcttccctgtgcaccagaagggcggccctgctgaggactgtggccctgtgaatgagcaccggggcatccagaggctggaggccatgctgtttgccctggaccgcatcaacagagacccccacctgctgcccggggtgcggctgggcgcccacatcctggacagctgcagcaaggacacccacgccctggagcaggccctggactttgtgcgggccagcctgagcagaggagcagatggcagccgccacatctgcccagatggcagctatgccacccatggagatgcccccacagccatcactggagtcatcggcggcagctacagtgatgtgtccatccaggtggccaacctgctgcggctcttccagatcccccagatctcctatgccagcaccagcgccaagctgagtgacaagagccgctatgactactttgccaggacagtgcccccagacttcttccaggccaaggccatggccgagatcctgcgcttcttcaactggacctacgtgtccacagtggccagcgagggggactatggagaaacaggaattgaggcctttgagctggaggcccgggccaggaacatctgtgtggccaccagcgagaaggtgggccgggccatgagccgggccgcctttgagggcgtggtgcgggccctgctgcagaagcccagcgcccgggtggccgtgctcttcaccaggagtgaagatgcccgggagctgctggccgccagccagaggctgaatgccagcttcacctgggtggccagtgatggctggggcgccctggagagcgtggtggccggcagcgagggcgctgctgagggcgccatcaccatcgagctggccagctaccccatcagtgactttgccagctacttccagagcctggacccctggaacaacagcaggaacccctggttccgggagttctgggagcagcgcttccgctgcagcttccggcagagggactgtgccgcccacagcctgcgggctgtgccctttgagcaggagagcaagatcatgtttgtggtgaatgctgtgtatgccatggcccacgccctgcacaacatgcaccgggccctgtgccccaacaccacccggctgtgtgatgccatgaggcctgtgaatggccggcggctgtacaaggactttgtgctgaatgtgaagtttgatgcccccttccggcctgctgacacccacaatgaggtgcgctttgacagatttggagatggcatcggccgctacaacatcttcacctacctgcgggccggcagcggccgctaccgctaccagaaggtgggctactgggccgagggcctgaccctggacaccagcctcatcccctgggccagccccagcgctggccccctgcctgccagccgctgcagcgagccctgcctgcagaatgaggtgaagtctgtgcagcccggggaggtgtgctgctggctgtgcatcccctgccagccctatgagtaccgcctggatgagttcacctgtgccgactgtggcctgggctactggcccaatgccagcctgaccggctgctttgagctgccccaggagtacatccgctggggagatgcctgggccgtgggccctgtgaccatcgcctgcctgggcgccctggccaccctgtttgtgctgggcgtgtttgtgcgccacaatgccacccctgtggtgaaggccagcggccgggagctgtgctacatcctgctgggcggcgtcttcctgtgctactgcatgaccttcatcttcatcgccaagcccagcacagctgtgtgcaccctgcggcggctgggcctgggcacagccttctctgtgtgctacagcgccctgctgaccaagaccaacagaattgcccgcatctttggaggagcccgggagggcgcccagaggccccgcttcatcagccctgccagccaggtggccatctgcctggccctgatcagcggccagctgctgattgtggtggcctggctggtggtggaggcccctggcaccgggaaggagacagcccctgagcggcgggaggtggtgaccctgcgctgcaaccacagagatgcctccatgctgggcagcctggcctacaacgtgctgctgattgccctgtgcaccctgtatgccttcaagaccaggaaatgtcctgagaacttcaatgaggccaagttcatcggcttcaccatgtacaccacctgcatcatctggctggccttcctgcccatcttctacgtgaccagcagtgactacagagtgcagaccaccaccatgtgtgtgtctgtgtccctgagcggctctgtggtgctgggctgcctgtttgcccccaagctgcacatcatcctcttccagccccagaagaatgtggtgagccaccgggcccccaccagcagatttggatctgctgctgcccgggccagcagcagcctgggccagggcagcggcagccagtttgtgcccaccgtgtgcaatggccgggaggtggtggacagcaccaccagcagcctgtag

SEQ ID NO: 153987 - DNA, 213 bp, synthetic construct
  misc_feature 1..213: note = Description of Artificial Sequence: Synthetic coding sequence
  source 1..213: mol_type = other DNA
atgggcagcctgctggccctgctggccctgctgctgctgtggggcgctgtggccgagggccctgccaagaaggtgctgaccctggagggggacctggtgctgggcggcctcttccctgtgcaccagaagggcggccctgctgaggactgtggccctgtgaatgagcaccggggcatccagaggctggaggccatgctgtttgccctggactag

SEQ ID NO: 153988 - DNA, 2640 bp, synthetic construct
  misc_feature 1..2640: note = Description of Artificial Sequence: Synthetic coding sequence
  source 1..2640: mol_type = other DNA
atgaagatgctgacccggctgcaggtgctgaccctggccctcttcagcaagggcttcctgctgagcctgggggaccacaacttcctgcggcgggagatcaagattgaaggagacctggtgctgggcggcctcttccccatcaatgagaagggcaccggcacagaggagtgtggccgcatcaatgaagatcggggcatccagaggctggaggccatgctgtttgccattgatgagatcaacaaggatgactacctgctgcccggggtgaagctgggcgtgcacatcctggacacctgcagccgggacacctacgccctggagcagagcctggagtttgtgcgggccagcctgaccaaggtggatgaagctgagtacatgtgcccagatggcagctatgccatccaggagaacatccccctgctgattgctggggtcatcggcggcagctacagctctgtgtccatccaggtggccaacctgctgcggctcttccagatcccccagatctcctatgccagcaccagcgccaagctgagtgacaagagccgctatgactactttgccaggacagtgcccccagacttctaccaggccaaggccatggccgagatcctgcgcttcttcaactggacctacgtgtccacagtggccagcgagggggactatggagaaacaggaattgaggcctttgagcaggaggcccggctgaggaacatctgcatcgccacagctgagaaggtgggccgcagcaacatcaggaagagctatgacagcgtcatccgggagctgctgcagaagcccaatgcccgggtggtggtgctcttcatgagaagtgatgacagccgggagctgattgctgctgccagccgggccaatgccagcttcacctgggtggccagtgatggctggggcgcccaggagagcatcatcaagggcagcgagcacgtggcctacggggccatcaccctggagctggccagccagcctgtgcggcagtttgaccgctacttccagagcctgaacccctacaacaaccacaggaacccctggttccgggacttctgggagcagaagttccagtgcagcctgcagaacaagaggaaccaccggcgggtgtgtgacaagcacctggccatcgacagcagcaactatgagcaggagagcaagatcatgtttgtggtgaatgctgtgtatgccatggcccacgccctgcacaagatgcagaggaccctgtgccccaacaccaccaagctgtgtgatgccatgaagatcctggatggcaagaagctgtacaaggactacctgctgaagatcaacttcaccgcccccttcaaccccaacaaggatgctgacagcatcgtgaagtttgacacctttggagatggcatgggccgctacaacgtgttcaacttccagaatgtgggcggcaagtacagctacctgaaggtgggccactgggccgagaccctgagcctggatgtgaacagcatccactggagcagaaattctgtgcccaccagccagtgcagcgacccctgtgccccaaatgagatgaagaacatgcagcctggagatgtgtgctgctggatctgcatcccctgtgagccctatgagtacctggctgatgagttcacctgcatggactgtggcagcggccagtggcccacagctgacctgaccggctgctatgacctgcctgaggactacatccgctgggaggatgcctgggccatcggccctgtgaccatcgcctgcctgggcttcatgtgcacctgcatggtggtgaccgtcttcatcaagcacaacaacacccccctggtgaaggccagcggccgggagctgtgctacatcctgctgtttggagtgggcctgagctactgcatgaccttcttcttcatcgccaagcccagccctgtgatctgtgccctgcggcggctgggcctgggcagcagctttgccatctgctacagcgccctgctgaccaagaccaactgcatcgcccgcatctttgatggagtgaagaatggagcccagaggcccaagttcatcagccccagcagccaggtgttcatctgcctgggcctcatcctggtgcagatcgtgatggtgtctgtgtggctgatcctggaggcccctggcacccggcgctacaccctggccgagaagcgggagaccgtcatcctgaagtgcaatgtgaaggacagctccatgctgatcagcctgacctatgatgtgatcctggtgatcctgtgcaccgtgtatgccttcaagaccaggaagtgcccagagaacttcaatgaggccaagttcatcggcttcaccatgtacaccacctgcatcatctggctggccttcctgcccatcttctacgtgaccagcagtgactacagagtgcagaccaccaccatgtgcatctctgtgtccctgagcggctttgtggtgctgggctgcctgtttgcccccaaggtgcacatcatcctcttccagccccagaagaatgtggtgacccaccggctgcacctgaaccgcttctctgtgtctggaacaggcaccacctacagccagagcagcgccagcacctacgtgcccaccgtgtgcaatggccgggaggtgctggacagcaccaccagcagcctgtag

SEQ ID NO: 153989 - DNA, 1608 bp, synthetic construct
  misc_feature 1..1608: note = Description of Artificial Sequence: Synthetic coding sequence
  source 1..1608: mol_type = other DNA
atgctgacccggctgcaggtgctgaccctggccctcttcagcaagggcttcctgctgagcctgggggaccacaacttcctgcggcgggagatcaagattgaaggagacctggtgctgggcggcctcttccccatcaatgagaagggcaccggcacagaggagtgtggccgcatcaatgaagatcggggcatccagaggctggaggccatgctgtttgccattgatgagatcaacaaggatgactacctgctgcccggggtgaagctgggcgtgcacatcctggacacctgcagccgggacacctacgccctggagcagagcctggagtttgtgcgggccagcctgaccaaggtggatgaagctgagtacatgtgcccagatggcagctatgccatccaggagaacatccccctgctgattgctggggtcatcggcggcagctacagctctgtgtccatccaggtggccaacctgctgcggctcttccagatcccccagatctcctatgccagcaccagcgccaagctgagtgacaagagccgctatgactactttgccaggacagtgcccccagacttctaccaggccaaggccatggccgagatcctgcgcttcttcaactggacctacgtgtccacagtggccagcgagggggactatggagaaacaggaattgaggcctttgagcaggaggcccggctgaggaacatctgcatcgccacagctgagaaggtgggccgcagcaacatcaggaagagctatgacagcgtcatccgggagctgctgcagaagcccaatgcccgggtggtggtgctcttcatgagaagtgatgacagccgggagctgattgctgctgccagccgggccaatgccagcttcacctgggtggccagtgatggctggggcgcccaggagagcatcatcaagggcagcgagcacgtggcctacggggccatcaccctggagctggccagccagcctgtgcggcagtttgaccgctacttccagagcctgaacccctacaacaaccacaggaacccctggttccgggacttctgggagcagaagttccagtgcagcctgcagaacaagaggaaccaccggcgggtgtgtgacaagcacctggccatcgacagcagcaactatgagcaggagagcaagatcatgtttgtggtgaatgctgtgtatgccatggcccacgccctgcacaagatgcagaggaccctgtgccccaacaccaccaagctgtgtgatgccatgaagatcctggatggcaagaagctgtacaaggactacctgctgaagatcaacttcaccggggctgatgacaaccacgtgcacctgtgccagcctgagtggctgtgtggcctgggcctgtttgtgtgcacccagggcagccaccaccctgtgtccaccccagaggagtgctgccacacccagacagccccccagcaggtgcagtgccagtggaactgggaccacatcctgtctgtgctgtgcaagcacgtgtgtgccaacggggtgcagtgggccggcagcccccggctgcaccacctgatctctgtgattgtgaactgcagctctgtgctggtgttcctggactgctag

SEQ ID NO: 153990 - DNA, 264 bp, synthetic construct
  misc_feature 1..264: note = Description of Artificial Sequence: Synthetic coding sequence
  source 1..264: mol_type = other DNA
atgaagatgctgacccggctgcaggtgctgaccctggccctcttcagcaagggcttcctgctgagcctgggggaccacaacttcctgcggcgggagatcaagattgaaggagacctggtgctgggcggcctcttccccatcaatgagaagggcaccggcacagaggagtgtggccgcatcaatgaagatcggggcatccagaggctggaggccatgctgtttgccattgatgagatcaacaaggatgactacctgctgccctag

SEQ ID NO: 153991 - DNA, 1614 bp, synthetic construct
  misc_feature 1..1614: note = Description of Artificial Sequence: Synthetic coding sequence
  source 1..1614: mol_type = other DNA
atgaagatgctgacccggctgcaggtgctgaccctggccctcttcagcaagggcttcctgctgagcctgggggaccacaacttcctgcggcgggagatcaagattgaaggagacctggtgctgggcggcctcttccccatcaatgagaagggcaccggcacagaggagtgtggccgcatcaatgaagatcggggcatccagaggctggaggccatgctgtttgccattgatgagatcaacaaggatgactacctgctgcccggggtgaagctgggcgtgcacatcctggacacctgcagccgggacacctacgccctggagcagagcctggagtttgtgcgggccagcctgaccaaggtggatgaagctgagtacatgtgcccagatggcagctatgccatccaggagaacatccccctgctgattgctggggtcatcggcggcagctacagctctgtgtccatccaggtggccaacctgctgcggctcttccagatcccccagatctcctatgccagcaccagcgccaagctgagtgacaagagccgctatgactactttgccaggacagtgcccccagacttctaccaggccaaggccatggccgagatcctgcgcttcttcaactggacctacgtgtccacagtggccagcgagggggactatggagaaacaggaattgaggcctttgagcaggaggcccggctgaggaacatctgcatcgccacagctgagaaggtgggccgcagcaacatcaggaagagctatgacagcgtcatccgggagctgctgcagaagcccaatgcccgggtggtggtgctcttcatgagaagtgatgacagccgggagctgattgctgctgccagccgggccaatgccagcttcacctgggtggccagtgatggctggggcgcccaggagagcatcatcaagggcagcgagcacgtggcctacggggccatcaccctggagctggccagccagcctgtgcggcagtttgaccgctacttccagagcctgaacccctacaacaaccacaggaacccctggttccgggacttctgggagcagaagttccagtgcagcctgcagaacaagaggaaccaccggcgggtgtgtgacaagcacctggccatcgacagcagcaactatgagcaggagagcaagatcatgtttgtggtgaatgctgtgtatgccatggcccacgccctgcacaagatgcagaggaccctgtgccccaacaccaccaagctgtgtgatgccatgaagatcctggatggcaagaagctgtacaaggactacctgctgaagatcaacttcaccggggctgatgacaaccacgtgcacctgtgccagcctgagtggctgtgtggcctgggcctgtttgtgtgcacccagggcagccaccaccctgtgtccaccccagaggagtgctgccacacccagacagccccccagcaggtgcagtgccagtggaactgggaccacatcctgtctgtgctgtgcaagcacgtgtgtgccaacggggtgcagtgggccggcagcccccggctgcaccacctgatctctgtgattgtgaactgcagctctgtgctggtgttcctggactgctag

SEQ ID NO: 153992 - DNA, 246 bp, synthetic construct
  misc_feature 1..246: note = Description of Artificial Sequence: Synthetic coding sequence
  source 1..246: mol_type = other DNA
atgaagatgctgacccggctgcaggtgctgaccctggccctcttcagcaagggcttcctgctgagcctgggggaccacaacttcctgcggcgggagatcaagattgaaggagacctggtgctgggcggcctcttccccatcaatgagaagggcaccggcacagaggagtgtggccgcatcaatgaagatcggggcatccagaggctggaggccatgctgtttgccattgatgagatcaacaagtag

SEQ ID NO: 153993 - DNA, 2256 bp, synthetic construct
  misc_feature 1..2256: note = Description of Artificial Sequence: Synthetic coding sequence
  source 1..2256: mol_type = other DNA
atgagccagagccctggagctggcagccccccacccctgccccccaggtctgcccctgtgcctgcccggagctgccgctgtgaggtggccaacctgctgcggctcttccagatcccccagatctcctatgccagcaccagcgccaagctgagtgacaagagccgctatgactactttgccaggacagtgcccccagacttctaccaggccaaggccatggccgagatcctgcgcttcttcaactggacctacgtgtccacagtggccagcgagggggactatggagaaacaggaattgaggcctttgagcaggaggcccggctgaggaacatctgcatcgccacagctgagaaggtgggccgcagcaacatcaggaagagctatgacagcgtcatccgggagctgctgcagaagcccaatgcccgggtggtggtgctcttcatgagaagtgatgacagccgggagctgattgctgctgccagccgggccaatgccagcttcacctgggtggccagtgatggctggggcgcccaggagagcatcatcaagggcagcgagcacgtggcctacggggccatcaccctggagctggccagccagcctgtgcggcagtttgaccgctacttccagagcctgaacccctacaacaaccacaggaacccctggttccgggacttctgggagcagaagttccagtgcagcctgcagaacaagaggaaccaccggcgggtgtgtgacaagcacctggccatcgacagcagcaactatgagcaggagagcaagatcatgtttgtggtgaatgctgtgtatgccatggcccacgccctgcacaagatgcagaggaccctgtgccccaacaccaccaagctgtgtgatgccatgaagatcctggatggcaagaagctgtacaaggactacctgctgaagatcaacttcaccgcccccttcaaccccaacaaggatgctgacagcatcgtgaagtttgacacctttggagatggcatgggccgctacaacgtgttcaacttccagaatgtgggcggcaagtacagctacctgaaggtgggccactgggccgagaccctgagcctggatgtgaacagcatccactggagcagaaattctgtgcccaccagccagtgcagcgacccctgtgccccaaatgagatgaagaacatgcagcctggagatgtgtgctgctggatctgcatcccctgtgagccctatgagtacctggctgatgagttcacctgcatggactgtggcagcggccagtggcccacagctgacctgaccggctgctatgacctgcctgaggactacatccgctgggaggatgcctgggccatcggccctgtgaccatcgcctgcctgggcttcatgtgcacctgcatggtggtgaccgtcttcatcaagcacaacaacacccccctggtgaaggccagcggccgggagctgtgctacatcctgctgtttggagtgggcctgagctactgcatgaccttcttcttcatcgccaagcccagccctgtgatctgtgccctgcggcggctgggcctgggcagcagctttgccatctgctacagcgccctgctgaccaagaccaactgcatcgcccgcatctttgatggagtgaagaatggagcccagaggcccaagttcatcagccccagcagccaggtgttcatctgcctgggcctcatcctggtgcagatcgtgatggtgtctgtgtggctgatcctggaggcccctggcacccggcgctacaccctggccgagaagcgggagaccgtcatcctgaagtgcaatgtgaaggacagctccatgctgatcagcctgacctatgatgtgatcctggtgatcctgtgcaccgtgtatgccttcaagaccaggaagtgcccagagaacttcaatgaggccaagttcatcggcttcaccatgtacaccacctgcatcatctggctggccttcctgcccatcttctacgtgaccagcagtgactacagagtgcagaccaccaccatgtgcatctctgtgtccctgagcggctttgtggtgctgggctgcctgtttgcccccaaggtgcacatcatcctcttccagccccagaagaatgtggtgacccaccggctgcacctgaaccgcttctctgtgtctggaacaggcaccacctacagccagagcagcgccagcacctacgtgcccaccgtgtgcaatggccgggaggtgctggacagcaccaccagcagcctgtag

SEQ ID NO: 153994 - DNA, 1416 bp, synthetic construct
  misc_feature 1..1416: note = Description of Artificial Sequence: Synthetic coding sequence
  source 1..1416: mol_type = other DNA
atgaggaggaccaaccacgagcctgagcccggctgccgcctgacagctgctgctgccacagctgtgagcagcagcagctgccaggagctgtctgtgcgggcccccttcaaccccaacaaggatgctgacagcatcgtgaagtttgacacctttggagatggcatgggccgctacaacgtgttcaacttccagaatgtgggcggcaagtacagctacctgaaggtgggccactgggccgagaccctgagcctggatgtgaacagcatccactggagcagaaattctgtgcccaccagccagtgcagcgacccctgtgccccaaatgagatgaagaacatgcagcctggagatgtgtgctgctggatctgcatcccctgtgagccctatgagtacctggctgatgagttcacctgcatggactgtggcagcggccagtggcccacagctgacctgaccggctgctatgacctgcctgaggactacatccgctgggaggatgcctgggccatcggccctgtgaccatcgcctgcctgggcttcatgtgcacctgcatggtggtgaccgtcttcatcaagcacaacaacacccccctggtgaaggccagcggccgggagctgtgctacatcctgctgtttggagtgggcctgagctactgcatgaccttcttcttcatcgccaagcccagccctgtgatctgtgccctgcggcggctgggcctgggcagcagctttgccatctgctacagcgccctgctgaccaagaccaactgcatcgcccgcatctttgatggagtgaagaatggagcccagaggcccaagttcatcagccccagcagccaggtgttcatctgcctgggcctcatcctggtgcagatcgtgatggtgtctgtgtggctgatcctggaggcccctggcacccggcgctacaccctggccgagaagcgggagaccgtcatcctgaagtgcaatgtgaaggacagctccatgctgatcagcctgacctatgatgtgatcctggtgatcctgtgcaccgtgtatgccttcaagaccaggaagtgcccagagaacttcaatgaggccaagttcatcggcttcaccatgtacaccacctgcatcatctggctggccttcctgcccatcttctacgtgaccagcagtgactacagagtgcagaccaccaccatgtgcatctctgtgtccctgagcggctttgtggtgctgggctgcctgtttgcccccaaggtgcacatcatcctcttccagccccagaagaatgtggtgacccaccggctgcacctgaaccgcttctctgtgtctggaacaggcaccacctacagccagagcagcgccagcacctacgtgcccaccgtgtgcaatggccgggaggtgctggacagcaccaccagcagcctgtag

SEQ ID NO: 153995 - DNA, 2391 bp, synthetic construct
  misc_feature 1..2391: note = Description of Artificial Sequence: Synthetic coding sequence
  source 1..2391: mol_type = other DNA
atgcctgcctgggagcccggggtggccgccagctgtggctggagggccccaccctgcagccccctgcggctgtgcatcgccccccacccctgcaccccacccagcagccaccagggcaacctgacctgccgcctgccccccaggagctttggcttctgccgctgtgtgtgggtgaggacccggggccccagcctgcccggggagcaggtgtccctggccgcccatgaaagtgaaggagctgctgcccagctgggcagcagccctgagattgacccccggcggccccgctgcctgctgcctgagagcgcccagatcccccagatctcctatgccagcacagccccagacctgagtgacaacagccgctatgacttcttcagccgggtggtgcccagcgacacctaccaggcccaggccatggtggacatcgtgcgggccctgaagtggaactacgtgtccacagtggccagcgagggcagctatggagagagcggcgtggaggccttcatccagaagagcagagaagatggcggcgtgtgcatcgcccagagcgtgaagatcccccgggagcccaaggccggggagtttgacaagatcatccggcggctgctggagaccagcaatgcccgggctgtgatcatctttgccaatgaagatgacatccggcgggtgctggaggccgcccggcgggccaaccagacaggccacttcttctggatgggcagtgacagctggggcagcaagatcgcccctgtgctgcacctggaggaggtggccgagggcgctgtgaccatcctgcccaagaggatgtctgtgcgggaccgggagcgcatcggccaggacagcgcctatgagcaggagggcaaggtgcagtttgtgattgatgctgtgtatgccatgggccacgccctgcacgccatgcaccgggacctgtgccccggccgggtgggcctgtgccccaggatggaccctgtggatggcacccagctgctgaagtacatcagaaatgtgaacttcagcggcattgctggcaaccctgtgaccttcaatgaaaatggagatgcccctggccgctatgacatctaccagtaccagctgagaaatgacagcgctgagtacaaggtgattggctcctggacagaccacctgcacctgagaattgaaagaatgcactggccaggcagcggccagcagctgcccaggagcatctgcagcctgccctgccagcccggggagaggaagaagacagtgaagggcatgccctgctgctggcactgtgagccctgcaccggctaccagtaccaggtggaccgctacacctgcaagacctgcccctatgacatgaggcccacagagaacagaacaggctgccggcccatccccatcatcaagctggagtggggcagcccctgggccgtgctgcccctcttcctggccgtggtgggcattgctgccaccctgtttgtggtgatcacctttgtgcgctacaatgacacccccatcgtgaaggccagcggccgggagctgtcctatgtgctgctggccggcatcttcctgtgctacgccaccaccttcctgatgattgctgagccagacctgggcacctgcagcctgcggcgcatcttcctgggcctgggcatgagcatctcctatgctgccctgctgaccaagaccaaccgcatctaccgcatctttgagcagggcaagaggtctgtgtctgccccccgcttcatcagccctgccagccagctggccatcaccttcagcctcatcagcctgcagctgctgggcatctgtgtgtggtttgtggtggaccccagccacagcgtggtggacttccaggaccagaggaccctggaccccaggtttgcccggggcgtgctgaagtgtgacatcagtgacctgagcctcatctgcctgctgggctacagcatgctgctgatggtgacctgcaccgtgtatgccatcaagacccggggcgtgcctgagaccttcaatgaggccaagcccatcggcttcaccatgtacaccacctgcatcgtgtggctggccttcatccccatcttcttcggcaccagccagagcgctgacaagctgtacatccagaccaccaccctgactgtgtctgtgtccctgagcgcctctgtgtccctgggcatgctgtacatgcccaaggtgtacatcatcctcttccaccctgagcagaatgtgcccaagaggaagaggagcctgaaggctgtggtgacagctgccaccatgagcaacaagttcacccagaagggcaacttccggcccaacggggaggccaagtctgagctgtgtgagaacctggaggccccagccctggccaccaagcagacctacgtgacctacaccaaccacgccatctag

SEQ ID NO: 153996 - DNA, 2739 bp, synthetic construct
  misc_feature 1..2739: note = Description of Artificial Sequence: Synthetic coding sequence
  source 1..2739: mol_type = other DNA
atgcctgggaagaggggcctgggctggtggtgggcccggctgcccctgtgcctgctgctgagcctgtatggcccctggatgcccagcagcctgggcaagcccaagggccacccccacatgaacagcatcagaattgatggagacatcaccctgggcggcctcttccctgtgcacggccggggcagcgagggcaagccctgtggggagctgaagaaggagaagggcatccaccggctggaggccatgctgtttgccctggaccgcatcaacaatgaccctgacctgctgcccaacatcaccctgggcgcccgcatcctggacacctgcagccgggacacccacgccctggagcagagcctgacctttgtgcaggccctgattgagaaggatggaacagaggtgcgctgtggcagcggcggcccccccatcatcaccaagccagagcgggtggtgggcgtcatcggggccagcggcagctctgtgtccatcatggtggccaacatcctgcggctcttcaagatcccccagatctcctatgccagcacagccccagacctgagtgacaacagccgctatgacttcttcagccgggtggtgcccagcgacacctaccaggcccaggccatggtggacatcgtgcgggccctgaagtggaactacgtgtccacagtggccagcgagggcagctatggagagagcggcgtggaggccttcatccagaagagccgggaggatggaggagtgtgcatcgcccagagcgtgaagatcccccgggagcccaaggccggggagtttgacaagatcatccggcggctgctggagaccagcaatgcccgggccgtcatcatctttgccaatgaagatgacatcagaagagtgctggaggccgcccggcgggccaaccagacaggccacttcttctggatgggcagtgacagctggggcagcaagatcgcccctgtgctgcacctggaggaggtggccgagggcgctgtgaccatcctgcccaagaggatgtctgtgcggggctttgaccgctacttcagcagcaggaccctggacaacaacagaagaaacatctggtttgctgagttctgggaggacaacttccactgcaagctgagcagacatgccctgaagaagggcagccacgtgaagaagtgcaccaaccgggagcgcatcggccaggacagcgcctatgagcaggagggcaaggtgcagtttgtgattgatgctgtgtatgccatgggccacgccctgcacgccatgcaccgggacctgtgccccggccgggtgggcctgtgccccaggatggaccctgtggatggcacccagctgctgaagtacatcagaaatgtgaacttcagcggcattgctggcaaccctgtgaccttcaatgaaaatggagatgcccctggccgctatgacatctaccagtaccagctgagaaatgacagcgctgagtacaaggtgattggctcctggacagaccacctgcacctgagaattgaaagaatgcactggccaggcagcggccagcagctgcccaggagcatctgcagcctgccctgccagcccggggagaggaagaagacagtgaagggcatgccctgctgctggcactgtgagccctgcaccggctaccagtaccaggtggaccgctacacctgcaagacctgcccctatgacatgaggcccacagagaacagaacaggctgccggcccatccccatcatcaagctggagtggggcagcccctgggccgtgctgcccctcttcctggccgtggtgggcattgctgccaccctgtttgtggtgatcacctttgtgcgctacaatgacacccccatcgtgaaggccagcggccgggagctgtcctatgtgctgctggccggcatcttcctgtgctacgccaccaccttcctgatgattgctgagccagacctgggcacctgcagcctgcggcgcatcttcctgggcctgggcatgagcatctcctatgctgccctgctgaccaagaccaaccgcatctaccgcatctttgagcagggcaagaggtctgtgtctgccccccgcttcatcagccctgccagccagctggccatcaccttcagcctcatcagcctgcagctgctgggcatctgtgtgtggtttgtggtggaccccagccacagcgtggtggacttccaggaccagaggaccctggaccccaggtttgcccggggcgtgctgaagtgtgacatcagtgacctgagcctcatctgcctgctgggctacagcatgctgctgatggtgacctgcaccgtgtatgccatcaagacccggggcgtgcctgagaccttcaatgaggccaagcccatcggcttcaccatgtacaccacctgcatcgtgtggctggccttcatccccatcttcttcggcaccagccagagcgctgacaagctgtacatccagaccaccaccctgactgtgtctgtgtccctgagcgcctctgtgtccctgggcatgctgtacatgcccaaggtgtacatcatcctcttccaccctgagcagaatgtgcccaagaggaagaggagcctgaaggctgtggtgacagctgccaccatgagcaacaagttcacccagaagggcaacttccggcccaacggggaggccaagtctgagctgtgtgagaacctggaggccccagccctggccaccaagcagacctacgtgacctacaccaaccacgccatctag

SEQ ID NO: 153997 - DNA, 2319 bp, synthetic construct
  misc_feature 1..2319: note = Description of Artificial Sequence: Synthetic coding sequence
  source 1..2319: mol_type = other DNA
atggtgcagaccctgcccaagctgttcccccatgatggagccaagaggaagaagaggaccctgcggaccagcggcccctgcttcggcggcggcggccagatcccccagatctcctatgccagcacagccccagacctgagtgacaacagccgctatgacttcttcagccgggtggtgcccagcgacacctaccaggcccaggccatggtggacatcgtgcgggccctgaagtggaactacgtgtccacagtggccagcgagggcagctatggagagagcggcgtggaggccttcatccagaagagccgggaggatggaggagtgtgcatcgcccagagcgtgaagatcccccgggagcccaaggccggggagtttgacaagatcatccggcggctgctggagaccagcaatgcccgggccgtcatcatctttgccaatgaagatgacatcagaagagtgctggaggccgcccggcgggccaaccagacaggccacttcttctggatgggcagtgacagctggggcagcaagatcgcccctgtgctgcacctggaggaggtggccgagggcgctgtgaccatcctgcccaagaggatgtctgtgcggggctttgaccgctacttcagcagcaggaccctggacaacaacagaagaaacatctggtttgctgagttctgggaggacaacttccactgcaagctgagcagacatgccctgaagaagggcagccacgtgaagaagtgcaccaaccgggagcgcatcggccaggacagcgcctatgagcaggagggcaaggtgcagtttgtgattgatgctgtgtatgccatgggccacgccctgcacgccatgcaccgggacctgtgccccggccgggtgggcctgtgccccaggatggaccctgtggatggcacccagctgctgaagtacatcagaaatgtgaacttcagcggcattgctggcaaccctgtgaccttcaatgaaaatggagatgcccctggccgctatgacatctaccagtaccagctgagaaatgacagcgctgagtacaaggtgattggctcctggacagaccacctgcacctgagaattgaaagaatgcactggccaggcagcggccagcagctgcccaggagcatctgcagcctgccctgccagcccggggagaggaagaagacagtgaagggcatgccctgctgctggcactgtgagccctgcaccggctaccagtaccaggtggaccgctacacctgcaagacctgcccctatgacatgaggcccacagagaacagaacaggctgccggcccatccccatcatcaagctggagtggggcagcccctgggccgtgctgcccctcttcctggccgtggtgggcattgctgccaccctgtttgtggtgatcacctttgtgcgctacaatgacacccccatcgtgaaggccagcggccgggagctgtcctatgtgctgctggccggcatcttcctgtgctacgccaccaccttcctgatgattgctgagccagacctgggcacctgcagcctgcggcgcatcttcctgggcctgggcatgagcatctcctatgctgccctgctgaccaagaccaaccgcatctaccgcatctttgagcagggcaagaggtctgtgtctgccccccgcttcatcagccctgccagccagctggccatcaccttcagcctcatcagcctgcagctgctgggcatctgtgtgtggtttgtggtggaccccagccacagcgtggtggacttccaggaccagaggaccctggaccccaggtttgcccggggcgtgctgaagtgtgacatcagtgacctgagcctcatctgcctgctgggctacagcatgctgctgatggtgacctgcaccgtgtatgccatcaagacccggggcgtgcctgagaccttcaatgaggccaagcccatcggcttcaccatgtacaccacctgcatcgtgtggctggccttcatccccatcttcttcggcaccagccagagcgctgacaagctgtacatccagaccaccaccctgactgtgtctgtgtccctgagcgcctctgtgtccctgggcatgctgtacatgcccaaggtgtacatcatcctcttccaccctgagcagaatgtgcccaagaggaagaggagcctgaaggctgtggtgacagctgccaccatgagcaacaagttcacccagaagggcaacttccggcccaacggggaggccaagtctgagctgtgtgagaacctggaggccccagccctggccaccaagcagacctacgtgacctacaccaaccacgccatctag

SEQ ID NO: 153998 - DNA, 2340 bp, synthetic construct
  misc_feature 1..2340: note = Description of Artificial Sequence: Synthetic coding sequence
  source 1..2340: mol_type = other DNA
atggctgtgcccctgggcgccccctgctgggccagcgccctgcctgcctgggcccctcctggcctgccccacaggagcctgctgacccggctgctgagccagcacgtgaagccagccaagatcccccagatctcctatgccagcacagccccagacctgagtgacaacagccgctatgacttcttcagccgggtggtgcccagcgacacctaccaggcccaggccatggtggacatcgtgcgggccctgaagtggaactacgtgtccacagtggccagcgagggcagctatggagagagcggcgtggaggccttcatccagaagagcagagaagatggcggcgtgtgcatcgcccagagcgtgaagatcccccgggagcccaaggccggggagtttgacaagatcatccggcggctgctggagaccagcaatgcccgggctgtgatcatctttgccaatgaagatgacatccggcgggtgctggaggccgcccggcgggccaaccagacaggccacttcttctggatgggcagtgacagctggggcagcaagatcgcccctgtgctgcacctggaggaggtggccgagggcgctgtgaccatcctgcccaagaggatgtctgtgcggggctttgaccgctacttcagcagcaggaccctggacaacaacagaagaaacatctggtttgctgagttctgggaggacaacttccactgcaagctgagcagacatgccctgaagaagggcagccacgtgaagaagtgcaccaaccgggagagaattggccaggacagcgcctatgagcaggagggcaaggtgcagtttgtgattgatgctgtgtatgccatgggccacgccctgcacgccatgcaccgggacctgtgccccggccgggtgggcctgtgccccaggatggaccctgtggatggcacccagctgctgaagtacatcagaaatgtgaacttctctggaattgctggcaaccctgtgaccttcaatgaaaatggagatgcccctggccgctatgacatctaccagtaccagctgagaaatgattctgctgagtacaaggtgattggctcctggacagaccacctgcacctgcgcatcgagaggatgcactggccaggcagcggccagcagctgcccaggagcatctgcagcctgccctgccagcctggagagaggaagaagacagtgaagggcatgccctgctgctggcactgtgagccctgcaccggctaccagtaccaggtggaccgctacacctgcaagacctgcccctatgacatgaggcccacagaaaatagaacaggctgccggcccatccccatcatcaagctggagtggggcagcccctgggccgtgctgcccctcttcctggccgtggtgggcattgctgccaccctgtttgtggtgatcacctttgtgcgctacaatgacacccccatcgtgaaggccagcggccgggagctgtcctatgtgctgctggccggcatcttcctgtgctacgccaccaccttcctgatgattgctgagccagacctgggcacctgcagcctgcggcgcatcttcctgggcctgggcatgagcatctcctatgctgccctgctgaccaagaccaaccgcatctaccgcatctttgagcagggcaagaggtctgtgtctgccccccgcttcatcagccctgccagccagctggccatcaccttcagcctcatcagcctgcagctgctgggcatctgtgtgtggtttgtggtggaccccagccacagcgtggtggacttccaggaccagaggaccctggaccccaggtttgcccggggcgtgctgaagtgtgacatcagtgacctgagcctcatctgcctgctgggctacagcatgctgctgatggtgacctgcaccgtgtatgccatcaagacccggggcgtgcctgagaccttcaatgaggccaagcccatcggcttcaccatgtacaccacctgcatcgtgtggctggccttcatccccatcttcttcggcaccagccagagcgctgacaagctgtacatccagaccaccaccctgactgtgtctgtgtccctgagcgcctctgtgtccctgggcatgctgtacatgcccaaggtgtacatcatcctcttccaccctgagcagaatgtgcccaagaggaagaggagcctgaaggctgtggtgacagctgccaccatgagcaacaagttcacccagaagggcaacttccggcccaatggagaggccaagtctgagctgtgtgagaacctggaggccccagccctggccaccaagcagacctacgtgacctacaccaaccacgccatctag

SEQ ID NO: 153999 - DNA, 2739 bp, synthetic construct; identical to SEQ ID NO: 153996
  misc_feature 1..2739: note = Description of Artificial Sequence: Synthetic coding sequence
  source 1..2739: mol_type = other DNA

SEQ ID NO: 154000 - DNA, 2232 bp, synthetic construct
  misc_feature 1..2232: note = Description of Artificial Sequence: Synthetic coding sequence
  source 1..2232: mol_type = other DNA
atgagctgcaagatcccccagatctcctatgccagcacagccccagacctgagtgacaacagccgctatgacttcttcagccgggtggtgcccagcgacacctaccaggcccaggccatggtggacatcgtgcgggccctgaagtggaactacgtgtccacagtggccagcgagggcagctatggagagagcggcgtggaggccttcatccagaagagcagagaagatggcggcgtgtgcatcgcccagagcgtgaagatcccccgggagcccaaggccggggagtttgacaagatcatccggcggctgctggagaccagcaatgcccgggctgtgatcatctttgccaatgaagatgacatccggcgggtgctggaggccgcccggcgggccaaccagacaggccacttcttctggatgggcagtgacagctggggcagcaagatcgcccctgtgctgcacctggaggaggtggccgagggcgctgtgaccatcctgcccaagaggatgtctgtgcggggctttgaccgctacttcagcagcaggaccctggacaacaacagaagaaacatctggtttgctgagttctgggaggacaacttccactgcaagctgagcagacatgccctgaagaagggcagccacgtgaagaagtgcaccaaccgggagagaattggccaggacagcgcctatgagcaggagggcaaggtgcagtttgtgattgatgctgtgtatgccatgggccacgccctgcacgccatgcaccgggacctgtgccccggccgggtgggcctgtgccccaggatggaccctgtggatggcacccagctgctgaagtacatcagaaatgtgaacttctctggaattgctggcaaccctgtgaccttcaatgaaaatggagatgcccctggccgctatgacatctaccagtaccagctgagaaatgattctgctgagtacaaggtgattggctcctggacagaccacctgcacctgcgcatcgagaggatgcactggccaggcagcggccagcagctgcccaggagcatctgcagcctgccctgccagcctggagagaggaagaagacagtgaagggcatgccctgctgctggcactgtgagccctgcaccggctaccagtaccaggtggaccgctacacctgcaagacctgcccctatgacatgaggcccacagaaaatagaacaggctgccggcccatccccatcatcaagctggagtggggcagcccctgggccgtgctgcccctcttcctggccgtggtgggcattgctgccaccctgtttgtggtgatcacctttgtgcgctacaatgacacccccatcgtgaaggccagcggccgggagctgtcctatgtgctgctggccggcatcttcctgtgctacgccaccaccttcctgatgattgctgagccagacctgggcacctgcagcctgcggcgcatcttcctgggcctgggcatgagcatctcctatgctgccctgctgaccaagaccaaccgcatctaccgcatctttgagcagggcaagaggtctgtgtctgccccccgcttcatcagccctgccagccagctggccatcaccttcagcctcatcagcctgcagctgctgggcatctgtgtgtggtttgtggtggaccccagccacagcgtggtggacttccaggaccagaggaccctggaccccaggtttgcccggggcgtgctgaagtgtgacatcagtgacctgagcctcatctgcctgctgggctacagcatgctgctgatggtgacctgcaccgtgtatgccatcaagacccggggcgtgcctgagaccttcaatgaggccaagcccatcggcttcaccatgtacaccacctgcatcgtgtggctggccttcatccccatcttcttcggcaccagccagagcgctgacaagctgtacatccagaccaccaccctgactgtgtctgtgtccctgagcgcctctgtgtccctgggcatgctgtacatgcccaaggtgtacatcatcctcttccaccctgagcagaatgtgcccaagaggaagaggagcctgaaggctgtggtgacagctgccaccatgagcaacaagttcacccagaagggcaacttccggcccaatggagaggccaagtctgagctgtgtgagaacctggaggccccagccctggccaccaagcagacctacgtgacctacaccaaccacgccatctag

SEQ ID NO: 154001 - DNA, 1776 bp, synthetic construct
  misc_feature 1..1776: note = Description of Artificial Sequence: Synthetic coding sequence
  source 1..1776: mol_type = other DNA
atgggcagtgacagctggggcagcaagatcgcccctgtgctgcacctggaggaggtggccgagggcgctgtgaccatcctgcccaagaggatgtctgtgcggggctttgaccgctacttcagcagcaggaccctggacaacaacagaagaaacatctggtttgctgagttctgggaggacaacttccactgcaagctgagcagacatgccctgaagaagggcagccacgtgaagaagtgcaccaaccgggagcgcatcggccaggacagcgcctatgagcaggagggcaaggtgcagtttgtgattgatgctgtgtatgccatgggccacgccctgcacgccatgcaccgggacctgtgccccggccgggtgggcctgtgccccaggatggaccctgtggatggcacccagctgctgaagtacatcagaaatgtgaacttcagcggcattgctggcaaccctgtgaccttcaatgaaaatggagatgcccctggccgctatgacatctaccagtaccagctgagaaatgacagcgctgagtacaaggtgattggctcctggacagaccacctgcacctgagaattgaaagaatgcactggccaggcagcggccagcagctgcccaggagcatctgcagcctgccctgccagcccggggagaggaagaagacagtgaagggcatgccctgctgctggcactgtgagccctgcaccggctaccagtaccaggtggaccgctacacctgcaagacctgcccctatgacatgaggcccacagagaacagaacaggctgccggcccatccccatcatcaagctggagtggggcagcccctgggccgtgctgcccctcttcctggccgtggtgggcattgctgccaccctgtttgtggtgatcacctttgtgcgctacaatgacacccccatcgtgaaggccagcggccgggagctgtcctatgtgctgctggccggcatcttcctgtgctacgccaccaccttcctgatgattgctgagccagacctgggcacctgcagcctgcggcgcatcttcctgggcctgggcatgagcatctcctatgctgccctgctgaccaagaccaaccgcatctaccgcatctttgagcagggcaagaggtctgtgtctgccccccgcttcatcagccctgccagccagctggccatcaccttcagcctcatcagcctgcagctgctgggcatctgtgtgtggtttgtggtggaccccagccacagcgtggtggacttccaggaccagaggaccctggaccccaggtttgcccggggcgtgctgaagtgtgacatcagtgacctgagcctcatctgcctgctgggctacagcatgctgctgatggtgacctgcaccgtgtatgccatcaagacccggggcgtgcctgagaccttcaatgaggccaagcccatcggcttcaccatgtacaccacctgcatcgtgtggctggccttcatccccatcttcttcggcaccagccagagcgctgacaagctgtacatccagaccaccaccctgactgtgtctgtgtccctgagcgcctctgtgtccctgggcatgctgtacatgcccaaggtgtacatcatcctcttccaccctgagcagaatgtgcccaagaggaagaggagcctgaaggctgtggtgacagctgccaccatgagcaacaagttcacccagaagggcaacttccggcccaacggggaggccaagtctgagctgtgtgagaacctggaggcccctggcagcagctag

SEQ ID NO: 154002 - DNA, 2364 bp, synthetic construct
  misc_feature 1..2364: note = Description of Artificial Sequence: Synthetic coding sequence
  source 1..2364: mol_type = other DNA
atggagcctgctggggagcgcttccctgagcagaggcaggtgctgatcctgctgctgctgctggaggtgaccctggccggctgggagccccggcgctacagcgtgatggaggagacagagcggggcagctttgtggccaacctggccaatgacctgggcctgggcgtgggggagctggccgagcggggggcccgggtggtgtctgaagataatgagcagggcctgcagctggacctgcagacaggccagctgatcctgaatgagaagctggaccgggagaagctgtgtggccccacagagccctgcatcatgcacttccaggtgctgctgaagaagcccctggaggtgttccgggcagagctgctggtgacagacatcaatgaccacagccctgagttccctgagcgggagatgaccctgaagatccctgagaccagcagcctgggcaccgtcttccccctgaagaaggcccgggacctggatgtgggcagcaacaacgtgcagaactacaacatcagccccaacagccacttccacgtgtccaccaggaccagaggagatggcaggaagtacccagagctggtgctggacacagagctggaccgggaggagcaggccgagctgcggctgaccctgacagctgtggatggcggcagcccccccaggtctggaacagtgcagatcctgatcctggtgctggatgccaatgacaatgcccctgagtttgtgcaggccctgtatgaggtgcaggtgcctgagaacagccctgtgggcagcctggtggtgaaggtgtctgcccgggacctggacaccggcaccaacggggagatctcctacagcctgtactacagcagccaggagattgacaagccctttgagctgagcagcctgagcggggagatccgcctcatcaagaagctggactttgagaccatgagcagctatgacctggacatcgaggccagtgatggcggcggcctgagcggcaagtgcagcgtgtctgtgaaggtgctggatgtgaatgacaacttccctgagctgagcatcagcagcctgaccagccccatccctgagaacagccctgagacagaggtggccctcttccgcatccgggaccgggacagcggagaaaatggcaagatgatctgcagcatccaggatgatgtgcccttcaagctgaagcccagcgtggagaacttctaccgcctggtgacagaaggagccctggaccgggagaccagggctgagtacaacatcaccatcaccatcacagacctgggcaccccccggctgaagacagagcagagcatcaccgtgctggtgtctgatgtgaatgacaatgccccagccttcacccagaccagctacaccctgtttgtgcgggagaacaacagccctgccctgcacatcggctctgtgtctgccacagaccgggacagcggcaccaatgcccaggtgacctacagcctgctgcccccccgggacccccacctgcccctgaccagcctggtgtccatcaacacagacaatggccacctgtttgccctgcagagcctggactatgaggccctgcaggcctttgagttccgggtgggcgccacagaccggggcttccctgccctgagcagcgaggccctggtgcgggtgctggtgctggatgccaatgacaacagcccctttgtgctgtaccccctgcagaatggaagtgccccctgcacagagctggtgcccagggctgctgagcccggctacctggtgaccaaggtggtggccgtggatggagacagcggccagaatgcctggctgagctaccagctgctgaaggccacagagcccggcctgtttggagtgtgggcccacaatggagaggtgaggacagcccggctgctgtctgaaagagatgtggccaagcaccggctggtggtgctggtgaaggacaatggagagccccccaggtctgccacagccaccctgcaggtgctgctggtggatggcttcagccagccctacctgcccctgcctgaggccgccccagcccaggcccaggccgacagcctgactgtgtacctggtggtggccctggcctctgtgagcagcctcttcctgttcagcgtcttcctgtttgtggccgtgcggctgtgcagaagaagcagagctgcctctgtgggccgctgcagcgtgcctgagggccccttccctggccacctggtggatgtgtctggcaccggcaccctgagccagagctaccagtatgaggtgtgcctgaccggcggcagcgagagcaatgacttcaagttcctgaagcccatcttccccaacatcgtgtcccaggacagcaggaggaagtctgagttcctggagtag

SEQ ID NO: 154003 - DNA, 3276 bp, synthetic construct
  misc_feature 1..3276: note = Description of Artificial Sequence: Synthetic coding sequence
  source 1..3276: mol_type = other DNA
atgcagctggatggcctgcaggccctgtgctggggcagcctcttccgcacccagctggtgcctgtgtatgtggccgtgctgcccagcccccagccctgcatcccccccacctgcacagccttcacagagttcagcggccccctggccaagcaccacagcttccagcccttccaggtggccgccccagctggccccaggagccccccccagcccttccacctgcccagcgtgtcccaggtgcacgccacccacctgctgtgccctgtgcgggtgctgggccccccctacccacccagcctggagctgctgaccagcatccacagccctgctgtgctgcctgccccccagatcccccagatctcctatgccagcacagcccctgagctgagtgacagcaccaggtatgacttcttcagccgggtggtgcccccagacagctaccaggcccaggccatggtggacatcgtgcgggccctgggctggaactacgtgtccaccctggccagcgagggcaactatggagagagcggcgtggaggcctttgtgcagatcagccgggaggccggggagctgggcgcccccaggcaccagggcgtgtacatcgtgtgggcccggggcccccagctgggccagaagcagaaggatggcggccccaggtccatgctgggccggggctgcctggccggggccccctgtggccgggacctgtttgtgctggatgacagcgccctgccccaggcctggaggagagtgcaggcccggctgcacccctgccggcccttcagccagcccacccagagcagcgctgctgtggcccgctggagcatcaagatcccccgggagcccaagccaggagagttcagcaaggtgatccggcggctgatggagaccccaaatgcccggggcatcatcatctttgccaatgaagatgacatcagccctgcccccacccggcgggtgctggaggccgcccggcaggccaacctgaccggccacttcctgtgggtgggcagtgacagctggggcgccaagaccagccccatcctgagcctggaggatgtggccgtgggcgccatcaccatcctgcccaagagggccagcattgatggctttgaccagtacttcatgaccaggagcctggagaacaacagaagaaacatctggtttgctgagttctgggaggagaacttcaactgcaagctgaccagcagcggcacccagagtgatgacagcaccaggaagtgcaccggggagagctgccccggctggacaggagaggagagaattggccgggacagcacctatgagcaggagggcaaggtgcagtttgtgattgatgctgtgtatgccatcgcccacgccctgcacagcatgcaccaggccctgtgccccggccacacaggcctgtgcccagccatggagcccacagatggccgcatgctgctgcagtacatccgctgccccctgcagtggctgaaccgcatccccctgtgtgagtggccccggcgggtgcggcccttcttctgccagtggaccctgggcctgctgagcagctgtggctacgtgaacaatgctgctgtgaatgtggccgtgcaggccttcctggccaccctgctgagcagcctgagcagcatctacccaggagtggagctgctgggccacgtgttcaacctgctgcggcggctgcacacagtgttctgcagcggctgcagcctcttcccccccaccgtgcacaagggcagcgctggcacccctgtgatgtttaatgaaaatggagatgcccctggccgctatgacatcttccagtaccaggccaccaatggaagtgccagcagcggcggctaccaggccgtgggccagtgggccgagaccctgcggctggatgtgtctgtgcagacagagccccaggtgggcatgggccctggcagccggcggcagaccccccagcccgtcttctgtgccagccaggtggaggccctgcagtggagcggggacccccatgaggtgcccagcagcctgtgcagcctgccctgtggccctggagagaggaagaagatggtgaagggcgtgccctgctgctggcactgtgaggcctgtgatggctaccgcttccaggtggatgagttcacctgtgaggcctgccctggggacatgaggcccacccccaaccacacaggctgccggcccacccctgtggtgcggctgtcctggagcagcccctgggccgccccacccctgctgctggccgtgctgggcatcgtggccaccaccaccgtggtggccacctttgtgcgctacaacaacacccccatcgtgcgggccagcggccgggagctgtcctatgtgctgctgaccggcatcttcctgatctatgccatcaccttcctgatggtggccgagcctggagctgctgtgtgtgccgcccggcggctcttcctgggcctgggcaccaccctgagctacagcgccctgctgaccaagaccaaccgcatctaccgcatctttgagcagggcaagaggtctgtgaccccaccacccttcatcagccccaccagccagctggtgatcaccttcagcctgaccagcctgcagatcaatgctgtgttccgggtgaccctcttctacttcggcagcctgcagtggcactacctgagcagcctgcaggccctgcccagcggggacctgtctgtgcagcacctgagcgcctctgtgtccctgggcatgctgtacagcaagagcaagacccctgtggacctggaggtgggcagcgagccctggggctacctgggagatggagtgctgcaggccgagcactggggcgagggccgcggggactggccccacgtgaaggtgatggtggtggtgtaccagagcagcctggtgtactacatgaagcaggcccaggccggccgggtgaagacagagctgctgaaggtggcccaccaccaggtggccaagtctgtgcctgaggagagccagatcgtggtgctgcacctggtgacagctggctacgtggacatggccatccgcaccacccgggccagcctgcacctgatgcccctgaccctggtgcctggagctgctgctgaggtgaatgagacccaggtggccgcccggctgggccctggcagcacagtgggcacctaccaggtggtggtggtgctgatgaggagcctgcagattgacaagaccaccaaccagctgagcctggagacctgcttcagcggcatccagggcttcctggcctctgtgaacagcctggtgatggacaagtag

SEQ ID NO: 154004 - DNA, 2634 bp, synthetic construct
  misc_feature 1..2634: note = Description of Artificial Sequence: Synthetic coding sequence
  source 1..2634: mol_type = other DNA
atggcccggccccggcgggcccgggagcccctgctggtggccctgctgcccctggcctggctggcccaggccggcctggcccgggccgccggctctgtgcggctggccggcggcctgaccctgggcggcctcttccctgtgcacgcccggggagctgctggccgggcctgtggccagctgaagaaggagcagggcgtgcaccggctggaggccatgctgtatgccctggacagagtgaatgctgaccctgagctgctgcccggggtgcggctgggcgcccggctgctggacacctgcagccgggacacctacgccctggagcaggccctgagctttgtgcaggccctgatccggggcagaggagatggagatgaggtgggcgtgcgctgccctggaggagtgccccccctgcggcctgcccctcctgagcgggtggtggccgtggtgggcgccagcgccagctctgtgtccatcatggtggccaacgtgctgcggctgtttgccatcccccagatctcctatgccagcacagcccctgagctgagtgacagcaccaggtatgacttcttcagccgggtggtgcccccagacagctaccaggcccaggccatggtggacatcgtgcgggccctgggctggaactacgtgtccaccctggccagcgagggcaactatggagagagcggcgtggaggcctttgtgcagatcagccgggaggccggcggcgtgtgcatcgcccagagcatcaagatcccccgggagcccaagccaggagagttcagcaaggtgatccggcggctgatggagaccccaaatgcccggggcatcatcatctttgccaatgaagatgacatccggcgggtgctggaggccgcccggcaggccaacctgaccggccacttcctgtgggtgggcagtgacagctggggcgccaagaccagccccatcctgagcctggaggatgtggccgtgggcgccatcaccatcctgcccaagagggccagcattgatggctttgaccagtacttcatgaccaggagcctggagaacaacagaagaaacatctggtttgctgagttctgggaggagaacttcaactgcaagctgaccagcagcggcacccagagtgatgacagcaccaggaagtgcaccggggaggagagaattggccgggacagcacctatgagcaggagggcaaggtgcagtttgtgattgatgctgtgtatgccatcgcccacgccctgcacagcatgcaccaggccctgtgccccggccacacaggcctgtgcccagccatggagcccacagatggccgcatgctgctgcagtacatccgggctgtgcgcttcaatggatctgctggcacccctgtgatgtttaatgaaaatggagatgcccctggccgctatgacatcttccagtaccaggccaccaatggaagtgccagcagcggcggctaccaggccgtgggccagtgggccgagaccctgcggctggatgtggaggccctgcagtggagcggggacccccatgaggtgcccagcagcctgtgcagcctgccctgtggccctggagagaggaagaagatggtgaagggcgtgccctgctgctggcactgtgaggcctgtgatggctaccgcttccaggtggatgagttcacctgtgaggcctgccctggggacatgaggcccacccccaaccacacaggctgccggcccacccctgtggtgcggctgtcctggagcagcccctgggccgccccacccctgctgctggccgtgctgggcatcgtggccaccaccaccgtggtggccacctttgtgcgctacaacaacacccccatcgtgcgggccagcggccgggagctgtcctatgtgctgctgaccggcatcttcctgatctatgccatcaccttcctgatggtggccgagcctggagctgctgtgtgtgccgcccggcggctcttcctgggcctgggcaccaccctgagctacagcgccctgctgaccaagaccaaccgcatctaccgcatctttgagcagggcaagaggtctgtgaccccaccacccttcatcagccccaccagccagctggtgatcaccttcagcctgaccagcctgcaggtggtgggcatgattgcctggctgggcgcccggcccccccacagcgtgattgattatgaggagcagaggacagtggaccctgagcaggcccggggcgtgctgaagtgtgacatgtctgacctgagcctcatcggctgcctgggctacagcctgctgctgatggtgacctgcaccgtgtatgccatcaaggcccggggcgtgcctgagaccttcaatgaggccaagcccatcggcttcaccatgtacaccacctgcatcatctggctggcctttgtgcccatcttcttcggcacagcccagagcgctgagaagatctacatccagaccaccaccctgactgtgtccctgagcctgagcgcctctgtgtccctgggcatgctgtatgtgcccaagacctacgtgatcctcttccaccctgagcagaatgtgcagaagaggaagaggagcctgaaggccaccagcacagtggccgccccacccaagggagaagatgctgaggcccacaagtag

SEQ ID NO: 154005 - DNA, 2748 bp, synthetic construct
  misc_feature 1..2748: note = Description of Artificial Sequence: Synthetic coding sequence
  source 1..2748: mol_type = other DNA
atggtgcagctgaggaagctgctgcgggtgctgaccctgatgaagttcccctgctgcgtgctggaggtgctgctgtgtgccctggccgctgctgcccggggccaggagatgtatgccccccacagcatcagaattgaaggagatgtgaccctgggcggcctcttccctgtgcacgccaagggccccagcggcgtgccctgtggggacatcaagagagaaaatggcatccaccggctggaggccatgctgtatgccctggaccagatcaacagcgaccccaacctgctgcccaacgtgaccctgggcgcccgcatcctggacacctgcagccgggacacctacgccctggagcagagcctgacctttgtgcaggccctgatccagaaggacaccagtgatgtgcgctgcaccaacggggagccccctgtgtttgtgaagccagagaaggtggtgggcgtcatcggggccagcggcagctctgtgtccatcatggtggccaacatcctgcggctcttccagatcccccagatctcctatgccagcacagcccctgagctgagtgatgaccggcgctatgacttcttcagccgggtggtgcccccagacagcttccaggcccaggccatggtggacatcgtgaaggccctgggctggaactacgtgtccaccctggccagcgagggcagctatggagagaagggcgtggagagcttcacccagatcagcaaggaggccggcggcctgtgcatcgcccagagcgtgcgcatcccccaggagaggaaggacaggaccatcgactttgaccgcatcatcaagcagctgctggacacccccaacagcagagctgtggtgatctttgccaatgatgaggacatcaagcagatcctggccgccgccaagagagctgaccaggtgggccacttcctgtgggtgggcagtgacagctggggcagcaagatcaaccccctgcaccagcatgaagatattgctgagggcgccatcaccatccagcccaagagggccaccgtggagggctttgatgcctacttcaccagcaggaccctggagaacaacagaagaaatgtgtggtttgctgagtactgggaggagaacttcaactgcaagctgaccatcagcggcagcaagaaggaggacacagacagaaaatgtacaggccaggagcgcatcggcaaggacagcaactatgagcaggagggcaaggtgcagtttgtgattgatgctgtgtatgccatggcccacgccctgcaccacatgaacaaggacctgtgtgccgactacagaggagtgtgcccagagatggagcaggccggcggcaagaagctgctgaagtacatcagaaatgtgaacttcaacggcagcgctggcacccctgtgatgttcaacaagaatggagatgcccctggccgctatgacatcttccagtaccagaccaccaacaccagcaaccctggctaccgcctgattggccagtggacagatgagctgcagctgaacatcgaggacatgcagtggggcaaaggagtgcgggagatcccagcctctgtgtgcaccctgccctgcaagccaggccagaggaagaagacccagaagggcaccccctgctgctggacctgtgagccctgtgatggctaccagtaccagtttgatgagatgacctgccagcactgcccctatgaccagaggcccaatgaaaatagaacaggctgccaggacatccccatcatcaagctggagtggcacagcccctgggccgtcatccctgtgttcctggccatgctgggcatcatcgccaccatctttgtgatggccaccttcatccgctacaatgacacccccatcgtgcgggccagcggccgggagctgtcctatgtgctgctgaccggcatcttcctgtgctacatcatcaccttcctgatgattgccaagccagatgtggccgtgtgcagcttccggcgggtcttcctgggcctgggcatgtgcatctcctatgctgccctgctgaccaagaccaaccgcatctaccgcatctttgagcagggcaagaagtctgtgacagcccccaggctcatcagccccaccagccagctggccatcaccagcagcctcatctctgtgcagctgctgggcgtcttcatctggtttggagtggacccccccaacatcatcatcgactatgatgagcacaagaccatgaaccctgagcaggcccggggcgtgctgaagtgtgacatcacagacctgcagatcatctgcagcctgggctacagcatcctgctgatggtgacctgcaccgtgtatgccatcaagacccggggcgtgcctgagaacttcaatgaggccaagcccatcggcttcaccatgtacaccacctgcatcgtgtggctggccttcatccccatcttctttggaacagcccagagcgctgagaagctgtacatccagaccaccaccctgaccatctccatgaacctgagcgcctctgtggccctgggcatgctgtacatgcccaaggtgtacatcatcatcttccaccctgagctgaatgtgcagaagaggaagaggagcttcaaggctgtggtgacagctgccaccatgagcagccggctgagccacaagcccagcgaccggcccaatggagaggccaagacagagctgtgtgaaaatgtggaccccaacagccctgctgccaagaagaagtatgtgtcctacaacaacctggtgatctag

SEQ ID NO: 154006 - DNA, 2721 bp, synthetic construct
  misc_feature 1..2721: note = Description of Artificial Sequence: Synthetic coding sequence
  source 1..2721: mol_type = other DNA
atggtgcagctgaggaagctgctgcgggtgctgaccctgatgaagttcccctgctgcgtgctggaggtgctgctgtgtgccctggccgctgctgcccggggccaggagatgtatgccccccacagcatcagaattgaaggagatgtgaccctgggcggcctcttccctgtgcacgccaagggccccagcggcgtgccctgtggggacatcaagagagaaaatggcatccaccggctggaggccatgctgtatgccctggaccagatcaacagcgaccccaacctgctgcccaacgtgaccctgggcgcccgcatcctggacacctgcagccgggacacctacgccctggagcagagcctgacctttgtgcaggccctgatccagaaggacaccagtgatgtgcgctgcaccaacggggagccccctgtgtttgtgaagccagagaaggtggtgggcgtcatcggggccagcggcagctctgtgtccatcatggtggccaacatcctgcggctcttccagatcccccagatctcctatgccagcacagcccctgagctgagtgatgaccggcgctatgacttcttcagccgggtggtgcccccagacagcttccaggcccaggccatggtggacatcgtgaaggccctgggctggaactacgtgtccaccctggccagcgagggcagctatggagagaagggcgtggagagcttcacccagatcagcaaggaggccggcggcctgtgcatcgcccagagcgtgcgcatcccccaggagaggaaggacaggaccatcgactttgaccgcatcatcaagcagctgctggacacccccaacagcagagctgtggtgatctttgccaatgatgaggacatcaagcagatcctggccgccgccaagagagctgaccaggtgggccacttcctgtgggtgggcagtgacagctggggcagcaagatcaaccccctgcaccagcatgaagatattgctgagggcgccatcaccatccagcccaagagggccaccgtggagggctttgatgcctacttcaccagcaggaccctggagaacaacagaagaaatgtgtggtttgctgagtactgggaggagaacttcaactgcaagctgaccatcagcggcagcaagaaggaggacacagacagaaaatgtacaggccaggagcgcatcggcaaggacagcaactatgagcaggagggcaaggtgcagtttgtgattgatgctgtgtatgccatggcccacgccctgcaccacatgaacaaggacctgtgtgccgactacagaggagtgtgcccagagatggagcaggccggcggcaagaagctgctgaagtacatcagaaatgtgaacttcaacggcagcgctggcacccctgtgatgttcaacaagaatggagatgcccctggccgctatgacatcttccagtaccagaccaccaacaccagcaaccctggctaccgcctgattggccagtggacagatgagctgcagctgaacatcgaggacatgcagtggggcaaaggagtgcgggagatcccagcctctgtgtgcaccctgccctgcaagccaggccagaggaagaagacccagaagggcaccccctgctgctggacctgtgagccctgtgatggctaccagtaccagtttgatgagatgacctgccagcactgcccctatgaccagaggcccaatgaaaatagaacaggctgccaggacatccccatcatcaagctggagtggcacagcccctgggccgtcatccctgtgttcctggccatgctgggcatcatcgccaccatctttgtgatggccaccttcatccgctacaatgacacccccatcgtgcgggccagcggccgggagctgtcctatgtgctgctgaccggcatcttcctgtgctacatcatcaccttcctgatgattgccaagccagatgtggccgtgtgcagcttccggcgggtcttcctgggcctgggcatgtgcatctcctatgctgccctgctgaccaagaccaaccgcatctaccgcatctttgagcagggcaagaagtctgtgacagcccccaggctcatcagccccaccagccagctggccatcaccagcagcctcatctctgtgcagctgctgggcgtcttcatctggtttggagtggacccccccaacatcatcatcgactatgatgagcacaagaccatgaaccctgagcaggcccggggcgtgctgaagtgtgacatcacagacctgcagatcatctgcagcctgggctacagcatcctgctgatggtgacctgcaccgtgtatgccatcaagacccggggcgtgcctgagaacttcaatgaggccaagcccatcggcttcaccatgtacaccacctgcatcgtgtggctggccttcatccccatcttctttggaacagcccagagcgctgagaagctgtacatccagaccaccaccctgaccatctccatgaacctgagcgcctctgtggccctgggcatgctgtacatgcccaaggtgtacatcatcatcttccaccctgagctgaatgtgcagaagaggaagaggagcttcaaggctgtggtgacagctgccaccatgagcagccggctgagccacaagcccagcgaccggcccaatggagaggccaagacagagctgtgtgaaaatgtggaccccaacagcgagaagtgcaactgctactag

SEQ ID NO: 154007 - DNA, 2769 bp, synthetic construct; identical to SEQ ID NO: 153895
  misc_feature 1..2769: note = Description of Artificial Sequence: Synthetic coding sequence
  source 1..2769: mol_type = other DNA

SEQ ID NO: 154008 - DNA, 2736 bp, synthetic construct
  misc_feature 1..2736: note = Description of Artificial Sequence: Synthetic coding sequence
  source 1..2736: mol_type = other DNA
atggtgcagctgaggaagctgctgcgggtgctgaccctgatgaagttcccctgctgcgtgctggaggtgctgctgtgtgccctggccgctgctgcccggggccaggagatgtatgccccccacagcatcagaattgaaggagatgtgaccctgggcggcctcttccctgtgcacgccaagggccccagcggcgtgccctgtggggacatcaagagagaaaatggcatccaccggctggaggccatgctgtatgccctggaccagatcaacagcgaccccaacctgctgcccaacgtgaccctgggcgcccgcatcctggacacctgcagccgggacacctacgccctggagcagagcctgacctttgtgcaggccctgatccagaaggacaccagtgatgtgcgctgcaccaacggggagccccctgtgtttgtgaagccagagaaggtggtgggcgtcatcggggccagcggcagctctgtgtccatcatggtggccaacatcctgcggctcttccagatcccccagatctcctatgccagcacagcccctgagctgagtgatgaccggcgctatgacttcttcagccgggtggtgcccccagacagcttccaggcccaggccatggtggacatcgtgaaggccctgggctggaactacgtgtccaccctggccagcgagggcagctatggagagaagggcgtggagagcttcacccagatcagcaaggaggccggcggcctgtgcatcgcccagagcgtgcgcatcccccaggagaggaaggacaggaccatcgactttgaccgcatcatcaagcagctgctggacacccccaacagcagagctgtggtgatctttgccaatgatgaggacatcaagcagatcctggccgccgccaagagagctgaccaggtgggccacttcctgtgggtgggcagtgacagctggggcagcaagatcaaccccctgcaccagcatgaagatattgctgagggcgccatcaccatccagcccaagagggccaccgtggagggctttgatgcctacttcaccagcaggaccctggagaacaacagaagaaatgtgtggtttgctgagtactgggaggagaacttcaactgcaagctgaccatcagcggcagcaagaaggaggacacagacagaaaatgtacaggccaggagcgcatcggcaaggacagcaactatgagcaggagggcaaggtgcagtttgtgattgatgctgtgtatgccatggcccacgccctgcaccacatgaacaaggacctgtgtgccgactacagaggagtgtgcccagagatggagcaggccggcggcaagaagctgctgaagtacatcagaaatgtgaacttcaacggcagcgctggcacccctgtgatgttcaacaagaatggagatgcccctggccgctatgacatcttccagtaccagaccaccaacaccagcaaccctggctaccgcctgattggccagtggacagatgagctgcagctgaacatcgaggacatgcagtggggcaaaggagtgcgggagatcccagcctctgtgtgcaccctgccctgcaagccaggccagaggaagaagacccagaagggcaccccctgctgctggacctgtgagccctgtgatggctaccagtaccagtttgatgagatgacctgccagcactgcccctatgaccagaggcccaatgaaaatagaacaggctgccaggacatccccatcatcaagctggagtggcacagcccctgggccgtcatccctgtgttcctggccatgctgggcatcatcgccaccatctttgtgatggccaccttcatccgctacaatgacacccccatcgtgcgggccagcggccgggagctgtcctatgtgctgctgaccggcatcttcctgtgctacatcatcaccttcctgatgattgccaagccagatgtggccgtgtgcagcttccggcgggtcttcctgggcctgggcatgtgcatctcctatgctgccctgctgaccaagaccaaccgcatctaccgcatctttgagcagggcaagaagtctgtgacagcccccaggctcatcagccccaccagccagctggccatcaccagcagcctcatctctgtgcagctgctgggcgtcttcatctggtttggagtggacccccccaacatcatcatcgactatgatgagcacaagaccatgaaccctgagcaggcccggggcgtgctgaagtgtgacatcacagacctgcagatcatctgcagcctgggctacagcatcctgctgatggtgacctgcaccgtgtatgccatcaagacccggggcgtgcctgagaacttcaatgaggccaagcccatcggcttcaccatgtacaccacctgcatcgtgtggctggccttcatccccatcttctttggaacagcccagagcgctgagaagctgtacatccagaccaccaccctgaccatctccatgaacctgagcgcctctgtggccctgggcatgctgtacatgcccaaggtgtacatcatcatcttccaccctgagctgaatgtgcagaagaggaagaggagcttcaaggctgtggtgacagctgccaccatgagcagccggctgagccacaagcccagcgaccggcccaatggagaggccaagacagagctgtgtgaaaatgtggaccccaacatcaccagcgaggacctgagcctgcacaaggaggactag

SEQ ID NO: 154009 - DNA, 2475 bp, synthetic construct
  misc_feature 1..2475: note = Description of Artificial Sequence: Synthetic coding sequence
  source 1..2475: mol_type = other DNA
atggtgcagctgaggaagctgctgcgggtgctgaccctgatgaagttcccctgctgcgtgctggaggtgctgctgtgtgccctggccgctgctgcccggggccaggagatgtatgccccccacagcatcagaattgaaggagatgtgaccctgggcggcctcttccctgtgcacgccaagggccccagcggcgtgccctgtggggacatcaagagagaaaatggcatccaccggctggaggccatgctgtatgccctggaccagatcaacagcgaccccaacctgctgcccaacgtgaccctgggcgcccgcatcctggacacctgcagccgggacacctacgccctggagcagagcctgacctttgtgcaggccctgatccagaaggacaccagtgatgtgcgctgcaccaacggggagccccctgtgtttgtgaagccagagaaggtggtgggcgtcatcggggccagcggcagctctgtgtccatcatggtggccaacatcctgcggctcttccagatcccccagatctcctatgccagcacagcccctgagctgagtgatgaccggcgctatgacttcttcagccgggtggtgcccccagacagcttccaggcccaggccatggtggacatcgtgaaggccctgggctggaactacgtgtccaccctggccagcgagggcagctatggagagaagggcgtggagagcttcacccagatcagcaaggaggccggcggcctgtgcatcgcccagagcgtgcgcatcccccaggagaggaaggacaggaccatcgactttgaccgcatcatcaagcagctgctggacacccccaacagcagagctgtggtgatctttgccaatgatgaggacatcaagcagatcctggccgccgccaagagagctgaccaggtgggccacttcctgtgggtgggcagtgacagctggggcagcaagatcaaccccctgcaccagcatgaagatattgctgagggcgccatcaccatccagcccaagagggccaccgtggagggctttgatgcctacttcaccagcaggaccctggagaacaacagaagaaatgtgtggtttgctgagtactgggaggagaacttcaactgcaagctgaccatcagcggcagcaagaaggaggacacagacagaaaatgtacaggccaggagcgcatcggcaaggacagcaactatgagcaggagggcaaggtgcagtttgtgattgatgctgtgtatgccatggcccacgccctgcaccacatgaacaaggacctgtgtgccgactacagaggagtgtgcccagagatggagcaggccggcggcaagaagctgctgaagtacatcagaaatgtgaacttcaatggagatgctggcacccctgtgatgttcaacaagaatggagatgcccctggccgctatgacatcttccagtaccagaccaccaacaccagcaaccctggctaccgcctgattggccagtggacagatgagctgcagctgaacatcgaggacatgcagtggggcaaaggagtgcgggagatcccagcctctgtgtgcaccctgccctgcaagccaggccagaggaagaagacccagaagggcaccccctgctgctggacctgtgagccctgtgatggctaccagtaccagtttgatgagatgacctgccagcactgcccctatgaccagaggcccaatgaaaatagaacaggctgccaggacatccccatcatcaagctggagtggcacagcccctgggccgtcatccctgtgttcctggccatgctgggcatcatcgccaccatctttgtgatggccaccttcatccgctacaatgacacccccatcgtgcgggccagcggccgggagctgtcctatgtgctgctgaccggcatcttcctgtgctacatcatcaccttcctgatgattgccaagccagatgtggccgtgtgcagcttccggcgggtcttcctgggcctgggcatgtgcatctcctatgctgccctgctgaccaagaccaaccgcatctaccgcatctttgagcagggcaagaagtctgtgacagcccccaggctcatcagccccaccagccagctggccatcaccagcagcctcatctctgtgcagctgctgggcgtcttcatctggtttggagtggacccccccaacatcatcatcgactatgatgagcacaagaccatgaaccctgagcaggcccggggcgtgctgaagtgtgacatcacagacctgcagatcatctgcagcctgggctacagcatcctgctgatggtgacctgcaccgtgtatgccatcaagacccggggcgtgcctgagaacttcaatgaggccaagcccatcggcttcaccatgtacaccacctgcatcgtgtggctggccttcatccccatcttctttggaacagcccagagcgctgagaaggtgatcctgtgctgcatctcctag

SEQ ID NO: 154010 - DNA, 2775 bp, synthetic construct
  misc_feature 1..2775: note = Description of Artificial Sequence: Synthetic coding sequence
  source 1..2775: mol_type = other DNA
atggtgcagctgaggaagctgctgcgggtgctgaccctgatgaagttcccctgctgcgtgctggaggtgctgctgtgtgccctggccgctgctgcccggggccaggagatgtatgccccccacagcatcagaattgaaggagatgtgaccctgggcggcctcttccctgtgcacgccaagggccccagcggcgtgccctgtggggacatcaagagagaaaatggcatccaccggctggaggccatgctgtatgccctggaccagatcaacagcgaccccaacctgctgcccaacgtgaccctgggcgcccgcatcctggacacctgcagccgggacacctacgccctggagcagagcctgacctttgtgcaggccctgatccagaaggacaccagtgatgtgcgctgcaccaacggggagccccctgtgtttgtgaagccagagaaggtggtgggcgtcatcggggccagcggcagctctgtgtccatcatggtggccaacatcctgcggctcttccagatcccccagatctcctatgccagcacagcccctgagctgagtgatgaccggcgctatgacttcttcagccgggtggtgcccccagacagcttccaggcccaggccatggtggacatcgtgaaggccctgggctggaactacgtgtccaccctggccagcgagggcagctatggagagaagggcgtggagagcttcacccagatcagcaaggaggccggcggcctgtgcatcgcccagagcgtgcgcatcccccaggagaggaaggacaggaccatcgactttgaccgcatcatcaagcagctgctggacacccccaacagcagagctgtggtgatctttgccaatgatgaggacatcaagcagatcctggccgccgccaagagagctgaccaggtgggccacttcctgtgggtgggcagtgacagctggggcagcaagatcaaccccctgcaccagcatgaagatattgctgagggcgccatcaccatccagcccaagagggccaccgtggagggctttgatgcctacttcaccagcaggaccctggagaacaacagaagaaatgtgtggtttgctgagtactgggaggagaacttcaactgcaagctgaccatcagcggcagcaagaaggaggacacagacagaaaatgtacaggccaggagcgcatcggcaaggacagcaactatgagcaggagggcaaggtgcagtttgtgattgatgctgtgtatgccatggcccacgccctgcaccacatgaacaaggacctgtgtgccgactacagaggagtgtgcccagagatggagcaggccggcggcaagaagctgctgaagtacatcagaaatgtgaacttcaacggcagcgctggcacccctgtgatgttcaacaagaatggagatgcccctggccgctatgacatcttccagtaccagaccaccaacaccagcaaccctggctaccgcctgattggccagtggacagatgagctgcagctgaacatcgaggacatgcagtggggcaaaggagtgcgggagatcccagcctctgtgtgcaccctgccctgcaagccaggccagaggaagaagacccagaagggcaccccctgctgctggacctgtgagccctgtgatggctaccagtaccagtttgatgagatgacctgccagcactgcccctatgaccagaggcccaatgaaaatagaacaggctgccaggacatccccatcatcaagctggagtggcacagcccctgggccgtcatccctgtgttcctggccatgctgggcatcatcgccaccatctttgtgatggccaccttcatccgctacaatgacacccccatcgtgcgggccagcggccgggagctgtcctatgtgctgctgaccggcatcttcctgtgctacatcatcaccttcctgatgattgccaagccagatgtggccgtgtgcagcttccggcgggtcttcctgggcctgggcatgtgcatctcctatgctgccctgctgaccaagaccaaccgcatctaccgcatctttgagcagggcaagaagtctgtgacagcccccaggctcatcagccccaccagccagctggccatcaccagcagcctcatctctgtgcagctgctgggcgtcttcatctggtttggagtggacccccccaacatcatcatcgactatgatgagcacaagaccatgaaccctgagcaggcccggggcgtgctgaagtgtgacatcacagacctgcagatcatctgcagcctgggctacagcatcctgctgatggtgacctgcaccgtgtatgccatcaagacccggggcgtgcctgagaacttcaatgaggccaagcccatcggcttcaccatgtacaccacctgcatcgtgtggctggccttcatccccatcttctttggaacagcccagagcgctgagaagctgtacatccagaccaccaccctgaccatctccatgaacctgagcgcctctgtggccctgggcatgctgtacatgcccaaggtgtacatcatcatcttccaccctgagctgaatgtgcagaagaggaagaggagcttcaaggctgtggtgacagctgccaccatgagcagccggctgagccacaagcccagcgaccggcccaatggagaggccaagacagagctgtgtgaaaatgtggaccccaacatcttcttcttcggctgcaccgtggagctgggcctgcacttcaagctgaccttcagcaggaaccagagcaacctgtag

SEQ ID NO: 154011 - DNA, 2727 bp, synthetic construct
  misc_feature 1..2727: note = Description of Artificial Sequence: Synthetic coding sequence
  source 1..2727: mol_type = other DNA
atggtgtgtgagggcaagaggtctgccagctgcccctgcttcttcctgctgacagccaagttctactggatcctgaccatgatgcagaggacccacagccaggagtatgcccacagcatccgggtggatggagacatcatcctgggcggcctcttccctgtgcacgccaagggggagcggggcgtgccctgtggggagctgaagaaggagaagggcatccaccggctggaggccatgctgtatgccatcgaccagatcaacaaggaccctgacctgctgagcaacatcaccctgggcgtgcgcatcctggacacctgcagccgggacacctacgccctggagcagagcctgacctttgtgcaggccctgattgagaaggatgccagtgatgtgaagtgtgccaatggagacccccccatcttcaccaagccagacaagatcagcggcgtgattggagctgctgccagctctgtgtccatcatggtggccaacatcctgcggctcttcaagatcccccagatctcctatgccagcacagcccctgagctgagtgacaacaccaggtatgacttcttcagccgggtggtgcccccagacagctaccaggcccaggccatggtggacatcgtgacagccctgggctggaactacgtgtccaccctggccagcgagggcaactatggagagagcggcgtggaggccttcacccagatcagccgggagatcggcggcgtgtgcatcgcccagagccagaagatcccccgggagcccaggcctggagaatttgagaagatcatcaagaggctgctggagaccccaaatgcccgggctgtgatcatgtttgccaatgaagatgacatccgccgcatcctggaggccgccaagaagctgaaccagagcggccacttcctgtggattggaagtgacagctggggcagcaagatcgcccctgtgtaccagcaggaggagattgctgagggcgctgtgaccatcctgcccaagagggccagcattgatggctttgaccgctacttccgcagcaggaccctggccaacaacagaagaaatgtgtggtttgctgagttctgggaggagaactttggctgcaagctgggcagccacggcaagaggaacagccacatcaagaagtgcaccggcctggagcgcatcgcccgggacagcagctatgagcaggagggcaaggtgcagtttgtgattgatgctgtgtacagcatggcctatgccctgcacaacatgcacaaggacctgtgccccggctacatcggcctgtgccccaggatgagcaccattgatggcaaggagctgctgggctacatccgggctgtgaacttcaacggcagcgctggcacccctgtgaccttcaatgaaaatggagatgcccctggccgctatgacatcttccagtaccagatcaccaacaagagcacagagtacaaggtgattggccactggaccaaccagctgcacctgaaggtggaggacatgcagtgggcccaccgggagcacacccacccagcctctgtgtgcagcctgccctgcaagccaggagagaggaagaagacagtgaagggcgtgccctgctgctggcactgtgagcgctgtgagggctacaactaccaggtggatgagctgagctgtgagctgtgccccctggaccagaggcccaacatgaacagaacaggctgccagctgatccccatcatcaagctggagtggcacagcccctgggccgtggtgcctgtgtttgtggccatcctgggcatcatcgccaccaccttcgtcatcgtgacctttgtgcgctacaatgacacccccatcgtgcgggccagcggccgggagctgtcctatgtgctgctgaccggcatcttcctgtgctacagcatcaccttcctgatgattgctgccccagacaccatcatctgcagcttcagaagagtcttcctgggcctgggcatgtgcttctcctatgctgccctgctgaccaagaccaaccgcatccaccgcatctttgagcagggcaagaagtctgtgacagcccccaagttcatcagccctgccagccagctggtgatcaccttcagcctcatctctgtgcagctgctgggcgtgtttgtgtggtttgtggtggaccccccccacatcatcattgattatggagagcagaggaccctggaccctgagaaggcccggggcgtgctgaagtgtgacatcagtgacctgagcctcatctgcagcctgggctacagcatcctgctgatggtgacctgcaccgtgtatgccatcaagacccggggcgtgcctgagaccttcaatgaggccaagcccatcggcttcaccatgtacaccacctgcatcatctggctggccttcatccccatcttcttcggcacagcccagagcgctgagaagatgtacatccagaccaccaccctgactgtgtccatgagcctgagcgcctctgtgtccctgggcatgctgtacatgcccaaggtgtacatcatcatcttccaccctgagcagaatgtgcagaagaggaagaggagcttcaaggctgtggtgacagctgccaccatgcagagcaagctgatccagaagggaaatgaccggcccaacggggaggtgaagtctgagctgtgtgagagcctggagaccaacaccagcagcaccaagaccacctacatctcctacagcaaccacagcatctag

SEQ ID NO: 154012 - DNA, 2727 bp, synthetic construct
  misc_feature 1..2727: note = Description of Artificial Sequence: Synthetic coding sequence
  source 1..2727: mol_type = other DNA
atggtgtgtgagggcaagaggtctgccagctgcccctgcttcttcctgctgacagccaagttctactggatcctgaccatgatgcagaggacccacagccaggagtatgcccacagcatccgggtggatggagacatcatcctgggcggcctcttccctgtgcacgccaagggggagcggggcgtgccctgtggggagctgaagaaggagaagggcatccaccggctggaggccatgctgtatgccatcgaccagatcaacaaggaccctgacctgctgagcaacatcaccctgggcgtgcgcatcctggacacctgcagccgggacacctacgccctggagcagagcctgacctttgtgcaggccctgattgagaaggatgccagtgatgtgaagtgtgccaatggagacccccccatcttcaccaagccagacaagatcagcggcgtgattggagctgctgccagctctgtgtccatcatggtggccaacatcctgcggctcttcaagatcccccagatctcctatgccagcacagcccctgagctgagtgacaacaccaggtatgacttcttcagccgggtggtgcccccagacagctaccaggcccaggccatggtggacatcgtgacagccctgggctggaactacgtgtccaccctggccagcgagggcaactatggagagagcggcgtggaggccttcacccagatcagccgggagatcggcggcgtgtgcatcgcccagagccagaagatcccccgggagcccaggcctggagaatttgagaagatcatcaagaggctgctggagaccccaaatgcccgggctgtgatcatgtttgccaatgaagatgacatccgccgcatcctggaggccgccaagaagctgaaccagagcggccacttcctgtggattggaagtgacagctggggcagcaagatcgcccctgtgtaccagcaggaggagattgctgagggcgctgtgaccatcctgcccaagagggccagcattgatggctttgaccgctacttccgcagcaggaccctggccaacaacagaagaaatgtgtggtttgctgagttctgggaggagaactttggctgcaagctgggcagccacggcaagaggaacagccacatcaagaagtgcaccggcctggagcgcatcgcccgggacagcagctatgagcaggagggcaaggtgcagtttgtgattgatgctgtgtacagcatggcctatgccctgcacaacatgcacaaggacctgtgccccggctacatcggcctgtgccccaggatgagcaccattgatggcaaggagctgctgggctacatccgggctgtgaacttcaacggcagcgctggcacccctgtgaccttcaatgaaaatggagatgcccctggccgctatgacatcttccagtaccagatcaccaacaagagcacagagtacaaggtgattggccactggaccaaccagctgcacctgaaggtggaggacatgcagtgggcccaccgggagcacacccacccagcctctgtgtgcagcctgccctgcaagccaggagagaggaagaagacagtgaagggcgtgccctgctgctggcactgtgagcgctgtgagggctacaactaccaggtggatgagctgagctgtgagctgtgccccctggaccagaggcccaacatgaacagaacaggctgccagctgatccccatcatcaagctggagtggcacagcccctgggccgtggtgcctgtgtttgtggccatcctgggcatcatcgccaccaccttcgtcatcgtgacctttgtgcgctacaatgacacccccatcgtgcgggccagcggccgggagctgtcctatgtgctgctgaccggcatcttcctgtgctacagcatcaccttcctgatgattgctgccccagacaccatcatctgcagcttcagaagagtcttcctgggcctgggcatgtgcttctcctatgctgccctgctgaccaagaccaaccgcatccaccgcatctttgagcagggcaagaagtctgtgacagcccccaagttcatcagccctgccagccagctggtgatcaccttcagcctcatctctgtgcagctgctgggcgtgtttgtgtggtttgtggtggaccccccccacatcatcattgattatggagagcagaggaccctggaccctgagaaggcccggggcgtgctgaagtgtgacatcagtgacctgagcctcatctgcagcctgggctacagcatcctgctgatggtgacctgcaccgtgtatgccatcaagacccggggcgtgcctgagaccttcaatgaggccaagcccatcggcttcaccatgtacaccacctgcatcatctggctggccttcatccccatcttcttcggcacagcccagagcgctgagaagatgtacatccagaccaccaccctgactgtgtccatgagcctgagcgcctctgtgtccctgggcatgctgtacatgcccaaggtgtacatcatcatcttccaccctgagcagaatgtgcagaagaggaagaggagcttcaaggctgtggtgacagctgccaccatgcagagcaagctgatccagaagggaaatgaccggcccaacggggaggtgaagtctgagctgtgtgagagcctggagaccaacagcaagagctctgtggagttccccatggtgaagagcggcagcaccagctag

SEQ ID NO: 154013 - DNA, 1506 bp, synthetic construct
  misc_feature 1..1506: note = Description of Artificial Sequence: Synthetic coding sequence
  source 1..1506: mol_type = other DNA
atggtgtgtgagggcaagaggtctgccagctgcccctgcttcttcctgctgacagccaagttctactggatcctgaccatgatgcagaggacccacagccaggagtatgcccacagcatccgggtggatggagacatcatcctgggcggcctcttccctgtgcacgccaagggggagcggggcgtgccctgtggggagctgaagaaggagaagggcatccaccggctggaggccatgctgtatgccatcgaccagatcaacaaggaccctgacctgctgagcaacatcaccctgggcgtgcgcatcctggacacctgcagccgggacacctacgccctggagcagagcctgacctttgtgcaggccctgattgagaaggatgccagtgatgtgaagtgtgccaatggagacccccccatcttcaccaagccagacaagatcagcggcgtgattggagctgctgccagctctgtgtccatcatggtggccaacatcctgcggctcttcaagatcccccagatctcctatgccagcacagcccctgagctgagtgacaacaccaggtatgacttcttcagccgggtggtgcccccagacagctaccaggcccaggccatggtggacatcgtgacagccctgggctggaactacgtgtccaccctggccagcgagggcaactatggagagagcggcgtggaggccttcacccagatcagccgggagatcggcggcgtgtgcatcgcccagagccagaagatcccccgggagcccaggcctggagaatttgagaagatcatcaagaggctgctggagaccccaaatgcccgggctgtgatcatgtttgccaatgaagatgacatccgccgcatcctggaggccgccaagaagctgaaccagagcggccacttcctgtggattggaagtgacagctggggcagcaagatcgcccctgtgtaccagcaggaggagattgctgagggcgctgtgaccatcctgcccaagagggccagcattgatggctttgaccgctacttccgcagcaggaccctggccaacaacagaagaaatgtgtggtttgctgagttctgggaggagaactttggctgcaagctgggcagccacggcaagaggaacagccacatcaagaagtgcaccggcctggagcgcatcgcccgggacagcagctatgagcaggagggcaaggtgcagtttgtgattgatgctgtgtacagcatggcctatgccctgcacaacatgcacaaggacctgtgccccggctacatcggcctgtgccccaggatgagcaccattgatggcaaggagctgctgggctacatccgggctgtgaacttcaacggctgcagaagaggcatccagatgagcctgccctggcccaccctcttcacccccagcttcagcagctcctgggccgtgctggccctgctgagcctgctgatgaagacagagatgctgctggatgtgatgatcagcagcagcatcaagtag

SEQ ID NO: 154014 - DNA, 63 bp, synthetic construct
  misc_feature 1..63: note = Description of Artificial Sequence: Synthetic coding sequence
  source 1..63: mol_type = other DNA
atggtgtgtgagggcaagaggtctgccagctgcccctgcttcttcctgctgacagccaagtag

SEQ ID NO: 154015 - DNA, 2727 bp, synthetic construct; identical to SEQ ID NO: 154011
  misc_feature 1..2727: note = Description of Artificial Sequence: Synthetic coding sequence
  source 1..2727: mol_type = other DNA

SEQ ID NO: 154016 - DNA, 885 bp, synthetic construct
  misc_feature 1..885: note = Description of Artificial Sequence: Synthetic coding sequence
  source 1..885: mol_type = other DNA
atggtgtgtgagggcaagaggtctgccagctgcccctgcttcttcctgctgacagccaagttctactggatcctgaccatgatgcagaggacccacagccaggagtatgcccacagcatccgggtggatggagacatcatcctgggcggcctcttccctgtgcacgccaagggggagcggggcgtgccctgtggggagctgaagaaggagaagggcatccaccggctggaggccatgctgtatgccatcgaccagatcaacaaggaccctgacctgctgagcaacatcaccctgggcgtgcgcatcctggacacctgcagccgggacacctacgccctggagcagagcctgacctttgtgcaggccctgattgagaaggatgccagtgatgtgaagtgtgccaatggagacccccccatcttcaccaagccagacaagatcagcggcgtgattggagctgctgccagctctgtgtccatcatggtggccaacatcctgcggctcttcaagatcccccagatctcctatgccagcacagcccctgagctgagtgacaacaccaggtatgacttcttcagccgggtggtgcccccagacagctaccaggcccaggccatggtggacatcgtgacagccctgggctggaactacgtgtccaccctggccagcgagggcaactatggagagagcggcgtggaggccttcacccagatcagccgggagatcggcggcgtgtgcatcgcccagagccagaagatcccccgggagcccaggcctggagaatttgagaagatcatcaagaggctgctggagaccccaaatgcccgggctgtgatcatgtttgccaatgaagatgacatccgccgcatcctggaggccgcctag

SEQ ID NO: 154017 - DNA, 1122 bp, synthetic construct
  misc_feature 1..1122: note = Description of Artificial Sequence: Synthetic coding sequence
  source 1..1122: mol_type = other DNA
atgaccaccagcgccagcagccacctgaacaagggcatcaagcaggtgtacatgagcctgccccagggcgagaaggtgcaggccatgtacatctggattgatggcaccggggagggcctgcgctgcaagaccaggaccctggacagcgagcccaagtgtgtggaggagctgcctgagtggaactttgatggcagcagcaccctgcagagcgagggcagcaacagcgacatgtacctggtgcctgctgccatgttccgggaccccttcaggaaggaccccaacaagctggtgctgtgtgaggtgttcaagtacaacagaagacctgctgagaccaacctgcggcacacctgcaagaggatcatggacatggtgagcaaccagcacccctggtttggcatggagcaggagtacaccctgatgggcacagatggccaccccttcggctggcccagcaatggcttccctggcccccagggcccctactactgcggcgtgggcgctgaccgggcctacggccgggacatcgtggaggcccactaccgggcctgcctgtatgctggggtgaagattgctggcaccaatgctgaggtgatgcctgcccagtgggagttccagatcggcccctgtgagggcatctccatgggagaccacctgtgggtggcccgcttcatcctgcaccgggtgtgtgaggactttggagtgattgccacctttgaccccaagcccatccctggcaactggaatggagctggctgccacaccaacttcagcaccaaggccatgagggaggagaatggcctgaagtacatcgaggaggccatcgagaagctgagcaagaggcaccagtaccacatccgggcctatgaccccaagggcggcctggacaatgcccggcggctgaccggcttccacgagaccagcaacatcaatgacttctctgctggggtggccaacagaagtgccagcatccgcatccccaggacagtgggccaggagaagaagggctactttgaggaccggcggcccagcgccaactgtgaccccttctctgtgacagaggccctgatccgcacctgcctgctgaatgaaacaggagatgagcccttccagtacaagaactag

SEQ ID NO: 154018 - DNA, 1122 bp, synthetic construct; identical to SEQ ID NO: 154017
  misc_feature 1..1122: note = Description of Artificial Sequence: Synthetic coding sequence
  source 1..1122: mol_type = other DNA

SEQ ID NO: 154019 - DNA, 1122 bp, synthetic construct; identical to SEQ ID NO: 154017
  misc_feature 1..1122: note = Description of Artificial Sequence: Synthetic coding sequence
  source 1..1122: mol_type = other DNA

SEQ ID NO: 154020 - DNA, 1122 bp, synthetic construct; identical to SEQ ID NO: 154017
  misc_feature 1..1122: note = Description of Artificial Sequence: Synthetic coding sequence
  source 1..1122: mol_type = other DNA

SEQ ID NO: 154021 - DNA, 702 bp, synthetic construct
  misc_feature 1..702: note = Description of Artificial Sequence: Synthetic coding sequence
  source 1..702: mol_type = other DNA
atgaccaccagcgccagcagccacctgaacaagggcatcaagcaggtgtacatgagcctgccccagggcgagaaggtgcaggccatgtacatctggattgatggcaccggggagggcctgcgctgcaagaccaggaccctggacagcgagcccaagtgtgtggaggagctgcctgagtggaactttgatggcagcagcaccctgcagagcgagggcagcaacagcgacatgtacctggtgcctgctgccatgttccgggaccccttcaggaaggaccccaacaagctggtgctgtgtgaggtgttcaagtacaacagaagacctgctgagaccaacctgcggcacacctgcaagaggatcatggacatggtgagcaaccagcacccctggtttggcatggagcaggagtacaccctgatgggcacagatggccaccccttcggctggcccagcaatggcttccagggcccccgggtgcacatcaccgtggtgtgggagcagacagagcccatggccggcacctcctggaggcccatcaccggccctgcctgcatgctggagagccggctgcggggcctgatgcccaggagctgcctgcccagcggcaacttccggctggacctggtgaaggagagcgcctgggagatcatcagcggctggcctgtgagcagctgcatcgtgtgtgtgaagaccctggagtag

SEQ ID NO: 154022 - DNA, 678 bp, synthetic construct
  misc_feature 1..678: note = Description of Artificial Sequence: Synthetic coding sequence
  source 1..678: mol_type = other DNA
atggaccagcaggccatctatgcagagctgaacctgcccacagacagcggccctgagagcagcagccccagcagcctgcccagagatgtgtgccagggcagcccctggcaccagtttgccctgaagctgagctgtgccggcatcatcctgctggtgctggtggtgacaggcctgtctgtgtctgtgaccagcctcatccagaagagcagcattgaaaaatgttctgtggacatccagcagagcaggaacaagaccacagagaggcctggcctgctgaactgccccatctactggcagcagctgcgggagaagtgcctgctcttcagccacacagtgaacccctggaacaacagcctggccgactgcagcaccaaggagagcagcctgctgctgatccgggacaaggatgagctgatccacacccagaacctgatccgggacaaggccatcctcttctggattggcctgaacttcagcctgtctgagaagaactggaagtggatcaatggcagcttcctgaacagcaatgacctggagatcagaggagatgccaaggagaacagctgcatcagcatcagccagacctctgtgtacagcgagtactgcagcacagagatccgctggatctgccagaaggagctgacccctgtgaggaacaaggtgtacccagacagctag

SEQ ID NO: 154023 - DNA, 825 bp, synthetic construct
  misc_feature 1..825: note = Description of Artificial Sequence: Synthetic coding sequence
  source 1..825: mol_type = other DNA
atgggcacagacagcagagctgccaaggccctgctggcccgggcccggaccctgcacctgcagacaggcaacctgctgaactggggccgcctgaggaagaagtgccccagcacccacagcgaggagctgcatgactgcatccagaagaccctgaatgagtggagcagccagatcaacccagacctggtgcgggagttcccagatgtgctggagtgcaccgtgtcccatgctgtggagaagatcaacccagatgagcgggaggagatgaaggtgtctgccaagctgttcatcgtggagagcaacagcagcagcagcaccaggtctgctgtggacatggcctgcagcgtgctgggcgtggcccagctggacagcgtcatcatcgccagcccccccattgaagatggagtgaacctgagcctggagcacctgcagccctactgggaggagctggagaacctggtgcagagcaagaagatcgtggccatcggcaccagtgacctggacaagacccagctggagcagctgtaccagtgggcccaggtgaagcccaacagcaaccaggtgaacctggccagctgctgcgtgatgcccccagacctgacagcctttgccaagcagtttgacatccagctgctgacccacaatgaccccaaggagctgctgtctgaggccagcttccaggaggccctgcaggagagcatcccagacatccaggcccacgagtgggtgcccctgtggctgctgcgctacagcgtgattgtgaagagccggggcatcatcaagagcaagggctacatcctgcaggccaagagaagaggcagctag

SEQ ID NO: 154024 - DNA, 1341 bp, synthetic construct
  misc_feature 1..1341: note = Description of Artificial Sequence: Synthetic coding sequence
  source 1..1341: mol_type = other DNA
atggccgccaggaaaggaagaagaaggacctgtgaaacaggagagcccatggaggccgagagcggggacaccagcagcgagggccctgcccaggtgtacctgcccggccggggcccccccctgcgggagggggaggagctggtgatggatgaggaggcctacgtgctgtaccaccgggcccagacaggagccccctgcctgagctttgatattgtgcgggaccacctgggggacaacagaacagagctgcccctgaccctgtacctgtgtgccggcacccaggccgagagcgcccagagcaaccggctgatgatgctgaggatgcacaacctgcacggcaccaagcccccaccttctgagggcagtgatgaggaggaggaggaggaggatgaggaggatgaggaggagaggaagccccagctggagctggccatggtgccccactatggaggcatcaacagagtgcgggtgtcctggctgggggaggagcctgtggccggcgtgtggagcgagaagggccaggtggaggtgtttgccctgcggcggctgctgcaggtggtggaggagccccaggccctggccgccttcctgagagatgagcaggcccagatgaagcccatcttctcctttgctggccacatgggagagggctttgccctggactggagcccccgggtgacaggccgcctgctgaccggggactgccagaagaacatccacctgtggacccccacagatggcggctcctggcacgtggaccagaggccctttgtgggccacaccaggtctgtggaggacctgcagtggagccccacagaaaatacagtgtttgccagctgcagcgcagatgccagcatccgcatctgggacatccgggccgcccccagcaaggcctgcatgctgaccacagccacagcccatgatggagatgtgaatgtcatctcctggagccggcgggagcccttcctgctgtctggaggagatgatggagccctgaagatctgggacctgcggcagttcaagagcggcagccctgtggccaccttcaagcagcacgtggcccctgtgacctctgtggagtggcacccccaggacagcggcgtgtttgctgccagcggggctgaccaccagatcacccagtgggacctggccgtggagcgggaccctgaggccggagatgtggaggccgaccccggcctggccgacctgccccagcagctgctgtttgtgcaccagggcgagacagagctgaaggagctgcactggcacccccagtgccccggcctgctggtgtccacagccctgagcggcttcaccatcttccgcaccatctctgtgtag

SEQ ID NO: 154025 - DNA, 1572 bp, synthetic construct
  misc_feature 1..1572: note = Description of Artificial Sequence: Synthetic coding sequence
  source 1..1572: mol_type = other DNA
atgcagagagctgctgccctggtgagaagaggctgcggccccaggacccccagctcctggggccgcagccagagcagcgctgctgctgaggccagcgctgtgctgaaggtgcggcctgagaggagcagaagagagcgcatcctgaccctggagagcatgaacccccaggtgaaggctgtggagtatgctgtgcggggccccatcgtgctgaaggccggggagattgagctggagctgcagaggggcatcaagaagcccttcacagaggtgatccgggccaacattggagatgcccaggccatgggccagcagcccatcaccttcctgcggcaggtgatggccctgtgcacctaccccaacctgctggacagccccagcttcccagaagatgccaagaagagggcccggcgcatcctgcaggcctgtggcggcaacagcctgggcagctacagcgccagccagggcgtgaactgcatcagagaagatgtggccgcctacatcaccaggagagatggaggagtgcctgctgaccctgacaacatctacctgaccactggagccagtgatggcatcagcaccatcctgaagatcctggtgtctgggggcggcaagagcaggactggagtgatgatccccatcccccagtaccccctgtacagcgctgtgatcagcgagctggatgccatccaggtgaactactacctggatgaggagaactgctgggccctgaatgtgaatgagctgcggcgggctgtgcaggaggccaaggaccactgtgaccccaaggtgctgtgcatcatcaaccctggcaaccccaccggccaggtgcagagcaggaagtgcattgaagatgtgatccactttgcctgggaggagaagctgttcctgctggctgatgaggtgtaccaggacaacgtgtacagcccagactgccgcttccacagcttcaagaaggtgctgtatgagatgggccctgagtacagcagcaatgtggagctggccagcttccacagcaccagcaagggctacatgggagaatgtggctacagaggaggctacatggaggtgatcaacctgcaccctgagatcaagggccagctggtgaagctgctgtctgtgcggctgtgcccccctgtgtctggccaggccgccatggacatcgtggtgaacccccctgtggccggggaggagagctttgagcagttcagccgggagaaggagagcgtgctgggcaacctggccaagaaggccaagctgacagaagatctcttcaaccaggtgcccggcatccactgcaaccccctgcagggcgccatgtatgccttcccccgcatcttcatcccagccaaggctgtggaggccgcccaggcccaccagatggccccagacatgttctactgcatgaagctgctggaggagaccggcatctgtgtggtgcccggcagcggcttcggccagcgggagggcacctaccacttcaggatgaccatcctgccccctgtggagaagctgaagacagtgctgcagaaggtgaaggacttccacatcaacttcctggagaagtatgcctag

SEQ ID NO: 154026 - DNA, 1272 bp, synthetic construct
  misc_feature 1..1272: note = Description of Artificial Sequence: Synthetic coding sequence
  source 1..1272: mol_type = other DNA
atgggccagcagcccatcaccttcctgcggcaggtgatggccctgtgcacctaccccaacctgctggacagccccagcttcccagaagatgccaagaagagggcccggcgcatcctgcaggcctgtggcggcaacagcctgggcagctacagcgccagccagggcgtgaactgcatcagagaagatgtggccgcctacatcaccaggagagatggaggagtgcctgctgaccctgacaacatctacctgaccactggagccagtgatggcatcagcaccatcctgaagatcctggtgtctgggggcggcaagagcaggactggagtgatgatccccatcccccagtaccccctgtacagcgctgtgatcagcgagctggatgccatccaggtgaactactacctggatgaggagaactgctgggccctgaatgtgaatgagctgcggcgggctgtgcaggaggccaaggaccactgtgaccccaaggtgctgtgcatcatcaaccctggcaaccccaccggccaggtgcagagcaggaagtgcattgaagatgtgatccactttgcctgggaggagaagctgttcctgctggctgatgaggtgtaccaggacaacgtgtacagcccagactgccgcttccacagcttcaagaaggtgctgtatgagatgggccctgagtacagcagcaatgtggagctggccagcttccacagcaccagcaagggctacatgggagaatgtggctacagaggaggctacatggaggtgatcaacctgcaccctgagatcaagggccagctggtgaagctgctgtctgtgcggctgtgcccccctgtgtctggccaggccgccatggacatcgtggtgaacccccctgtggccggggaggagagctttgagcagttcagccgggagaaggagagcgtgctgggcaacctggccaagaaggccaagctgacagaagatctcttcaaccaggtgcccggcatccactgcaaccccctgcagggcgccatgtatgccttcccccgcatcttcatcccagccaaggctgtggaggccgcccaggcccaccagatggccccagacatgttctactgcatgaagctgctggaggagaccggcatctgtgtggtgcccggcagcggcttcggccagcgggagggcacctaccacttcaggatgaccatcctgccccctgtggagaagctgaagacagtgctgcagaaggtgaaggacttccacatcaacttcctggagaagtatgcctag

SEQ ID NO: 154027 - DNA, 1242 bp, synthetic construct
  misc_feature 1..1242: note = Description of Artificial Sequence: Synthetic coding sequence
  source 1..1242: mol_type = other DNA
atggcccctccttctgtgtttgctgaggtgccccaggcccagcctgtgctggtgttcaagctgacagctgacttcagagaagatcctgaccccaggaaggtgaacctgggcgtgggcgcctacagaacagatgactgccacccctgggtgctgcctgtggtgaagaaggtggagcagaagatcgccaatgacaacagcctgaaccacgagtacctgcccatcctgggcctggccgagttccgcagctgtgccagccggctggccctgggagatgacagccctgccctgaaggagaagagggtgggcggcgtgcagagcctgggcggcaccggggccctgagaattggagctgacttcctggcccgctggtacaacggcaccaacaacaagaacacccctgtgtatgtgagcagccccacctgggagaaccacaatgctgtgttttctgctgctggcttcaaggacatccgcagctaccgctactgggatgctgagaagaggggcctggacctgcagggcttcctgaatgacctggagaatgcccctgagttcagcatcgtggtgctgcacgcctgtgcccacaaccccactggaattgaccccaccccagagcagtggaagcagatcgcctctgtgatgaagcaccgcttcctgttccccttctttgacagcgcctaccagggctttgccagcggcaacctggagagagatgcctgggccatccgctactttgtgtctgagggctttgagttcttctgtgcccagagcttcagcaagaactttggcctgtacaatgaaagagtgggcaacctgactgtggtgggcaaggagcctgagagcatcctgcaggtgctgagccagatggagaagatcgtgcgcatcacctggagcaaccccccagcccagggcgcccgcatcgtggccagcaccctgagcaaccctgagctgtttgaggagtggacaggaaatgtgaagaccatggctgaccgcatcctgaccatgaggtctgagctgcgggcccggctggaggccctgaagaccccaggcacctggaaccacatcacagaccagatcggcatgttctccttcaccggcctgaaccccaagcaggtggagtacctggtgaatgagaagcacatctacctgctgcccagcggccgcatcaacgtgtctggcctgaccaccaagaacctggactatgtggccaccagcatccacgaggccgtgaccaagatccagtag

SEQ ID NO: 154028 - DNA, 1101 bp, synthetic construct
  misc_feature 1..1101: note = Description of Artificial Sequence: Synthetic coding sequence
  source 1..1101: mol_type = other DNA
atggcccctccttctgtgtttgctgaggtgccccaggcccagcctgtgctggtgttcaagctgacagctgacttcagagaagatcctgaccccaggaaggtgaacctgggcgtgggcgcctacagaacagatgacagccctgccctgaaggagaagagggtgggcggcgtgcagagcctgggcggcactggagccctgcgcatcggggctgacttcctggcccgctggtacaacggcaccaacaacaagaacacccctgtgtatgtgagcagccccacctgggagaaccacaatgctgtgttttctgctgctggcttcaaggacatccgcagctaccgctactgggatgctgagaagaggggcctggacctgcagggcttcctgaatgacctggagaatgcccctgagttcagcatcgtggtgctgcacgcctgtgcccacaaccccaccggcatcgaccccaccccagagcagtggaagcagatcgcctctgtgatgaagcaccgcttcctgttccccttctttgattctgcctaccagggctttgccagcggcaacctggagagagatgcctgggccatccgctactttgtgtctgagggctttgagttcttctgtgcccagagcttcagcaagaactttggcctgtacaatgaaagagtgggcaacctgactgtggtgggcaaggagcctgagagcatcctgcaggtgctgagccagatggagaagatcgtgcgcatcacctggagcaaccccccagcccagggcgccagaattgtggccagcaccctgagcaaccctgagctgtttgaggagtggacaggaaatgtgaagaccatggctgaccgcatcctgaccatgaggtctgagctgcgggcccggctggaggccctgaagaccccaggcacctggaaccacatcacagaccagatcggcatgttctccttcaccggcctgaaccccaagcaggtggagtacctggtgaatgagaagcacatctacctgctgcccagcggccgcatcaacgtgtctggcctgaccaccaagaacctggactatgtggccaccagcatccatgaagctgtgaccaagatccagtag

SEQ ID NO: 154029 - DNA, 1179 bp, synthetic construct
  misc_feature 1..1179: note = Description of Artificial Sequence: Synthetic coding sequence
  source 1..1179: mol_type = other DNA
atgcaggtgtggagcccctggaagggggccatgtgcccccggccccacaagccagcctacagaacagatgactgccacccctgggtgctgcctgtggtgaagaaggtggagcagaagatcgccaatgacaacagcctgaaccacgagtacctgcccatcctgggcctggccgagttccgcagctgtgccagccggctggccctgggagatgacagccctgccctgaaggagaagagggtgggcggcgtgcagagcctgggcggcactggagccctgcgcatcggggctgacttcctggcccgctggtacaacggcaccaacaacaagaacacccctgtgtatgtgagcagccccacctgggagaaccacaatgctgtgttttctgctgctggcttcaaggacatccgcagctaccgctactgggatgctgagaagaggggcctggacctgcagggcttcctgaatgacctggagaatgcccctgagttcagcatcgtggtgctgcacgcctgtgcccacaaccccaccggcatcgaccccaccccagagcagtggaagcagatcgcctctgtgatgaagcaccgcttcctgttccccttctttgattctgcctaccagggctttgccagcggcaacctggagagagatgcctgggccatccgctactttgtgtctgagggctttgagttcttctgtgcccagagcttcagcaagaactttggcctgtacaatgaaagagtgggcaacctgactgtggtgggcaaggagcctgagagcatcctgcaggtgctgagccagatggagaagatcgtgcgcatcacctggagcaaccccccagcccagggcgccagaattgtggccagcaccctgagcaaccctgagctgtttgaggagtggacaggaaatgtgaagaccatggctgaccgcatcctgaccatgaggtctgagctgcgggcccggctggaggccctgaagaccccaggcacctggaaccacatcacagaccagatcggcatgttctccttcaccggcctgaaccccaagcaggtggagtacctggtgaatgagaagcacatctacctgctgcccagcggccgcatcaacgtgtctggcctgaccaccaagaacctggactatgtggccaccagcatccatgaagctgtgaccaagatccagtag

SEQ ID NO: 154030 - DNA, 1293 bp, synthetic construct
  misc_feature 1..1293: note = Description of Artificial Sequence: Synthetic coding sequence
  source 1..1293: mol_type = other DNA
atggccctgctgcacagcggccgggtgctgcccggcattgctgctgccttccaccctggcctggccgccgccgccagcgcccgggccagctcctggtggacccacgtggagatgggccccccagaccccatcctgggcgtgacagaggccttcaagagggacaccaacagcaagaagatgaacctgggcgtgggcgcctacagagatgacaatggcaagccctacgtgctgcccagcgtgaggaaggccgaggcccagattgctgccaagaacctggacaaggagtacctgcccatcggcggcctggccgagttctgcaaggccagcgctgagctggccctgggggagaacagcgaggtgctgaagagcggccgctttgtgacagtgcagaccatctctggaactggagccctgcgcatcggggccagcttcctgcagcgcttcttcaagttcagcagagatgtgttcctgcccaagcccacctggggcaaccacacccccatcttcagagatgctggcatgcagctgcagggctaccgctactatgaccccaagacctgtggctttgacttcaccggggctgtggaggacatcagcaagatccctgagcagagcgtgctgctgctgcacgcctgtgcccacaaccccactggagtggaccccaggcctgagcagtggaaggagatcgccaccgtggtgaagaagaggaacctgtttgccttctttgacatggcctaccagggctttgccagcggagatggagacaaggatgcctgggccgtgcgccacttcatcgagcagggcatcaacgtgtgcctgtgccagagctatgccaagaacatgggcctgtatggagagcgggtgggcgccttcaccatggtgtgcaaggatgctgatgaggccaagagggtggagagccagctgaagatcctgatccggcccatgtacagcaacccccccctgaatggagccagaattgctgctgccatcctgaacaccccagacctgaggaagcagtggctgcaggaggtgaaggtgatggctgaccgcatcatcggcatgaggacccagctggtgagcaacctgaagaaggagggcagcacccacaactggcagcacatcacagaccagatcggcatgttctgcttcaccggcctgaagccagagcaggtggagcggctcatcaaggagttcagcatctacatgaccaaggatggccgcatctctgtggccggcgtgaccagcagcaatgtgggctacctggcccacgccatccaccaggtgaccaagtag

SEQ ID NO: 154031 - DNA, 570 bp, synthetic construct
  misc_feature 1..570: note = Description of Artificial Sequence: Synthetic coding sequence
  source 1..570: mol_type = other DNA
atggccctgctgcacagcggccgggtgctgcccggcattgctgctgccttccaccctggcctggccgccgccgccagcgcccgggccagctcctggtggacccacgtggagatgggccccccagaccccatcctgggcgtgacagaggccttcaagagggacaccaacagcaagaagatgaacctgggcgtgggcgcctacagagatgacaatggcaagccctacgtgctgcccagcgtgaggaaggccgaggcccagattgctgccaagaacctggacaaggagtacctgcccatcggcggcctggccgagttctgcaaggacttcctgagcagcgctgagatgtccttctgccccaaccagcccggggagaccacccaccccagcagcggcatgctggcctgcagctacaaggtgattggcatcatgaccccccggctggccgtgctgaccagccaggccctgtggaggatcttccagaagtaccagagcagggtcttcttcttctgcatgcctgcccccaccatcccccgggagtggaccagggtgaggaacagcggcaggaagtag

SEQ ID NO: 154032 - DNA, 1164 bp, synthetic construct
  misc_feature 1..1164: note = Description of Artificial Sequence: Synthetic coding sequence
  source 1..1164: mol_type = other DNA
atggccctgctgcacagcggccgggtgctgcccggcattgctgctgccttccaccctggcctggccgccgccgccagcgcccgggccagctcctggtggacccacgtggagatgggccccccagaccccatcctgggcgtgacagaggccttcaagagggacaccaacagcaagaagatgaacctgggcgtgggcgcctacagagatgacaatggcaagccctacgtgctgcccagcgtgaggaagtttgtgacagtgcagaccatcagcggcaccggggccctgagaattggagccagcttcctgcagcgcttcttcaagttcagcagagatgtgttcctgcccaagcccacctggggcaaccacacccccatcttcagagatgctggcatgcagctgcagggctaccgctactatgaccccaagacctgtggctttgacttcaccggggctgtggaggacatcagcaagatccctgagcagagcgtgctgctgctgcacgcctgtgcccacaaccccaccggggtggaccccaggcctgagcagtggaaggagatcgccaccgtggtgaagaagaggaacctgtttgccttctttgacatggcctaccagggctttgccagcggagatggagacaaggatgcctgggccgtgcgccacttcatcgagcagggcatcaacgtgtgcctgtgccagagctatgccaagaacatgggcctgtatggagagcgggtgggcgccttcaccatggtgtgcaaggatgctgatgaggccaagagggtggagagccagctgaagatcctgatccggcccatgtacagcaacccccccctgaatggagccagaattgctgctgccatcctgaacaccccagacctgaggaagcagtggctgcaggaggtgaaggtgatggctgaccgcatcatcggcatgaggacccagctggtgagcaacctgaagaaggagggcagcacccacaactggcagcacatcacagaccagatcggcatgttctgcttcaccggcctgaagccagagcaggtggagcggctcatcaaggagttcagcatctacatgaccaaggatggccgcatctctgtggccggcgtgaccagcagcaatgtgggctacctggcccacgccatccaccaggtgaccaagtag

SEQ ID NO: 154033 - DNA, 1491 bp, synthetic construct
  misc_feature 1..1491: note = Description of Artificial Sequence: Synthetic coding sequence
  source 1..1491: mol_type = other DNA
atggccagcagcactggagacaggagccaggccgtgcgccacggcctgcgggccaaggtgctgaccctggatggcatgaacccccgggtgagaagagtggagtatgctgtgcggggccccatcgtgcagagggccctggagctggagcaggagctgcggcagggcgtgaagaagcccttcacagaggtgatccgggccaacattggagatgcccaggccatgggccagaggcccatcaccttcctgcggcaggtgctggccctgtgtgtgaacccagacctgctgagcagccccaacttcccagatgatgccaagaagagagctgagcgcatcctgcaggcctgtggcggccacagcctgggcgcctacagcgtgagcagcggcatccagctgatccgggaggatgtggcccgctacatcgagaggagagatggcggcatcccagctgaccccaacaacgtgttcctgagcactggagccagtgatgccatcgtgacagtgctgaagctgctggtggccggggagggccacaccaggactggagtgctgatccccatcccccagtaccccctgtacagcgccaccctggccgagctgggcgctgtgcaggtggactactacctggatgaggagcgggcctgggccctggatgtggccgagctgcaccgggccctgggccaggcccgggaccactgccggccccgggccctgtgtgtgatcaaccctggcaaccccaccggccaggtgcagaccagagaatgtattgaagctgtgatccgctttgcctttgaggagcggctcttcctgctggctgatgaggtgtaccaggacaacgtgtatgctgctggcagccagttccacagcttcaagaaggtgctgatggagatgggccccccctatgccggccagcaggagctggccagcttccacagcaccagcaagggctacatgggagaatgtggcttccggggcggctacgtggaggtggtgaacatggatgctgctgtgcagcagcagatgctgaagctgatgtctgtgcggctgtgcccccctgtgcccggccaggccctgctggacctggtggtgagccccccagcccccacagaccccagctttgcccagttccaggccgagaagcaggccgtgctggccgagctggccgccaaggccaagctgacagagcaggtgttcaatgaggcccctggcatcagctgcaaccctgtgcagggcgccatgtacagcttcccccgggtgcagctgccccccagggctgtggagcgggcccaggagctgggcctggccccagacatgttcttctgcctgcggctgctggaggagaccggcatctgtgtggtgcccggcagcggcttcggccagcgggagggcacctaccacttcaggatgaccatcctgccccccctggagaagctgcggctgctgctggagaagctgagccgcttccacgccaagttcaccctggagtacagctag

SEQ ID NO: 154034 - DNA, 1491 bp, synthetic construct; identical to SEQ ID NO: 154033
  misc_feature 1..1491: note = Description of Artificial Sequence: Synthetic coding sequence
  source 1..1491: mol_type = other DNA

SEQ ID NO: 154035 - DNA, 2010 bp, synthetic construct
  misc_feature 1..2010: note = Description of Artificial Sequence: Synthetic coding sequence
  source 1..2010: mol_type = other DNA
atgatgaggctgcggggcagcggcatgctgcgggacctgctgctgcggagccctgctggggtgtctgccaccctgcggcgggcccagcccctggtgaccctgtgccggcggccccggggcggcggccggcctgctgctggccctgctgctgctgcccggctgcacccctggtggggcggcggcggctggccagctgagcccctggcccggggcctgagcagcagccccagcgagatcctgcaggagctgggcaagggcagcacccacccccagcccggggtgagccccccagctgccccagctgcccctggccccaaggatggccctggagaaacagatgcctttggaaacagcgagggcaaggagctggtggccagcggggagaacaagatcaagcagggcctgctgcccagcctggaggacctgctcttctacaccatcgccgagggccaggagaagatccctgtgcacaagttcatcacagccctgaagagcacaggcctgcggaccagtgacccccggctgaaggagtgcatggacatgctgcggctgaccctgcagaccaccagtgatggagtgatgctggacaaggacctcttcaagaagtgtgtgcagagcaacatcgtgctgctgacccaggccttccggaggaagtttgtgatcccagacttcatgtccttcaccagccacattgatgagctgtatgaaagtgccaagaagcagagcggcggcaaggtggccgactacatcccccagctggccaagttctccccagacctgtggggcgtgtctgtgtgcaccgtggatggccagaggcacagcactggagacaccaaggtgcccttctgcctgcagagctgtgtgaagcccctgaagtatgccatcgctgtgaatgacctgggcacagaatatgtgcaccgctacgtgggcaaggagcccagcggcctgcgcttcaacaagctgttcctgaatgaagatgacaagccccacaaccccatggtgaatgctggggccatcgtggtgaccagcctcatcaagcagggcgtgaacaatgctgagaagtttgattatgtgatgcagttcctgaacaagatggctggaaatgaatatgtgggcttcagcaatgccaccttccagagcgagcgggagagcggggacaggaactttgccatcggctactacctgaaggagaagaagtgcttccctgagggcacagacatggtgggcatcctggacttctacttccagctgtgcagcattgaggtgacctgtgagagcgcctctgtgatggccgccaccctggccaacggcggcttctgccccatcactggagagcgggtgctgagccctgaggccgtgaggaacaccctgagcctgatgcacagctgtggcatgtatgacttcagcggccagtttgccttccacgtgggcctgcctgccaagagcggcgtggccggcggcatcctgctggtggtgcccaacgtgatgggcatgatgtgctggagcccccccctggacaagatgggcaacagcgtgaagggcatccacttctgccacgacctggtgtccctgtgcaacttccacaactatgacaacctgcggcactttgccaagaagctggacccccggcgggagggcggggaccagagggtgaagagcgtcatcaacctgctgtttgctgcctacacaggagatgtgtctgccctgcggagatttgccctgagcgccatggacatggagcagagggactatgacagcaggacagccctgcacgtggccgctgctgagggccacgtggaggtggtgaagttcctgctggaggcctgcaaggtgaaccccttccccaaggaccgctggaacaacacccccatggatgaggccctgcacttcggccaccatgatgtgttcaagatcctgcaggagtaccaggtgcagtacaccccccagggcgacagcgacaacgggaaggagaaccagacagtgcacaagaacctggatggcctgctgtag

SEQ ID NO: 154036 - DNA, 1797 bp, synthetic construct
  misc_feature 1..1797: note = Description of Artificial Sequence: Synthetic coding sequence
  source 1..1797: mol_type = other DNA
atgatgaggctgcggggcagcggcatgctgcgggacctgctgctgcggagccctgctggggtgtctgccaccctgcggcgggcccagcccctggtgaccctgtgccggcggccccggggcggcggccggcctgctgctggccctgctgctgctgcccggctgcacccctggtggggcggcggcggctggccagctgagcccctggcccggggcctgagcagcagccccagcgagatcctgcaggagctgggcaagggcagcacccacccccagcccggggtgagccccccagctgccccagctgcccctggccccaaggatggccctggagaaacagatgcctttggaaacagcgagggcaaggagctggtggccagcggggagaacaagatcaagcagggcctgctgcccagcctggaggacctgctcttctacaccatcgccgagggccaggagaagatccctgtgcacaagttcatcacagccctgaagagcacaggcctgcggaccagtgacccccggctgaaggagtgcatggacatgctgcggctgaccctgcagaccaccagtgatggagtgatgctggacaaggacctcttcaagaagtgtgtgcagagcaacatcgtgctgctgacccaggccttccggaggaagtttgtgatcccagacttcatgtccttcaccagccacattgatgagctgtatgaaagtgccaagaagcagagcggcggcaaggtggccgactacatcccccagctggccaagttctccccagacctgtggggcgtgtctgtgtgcaccgtggatggccagaggcacagcactggagacaccaaggtgcccttctgcctgcagagctgtgtgaagcccctgaagtatgccatcgctgtgaatgacctgggcacagaatatgtgcaccgctacgtgggcaaggagcccagcggcctgcgcttcaacaagctgttcctgaatgaagatgacaagccccacaaccccatggtgaatgctggggccatcgtggtgaccagcctcatcaagcagggcgtgaacaatgctgagaagtttgattatgtgatgcagttcctgaacaagatggctggaaatgaatatgtgggcttcagcaatgccaccttccagagcgagcgggagagcggggacaggaactttgccatcggctactacctgaaggagaagaagtgcttccctgagggcacagacatggtgggcatcctggacttctacttccagctgtgcagcattgaggtgacctgtgagagcgcctctgtgatggccgccaccctggccaacggcggcttctgccccatcactggagagcgggtgctgagccctgaggccgtgaggaacaccctgagcctgatgcacagctgtggcatgtatgacttcagcggccagtttgccttccacgtgggcctgcctgccaagagcggcgtggccggcggcatcctgctggtggtgcccaacgtgatgggcatgatgtgctggagcccccccctggacaagatgggcaacagcgtgaagggcatccacttctgccacgacctggtgtccctgtgcaacttccacaactatgacaacctgcggcactttgccaagaagctggacccccggcgggagggcggggaccagaggcacagctttggccccctggactatgagagcctgcagcaggagctggccctgaaggagaccgtgtggaagaaggtgtccccagagagcaatgaagacatcagcaccaccgtggtgtacaggatggagagcctgggggagaagagctag

SEQ ID NO: 154037 - DNA, 525 bp, synthetic construct
  misc_feature 1..525: note = Description of Artificial Sequence: Synthetic coding sequence
  source 1..525: mol_type = other DNA
atgggcatgatgtgctggagcccccccctggacaagatgggcaacagcgtgaagggcatccacttctgccacgacctggtgtccctgtgcaacttccacaactatgacaacctgcggcactttgccaagaagctggacccccggcgggagggcggggaccagagggtgaagagcgtcatcaacctgctgtttgctgcctacacaggagatgtgtctgccctgcggagatttgccctgagcgccatggacatggagcagagggactatgacagcaggacagccctgcacgtggccgctgctgagggccacgtggaggtggtgaagttcctgctggaggcctgcaaggtgaaccccttccccaaggaccgctggaacaacacccccatggatgaggccctgcacttcggccaccatgatgtgttcaagatcctgcaggagtaccaggtgcagtacaccccccagggcgacagcgacaatggcaaggagaaccagacagtgcacaagaacctggatggcctgctgtag

SEQ ID NO: 154038 - DNA, 1809 bp, synthetic construct
  misc_feature 1..1809: note = Description of Artificial Sequence: Synthetic coding sequence
  source 1..1809: mol_type = other DNA
atgaggtccatgaaggccctgcagaaggccctgagccgggccggcagccactgcggccggggcggctggggccaccccagccgcagccccctgctgggcggcggcgtgcgccaccacctgtctgaggccgccgcccagggccgggagaccccccacagccaccagccccagcaccaggaccatgacagcagcgagagcggcatgctgagccggctgggggacctgctcttctacaccatcgccgagggccaggagcgcatccccatccacaagttcaccacagccctgaaggccaccggcctgcagaccagtgacccccggctgcgggactgcatgtctgagatgcaccgggtggtgcaggagagcagcagcggcggcctgctggaccgggacctcttcagaaaatgtgtgagcagcaacatcgtgctgctgacccaggccttcaggaagaagtttgtgatcccagactttgaggagttcaccggccacgtggaccgcatctttgaagatgtgaaggagctgactggaggcaaggtggccgcctacatcccccagctggccaagagcaacccagacctgtggggcgtgtccctgtgcaccgtggatggccagaggcacagcgtgggccacaccaagatccccttctgcctgcagagctgtgtgaagcccctgacctacgccatcagcatcagcaccctgggcacagattatgtgcacaagtttgtgggcaaggagcccagcggcctgcgctacaacaagctgagcctgaatgaggagggcatcccccacaaccccatggtgaatgctggggccatcgtggtgagcagcctcatcaagatggactgcaacaaggccgagaagtttgattttgtgctgcagtacctgaacaagatggctggaaatgagtacatgggcttcagcaatgccaccttccagagcgagaaggagactggagacaggaactatgccatcggctactacctgaaggagaagaagtgcttccccaagggcgtggacatgatggccgccctggacctgtacttccagctgtgcagcgtggaggtgacctgtgagagcggctctgtgatggccgccaccctggccaatggaggcatctgccccatcaccggggagagcgtgctgtctgctgaggccgtgaggaacaccctgagcctgatgcacagctgtggcatgtatgacttcagcggccagtttgccttccacgtgggcctgcctgccaagtctgctgtgtctggggccatcctgctggtggtgcccaacgtgatgggcatgatgtgcctgagcccccccctggacaagctgggcaacagccaccggggcaccagcttctgccagaagctggtgtccctcttcaacttccacaactatgacaacctgcggcactgtgccaggaagctggacccccggcgggagggcgctgagatccggaacaagacagtggtgaacctgctgtttgctgcctacagcggagatgtgtctgccctgcggagatttgccctgagcgccatggacatggagcagaaggactatgacagcaggacagccctgcacgtggccgctgctgagggccacatcgaggtggtgaagttcctgattgaggcctgcaaggtgaacccctttgccaaggaccgctggggcaacatccccctggatgatgctgtgcagttcaaccacctggaggtggtgaagctgctgcaggactaccaggacagctacaccctgtctgagacccaggccgaggccgctgctgaggccctgagcaaggagaacctggagagcatggtgtag

SEQ ID NO: 154039 - DNA, 534 bp, synthetic construct
  misc_feature 1..534: note = Description of Artificial Sequence: Synthetic coding sequence
  source 1..534: mol_type = other DNA
atgaggtccatgaaggccctgcagaaggccctgagccgggccggcagccactgcggccggggcggctggggccaccccagccgcagccccctgctgggcggcggcgtgcgccaccacctgtctgaggccgccgcccagggccgggagaccccccacagccaccagccccagcaccaggaccatgacagcagcgagagcggcatgctgagccggctgggggacctgctcttctacaccatcgccgagggccaggagcgcatccccatccacaagttcaccacagccctgaaggccaccggcctgcagaccagtgacccccggctgcgggactgcatgtctgagatgcaccgggtggtgcaggagagcagcagcggcggcctgctggaccgggacctcttcaggaagtggcagcccaccagcctgtcctggcccagccagacccagacctgtggggtgagcccctgtgccctgtggatggtgaatggcaccctgtgggccacccagaggagccccagcgcctgcagccctgtgtag

SEQ ID NO: 154040 - DNA, 2049 bp, synthetic construct
  misc_feature 1..2049: note = Description of Artificial Sequence: Synthetic coding sequence
  source 1..2049: mol_type = other DNA
atgtgtggcatctttgcctacatgaactacagagtgcccaggaccaggaaggagatctttgagaccctcatcaagggcctgcagaggctggagtaccggggctatgattctgctggggtggccattgatggcaacaaccacgaggtgaaggagcggcacatccagctggtgaagaagaggggcaaggtgaaggccctggatgaggagctgtacaagcaggacagcatggacctgaaggtggagtttgagacccacttcggcatcgcccacacccgctgggccacccacggcgtgcccagcgctgtgaacagccacccccagaggagtgacaagggaaatgaatttgtggtgatccacaacggcatcatcaccaactacaaggacctgaggaagttcctggagagcaagggctatgaatttgagagcgagacagacacagagaccatcgccaagctgatcaagtatgtgtttgacaaccgggagacagaggacatcaccttcagcaccctggtggagagggtcatccagcagctggagggcgcctttgccctggtgttcaagtctgtgcactacccaggagaggccgtggccacccggcggggcagccccctgctgattggagtgcgcagcaagtacaagctgagcacagagcagatccccatcctgtaccgcacctgcaccctggagaatgtgaagaacatctgcaagaccaggatgaagaggctggacagcagcgcctgcctgcatgctgtgggggacaaggctgtggagttcttctttgccagtgatgccagcgccatcatcgagcacaccaacagagtcatcttcctggaggatgatgacattgctgctgtggctgatggcaagctgagcatccaccgggtgaagaggtctgccagtgatgaccccagccgggccatccagaccctgcagatggagctgcagcagatcatgaagggcaacttcagcgccttcatgcagaaggagatctttgagcagcctgagagcgtcttcaacaccatgaggggccgggtgaactttgagaccaacacagtgctgctgggcggcctgaaggaccacctgaaggagatccgccgctgccggcggctgattgtgattggctgcggcaccagctaccacgccgctgtggccacccggcaggtgctggaggagctgacagagctgcctgtgatggtggagctggccagtgacttcctggacaggaacacccctgtgttcagagatgatgtgtgcttcttcatcagccagagcggggagacagctgacaccctgctggccctgcgctactgcaaggacagaggagccctgactgtgggcgtgaccaacacagtgggcagcagcatcagccgggagacagactgtggggtgcacatcaatgccggccctgagattggagtggccagcaccaaggcctacaccagccagttcatcagcctggtgatgtttggcctgatgatgtctgaagatcgcatcagcctgcagaacagacggcaggagatcatccggggcctgcggagcctgcctgagctgatcaaggaggtgctgagcctggaggagaagatccatgacctggccctggagctgtacacccagaggagcctgctggtgatgggccggggctacaactatgccacctgcctggagggcgccctgaagatcaaggagatcacctacatgcacagcgagggcatcctggccggggagctgaagcacggccccctggccctgattgacaagcagatgcctgtgatcatggtgatcatgaaggacccctgctttgccaagtgccagaatgccctgcagcaggtgacagcccggcagggccggcccatcatcctgtgcagcaaggatgacacagagagcagcaagtttgcctacaagaccatcgagctgccccacacagtggactgcctgcagggcatcctgagcgtcatccccctgcagctgctgtccttccacctggccgtgctgcggggctatgatgtggacttccccaggaacctggccaagtctgtgacagtggagtag

SEQ ID NO: 154041 - DNA, 1086 bp, synthetic construct
  misc_feature 1..1086: note = Description of Artificial Sequence: Synthetic coding sequence
  source 1..1086: mol_type = other DNA
atggccggcggccgccacagaagagtggtgggcaccctgcacctgctgctgctggtggccgccctgccctgggccagccggggcgtgagccccagcgccagcgcctggccagaggagaagaactaccaccagcctgccatcctgaacagcagcgccctgcggcagattgctgagggcaccagcatcagcgagatgtggcagaatgacctgcagcccctgctgattgagcgctacccaggcagccctggcagctatgctgcccggcagcacatcatgcagaggatccagaggctgcaggccgactgggtgctggagattgacaccttcctgagccagaccccctacggctaccgctccttcagcaacatcatcagcaccctgaaccccacagccaagaggcacctggtgctggcctgccactatgacagcaagtacttcagccactggaacaacagagtgtttgtgggcgccacagacagcgctgtgccctgtgccatgatgctggagctggcccgggccctggacaagaagctgctgagcctgaagacagtgtctgacagcaagccagacctgagcctgcagctgatcttctttgatggagaggaggccttcctgcactggagcccccaggacagcctgtatggcagccgccacctggccgccaagatggccagcaccccccaccccccaggggcccggggcaccagccagctgcacggcatggacctgctggtgctgctggacctgattggagcccccaaccccaccttccccaacttcttccccaacagcgcccgctggtttgagcggctgcaggccatcgagcacgagctgcacgagctgggcctgctgaaggaccacagcctggagggccgctacttccagaactacagctatggaggagtcatccaggatgaccacatccccttcctgcggcggggcgtgcctgtgctgcacctgatccccagccccttccctgaggtgtggcacaccatggatgacaatgaggagaacctggatgagagcaccatcgacaacctgaacaagatcctgcaggtgtttgtgctggagtacctgcacctgtag

SEQ ID NO: 154042 - DNA, 939 bp, synthetic construct
  misc_feature 1..939: note = Description of Artificial Sequence: Synthetic coding sequence
  source 1..939: mol_type = other DNA
atggccggcggccgccacagaagagtggtgggcaccctgcacctgctgctgctggtggccgccctgccctgggccagccggggcgtgagccccagcgccagcgcctggccagaggagaagcacatcatgcagaggatccagaggctgcaggccgactgggtgctggagattgacaccttcctgagccagaccccctacggctaccgctccttcagcaacatcatcagcaccctgaaccccacagccaagaggcacctggtgctggcctgccactatgacagcaagtacttcagccactggaacaacagagtgtttgtgggcgccacagattctgctgtgccctgtgccatgatgctggagctggcccgggccctggacaagaagctgctgagcctgaagacagtgtctgacagcaagccagacctgagcctgcagctgatcttctttgatggagaggaggccttcctgcactggagcccccaggacagcctgtatggcagccgccacctggccgccaagatggccagcaccccccaccccccaggggcccggggcaccagccagctgcacggcatggacctgctggtgctgctggacctgattggagcccccaaccccaccttccccaacttcttccccaacagcgcccgctggtttgagcggctgcaggccattgaacatgagctgcacgagctgggcctgctgaaggaccacagcctggagggccgctacttccagaactacagctatggaggagtcatccaggatgaccacatccccttcctgcggcggggcgtgcctgtgctgcacctgatccccagccccttccctgaggtgtggcacaccatggatgacaatgaggagaacctggatgagagcaccatcgacaacctgaacaagatcctgcaggtgtttgtgctggagtacctgcacctgtag

SEQ ID NO: 154043 - DNA, 2328 bp, synthetic construct
  misc_feature 1..2328: note = Description of Artificial Sequence: Synthetic coding sequence
  source 1..2328: mol_type = other DNA
atggccgccctggacagcctgagcctcttcaccagcctgggcctgtctgagcagaaggcccgggagaccctgaagaacagcgccctgagcgcccagctgcgggaggccgccacccaggcccagcagaccctgggcagcaccatcgacaaggccaccggcatcctgctgtatggcctggccagccggctgcgggacacccggcggctgtccttcctggtgtcctacatcgccagcaagaagatccacacagagccccagctgtctgctgccctggagtatgtgcgcagccaccccctggaccccatcgacacagtggactttgagcgggagtgtggggtgggcgtcatcgtgaccccagagcagatcgaggaggccgtggaggccgccatcaacagacaccggccccagctgctggtggagcgctaccacttcaacatgggcctgctgatgggagaggcccgggctgtgctgaagtgggcagatggcaagatgatcaagaatgaggtggacatgcaggtgctgcacctgctgggccccaagctggaggccgacctggagaagaagttcaaggtggccaaggcccggctggaggagacagacagaagaacagccaaggatgtggtggagaatggagaaacagctgaccagaccctgagcctgatggagcagctgcggggggaggccctgaagttccacaagccaggagagaactacaagaccccaggctacgtggtgaccccccacaccatgaacctgctgaagcagcacctggagatcaccggcggccaggtgaggacccgcttccccccagagcccaacggcatcctgcacatcggccacgccaaggccatcaacttcaactttggctacgccaaggccaacaacggcatctgcttcctgcgctttgatgacaccaaccctgagaaggaggaggccaagttcttcaccgccatctgtgacatggtggcctggctgggctacaccccctacaaggtgacctacgccagtgactactttgaccagctgtatgcctgggccgtggagctgatcagaagaggcctggcctacgtgtgccaccagagaggagaggagctgaagggccacaacaccctgcccagcccctggagggaccggcccatggaggagagcctgctgctgtttgaggccatgaggaagggcaagttcagcgagggggaggccaccctgaggatgaagctggtgatggaggatggcaagatggaccctgtggcctacagagtgaagtacaccccccaccacaggactggagacaagtggtgcatctaccccacctatgactacacccactgcctgtgtgacagcattgagcacatcacccacagcctgtgcaccaaggagttccaggcccggcgcagcagctacttctggctgtgcaatgccctggatgtgtactgccctgtgcagtgggagtatggccgcctgaacctgcactatgctgtggtgtccaagaggaagatcctgcagctggtggccactggagctgtgcgggactgggatgaccccaggctcttcaccctgacagccctgcggcggcggggcttccccccagaggccatcaacaacttctgtgcccgggtgggcgtgacagtggcccagaccaccatggagccccacctgctggaggcctgtgtgagagatgtgctgaatgacacagccccccgggccatggctgtgctggagagcctgcgggtcatcatcaccaacttccctgctgccaagagcctggacatccaggtgcccaacttcccagcagatgagaccaagggcttccaccaggtgccctttgcccccatcgtgttcatcgagaggacagacttcaaggaggagcctgagcccggcttcaagaggctggcctggggccagcctgtgggcctgcggcacacaggctacgtgattgagctgcagcacgtggtgaagggccccagcggctgtgtggagagcctggaggtgacctgccggcgggcagatgctggggagaagcccaaggccttcatccactgggtgtcccagcccctgatgtgtgaggtgcggctgtatgaaagactcttccagcacaagaaccctgaggaccccacagaggtgcctgggggcttcctgagtgacctgaacctggccagcctgcacgtggtggatgctgccctggtggactgcagcgtggccctggccaagccctttgacaagttccagtttgagcggctgggctacttctctgtggaccctgacagccaccagggcaagctggtgttcaacagaacagtgaccctgaaggaggaccccgggaaggtgtag

SEQ ID NO: 154044 - DNA, 2295 bp, synthetic construct
  misc_feature 1..2295: note = Description of Artificial Sequence: Synthetic coding sequence
  source 1..2295: mol_type = other DNA
atggccgccctggacagcctgagcctcttcaccagcctgggcctgtctgagcagaaggcccgggagaccctgaagaacagcgccctgagcgcccagctgcgggaggccgccacccaggcccagcagaccctgggcagcaccatcgacaaggccaccggcatcctgctgtatggcctggccagccggctgcgggacacccggcggctgtccttcctggtgtcctacatcgccacagccctggagtatgtgcgcagccaccccctggaccccatcgacacagtggactttgaaagagaatgtggggtgggcgtgattgtgaccccagagcagatcgaggaggccgtggaggccgccatcaacagacaccggccccagctgctggtggagcgctaccacttcaacatgggcctgctgatgggagaggcccgggctgtgctgaagtgggcagatggcaagatgatcaagaatgaggtggacatgcaggtgctgcacctgctgggccccaagctggaggccgacctggagaagaagttcaaggtggccaaggcccggctggaggagacagacagaagaacagccaaggatgtggtggagaatggagaaacagctgaccagaccctgagcctgatggagcagctgcggggggaggccctgaagttccacaagccaggagagaactacaagaccccaggctacgtggtgaccccccacaccatgaacctgctgaagcagcacctggagatcactggaggccaggtgaggacccgcttccccccagagcccaacggcatcctgcacatcggccacgccaaggccatcaacttcaactttggctacgccaaggccaacaacggcatctgcttcctgcgctttgatgacaccaaccctgagaaggaggaggccaagttcttcaccgccatctgtgacatggtggcctggctgggctacaccccctacaaggtgacctacgccagtgactactttgaccagctgtatgcctgggccgtggagctgatccggcggggcctggcctacgtgtgccaccagagaggagaggagctgaagggccacaacaccctgcccagcccctggagggaccggcccatggaggagagcctgctgctgtttgaggccatgaggaagggcaagttcagcgagggggaggccaccctgaggatgaagctggtgatggaggatggcaagatggaccctgtggcctacagagtgaagtacaccccccaccacaggactggagacaagtggtgcatctaccccacctatgactacacccactgcctgtgtgacagcattgagcacatcacccacagcctgtgcaccaaggagttccaggcccggcgcagcagctacttctggctgtgcaatgccctggatgtgtactgccctgtgcagtgggagtatggccgcctgaacctgcactatgctgtggtgtccaagaggaagatcctgcagctggtggccaccggggctgtgcgggactgggatgaccccaggctcttcaccctgacagccctgcggcggcggggcttccccccagaggccatcaacaacttctgtgcccgggtgggcgtgacagtggcccagaccaccatggagccccacctgctggaggcctgtgtgagagatgtgctgaatgacacagccccccgggccatggctgtgctggagagcctgcgggtcatcatcaccaacttccctgctgccaagagcctggacatccaggtgcccaacttcccagcagatgagaccaagggcttccaccaggtgccctttgcccccatcgtgttcattgaaagaacagacttcaaggaggagcctgagcccggcttcaagaggctggcctggggccagcctgtgggcctgcggcacacaggctacgtgattgagctgcagcacgtggtgaagggccccagcggctgtgtggagagcctggaggtgacctgcagaagagcagatgctggggagaagcccaaggccttcatccactgggtgtcccagcccctgatgtgtgaggtgcggctgtatgagcggctcttccagcacaagaaccctgaggaccccacagaggtgcctgggggcttcctgagtgacctgaacctggccagcctgcacgtggtggatgctgccctggtggactgcagcgtggccctggccaagccctttgacaagttccagtttgagcggctgggctacttctctgtggaccctgacagccaccagggcaagctggtgttcaacagaacagtgaccctgaaggaggaccccgggaaggtgtag

SEQ ID NO: 154045 - DNA, 849 bp, synthetic construct
  misc_feature 1..849: note = Description of Artificial Sequence: Synthetic coding sequence
  source 1..849: mol_type = other DNA
atgcccacctgccgcctgggccccaagttcctgctggtgtctggagtgtctgccatggccgccctggacagcctgagcctcttcaccagcctgggcctgtctgagcagaaggcccgggagaccctgaagaacagcgccctgagcgcccagctgcgggaggccgccacccaggcccagcagaccctgggcagcaccatcgacaaggccaccggcatcctgctgtatggcctggccagccggctgcgggacacccggcggctgtccttcctggtgtcctacatcgccagcaagaagatccacacagagccccagctgtctgctgccctggagtatgtgcgcagccaccccctggaccccatcgacacagtggactttgagcgggagtgtggggtgggcgtcatcgtgaccccagagcagatcgaggaggccgtggaggccgccatcaacagacaccggccccagctgctggtggagcgctaccacttcaacatgggcctgctgatgggagaggcccgggctgtgctgaagtgggcagatggcaagatgatcaagaatgaggtggacatgcaggtgctgcacctgctgggccccaagctggaggccgacctggagaagaagttcaaggtggccaaggcccggctggaggagacagacagaagaacagccaaggatgtggtggagaatggagaaacagctgaccagaccctgagcctgatggagcagctgcggggggaggccctgaagttccacaagccaggcacctaccctgtgcctgcccggacccagtggaacccagcctactggacctgccagagccaccagttccagctgtggctgtgccaggtgtag

SEQ ID NO: 154046 - DNA, 2874 bp, synthetic construct
  misc_feature 1..2874: note = Description of Artificial Sequence: Synthetic coding sequence
  source 1..2874: mol_type = other DNA
atgaactttgctgagcgggagggcagcaagcgctactgcatccagaccaagcacgtggccatcctgtgtgctgtggtggtgggcgtgggcctcatcgtgggcctggccgtgggcctgaccaggagctgtgacagcagtggagatggcggccctggaacagccccagcccccagccacctgcccagcagcacagccagccccagcggccccccagcccaggaccaggacatctgcccagcctctgaagatgaaagtggccagtggaagaacttccggctgcctgactttgtgaaccctgtgcactatgacctgcacgtgaagcccctgctggaggaggacacctacacaggcaccgtgtccatcagcatcaacctgagcgcccccacccgctacctgtggctgcacctgcgggagacccgcatcacccggctgcctgagctgaagaggccttctggggaccaggtgcaggtgcggcgctgctttgagtacaagaagcaggagtatgtggtggtggaggccgaggaggagctgacccccagcagtggagatggcctgtacctgctgaccatggagtttgctggctggctgaatggcagcctggtgggcttctaccgcaccacctacacagaaaatggccaggtgaagagcatcgtggccacagaccacgagcccacagatgccaggaagagcttcccctgctttgatgagcccaacaagaaggccacctacaccatcagcatcacccaccccaaggagtatggagccctgagcaacatgcctgtggccaaggaggagagcgtggatgacaagtggaccaggaccacctttgagaagtctgtgcccatgagcacctacctggtgtgctttgctgtgcaccagtttgacagcgtgaagaggatcagcaacagcggcaagcccctgaccatctacgtgcagcctgagcagaagcacacagcagaatatgctgccaacatcaccaagtctgtgtttgactactttgaggagtactttgccatgaactacagcctgcccaagctggacaagatcgccatcccagactttggcaccggggccatggagaactggggcctcatcacctaccgggagaccaacctgctgtatgaccccaaggagagcgccagcagcaaccagcagagggtggccaccgtggtggcccacgagctggtgcaccagtggtttggaaatattgtgaccatggactggtgggaggacctgtggctgaatgaaggatttgccagcttctttgagttcctgggcgtgaaccacgccgagacagactggcagatgagggaccagatgctgctggaggatgtgctgcctgtgcaggaggatgacagcctgatgagcagccaccccatcatcgtgacagtgaccaccccagatgagatcacctctgtgtttgatggcatctcctacagcaagggcagcagcatcctgaggatgctggaggactggatcaagccagagaacttccagaagggctgccagatgtacctggagaagtaccagttcaagaatgccaagaccagtgacttctgggccgccctggaggaggccagccggctgcctgtgaaggaggtgatggacacctggacccggcagatgggctaccctgtgctgaatgtgaatggagtgaagaacatcacccagaagcgcttcctgctggacccccgggccaaccccagccagcccccaagtgacctgggctacacctggaacatccctgtgaagtggacagaggacaacatcaccagctctgtgctcttcaacagaagtgagaaggagggcatcaccctgaacagcagcaaccccagcggaaatgccttcctgaagatcaacccagaccacatcggcttctacagagtgaactatgaggtggccacctgggacagcatcgccacagccctgagcctgaaccacaagaccttcagcagcgctgaccgggccagcctgattgatgatgcctttgccctggcccgggcccagctgctggactacaaggtggccctgaacctgaccaagtacctgaagcgggaggagaacttcctgccctggcagagggtcatctctgctgtgacctacatcatctccatgtttgaagatgacaaggagctgtaccccatgattgaggagtacttccagggccaggtgaagcccatcgctgacagcctgggctggaatgatgctggggaccacgtgaccaagctgctgcggagctctgtgctgggctttgcctgcaagatgggagaccgggaggccctgaacaatgccagcagcctgtttgagcagtggctgaatggaacagtgtccctgcctgtgaacctgcggctgctggtgtaccgctatggcatgcagaacagcggaaatgagatctcctggaactacaccctggagcagtaccagaagaccagcctggcccaggagaaggagaagctgctgtatggcctggcctctgtgaagaatgtgaccctgctgagccgctacctggacctgctgaaggacaccaacctgatcaagacccaggatgtgttcaccgtcatccgctacatctcctacaacagctatggcaagaacatggcctggaactggatccagctgaactgggactacctggtgaaccgctacaccctgaacaacagaaacctgggccgcatcgtgaccatcgccgagcccttcaacacagagctgcagctgtggcagatggagagcttctttgccaagtacccccaggccggggccggggagaagccccgggagcaggtgctggagaccgtgaagaacaacatcgagtggctgaagcagcacaggaacaccatccgggagtggttcttcaacctgctggagagcggctag

SEQ ID NO: 154047 - DNA, 4539 bp, synthetic construct
  misc_feature 1..4539: note = Description of Artificial Sequence: Synthetic coding sequence
  source 1..4539: mol_type = other DNA
atggccaccctgagcctgactgtgaacagcggggacccccccctgggcgccctgctggccgtggagcacgtgaaggatgatgtgtccatctctgtggaggagggcaaggagaacatcctgcacgtgtctgaaaatgtcatcttcacagatgtgaacagcatcctgcgctacctggcccgggtggccaccacagctggcctgtatggcagcaacctgatggagcacacagaaattgaccactggctggagttcagcgccaccaagctgagcagctgtgacagcttcaccagcaccatcaatgagctgaaccactgcctgagcctgcggacctacctggtgggcaacagcctgagcctggccgacctgtgtgtgtgggccaccctgaagggaaatgctgcctggcaggagcagctgaagcagaagaaggcccctgtgcacgtgaagcgctggtttggcttcctggaggcccagcaggccttccagagcgtgggcaccaagtgggatgtgtccaccaccaaggcccgggtggcccctgagaagaagcaggatgtgggcaagtttgtggagctgcctggagctgagatgggcaaggtgacagtgcgcttccccccagaggccagcggctacctgcacatcggccacgccaaggccgccctgctgaaccagcactaccaggtgaacttcaagggcaagctgatcatgagatttgatgacaccaaccctgagaaggagaaggaggactttgagaaggtgatcctggaggatgtggccatgctgcacatcaagccagaccagttcacctacaccagtgaccactttgagaccatcatgaagtatgcagagaagctgatccaggagggcaaggcctacgtggatgacaccccagctgagcagatgaaggccgagcgggagcagagaattgacagcaagcacaggaagaaccccatcgagaagaacctgcagatgtgggaggagatgaagaagggcagccagtttggccagagctgctgcctgcgggccaagattgacatgagcagcaacaacggctgcatgagggaccccaccctgtaccgctgcaagatccagccccaccccaggactggaaacaagtacaacgtgtaccccacctatgactttgcctgccccatcgtggacagcattgaaggagtgacccacgccctgcggaccacagagtaccatgacagagatgagcagttctactggatcatcgaggccctgggcatcaggaagccctacatctgggagtacagccggctgaacctgaacaacacagtgctgagcaagaggaagctgacctggtttgtgaatgaaggcctggtggatggctgggatgacccccgcttccccaccgtgcggggcgtgctgcggcggggcatgacagtggagggcctgaagcagttcatcgccgcccagggcagcagccgctctgtggtgaacatggagtgggacaagatctgggccttcaacaagaaggtgattgatcctgtggcccccaggtatgtggccctgctgaagaaggaggtgattcctgtgaatgtgcctgaggcccaggaggagatgaaggaggtggccaagcaccccaagaaccctgaggtgggcctgaagcctgtgtggtacagccccaaggtgttcatcgagggcgcagatgctgagaccttcagcgagggggagatggtgaccttcatcaactggggcaacctgaacatcaccaagatccacaagaatgctgatggcaagatcatcagcctggatgccaagctgaacctggagaacaaggactacaagaagaccaccaaggtgacctggctggccgagaccacccacgccctgcccatccctgtgatctgtgtgacctatgagcacctgatcaccaagcctgtgctgggcaaggatgaggacttcaagcagtatgtgaacaagaacagcaagcatgaggagctgatgctgggggacccctgcctgaaggacctgaagaagggggacatcatccagctgcagaggcggggcttcttcatctgtgaccagccctatgagcctgtgagcccctacagctgcaaggaggccccctgtgtgctgatctacatcccagatggccacaccaaggagatgcccaccagcggcagcaaggagaagaccaaggtggaggccaccaagaatgagaccagcgcccccttcaaggagcggcccacccccagcctgaacaacaactgcaccaccagcgaggacagcctggtgctgtacaacagagtggccgtgcagggagatgtggtgcgggagctgaaggccaagaaggcccccaaggaggatgtggatgctgctgtgaagcagctgctgagcctgaaggccgagtacaaggagaagacaggccaggagtacaagccaggcaaccccccagctgagatcggccagaacatcagcagcaacagcagcgccagcatcctggagagcaagagcctgtatgatgaggtggccgcccagggcgaggtggtgaggaagctgaaggccgagaagagccccaaggccaagatcaatgaagctgtggagtgcctgctgagcctgaaggcccagtacaaggagaagacaggcaaggagtacatccctggccagccccccctgagccagagcagtgacagcagccccaccagaaattctgagcccgccggcctggagaccccagaggccaaggtgctgtttgacaaggtggccagccagggcgaggtggtgaggaagctgaagacagagaaggcccccaaggaccaggtggacattgctgtgcaggagctgctgcagctgaaggcccagtacaagagcctcatcggcgtggagtacaagcctgtgtctgccaccggggctgaggacaaggacaagaagaagaaggagaaggagaacaagtctgagaagcagaacaagccccagaagcagaatgatggccagaggaaggaccccagcaagaaccagggcggcggcctgagcagcagcggggccggggagggccagggccccaagaagcagacccggctgggcctggaggccaagaaggaggagaacctggccgactggtacagccaggtgatcaccaagtctgagatgattgagtaccatgacatcagcggctgctacatcctgcggccctgggcctatgccatctgggaggccatcaaggacttctttgatgctgagatcaagaagctgggcgtggagaactgctacttccccatgtttgtgtcccagagcgccctggagaaggagaagacccacgtggccgactttgcccctgaggtggcctgggtgaccaggtctgggaagacagagctggccgagcccatcgccatccggcccaccagcgagaccgtgatgtacccagcctatgccaagtgggtgcagagccaccgggacctgcccatcaagctgaaccagtggtgcaatgtggtgcgctgggagttcaagcacccccagcccttcctgcggacccgggagttcctgtggcaggagggccacagcgcctttgccaccatggaggaggccgctgaggaggtgctgcagatcctggacctgtatgcccaggtgtatgaggagctgctggccatccctgtggtgaagggcaggaagacagagaaggagaagtttgctggaggagactacaccaccaccatcgaggccttcatcagcgccagcggccgggccatccagggcggcaccagccaccacctgggccagaacttcagcaagatgtttgagatcgtgtttgaggaccccaagatccctggagagaagcagtttgcctaccagaacagctggggcctgaccaccaggaccatcggcgtgatgaccatggtgcatggagacaacatgggcctggtgctgcccccccgggtggcctgtgtgcaggtggtgatcatcccctgtggcatcaccaatgccctgtctgaggaggacaaggaggccctgattgccaagtgcaatgactacagaagaaggctgctgtctgtgaacatccgggtgcgggctgacctgcgggacaactacagccctggctggaagttcaaccactgggagctgaagggcgtgcccatccggctggaggtgggcccccgggacatgaagagctgccagtttgtggccgtgagaagagacaccggggagaagctgactgtggccgagaatgaagctgagaccaagctgcaggccatcctggaggacatccaggtgaccctcttcacccgggccagcgaggacctgaagacccacatggtggtggccaacaccatggaggacttccagaagatcctggacagcggcaagatcgtgcagatccccttctgtggggagattgactgtgaggactggatcaagaagaccacagcccgggaccaggacctggagcccggggcccccagcatgggcgccaagagcctgtgcatccccttcaagcccctgtgtgagctgcagcccggggccaagtgtgtgtgtgggaagaacccagccaagtactacaccctgtttggccgcagctactag

SEQ ID NO: 154048 - DNA, 2964 bp, synthetic construct
  misc_feature 1..2964: note = Description of Artificial Sequence: Synthetic coding sequence
  source 1..2964: mol_type = other DNA
atggccaccctgagcctgactgtgaacagcggggacccccccctgggcgccctgctggccgtggagcacgtgaaggatgatgtgtccatctctgtggaggagggcaaggagaacatcctgcacgtgtctgaaaatgtcatcttcacagatgtgaacagcatcctgcgctacctggcccgggtggccaccacagctggcctgtatggcagcaacctgatggagcacacagaaattgaccactggctggagttcagcgccaccaagctgagcagctgtgacagcttcaccagcaccatcaatgagctgaaccactgcctgagcctgcggacctacctggtgggcaacagcctgagcctggccgacctgtgtgtgtgggccaccctgaagggaaatgctgcctggcaggagcagctgaagcagaagaaggcccctgtgcacgtgaagcgctggtttggcttcctggaggcccagcaggccttccagagcgtgggcaccaagtgggatgtgtccaccaccaaggcccgggtggcccctgagaagaagcaggatgtgggcaagtttgtggagctgcctggagctgagatgggcaaggtgacagtgcgcttccccccagaggccagcggctacctgcacatcggccacgccaaggccgccctgctgaaccagcactaccaggtgaacttcaagggcaagctgatcatgagatttgatgacaccaaccctgagaaggagaaggaggactttgagaaggtgatcaagtctgtggtgatgaccctgtgccagaagagcatcaaggtgacaggcctgcccaacaccttcatggtgatcctggaggatgtggccatgctgcacatcaagccagaccagttcacctacaccagtgaccactttgagaccatcatgaagtatgcagagaagctgatccaggagggcaaggcctacgtggatgacaccccagctgagcagatgaaggccgagcgggagcagagaattgacagcaagcacaggaagaaccccatcgagaagaacctgcagatgtgggaggagatgaagaagggcagccagtttggccagagctgctgcctgcgggccaagattgacatgagcagcaacaacggctgcatgagggaccccaccctgtaccgctgcaagatccagccccaccccaggactggaaacaagtacaacgtgtaccccacctatgactttgcctgccccatcgtggacagcattgaaggagtgacccacgccctgcggaccacagagtaccatgacagagatgagcagttctactggatcatcgaggccctgggcatcaggaagccctacatctgggagtacagccggctgaacctgaacaacacagtgctgagcaagaggaagctgacctggtttgtgaatgaaggcctggtggatggctgggatgacccccgcttccccaccgtgcggggcgtgctgcggcggggcatgacagtggagggcctgaagcagttcatcgccgcccagggcagcagccgctctgtggtgaacatggagtgggacaagatctgggccttcaacaagaaggtgattgatcctgtggcccccaggtatgtggccctgctgaagaaggaggtgattcctgtgaatgtgcctgaggcccaggaggagatgaaggaggtggccaagcaccccaagaaccctgaggtgggcctgaagcctgtgtggtacagccccaaggtgttcatcgagggcgcagatgctgagaccttcagcgagggggagatggtgaccttcatcaactggggcaacctgaacatcaccaagatccacaagaatgctgatggcaagatcatcagcctggatgccaagctgaacctggagaacaaggactacaagaagaccaccaaggtgacctggctggccgagaccacccacgccctgcccatccctgtgatctgtgtgacctatgagcacctgatcaccaagcctgtgctgggcaaggatgaggacttcaagcagtatgtgaacaagaacagcaagcatgaggagctgatgctgggggacccctgcctgaaggacctgaagaagggggacatcatccagctgcagaggcggggcttcttcatctgtgaccagccctatgagcctgtgagcccctacagctgcaaggaggccccctgtgtgctgatctacatcccagatggccacaccaaggagatgcccaccagcggcagcaaggagaagaccaaggtggaggccaccaagaatgagaccagcgcccccttcaaggagcggcccacccccagcctgaacaacaactgcaccaccagcgaggacagcctggtgctgtacaacagagtggccgtgcagggagatgtggtgcgggagctgaaggccaagaaggcccccaaggaggatgtggatgctgctgtgaagcagctgctgagcctgaaggccgagtacaaggagaagacaggccaggagtacaagccaggcaaccccccagctgagatcggccagaacatcagcagcaacagcagcgccagcatcctggagagcaagagcctgtatgatgaggtggccgcccagggcgaggtggtgaggaagctgaaggccgagaagagccccaaggccaagatcaatgaagctgtggagtgcctgctgagcctgaaggcccagtacaaggagaagacaggcaaggagtacatccctggccagccccccctgagccagagcagtgacagcagccccaccagaaattctgagcccgccggcctggagaccccagaggccaaggtgctgtttgacaaggtggccagccagggcgaggtggtgaggaagctgaagacagagaaggcccccaaggaccaggtggacattgctgtgcaggagctgctgcagctgaaggcccagtacaagagcctcatcggcgtggagtacaagcctgtgtctgccaccggggctgaggacaaggacaagtag

SEQ ID NO: 154049 - DNA, 2928 bp, synthetic construct
  misc_feature 1..2928: note = Description of Artificial Sequence: Synthetic coding sequence
  source 1..2928: mol_type = other DNA
atggccaccctgagcctgactgtgaacagcggggacccccccctgggcgccctgctggccgtggagcacgtgaaggatgatgtgtccatctctgtggaggagggcaaggagaacatcctgcacgtgtctgaaaatgtcatcttcacagatgtgaacagcatcctgcgctacctggcccgggtggccaccacagctggcctgtatggcagcaacctgatggagcacacagaaattgaccactggctggagttcagcgccaccaagctgagcagctgtgacagcttcaccagcaccatcaatgagctgaaccactgcctgagcctgcggacctacctggtgggcaacagcctgagcctggccgacctgtgtgtgtgggccaccctgaagggaaatgctgcctggcaggagcagctgaagcagaagaaggcccctgtgcacgtgaagcgctggtttggcttcctggaggcccagcaggccttccagagcgtgggcaccaagtgggatgtgtccaccaccaaggcccgggtggcccctgagaagaagcaggatgtgggcaagtttgtggagctgcctggagctgagatgggcaaggtgacagtgcgcttccccccagaggccagcggctacctgcacatcggccacgccaaggccgccctgctgaaccagcactaccaggtgaacttcaagggcaagctgatcatgagatttgatgacaccaaccctgagaaggagaaggaggactttgagaaggtgatcctggaggatgtggccatgctgcacatcaagccagaccagttcacctacaccagtgaccactttgagaccatcatgaagtatgcagagaagctgatccaggagggcaaggcctacgtggatgacaccccagctgagcagatgaaggccgagcgggagcagagaattgacagcaagcacaggaagaaccccatcgagaagaacctgcagatgtgggaggagatgaagaagggcagccagtttggccagagctgctgcctgcgggccaagattgacatgagcagcaacaacggctgcatgagggaccccaccctgtaccgctgcaagatccagccccaccccaggactggaaacaagtacaacgtgtaccccacctatgactttgcctgccccatcgtggacagcattgaaggagtgacccacgccctgcggaccacagagtaccatgacagagatgagcagttctactggatcatcgaggccctgggcatcaggaagccctacatctgggagtacagccggctgaacctgaacaacacagtgctgagcaagaggaagctgacctggtttgtgaatgaaggcctggtggatggctgggatgacccccgcttccccaccgtgcggggcgtgctgcggcggggcatgacagtggagggcctgaagcagttcatcgccgcccagggcagcagccgctctgtggtgaacatggagtgggacaagatctgggccttcaacaagaagctgcgggccctgtgcaagaaggtgattgatcctgtggccccccgctacgtggccctgctgaagaaggaggtgattcctgtgaatgtgcctgaggcccaggaggagatgaaggaggtggccaagcaccccaagaaccctgaggtgggcctgaagcctgtgtggtacagccccaaggtgttcattgaaggagcagatgctgagaccttcagcgagggggagatggtgaccttcatcaactggggcaacctgaacatcaccaagatccacaagaatgctgatggcaagatcatcagcctggatgccaagctgaacctggagaacaaggactacaagaagaccaccaaggtgacctggctggccgagaccacccacgccctgcccatccctgtgatctgtgtgacctatgagcacctgatcaccaagcctgtgctgggcaaggatgaggacttcaagcagtatgtgaacaagaacagcaagcatgaggagctgatgctgggggacccctgcctgaaggacctgaagaagggggacatcatccagctgcagaggcggggcttcttcatctgtgaccagccctatgagcctgtgagcccctacagctgcaaggaggccccctgtgtgctgatctacatcccagatggccacaccaaggagatgcccaccagcggcagcaaggagaagaccaaggtggaggccaccaagaatgagaccagcgcccccttcaaggagcggcccacccccagcctgaacaacaactgcaccaccagcgaggacagcctggtgctgtacaacagagtggccgtgcagggagatgtggtgcgggagctgaaggccaagaaggcccccaaggaggatgtggatgctgctgtgaagcagctgctgagcctgaaggccgagtacaaggagaagacaggccaggagtacaagccaggcaaccccccagctgagatcggccagaacatcagcagcaacagcagcgccagcatcctggagagcaagagcctgtatgatgaggtggccgcccagggcgaggtggtgaggaagctgaaggccgagaagagccccaaggccaagatcaatgaggccgtggagtgcctgctgagcctgaaggcccagtacaaggagaagacaggcaaggagtacatccctggccagccccccctgagccagagcagtgacagcagccccaccaggaacagcgagcctgctggcctggagaccccagaggccaaggtgctgtttgacaaggtggccagccagggcgaggtggtgaggaagctgaagacagagaaggcccccaaggaccaggtggacattgctgtgcaggagctgctgcagctgaaggcccagtacaagagcctgattggagtggagtacaagcctgtgtctgccactggagctgaggacaaggacaagaagaagaaggagaagtag

SEQ ID NO: 154050 - DNA, 1572 bp, synthetic construct
  misc_feature 1..1572: note = Description of Artificial Sequence: Synthetic coding sequence
  source 1..1572: mol_type = other DNA
atggccgccctgctgcggcggctgctgcagcgggagcggcccagcgctgccagcggccggcctgtgggccggcgggaggccaacctgggcacagatgctggggtggccgtgcgggtgcgctttgcccccagccccaccggcttcctgcacctgggcggcctgaggacagccctgtacaactacatctttgccaagaagtaccagggcagcttcatcctgcggctggaggacacagaccagaccagggtggtgcctggagctgctgaaaatattgaggacatgctggagtgggccggcatccccccagatgagagccccaggagaggaggccctgctggcccctaccagcagagccagaggctggagctgtatgcccaggccacagaggccctgctgaagacaggagctgcctacccctgcttctgcagcccccagaggctggagctgctgaagaaggaggccctgaggaaccaccagacccccaggtatgacaaccgctgcaggaacatgagccaggagcaggtggcccagaagctggccaaggaccccaagccagccatccgcttccggctggagcaggtggtgcctgccttccaggacctggtgtatggctggaacagacatgaggtggcctctgtggagggggaccctgtgatcatgaagagtgatggcttccccacctaccacctggcctgtgtggtggatgaccaccacatgggcatcagccacgtgctgcggggcagcgagtggctggtgtccacagccaagcacctgctgctgtaccaggccctgggctggcagcccccccactttgcccacctgcccctgctgctgaacagagatggcagcaagctgagcaagaggcagggagatgtgttcctggagcactttgctgctgatggcttcctgcctgacagcctgctggacatcatcaccaactgtggcagcggctttgctgagaaccagatgggccgcaccctgcctgagctgatcacccagttcaacctgacccaggtgacctgccacagcgccctgctggacctggagaagctgcctgagttcaaccggctgcacctgcagaggctggtgtccaatgaaagccagaggcggcagctggtgggcaagctgcaggtgctggtggaggaggccttcggctgccagctgcagaacagagatgtgctgaaccctgtgtatgtggagcgcatcctgctgctgcggcagggccacatctgccgcctgcaggacctggtgtcccctgtgtacagctacctgtggaccaggcctgctgtgggccgggcccagctggatgccatcagcgagaaggtggatgtgattgccaagagggtgctgggcctgctggagaggagctccatgagcctgacccaggacatgctgaatggagagctgaagaagctgtctgagggcctggagggcaccaagtacagcaatgtgatgaagctgctgaggatggccctgagcggccagcagcagggcccccctgtggccgagatgatgctggccctgggccccaaggaggtgcgggagcgcatccagaaggtggtgagcagctag

SEQ ID NO: 154051 - DNA, 1572 bp, synthetic construct; identical to SEQ ID NO: 154050
  misc_feature 1..1572: note = Description of Artificial Sequence: Synthetic coding sequence
  source 1..1572: mol_type = other DNA

SEQ ID NO: 154052 - DNA, 321 bp, synthetic construct
  misc_feature 1..321: note = Description of Artificial Sequence: Synthetic coding sequence
  source 1..321: mol_type = other DNA
atggcccaggagtttgtgaactgcaagatccagcccgggaaggtggtggtgttcatcaagcccacctgcccctactgcagaagagcccaggagatcctgagccagctgcccatcaagcagggcctgctggagtttgtggacatcacagccaccaaccacaccaatgagatccaggactacctgcagcagctgactggagccaggacagtgcccagggtcttcatcggcaaggactgcatcggcggctgcagcgacctggtgtccctgcagcagagcggggagctgctgacccggctgaagcagatcggggccctgcagtag

SEQ ID NO: 154053 - DNA, 321 bp, synthetic construct; identical to SEQ ID NO: 154052
  misc_feature 1..321: note = Description of Artificial Sequence: Synthetic coding sequence
  source 1..321: mol_type = other DNA

SEQ ID NO: 154054 - DNA, 321 bp, synthetic construct; identical to SEQ ID NO: 154052
  misc_feature 1..321: note = Description of Artificial Sequence: Synthetic coding sequence
  source 1..321: mol_type = other DNA

SEQ ID NO: 154055 - DNA, 321 bp, synthetic construct; identical to SEQ ID NO: 154052
  misc_feature 1..321: note = Description of Artificial Sequence: Synthetic coding sequence
  source 1..321: mol_type = other DNA

SEQ ID NO: 154056 - DNA, 321 bp, synthetic construct; identical to SEQ ID NO: 154052
  misc_feature 1..321: note = Description of Artificial Sequence: Synthetic coding sequence
  source 1..321: mol_type = other DNA

SEQ ID NO: 154057 - DNA, 495 bp, synthetic construct
  misc_feature 1..495: note = Description of Artificial Sequence: Synthetic coding sequence
  source 1..495: mol_type = other DNA
atgatctggaggcgggccgccctggccggcacccggctggtgtggagccgcagcggcagcgctggctggctggacagagctgctggagctgctggagctgctgctgctgctgccagcggcatggagagcaacaccagcagcagcctggagaacctggccacagcccctgtgaaccagatccaggagaccatcagtgacaactgtgtggtgatcttcagcaagaccagctgcagctactgcaccatggccaagaagctgttccatgacatgaatgtgaactacaaggtggtggagctggacctgctggagtatggcaaccagttccaggatgccctgtacaagatgaccggggagaggacagtgccccgcatctttgtgaatggcaccttcatcggcggggccacagacacccaccggctgcacaaggagggcaagctgctgcccctggtgcaccagtgctacctgaagaagagcaagaggaaggagttccagtag

SEQ ID NO: 154058 - DNA, 498 bp, synthetic construct
  misc_feature 1..498: note = Description of Artificial Sequence: Synthetic coding sequence
  source 1..498: mol_type = other DNA
atgaacccccgggacaagcaggtgagccgcttcagccccctgaaggatgtgtacacctgggtggccctggccggcatccagaggagcggcagccctggccgcaccaggtctgctgcccggaggatggagagcaacaccagcagcagcctggagaacctggccacagcccctgtgaaccagatccaggagaccatcagtgacaactgtgtggtgatcttcagcaagaccagctgcagctactgcaccatggccaagaagctgttccatgacatgaatgtgaactacaaggtggtggagctggacctgctggagtatggcaaccagttccaggatgccctgtacaagatgactggagagaggacagtgccccgcatctttgtgaatggcaccttcatcggcggggccacagacacccaccggctgcacaaggagggcaagctgctgcccctggtgcaccagtgctacctgaagaagagcaagaggaaggagttccagtag

SEQ ID NO: 154059 - DNA, 1008 bp, synthetic construct
  misc_feature 1..1008: note = Description of Artificial Sequence: Synthetic coding sequence
  source 1..1008: mol_type = other DNA
atggctgctggagctgctgaggccgctgtggccgctgtggaggaggtgggcagcgctggccagtttgaggagctgctgcggctgaaggccaagagcctgctggtggtgcacttctgggccccctgggccccccagtgtgcccagatgaatgaggtgatggccgagctggccaaggagctgccccaggtgtcctttgtgaagctggaggccgagggcgtgcctgaggtgtctgagaagtatgagatcagctctgtgcccaccttcctgttcttcaagaacagccagaagattgaccggctggatggagcccacgcccctgagctgaccaagaaggtgcagagacatgccagcagcggcagcttcctgcccagcgccaatgagcacctgaaggaggacctgaacctgcggctgaagaagctgacccatgctgccccctgcatgctgttcatgaagggcaccccccaggagccccgctgtggcttcagcaagcagatggtggagatcctgcacaagcacaacatccagttcagcagctttgacatcttcagtgatgaggaggtgcggcagggcctgaaggcctacagctcctggcccacctacccccagctgtatgtgtctggagagctgattggaggcctggacatcatcaaggagctggaggccagcgaggagctggacaccatctgccccaaggcccccaagctggaggagcggctgaaggtgctgaccaacaaggcctctgtgatgctgttcatgaagggcaacaagcaggaggccaagtgtggcttcagcaagcagatcctggagatcctgaacagcactggagtggagtatgagacctttgacatcctggaggatgaggaggtgcggcagggcctgaaggcctacagcaactggcccacctacccccagctgtatgtgaagggggagctggtgggcggcctggacatcgtgaaggagctgaaggaaaatggagagctgctgcccatcctgcggggggagaactag

SEQ ID NO: 154060 - DNA, 1008 bp, synthetic construct; identical to SEQ ID NO: 154059
  misc_feature 1..1008: note = Description of Artificial Sequence: Synthetic coding sequence
  source 1..1008: mol_type = other DNA

SEQ ID NO: 154061 - DNA, 1008 bp, synthetic construct; identical to SEQ ID NO: 154059
  misc_feature 1..1008: note = Description of Artificial Sequence: Synthetic coding sequence
  source 1..1008: mol_type = other DNA

SEQ ID NO: 154062 - DNA, 474 bp, synthetic construct
  misc_feature 1..474: note = Description of Artificial Sequence: Synthetic coding sequence
  source 1..474: mol_type = other DNA
atgagcggcagcctgggccgggctgctgctgccctgctgcgctggggcagaggagctgggggcggcggcctgtggggccctggggtgcgggccgccggcagcggggccggcggcggcggcagcgctgagcagctggatgccctggtgaagaaggacaaggtggtggtgttcctgaagggcaccccagagcagccccagtgtggcttcagcaatgctgtggtgcagatcctgcggctgcacggcgtgcgggactatgctgcctacaacgtgctggatgatcctgagctgcggcagggcatcaaggactacagcaactggcccaccatcccccaggtgtacctgaatggagaatttgtgggcggctgtgacatcctgctgcagatgcaccagaatggagacctggtggaggagctgaagaagctgggcatccacagcgccctgctggatgagaagaaggaccaggacagcaagtag

SEQ ID NO: 154063 - DNA, 873 bp, synthetic construct
  misc_feature 1..873: note = Description of Artificial Sequence: Synthetic coding sequence
  source 1..873: mol_type = other DNA
atgctgaagcgggagatgaagccagagagtgaccggcccaggaaggtgcgcttccgcatcgccagcagccacagcggccgggtgctgaaggaggtgtatgaagatggccagcccagcggcagcctggacagtgaatgtgccagcatctgtggcattgatggcctgggggacagtgatggccagcagaatggccacatcgagagtgaaggagatgaaaatgaaaatgaccaggacagcctgctggtgctggcccgggccgccagcgagaagggcttcggcaccaggagagtgaacatcctgagcaagaatggaacagtgcggggcgtgaagtacaaggtgtctgctggccaggccctcttcaacaacctgaccaaggtgctgcagcagcccagcacagacctggagtttgacagagtggtgatctacaccacctgcctgcgggtggtgaggaccacctttgagcgctgtgagctggtgaggaagatcttccagaaccaccgggtgaagtttgaggagaagaacatcgccctgaatggagaatatggcaaggagctggatgagcgctgccggcgggtgtctgaggcccccagcctgcctgtggtgttcattgatggccactacctgggcggcgctgagaagatcctgtccatgaatgaaagtggagagctgcaggacatcctgaccaagattgaaagagtgcagcacccccatgagtgccccagctgtggcggcttcggcttcctgccctgcagcgtgtgccacggcagcaagatgtccatgttcaggaactgcttcacagacagcttcaaggccctgaagtgcacagcctgcaatgaaaatggcctgcagcgctgcaagaactgtgccggctag

SEQ ID NO: 154064 - DNA, 828 bp, synthetic construct; identical to SEQ ID NO: 145811
  misc_feature 1..828: note = Description of Artificial Sequence: Synthetic coding sequence
  source 1..828: mol_type = other DNA

SEQ ID NO: 154065 - DNA, 987 bp, synthetic construct
  misc_feature 1..987: note = Description of Artificial Sequence: Synthetic coding sequence
  source 1..987: mol_type = other DNA
atggccctgcggggcgtgtctgtgcggctgctgagccggggccctggcctgcacgtgctgcggacctgggtgagcagcgctgcccagacagccagcaggcctgagtttgactggcaggaccccctggtgctggaggagcagctgaccacagatgagatcctgatccgggacaccttccgcacctactgccaggagcggctgatgccccgcatcctgctggccaacagaaatgaaggctacggctgtgccggcgtgtcctctgtggcctacggcctgctggcccgggagctggagcgggtggacagcggctaccgcagcgccatgtctgtgcagagcagcctggtgatgcaccccatctatgcctacggcagcgaggagcagaggcagaagtacctgccccagctggccaagggggagctgctgggctgcttcggcctgacagagcccaacagcggcagtgaccccagctccatggagacccgggcccactacaacagcagcaacaagagctacaccctgaatggcaccaagacctggatcaccaacagccccatggctgacctgtttgtggtgtgggcccgctgtgaagatggctgcatccggggcttcctgctggagaagggcatgaggggcctgagcgccccccgcatccagggcaagttcagcctgcgggccagcgccaccggcatgatcatcatggatggagtggaggtgcctgaagaaaatgtgctgcccggggccagcagcctgggcggccccttcggctgcctgaacaatgcccgctatggcatcgcctggggcgtgctgggcgccagcgagttctgcctgcacacagcccggcagtatgccctggacaggatgcagtttggagtgcccctggccaggaaccagctgatccagaagaagctggccgacatgctgacagagatcaccctgggcctgcacgcctgcctgcagctgggccgcctgaaggaccaggacaagtag

SEQ ID NO: 154066 - DNA, 1185 bp, synthetic construct
  misc_feature 1..1185: note = Description of Artificial Sequence: Synthetic coding sequence
  source 1..1185: mol_type = other DNA
atgaggagcagcagcggcaccccatctgcccccacagcccggcgggacagctgcctggccagctgctggcccatcgccaccaagagcctggccctgctgccccggctggagtgcagcggcaccatcctggcccactgcaagttctgcctgcccggcagcagtgacagccctgccagcacccccctggtggccggcatcaccggctacggctgtgccggcgtgtcctctgtggcctacggcctgctggcccgggagctggagcgggtggacagcggctacagaagtgccatgtctgtgcagagcagcctggtgatgcaccccatctatgcctacggcagcgaggagcagaggcagaagtacctgccccagctggccaagggggagctgctgggctgcttcggcctgacagagcccaacagcggcagtgaccccagctccatggagacccgggcccactacaacagcagcaacaagagctacaccctgaatggcaccaagacctggatcaccaacagccccatggctgacctgtttgtggtgtgggcccgctgtgaagatggctgcatccggggcttcctgctggagaagggcatgaggggcctgagcgccccccgcatccagggcaagttcagcctgcgggccagcgccaccggcatgatcatcatggatggagtggaggtgcctgaggagaatgtgctgcccggggccagcagcctgggcggccccttcggctgcctgaacaatgcccgctatggaattgcctggggcgtgctgggcgccagcgagttctgcctgcacacagcccggcagtatgccctggacaggatgcagtttggagtgcccctggccaggaaccagctgatccagaagaagctggccgacatgctgacagagatcaccctgggcctgcacgcctgcctgcagctgggccgcctgaaggaccaggacaaggccgcccctgagatggtgtccctgctgaagaggaacaactgtgggaaggccctggacatcgcccggcaggcccgggacatgctgggcggcaatggcatcagtgatgagtaccacgtgatcagacatgccatgaacctggaggccgtgaacacctatgagggcacccatgacatccacgccctgatcctgggccgggccatcaccggcatccaggccttcaccgccagcaagtag

SEQ ID NO: 154067 - DNA, 1287 bp, synthetic construct
  misc_feature 1..1287: note = Description of Artificial Sequence: Synthetic coding sequence
  source 1..1287: mol_type = other DNA
atggccctgcggggcgtgtctgtgcggctgctgagccggggccctggcctgcacgtgctgcggacctgggtgagcagcgctgcccagacagagaagggcggccgcacccagagccagctggccaagagcagcaggcctgagtttgactggcaggaccccctggtgctggaggagcagctgaccacagatgagatcctgatccgggacaccttccgcacctactgccaggagcggctgatgccccgcatcctgctggccaacagaaatgaggtgttccaccgggagatcatcagcgagatgggagagctgggcgtgctgggccccaccatcaagggctacggctgtgccggcgtgtcctctgtggcctacggcctgctggcccgggagctggagcgggtggacagcggctacagaagtgccatgtctgtgcagagcagcctggtgatgcaccccatctatgcctacggcagcgaggagcagaggcagaagtacctgccccagctggccaagggggagctgctgggctgcttcggcctgacagagcccaacagcggcagtgaccccagctccatggagacccgggcccactacaacagcagcaacaagagctacaccctgaatggcaccaagacctggatcaccaacagccccatggctgacctgtttgtggtgtgggcccgctgtgaagatggctgcatccggggcttcctgctggagaagggcatgaggggcctgagcgccccccgcatccagggcaagttcagcctgcgggccagcgccaccggcatgatcatcatggatggagtggaggtgcctgaggagaatgtgctgcccggggccagcagcctgggcggccccttcggctgcctgaacaatgcccgctatggaattgcctggggcgtgctgggcgccagcgagttctgcctgcacacagcccggcagtatgccctggacaggatgcagtttggagtgcccctggccaggaaccagctgatccagaagaagctggccgacatgctgacagagatcaccctgggcctgcacgcctgcctgcagctgggccgcctgaaggaccaggacaaggccgcccctgagatggtgtccctgctgaagaggaacaactgtgggaaggccctggacatcgcccggcaggcccgggacatgctgggcggcaatggcatcagtgatgagtaccacgtgatcagacatgccatgaacctggaggccgtgaacacctatgaggtggtgcagatgtgcagcctgaagaggcgctggaacagcctgtag

SEQ ID NO: 154068 - DNA, 291 bp, synthetic construct
  misc_feature 1..291: note = Description of Artificial Sequence: Synthetic coding sequence
  source 1..291: mol_type = other DNA
atgtgtgccgcccggctggccgctgctgctgctgctgcccagagcgtgtatgccttcagcgcccggcccctggccggcggggagcctgtgtccctgggcagcctgcggggcaaggtgctgctgattgaaaatgtggccagcctgaccaccgtgcgggactacacccagatgaatgagctgcagaggcggctgggcccccggggcctggtggtgctgggcttcccctgcaaccagtttggccaccaggtgcggcgggcagagcggggcggggccggggctgatgtgcagtag

SEQ ID NO: 154069 - DNA, 606 bp, synthetic construct
  misc_feature 1..606: note = Description of Artificial Sequence: Synthetic coding sequence
  source 1..606: mol_type = other DNA
atgtgtgccgcccggctggccgctgctgctgctgctgcccagagcgtgtatgccttcagcgcccggcccctggccggcggggagcctgtgtccctgggcagcctgcggggcaaggtgctgctgattgaaaatgtggccagcctgaccaccgtgcgggactacacccagatgaatgagctgcagaggcggctgggcccccggggcctggtggtgctgggcttcccctgcaaccagtttggccaccaggagaatgccaagaatgaggagatcctgaacagcctgaagtatgtgcggcctgggggcggctttgagcccaacttcatgctgtttgagaagtgtgaggtgaatggagctggggcccaccccctgtttgccttcctgcgggaggccctgcctgcccccagtgatgatgccacagccctgatgacagaccccaagctgatcacctggagccctgtgtgcagaaatgatgtggcctggaactttgagaagttcctggtgggcccagatggagtgcccctgcggcgctacagccgccgcttccagaccatcgacatcgagccagacatcgaggccctgctgagccagggccccagctgtgcctag

SEQ ID NO: 154070 - DNA, 567 bp, synthetic construct
  misc_feature 1..567: note = Description of Artificial Sequence: Synthetic coding sequence
  source 1..567: mol_type = other DNA
atggccttcatcgccaagagcttctatgacctgagcgccatcagcctggatggagagaaggtggacttcaacaccttccggggccgggctgtgctgattgaaaatgtggccagcggcaccaccacccgggacttcacccagctgaatgagctgcagtgccgcttcccccggcggctggtggtgctgggcttcccctgcaaccagtttggccaccaggagaactgccagaatgaggagatcctgaacagcctgaagtatgtgcggcctgggggcggctaccagcccaccttcaccctggtgcagaagtgtgaggtgaatggccagaatgagcaccctgtgtttgcctacctgaaggacaagctgccctacccctatgatgaccccttcagcctgatgacagaccccaagctgatcatctggagccctgtgcggcggagtgatgtggcctggaactttgagaagttcctgattggccctgagggggagcccttccgccgctacagcaggaccttccccaccatcaacatcgagccagacatcaagaggctgctgaaggtggccatctag

SEQ ID NO: 154071 - DNA, 588 bp, synthetic construct
  misc_feature 1..588: note = Description of Artificial Sequence: Synthetic coding sequence
  source 1..588: mol_type = other DNA
atgagcctgggccgcctgtgccgcctgctgaagccagccctgctgtgtggggccctggccgcccctggcctggccggcaccatgtgtgccagcagagatgactggaggtgtgcccgctccatgcatgagttcagcgccaaggacattgatggccacatggtgaacctggacaagtaccggggctttgtgtgcatcgtgaccaacgtggccagccagaagacagaggtgaactacacccagctggtggacctgcacgcccgctatgcagaatgtggcctgcgcatcctggccttcccctgcaaccagtttgggaagcaggagcccggcagcaatgaggagatcaaggagtttgctgctggctacaacgtgaagtttgacatgttcagcaagatctgtgtgaatggagatgatgcccaccccctgtggaagtggatgaagatccagcccaagggcaagggcatcctgggcaatgccatcaagtggaacttcaccaagttcctgattgacaagaatggctgtgtggtgaagagatatggccccatggaggagcccctggtgattgagaaggacctgccccactacttctag

SEQ ID NO: 154072 - DNA, 666 bp, synthetic construct
  misc_feature 1..666: note = Description of Artificial Sequence: Synthetic coding sequence
  source 1..666: mol_type = other DNA
atgaccacccagctgcgggtggtgcacctgctgcccctgctgctggcctgctttgtgcagaccagccccaagcaggagaagatgaagatggactgccacaaggatgagaagggcaccatctatgactatgaggccatcgccctgaacaagaatgaatatgtgtccttcaagcagtatgtgggcaagcacatcctgtttgtgaatgtggccacctactgcggcctgacagcccagtacccagagctgaatgccctgcaggaggagctgaagccctacggcctggtggtgctgggcttcccctgcaaccagtttgggaagcaggagcccggggacaacaaggagatcctgcccggcctgaagtatgtgcggcctgggggcggctttgtgcccagcttccagctgtttgagaagggagatgtgaatggagagaaggagcagaaggtgttctccttcctgaagcacagctgcccccaccccagcgagatcctgggcaccttcaagagcatctcctgggaccctgtgaaggtgcatgacatccgctggaactttgagaagttcctggtgggcccagatggcatccctgtgatgcgctggagccaccgggccaccgtgtcctctgtgaagacagacatcctggcctacctgaagcagttcaagaccaagtag

SEQ ID NO: 154073 - DNA, 303 bp, synthetic construct
  misc_feature 1..303: note = Description of Artificial Sequence: Synthetic coding sequence
  source 1..303: mol_type = other DNA
atgaccacccagctgcgggtggtgcacctgctgcccctgctgctggcctgctttgtgcagaccagccccaagcaggagaagatgaagatggactgccacaaggatgagaagggcaccatctatgactatgaggccatcgccctgaacaagaatgaatatgtgtccttcaagcagtatgtgggcaagcacatcctgtttgtgaatgtggccacctactgcggcctgacagcccagtacccaggcatgtctgtgcagggagaagatctctacctggtgagcagcttcctgaggaagggcatgtag

SEQ ID NO: 154074 - DNA, 573 bp, synthetic construct
  misc_feature 1..573: note = Description of Artificial Sequence: Synthetic coding sequence
  source 1..573: mol_type = other DNA
atggccgagaagacccagaagtctgtgaagatcgcccctggagctgtggtgtgtgtggagagcgagatcagaggagatgtgaccatcggccccaggacagtcatccaccccaaggcccgcatcatcgccgaggccggccccatcgtcatcggggagggcaacctgattgaggagcaggccctgatcatcaatgcctacccagacaacatcaccccagacacagaagatcctgagcccaagcccatgatcatcggcaccaacaacgtgtttgaggtgggctgctacagccaggccatgaagatgggagacaacaacgtgattgagagcaaggcctacgtgggcagaaatgtcatcctgaccagcggctgcatcattggagcctgctgcaacctgaacacctttgaggtgatcccagaaaatacagtcatctacggggctgactgcctgcggcgggtgcagacagagcggccccagccccagaccctgcagctggacttcctgatgaagatcctgcccaactaccaccacctgaagaagaccatgaagggcagcagcacccctgtgaagaactag

SEQ ID NO: 154075 - DNA, 1440 bp, synthetic construct
  misc_feature 1..1440: note = Description of Artificial Sequence: Synthetic coding sequence
  source 1..1440: mol_type = other DNA
atggcctgccggcaggagccccagccccagggccccccacctgctgctggagctgtggccagctatgactacctggtgattggaggcggcagcggcggcctggccagcgcccggcgggctgctgagctgggcgcccgggctgctgtggtggagagccacaagctgggcggcacctgtgtgaatgtgggctgtgtgcccaagaaggtgatgtggaacacagctgtgcacagcgagttcatgcatgaccacgccgactatggcttccccagctgtgagggcaagttcaactggagggtcatcaaggagaagagagatgcctacgtgtcccggctgaatgccatctaccagaacaacctgaccaagagccacatcgagatcatccggggccatgctgccttcaccagtgaccccaagcccaccatcgaggtgtctgggaagaagtacacagccccccacatcctgattgccactggaggcatgcccagcacccctcatgagagccagatccctggggccagcctgggcatcaccagtgatggcttcttccagctggaggagctgcccggccgctctgtgattgtgggcgccggctacatcgctgtggagatggccggcatcctgagcgccctgggcagcaagaccagcctgatgatcagacatgacaaggtgctgcggagctttgacagcatgatcagcaccaactgcacagaggagctggagaatgctggggtggaggtgctgaagttcagccaggtgaaggaggtgaagaagaccctgagcggcctggaggtgtccatggtgacagctgtgcccggccgcctgcctgtgatgaccatgatcccagatgtggactgcctgctgtgggccatcggccgggtgcccaacaccaaggacctgagcctgaacaagctgggcatccagacagatgacaagggccacatcatcgtggatgagttccagaacaccaacgtgaagggcatctatgctgtgggagatgtgtgtgggaaggccctgctgacccctgtggccatcgccgccggcaggaagctggcccaccggctgtttgagtacaaggaggacagcaagctggactacaacaacatccccaccgtggtgttcagccacccccccatcggcaccgtgggcctgacagaagatgaggccatccacaagtatggaattgaaaatgtgaagacctacagcaccagcttcacccccatgtaccacgctgtgaccaagaggaagaccaagtgtgtgatgaagatggtgtgtgccaacaaggaggagaaggtggtgggcatccacatgcagggcctgggctgtgatgagatgctgcagggctttgctgtggccgtgaagatgggcgccaccaaggctgactttgacaacacagtggccatccaccccaccagcagcgaggagctggtgaccctgaggtag

SEQ ID NO: 154076 - DNA, 1323 bp, synthetic construct
  misc_feature 1..1323: note = Description of Artificial Sequence: Synthetic coding sequence
  source 1..1323: mol_type = other DNA
atggccctgctgccccgggccctgtctgctggggccggccccagctggaggagagctgcccgggccttccggggcttcctgctgctgctgcctgagcctgctgccctgacccgggccctgagccgggccatggcctgccggcaggagccccagccccagggccccccacctgctgctggagctgtggccagctatgactacctggtgattggaggcggcagcggcggcctggccagcgccaggagagctgctgagctgggcgcccgggctgctgtggtggagagccacaagctgggcggcacctgtgtgaatgtgggctgtgtgcccaagaaggtgatgtggaacacagctgtgcacagcgagttcatgcatgaccatgctgactatggcttccccagctgtgagggcaagttcaactggagggtcatcaaggagaagagagatgcctacgtgtcccggctgaatgccatctaccagaacaacctgaccaagagccacatcgagatcatccggggccacgccgccttcaccagtgaccccaagcccaccatcgaggtgtctgggaagaagtacacagccccccacatcctgattgccaccggcggcatgcccagcacccctcatgagagccagatccctggggccagcctgggcatcaccagtgatggcttcttccagctggaggagctgcccggccgcagcgtcatcgtgggcgccggctacatcgctgtggagatggccggcatcctgagcgccctgggcagcaagaccagcctgatgatcagacatgacaagggcatccagacagatgacaagggccacatcatcgtggatgagttccagaacaccaacgtgaagggcatctatgctgtgggagatgtgtgtgggaaggccctgctgacccctgtggccatcgctgctggcaggaagctggcccaccggctgtttgagtacaaggaggacagcaagctggactacaacaacatccccaccgtggtgttcagccacccccccatcggcaccgtgggcctgacagaagatgaggccatccacaagtatggaattgaaaatgtgaagacctacagcaccagcttcacccccatgtaccacgctgtgaccaagaggaagaccaagtgtgtgatgaagatggtgtgtgccaacaaggaggagaaggtggtgggcatccacatgcagggcctgggctgtgatgagatgctgcagggctttgctgtggccgtgaagatgggcgccaccaaggctgactttgacaacacagtggccatccaccccaccagcagcgaggagctggtgaccctgaggtag

SEQ ID NO: 154077 - DNA, 1410 bp, synthetic construct
  misc_feature 1..1410: note = Description of Artificial Sequence: Synthetic coding sequence
  source 1..1410: mol_type = other DNA
atggccctgctgccccgggccctgtctgctggggccggccccagctggaggagagctgcccgggccttccggggcttcctgctgctgctgcctgagcctgctgccctgacccgggccctgagccgggccatggcctgccggcaggagccccagccccagggccccccacctgctgctggagctgtggccagctatgactacctggtgattggaggcggcagcggcggcctggccagcgccaggagagctgctgagctgggcgcccgggctgctgtggtggagagccacaagctgggcggcacctgtgtgaatgtgggctgtgtgcccaagaaggtgatgtggaacacagctgtgcacagcgagttcatgcatgaccatgctgactatggcttccccagctgtgagggcaagttcaactggagggtcatcaaggagaagagagatgcctacgtgtcccggctgaatgccatctaccagaacaacctgaccaagagccacatcgagatcatccggggccacgccgccttcaccagtgaccccaagcccaccatcgaggtgtctgggaagaagtacacagccccccacatcctgattgccaccggcggcatgcccagcacccctcatgagagccagatccctggggccagcctgggcatcaccagtgatggcttcttccagctggaggagctgcccggccgcagcgtcatcgtgggcgccggctacatcgctgtggagatggccggcatcctgagcgccctgggcagcaagaccagcctgatgatcagacatgacaaggtgctgcggagctttgacagcatgatcagcaccaactgcacagaggagctggagaatgccggcgtggaggtgctgaagttcagccagggcatccagacagatgacaagggccacatcatcgtggatgagttccagaacaccaacgtgaagggcatctatgctgtgggagatgtgtgtgggaaggccctgctgacccctgtggccatcgccgccggcaggaagctggcccaccggctgtttgagtacaaggaggacagcaagctggactacaacaacatccccaccgtggtgttcagccacccccccatcggcaccgtgggcctgacagaagatgaggccatccacaagtatggaattgaaaatgtgaagacctacagcaccagcttcacccccatgtaccacgctgtgaccaagaggaagaccaagtgtgtgatgaagatggtgtgtgccaacaaggaggagaaggtggtgggcatccacatgcagggcctgggctgtgatgagatgctgcagggctttgctgtggccgtgaagatgggcgccaccaaggctgactttgacaacacagtggccatccaccccaccagcagcgaggagctggtgaccctgaggtag

SEQ ID NO: 154078 - DNA, 1482 bp, synthetic construct
  misc_feature 1..1482: note = Description of Artificial Sequence: Synthetic coding sequence
  source 1..1482: mol_type = other DNA
atggccctgctgccccgggccctgtctgctggggccggccccagctggaggagagctgcccgggccttccggggcttcctgctgctgctgcctgagcctgctgccctgacccgggccctgagccgggccatggcctgccggcaggagccccagccccagggccccccacctgctgctggagctgtggccagctatgactacctggtgattggaggcggcagcggcggcctggccagcgccaggagagctgctgagctgggcgcccgggctgctgtggtggagagccacaagctgggcggcacctgtgtgaatgtgggctgtgtgcccaagaaggtgatgtggaacacagctgtgcacagcgagttcatgcatgaccatgctgactatggcttccccagctgtgagggcaagttcaactggagggtcatcaaggagaagagagatgcctacgtgtcccggctgaatgccatctaccagaacaacctgaccaagagccacatcgagatcatccggggccacgccgccttcaccagtgaccccaagcccaccatcgaggtgtctgggaagaagtacacagccccccacatcctgattgccaccggcggcatgcccagcacccctcatgagagccagatccctggggccagcctgggcatcaccagtgatggcttcttccagctggaggagctgcccggccgcagcgtcatcgtgggcgccggctacatcgctgtggagatggccggcatcctgagcgccctgggcagcaagaccagcctgatgatcagacatgacaaggtgaaggaggtgaagaagaccctgagcggcctggaggtgtccatggtgacagctgtgcccggccgcctgcctgtgatgaccatgatcccagatgtggactgcctgctgtgggccatcggccgggtgcccaacaccaaggacctgagcctgaacaagctgggcatccagacagatgacaagggccacatcatcgtggatgagttccagaacaccaacgtgaagggcatctatgctgtgggagatgtgtgtgggaaggccctgctgacccctgtggccatcgccgccggcaggaagctggcccaccggctgtttgagtacaaggaggacagcaagctggactacaacaacatccccaccgtggtgttcagccacccccccatcggcaccgtgggcctgacagaagatgaggccatccacaagtatggaattgaaaatgtgaagacctacagcaccagcttcacccccatgtaccacgctgtgaccaagaggaagaccaagtgtgtgatgaagatggtgtgtgccaacaaggaggagaaggtggtgggcatccacatgcagggcctgggctgtgatgagatgctgcagggctttgctgtggccgtgaagatgggcgccaccaaggctgactttgacaacacagtggccatccaccccaccagcagcgaggagctggtgaccctgaggtag

SEQ ID NO: 154079 - DNA, 669 bp, synthetic construct
  misc_feature 1..669: note = Description of Artificial Sequence: Synthetic coding sequence
  source 1..669: mol_type = other DNA
atggccgagaagcccaagctgcactacttcaatgcccggggccgcatggagagcacccgctggctgctggccgccgccggcgtggagtttgaggagaagttcatcaagtctgctgaggacctggacaagctgagaaatgatggctacctgatgttccagcaggtgcccatggtggagattgatggcatgaagctggtgcagacccgggccatcctgaactacatcgccagcaagtacaacctgtatggcaaggacatcaaggagcgggccctgattgacatgtacatcgagggcattgctgacctgggggagatgatcctgctgctgcctgtgtgccccccagaggagaaggatgccaagctggccctgatcaaggagaagatcaagaaccgctacttccctgcctttgagaaggtgctgaagagccacggccaggactacctggtgggcaacaagctgagcagagctgacatccacctggtggagctgctgtactacgtggaggagctggacagcagcctcatcagcagcttccccctgctgaaggccctgaagacccgcatcagcaacctgcccaccgtgaagaagttcctgcagcccggcagccccaggaagccacccatggatgagaagagcctggaggaggccaggaagatcttccgcttctag

SEQ ID NO: 154080 - DNA, 669 bp, synthetic construct
  misc_feature 1..669: note = Description of Artificial Sequence: Synthetic coding sequence
  source 1..669: mol_type = other DNA
atggccgagaagcccaagctgcactacagcaacatccggggccgcatggagagcatccgctggctgctggccgccgccggcgtggagtttgaggagaagttcatcaagtctgctgaggacctggacaagctgagaaatgatggctacctgatgttccagcaggtgcccatggtggagattgatggcatgaagctggtgcagacccgggccatcctgaactacatcgccagcaagtacaacctgtatggcaaggacatcaaggagaaggccctgattgacatgtacatcgagggcattgctgacctgggggagatgatcctgctgctgcccttcagccagcctgaggagcaggatgccaagctggccctgatccaggagaagaccaagaaccgctacttccctgcctttgagaaggtgctgaagagccacggccaggactacctggtgggcaacaagctgagcagagctgacatccacctggtggagctgctgtactacgtggaggagctggacagcagcctcatcagcagcttccccctgctgaaggccctgaagacccgcatcagcaacctgcccaccgtgaagaagttcctgcagcccggcagccccaggaagccacccatggatgagaagagcctggaggagagcaggaagatcttccgcttctag

SEQ ID NO: 154081 - DNA, 729 bp, synthetic construct
  misc_feature 1..729: note = Description of Artificial Sequence: Synthetic coding sequence
  source 1..729: mol_type = other DNA
atgctgctgctggccccccagatgctgagcctgctgctgctggccctgcctgtgctggccagccctgcctacgtggccccagcccctggccaggccctgcagcagacaggcatcgtgggcggccaggaggcccccaggagcaagtggccctggcaggtgtccctgcgggtgcggggcccctactggatgcacttctgtggcggcagcctcatccacccccagtgggtgctgacagctgcccactgtgtggagccagacatcaaggacctggccgccctgcgggtgcagctgcgggagcagcacctgtactaccaggaccagctgctgcctgtgagccgcatcatcgtgcacccccagttctacatcatccagacaggagctgacatcgccctgctggagctggaggagcctgtgaacatcagcagccacatccacacagtgaccctgcccccagccagcgagaccttccccccaggcatgccctgctgggtgacaggctggggagatgtggacaacaacgtgcacctgcccccaccctaccccctgaaggaggtggaggtgcctgtggtggagaaccacctgtgcaatgctgagtaccacacaggcctgcacacaggccacagcttccagatcgtgagagatgacatgctgtgtgccggcagcgagaaccacgacagctgccagggcgacagcggcggccccctggtgtgcaaggtgaatggcacctag

SEQ ID NO: 154082 - DNA, 519 bp, synthetic construct
  misc_feature 1..519: note = Description of Artificial Sequence: Synthetic coding sequence
  source 1..519: mol_type = other DNA
atgttccagcaggtgcccatggtggagattgatggcatgaagctggtgcagacccgggccatcctgaactacatcgccagcaagtacaacctgtatggcaaggacatcaaggagcgggccctgattgacatgtacacagagggcatggctgacctgaatgagatgatcctgctgctgcccctgtgcaggcctgaggagaaggatgccaagatcgccctgatcaaggagaagaccaagagccgctacttccctgcctttgagaaggtgctgcagagccacggccaggactacctggtgggcaacaagctgagcagagctgacatcagcctggtggagctgctgtactacgtggaggagctggacagcagcctcatcagcaacttccccctgctgaaggccctgaagacccgcatcagcaacctgcccaccgtgaagaagttcctgcagcccggcagccccaggaagcccccagcagatgccaaggccctggaggaggccaggaagatcttccgcttctag

SEQ ID NO: 154083 - DNA, 327 bp, synthetic construct
  misc_feature 1..327: note = Description of Artificial Sequence: Synthetic coding sequence
  source 1..327: mol_type = other DNA
atgttccagcaggtgcccatggtggagattgatggcatgaagctggtgcagacccgggccatcctgaactacatcgccagcaagtacaacctgtatggcaaggacatcaaggagcgggccctgattgacatgtacacagagggcatggctgacctgaatgagatgatcctgctgctgcccctgtgcaggcctgaggagaaggatgccaagatcgccctgatcaaggagaagaccaagagccgctacttccctgcctttgaggccgacatcagcctggtggagctgctgtactacgtggaggagctggacagcagcctcatctcctag

SEQ ID NO: 154084 - DNA, 669 bp, synthetic construct
  misc_feature 1..669: note = Description of Artificial Sequence: Synthetic coding sequence
  source 1..669: mol_type = other DNA
atggccgcccggcccaagctgcactacccaaatggccggggccgcatggagagcgtgcgctgggtgctggccgccgccggcgtggagtttgatgaggagttcctggagaccaaggagcagctgtacaagctgcaggacggcaaccacctgctcttccagcaggtgcccatggtggagattgatggcatgaagctggtgcagaccaggagcatcctgcactacatcgctgacaagcacaacctgtttgggaagaacctgaaggagaggaccctgattgacatgtatgtggagggcaccctggacctgctggagctgctgatcatgcaccccttcctgaagccagatgaccagcagaaggaggtggtgaacatggcccagaaggccatcatccgctacttccctgtgtttgagaagatcctgcggggccacggccagagcttcctggtgggcaaccagctgagcctggctgatgtgatcctgctgcagaccatcctggccctggaggagaagatccccaacatcctgagcgccttccccttcctgcaggagtacacagtgaagctgagcaacatccccaccatcaagcgcttcctggagcccggcagcaagaagaagcccccaccagatgagatctacgtgaggacagtgtacaacatcttccggccctag

SEQ ID NO: 154085 - DNA, 390 bp, synthetic construct
  misc_feature 1..390: note = Description of Artificial Sequence: Synthetic coding sequence
  source 1..390: mol_type = other DNA
atgtatgtggagggcaccctggacctgctggagctgctgatcatgcaccccttcctgaagccagatgaccagcagaaggaggtggtgaacatggcccagaaggccatcatccgctacttccctgtgtttgagaagatcctgcggggccacggccagagcttcctggtgggcaaccagctgagcctggctgatgtgatcctgctgcagaccatcctggccctggaggagaagatccccaacatcctgagcgccttccccttcctgcaggagtacacagtgaagctgagcaacatccccaccatcaagcgcttcctggagcccggcagcaagaagaagcccccaccagatgagatctacgtgaggacagtgtacaacatcttccggccctag

SEQ ID NO: 154086 - DNA, 669 bp, synthetic construct; identical to SEQ ID NO: 154084
  misc_feature 1..669: note = Description of Artificial Sequence: Synthetic coding sequence
  source 1..669: mol_type = other DNA

SEQ ID NO: 154087 - DNA, 270 bp, synthetic construct
  misc_feature 1..270: note = Description of Artificial Sequence: Synthetic coding sequence
  source 1..270: mol_type = other DNA
atgtatgtggagggcaccctggacctgctggagctgctgatcatgcaccccttcctgaagccagatgaccagcagaaggaggtggtgaacatggcccagaaggccatcatccgctacttccctgtgtttgagaagatcctgcggggccacggccagagcttcctggtgggcaaccagctgagcctggctgatgtgatcctgctgcagaccatcctggccctggaggagaagatccccaacatcctgagcgccttccccttcctgcagtag

SEQ ID NO: 154088 - DNA, 390 bp, synthetic construct; identical to SEQ ID NO: 154085
  misc_feature 1..390: note = Description of Artificial Sequence: Synthetic coding sequence
  source 1..390: mol_type = other DNA

SEQ ID NO: 154089 - DNA, 669 bp, synthetic construct
  misc_feature 1..669: note = Description of Artificial Sequence: Synthetic coding sequence
  source 1..669: mol_type = other DNA
atggccgagaagcccaagctgcactacagcaatgcccggggctccatggagagcatccgctggctgctggccgccgccggcgtggagctggaggagaagttcctggagagcgctgaggacctggacaagctgagaaatgatggcagcctgctcttccagcaggtgcccatggtggagattgatggcatgaagctggtgcagacccgggccatcctgaactacatcgccagcaagtacaacctgtatggcaaggacatgaaggagcgggccctgattgacatgtacacagagggcatcgtggacctgacagagatgatcctgctgctgctgatctgccagcctgaggagagagatgccaagacagccctggtgaaggagaagatcaagaaccgctacttccctgcctttgagaaggtgctgaagagccaccggcaggactacctggtgggcaacaagctgtcctgggccgacatccacctggtggagctgttctactacgtggaggagctggacagcagcctcatcagcagcttccccctgctgaaggccctgaagacccgcatcagcaacctgcccaccgtgaagaagttcctgcagcccggcagccagaggaagccacccatggatgagaagagcctggaggaggccaggaagatcttccgcttctag

SEQ ID NO: 154090 - DNA, 669 bp, synthetic construct; identical to SEQ ID NO: 154089
  misc_feature 1..669: note = Description of Artificial Sequence: Synthetic coding sequence
  source 1..669: mol_type = other DNA

SEQ ID NO: 154091 - DNA, 657 bp, synthetic construct
  misc_feature 1..657: note = Description of Artificial Sequence: Synthetic coding sequence
  source 1..657: mol_type = other DNA
atgcccatgatcctgggctactgggacatccggggcctggcccacgccatccggctgctgctggagtacacagacagcagctatgaggagaagaagtacaccatgggagatgccccagactatgacaggagccagtggctgaatgagaagttcaagctgggcctggacttccccaacctgccctacctgattgatggagcccacaagatcacccagagcaatgccatcctgtgctacatcgccaggaagcacaacctgtgtggggagacagaggaggagaagatccgggtggacatcctggagaaccagaccatggacaaccacatgcagctgggcatgatctgctacaaccctgagtttgagaagctgaagcccaagtacctggaggagctgcctgagaagctgaagctgtacagcgagttcctgggcaagaggccctggtttgctggcaacaagatcacctttgtggacttcctggtgtatgatgtgctggacctgcaccgcatctttgagcccaagtgcctggatgccttccccaacctgaaggacttcatcagcagatttgagggcctggagaagatcagcgcctacatgaagagcagccgcttcctgcccaggcctgtgttcagcaagatggctgtgtggggcaacaagtag

SEQ ID NO: 154092 - DNA, 546 bp, synthetic construct
  misc_feature 1..546: note = Description of Artificial Sequence: Synthetic coding sequence
  source 1..546: mol_type = other DNA
atgcccatgatcctgggctactgggacatccggggcctggcccacgccatccggctgctgctggagtacacagacagcagctatgaggagaagaagtacaccatgggagatgccccagactatgacaggagccagtggctgaatgagaagttcaagctgggcctggacttccccaacctgccctacctgattgatggagcccacaagatcacccagagcaatgccatcctgtgctacatcgccaggaagcacaacctgtgtggggagacagaggaggagaagatccgggtggacatcctggagaaccagaccatggacaaccacatgcagctgggcatgatctgctacaaccctgagtttgagaagctgaagcccaagtacctggaggagctgcctgagaagctgaagctgtacagcgagttcctgggcaagaggccctggtttgctggcaacaagggcctggagaagatcagcgcctacatgaagagcagccgcttcctgcccaggcctgtgttcagcaagatggctgtgtggggcaacaagtag

SEQ ID NO: 154093 - DNA, 450 bp, synthetic construct
  misc_feature 1..450: note = Description of Artificial Sequence: Synthetic coding sequence
  source 1..450: mol_type = other DNA
atgcccatgatcctgggctactgggacatccggggcctggcccacgccatccggctgctgctggagtacacagacagcagctatgaggagaagaagtacaccatgggagatgccccagactatgacaggagccagtggctgaatgagaagttcaagctgggcctggacttccccaacctgccctacctgattgatggagcccacaagatcacccagagcaatgccatcctgtgctacatcgccaggaagcacaacctgtgtggggagacagaggaggagaagatccgggtggacatcctggagaaccagaccatggacaaccacatgcagctgggcatgatctgctacaaccctgagtttggcctggagaagatcagcgcctacatgaagagcagccgcttcctgcccaggcctgtgttcagcaagatggctgtgtggggcaacaagtag

SEQ ID NO: 154094 - DNA, 714 bp, synthetic construct
  misc_feature 1..714: note = Description of Artificial Sequence: Synthetic coding sequence
  source 1..714: mol_type = other DNA
atgcccatgatcctgggctactgggacatccggggcctggcccacgccatccggctgctgctggagtacacagacagcagctatgaggagaagaagtacaccatgggagatgccccagactatgacaggagccagtggctgaatgagaagttcaagctgggcctggacttccccaacggcatgctgggcagcctggtggcccagctgagctttgctggcttccccagcatccagctgccctacctgattgatggagcccacaagatcacccagagcaatgccatcctgtgctacatcgccaggaagcacaacctgtgtggggagacagaggaggagaagatccgggtggacatcctggagaaccagaccatggacaaccacatgcagctgggcatgatctgctacaaccctgagtttgagaagctgaagcccaagtacctggaggagctgcctgagaagctgaagctgtacagcgagttcctgggcaagaggccctggtttgctggcaacaagatcacctttgtggacttcctggtgtatgatgtgctggacctgcaccgcatctttgagcccaagtgcctggatgccttccccaacctgaaggacttcatcagcagatttgagggcctggagaagatcagcgcctacatgaagagcagccgcttcctgcccaggcctgtgttcagcaagatggctgtgtggggcaacaagtag

SEQ ID NO: 154095 - DNA, 657 bp, synthetic construct
  misc_feature 1..657: note = Description of Artificial Sequence: Synthetic coding sequence
  source 1..657: mol_type = other DNA
atgcccatgaccctgggctactggaacatccggggcctggcccacagcatccggctgctgctggagtacacagacagcagctatgaggagaagaagtacaccatgggagatgccccagactatgacaggagccagtggctgaatgagaagttcaagctgggcctggacttccccaacctgccctacctgattgatggcacccacaagatcacccagagcaatgccatcctgcgctacatcgccaggaagcacaacctgtgtggggagagcgagaaggagcagatccgggaggacatcctggagaaccagttcatggacagcaggatgcagctggccaagctgtgctatgaccctgactttgagaagctgaagccagagtacctgcaggccctgcctgagatgctgaagctgtacagccagttcctgggcaagcagccctggttcctgggggacaagatcacctttgtggacttcatcgcctatgatgtgctggagaggaaccaggtgtttgagcccagctgcctggatgccttccccaacctgaaggacttcatcagcagatttgagggcctggagaagatcagcgcctacatgaagagcagccgcttcctgcccaggcctgtgttcaccaagatggctgtgtggggcaacaagtag

SEQ ID NO: 154096 - DNA, 540 bp, synthetic construct
  misc_feature 1..540: note = Description of Artificial Sequence: Synthetic coding sequence
  source 1..540: mol_type = other DNA
atgaccctgggctactggaacatccggggcctggcccacagcatccggctgctgctggagtacacagacagcagctatgaggagaagaagtacaccatgggagatgccccagactatgacaggagccagtggctgaatgagaagttcaagctgggcctggacttccccaacctgccctacctgattgatggcacccacaagatcacccagagcaatgccatcctgcgctacatcgccaggaagcacaacctgtgtggggagagcgagaaggagcagatccgggaggacatcctggagaaccagttcatggacagcaggatgcagctggccaagctgtgctatgaccctgactttgagaagctgaagccagagtacctgcaggccctgcctgagatgctgaagctgtacagccagttcctgggcaagcagccctggttcctgggggacaagggcctggagaagatcagcgcctacatgaagagcagccgcttcctgcccaggcctgtgttcaccaagatggctgtgtggggcaacaagtag

SEQ ID NO: 154097 - DNA, 264 bp, synthetic construct
  misc_feature 1..264: note = Description of Artificial Sequence: Synthetic coding sequence
  source 1..264: mol_type = other DNA
atggacagcaggatgcagctggccaagctgtgctatgaccctgactttgagaagctgaagccagagtacctgcaggccctgcctgagatgctgaagctgtacagccagttcctgggcaagcagccctggttcctgggggacaagatcacctttgtggacttcatcgcctatgatgtgctggagaggaaccaggtgtttgagcccagctgcctggatgccttccccaacctgaaggacttcatcagcagatttgagcacagctag

SEQ ID NO: 154098 - DNA, 576 bp, synthetic construct
  misc_feature 1..576: note = Description of Artificial Sequence: Synthetic coding sequence
  source 1..576: mol_type = other DNA
atgcccatgaccctgggctactggaacatccggggcctggcccacagcatccggctgctgctggagtacacagacagcagctatgaggagaagaagtacaccatgggagatgccccagactatgacaggagccagtggctgaatgagaagttcaagctgggcctggacttccccaacctgccctacctgattgatggcacccacaagatcacccagagcaatgccatcctgcgctacatcgccaggaagcacaacctgtgtggggagagcgagaaggagcagatccgggaggacatcctggagaaccagttcatggacagcaggatgcagctggccaagctgtgctatgaccctgactttgagaagctgaagccagagtacctgcaggccctgcctgagatgctgaagctgtacagccagttcctgggcaagcagccctggttcctgggggacaagatcacctttgtggacttcatcgcctatgatgtgctggagaggaaccaggtgtttgagcccagctgcctggatgccttccccaacctgaaggacttcatcagcagatttgagcacagctag

SEQ ID NO: 154099 - DNA, 576 bp, synthetic construct; identical to SEQ ID NO: 154098
  misc_feature 1..576: note = Description of Artificial Sequence: Synthetic coding sequence
  source 1..576: mol_type = other DNA

SEQ ID NO: 154100 - DNA, 678 bp, synthetic construct
  misc_feature 1..678: note = Description of Artificial Sequence: Synthetic coding sequence
  source 1..678: mol_type = other DNA
atgagctgtgagagctccatggtgctgggctactgggacatccggggcctggcccacgccatccggctgctgctggagttcacagacaccagctatgaggagaagcgctacacctgtggggaggccccagactatgacaggagccagtggctggatgtgaagttcaagctggacctggacttccccaacctgccctacctgctggatggcaagaacaagatcacccagagcaatgccatcctgcgctacatcgccaggaagcacaacatgtgtggggagacagaggaggagaagatccgggtggacatcatcgagaaccaggtgatggacttccgcacccagctgatccggctgtgctacagcagtgaccacgagaagctgaagccccagtacctggaggagctgcccggccagctgaagcagttctccatgttcctgggcaagttctcctggtttgctggggagaagctgacctttgtggacttcctgacctatgacatcctggaccagaaccgcatctttgaccccaagtgcctggatgagttccccaacctgaaggccttcatgtgccgctttgaggccctggagaagattgctgcctacctgcagagcgaccagttctgcaagatgcccatcaacaacaagatggcccagtggggcaacaagcctgtgtgctag

SEQ ID NO: 154101 - DNA, 678 bp, synthetic construct; identical to SEQ ID NO: 154100
  misc_feature 1..678: note = Description of Artificial Sequence: Synthetic coding sequence
  source 1..678: mol_type = other DNA

SEQ ID NO: 154102 - DNA, 678 bp, synthetic construct; identical to SEQ ID NO: 154100
  misc_feature 1..678: note = Description of Artificial Sequence: Synthetic coding sequence
  source 1..678: mol_type = other DNA

SEQ ID NO: 154103 - DNA, 588 bp, synthetic construct
  misc_feature 1..588: note = Description of Artificial Sequence: Synthetic coding sequence
  source 1..588: mol_type = other DNA
atgtccatgaccctgggctactgggacatccggggcctggcccacgccatccggctgctgctggagtacacagacagcagctatgaggagaagaagtacaccatgggagatgccccagactatgacaggagccagtggctgaatgagaagttcaagctgggcctggacttccccaacctgccctacctgattgatggagcccacaagatcacccagagcaatgccatcctgtgctacatcgccaggaagcacaacctgtgtggggagacagaggaggagaagatccgggtggacatcctggagaaccaggccatggatgtgagcaaccagctggcccgggtgtgctacagcccagactttgagaagctgaagccagagtacctggaggagctgcccaccatgatgcagcacttcagccagttcctgggcaagaggccctggtttgtgggggacaagatcacctttgtggacttcctggcctatgatgtgctggacctgcaccgcatctttgagcccaactgcctggatgccttccccaacctgaaggacttcatcagcagatttgaggtgtcctgtggcatcatgtag

SEQ ID NO: 154104 - DNA, 474 bp, synthetic construct
  misc_feature 1..474: note = Description of Artificial Sequence: Synthetic coding sequence
  source 1..474: mol_type = other DNA
atgtccatgaccctgggctactgggacatccggggcctggcccacgccatccggctgctgctggagtacacagacagcagctatgaggagaagaagtacaccatgggagatgccccagactatgacaggagccagtggctgaatgagaagttcaagctgggcctggacttccccaatgagaagctgaagccagagtacctggaggagctgcccaccatgatgcagcacttcagccagttcctgggcaagaggccctggtttgtgggggacaagatcacctttgtggacttcctggcctatgatgtgctggacctgcaccgcatctttgagcccaactgcctggatgccttccccaacctgaaggacttcatcagcagatttgagggcctggagaagatcagcgcctacatgaagagcagccgcttcctgcccaagcccctgtacaccagggtggccgtgtggggcaacaagtag

SEQ ID NO: 154105 - DNA, 609 bp, synthetic construct
  misc_feature 1..609: note = Description of Artificial Sequence: Synthetic coding sequence
  source 1..609: mol_type = other DNA
atgctgggcagcctgctggcccagctgtccttccctggcttccccagcatccagctgccctacctgattgatggagcccacaagatcacccagagcaatgccatcctgtgctacatcgccaggaagcacaacctgtgtggggagacagaggaggagaagatccgggtggacatcctggagaaccaggccatggatgtgagcaaccagctggcccgggtgtgctacagcccagactttgagaagctgaagccagagtacctggaggagctgcccaccatgatgcagcacttcagccagttcctgggcaagaggccctggtttgtgggggacaagatcacctttgtggacttcctggcctatgatgtgctggacctgcaccgcatctttgagcccaactgcctggatgccttccccaacctgaaggacttcatcagcagatttgaggtgatgccacccagcagcttcctgtttgatgccccctgcagcgtgaccagcttccagatgctgagccagagctggagctacatcaagaacaacctgcacctgctgtctgctggcttcatgcctggcaccctgcccagcaccctgtacctgagctgtggcatctag

SEQ ID NO: 154106 - DNA, 657 bp, synthetic construct
  misc_feature 1..657: note = Description of Artificial Sequence: Synthetic coding sequence
  source 1..657: mol_type = other DNA
atgtccatgaccctgggctactgggacatccggggcctggcccacgccatccggctgctgctggagtacacagacagcagctatgaggagaagaagtacaccatgggagatgccccagactatgacaggagccagtggctgaatgagaagttcaagctgggcctggacttccccaacctgccctacctgattgatggagcccacaagatcacccagagcaatgccatcctgtgctacatcgccaggaagcacaacctgtgtggggagacagaggaggagaagatccgggtggacatcctggagaaccaggccatggatgtgagcaaccagctggcccgggtgtgctacagcccagactttgagaagctgaagccagagtacctggaggagctgcccaccatgatgcagcacttcagccagttcctgggcaagaggccctggtttgtgggggacaagatcacctttgtggacttcctggcctatgatgtgctggacctgcaccgcatctttgagcccaactgcctggatgccttccccaacctgaaggacttcatcagcagatttgagggcctggagaagatcagcgcctacatgaagagcagccgcttcctgcccaagcccctgtacaccagggtggccgtgtggggcaacaagtag

SEQ ID NO: 154107 - DNA, 657 bp, synthetic construct
  misc_feature 1..657: note = Description of Artificial Sequence: Synthetic coding sequence
  source 1..657: mol_type = other DNA
atgcccatgaccctgggctactgggacatccggggcctggcccacgccatccggctgctgctggagtacacagacagcagctatgtggagaagaagtacaccctgggagatgccccagactatgacaggagccagtggctgaatgagaagttcaagctgggcctggacttccccaacctgccctacctgattgatggagcccacaagatcacccagagcaatgccatcctgcgctacatcgccaggaagcacaacctgtgtggggagacagaggaggagaagatccgggtggacatcctggagaaccaggtgatggacaaccacatggagctggtgcggctgtgctatgaccctgactttgagaagctgaagcccaagtacctggaggagctgcctgagaagctgaagctgtacagcgagttcctgggcaagaggccctggtttgctggggacaagatcacctttgtggacttcctggcctatgatgtgctggacatgaagaggatctttgagcccaagtgcctggatgccttcctgaacctgaaggacttcatcagcagatttgagggcctgaagaagatcagcgcctacatgaagagcagccagttcctgcggggcctgctgtttgggaagagcgccacctggaacagcaagtag

SEQ ID NO: 154108 - DNA, 714 bp, synthetic construct
  misc_feature 1..714: note = Description of Artificial Sequence: Synthetic coding sequence
  source 1..714: mol_type = other DNA
atgcccatgaccctgggctactgggacatccggggcctggcccacgccatccggctgctgctggagtacacagacagcagctatgtggagaagaagtacaccctgggagatgccccagactatgacaggagccagtggctgaatgagaagttcaagctgggcctggacttccccaacggcatgctgggcagcctggtggcccagctgtccttccctggcttccccagcatccagctgccctacctgattgatggagcccacaagatcacccagagcaatgccatcctgcgctacatcgccaggaagcacaacctgtgtggggagacagaggaggagaagatccgggtggacatcctggagaaccaggtgatggacaaccacatggagctggtgcggctgtgctatgaccctgactttgagaagctgaagcccaagtacctggaggagctgcctgagaagctgaagctgtacagcgagttcctgggcaagaggccctggtttgctggggacaagatcacctttgtggacttcctggcctatgatgtgctggacatgaagaggatctttgagcccaagtgcctggatgccttcctgaacctgaaggacttcatcagcagatttgagggcctgaagaagatcagcgcctacatgaagagcagccagttcctgcggggcctgctgtttgggaagagcgccacctggaacagcaagtag

SEQ ID NO: 154109 - DNA, 609 bp, synthetic construct
  misc_feature 1..609: note = Description of Artificial Sequence: Synthetic coding sequence
  source 1..609: mol_type = other DNA
atgctgggcagcctggtggcccagctgtccttccctggcttccccagcatccagctgccctacctgattgatggagcccacaagatcacccagagcaatgccatcctgcgctacatcgccaggaagcacaacctgtgtggggagacagaggaggagaagatccgggtggacatcctggagaaccaggtgatggacaaccacatggagctggtgcggctgtgctatgaccctgactttgagaagctgaagcccaagtacctggaggagctgcctgagaagctgaagctgtacagcgagttcctgggcaagaggccctggtttgctggggacaagatcacctttgtggacttcctggcctatgatgtgctggacatgaagaggatctttgagcccaagtgcctggatgccttcctgaacctgaaggacttcatcagcagatttgaggtgatgccacccagcagcttcctgtttgatgccccctgcagcttcctgtccttccagatgctgagccagagctggagctacaccaagaacaacagctatgtgctgagcacaggcttcatgcctggcatcatgcccagcaccctgtacctgagctgccgcatctag

SEQ ID NO: 154110 - DNA, 627 bp, synthetic construct
  misc_feature 1..627: note = Description of Artificial Sequence: Synthetic coding sequence
  source 1..627: mol_type = other DNA
atgtctggagagagcgcccggagcctgggcaaaggaagtgcccctcctggccctgtgcctgagggcagcatccgcatctacagcatgaggttctgcccctttgctgagaggacccggctggtgctgaaggccaagggcatcagacatgaagtcatcaacatcaacctgaagaacaagccagagtggttcttcaagaagaaccccttcggcctggtgcctgtgctggagaacagccagggccagctgatctatgagagcgccatcacctgtgagtacctggatgaggcctacccaggcaagaagctgctgcctgatgacccctatgagaaggcctgccagaagatgatcctggagctgttcagcaaggtgctgaccaacaagaagaccaccttcttcggcggcaacagcatctccatgattgactacctgatctggccctggtttgagcggctggaggccatgaagctgaatgaatgtgtggaccacacccccaagctgaagctgtggatggccgccatgaaggaggaccccaccgtgtctgccctgctgaccagcgagaaggactggcagggcttcctggagctgtacctgcagaacagccctgaggcctgtgactatggcctgtag

SEQ ID NO: 154111 - DNA, 726 bp, synthetic construct
  misc_feature 1..726: note = Description of Artificial Sequence: Synthetic coding sequence
  source 1..726: mol_type = other DNA
atgtctggagagagcgcccggagcctgggcaaaggaagtgcccctcctggccctgtgcctgagggcagcatccgcatctacagcatgaggttctgcccctttgctgagaggacccggctggtgctgaaggccaagggcatcagacatgaagtcatcaacatcaacctgaagaacaagccagagtggttcttcaagaagaaccccttcggcctggtgcctgtgctggagaacagccagggccagctgatctatgagagcgccatcacctgtgagtacctggatgaggcctacccaggcaagaagctgctgcctgatgacccctatgagaaggcctgccagaagatgatcctggagctgttcagcaaggtgcccagcctggtgggcagcttcatccgcagccagaacaaggaggactatgccggcctgaaggaggagttcaggaaggagttcaccaagctggaggaggtgctgaccaacaagaagaccaccttctttggaggcaacagcatctccatgattgactacctgatctggccctggtttgagcggctggaggccatgaagctgaatgaatgtgtggaccacacccccaagctgaagctgtggatggccgccatgaaggaggaccccaccgtgtctgccctgctgaccagcgagaaggactggcagggcttcctggagctgtacctgcagaacagccctgaggcctgtgactatggcctgtag

SEQ ID NO: 154112 - DNA, 543 bp, synthetic construct
  misc_feature 1..543: note = Description of Artificial Sequence: Synthetic coding sequence
  source 1..543: mol_type = other DNA
atgaggttctgcccctttgctgagaggacccggctggtgctgaaggccaagggcatcagacatgaagtcatcaacatcaacctgaagaacaagccagagtggttcttcaagaagaaccccttcggcctggtgcctgtgctggagaacagccagggccagctgatctatgagagcgccatcacctgtgagtacctggatgaggcctacccaggcaagaagctgctgcctgatgacccctatgagaaggcctgccagaagatgatcctggagctgttcagcaaggtgctgaccaacaagaagaccaccttcttcggcggcaacagcatctccatgattgactacctgatctggccctggtttgagcggctggaggccatgaagctgaatgaatgtgtggaccacacccccaagctgaagctgtggatggccgccatgaaggaggaccccaccgtgtctgccctgctgaccagcgagaaggactggcagggcttcctggagctgtacctgcagaacagccctgaggcctgtgactatggcctgtag

SEQ ID NO: 154113 - DNA, 603 bp, synthetic construct
  misc_feature 1..603: note = Description of Artificial Sequence: Synthetic coding sequence
  source 1..603: mol_type = other DNA
atgaggttctgcccctttgctgagaggacccggctggtgctgaaggccaagggcatcagacatgaagtcatcaacatcaacctgaagaacaagccagagtggttcttcaagaagaaccccttcggcctggtgcctgtgctggagaacagccagggccagctgatctatgagagcgccatcacctgtgagtacctggatgaggcctacccaggcaagaagctgctgcctgatgacccctatgagaaggcctgccagaagatgatcctggagctgttcagcaaggtgcccagcctggtgggcagcttcatccgcagccagaacaaggaggactatgccggcctgaaggaggagttcaggaaggagttcaccaagctggaggaggtgctgaccaacaagaagaccaccttctttggaggcaacagcatctccatgattgactacctgatctggccctggtttgagcggctggaggccatgaagctgaatgaatgtgtggaccacacccccaagctgaagctgtggatggccgccatgaaggaggaccccaccgtgtctgccctgctgaccagcgagaaggactggcagggcttcctggagctgtag

SEQ ID NO: 154114 - DNA, 642 bp, synthetic construct
  misc_feature 1..642: note = Description of Artificial Sequence: Synthetic coding sequence
  source 1..642: mol_type = other DNA
atgaggttctgcccctttgctgagaggacccggctggtgctgaaggccaagggcatcagacatgaagtcatcaacatcaacctgaagaacaagccagagtggttcttcaagaagaaccccttcggcctggtgcctgtgctggagaacagccagggccagctgatctatgagagcgccatcacctgtgagtacctggatgaggcctacccaggcaagaagctgctgcctgatgacccctatgagaaggcctgccagaagatgatcctggagctgttcagcaaggtgcccagcctggtgggcagcttcatccgcagccagaacaaggaggactatgccggcctgaaggaggagttcaggaaggagttcaccaagctggaggaggtgctgaccaacaagaagaccaccttctttggaggcaacagcatctccatgattgactacctgatctggccctggtttgagcggctggaggccatgaagctgaatgaatgtgtggaccacacccccaagctgaagctgtggatggccgccatgaaggaggaccccaccgtgtctgccctgctgaccagcgagaaggactggcagggcttcctggagctgtacctgcagaacagccctgaggcctgtgactatggcctgtag

SEQ ID NO: 154115 - DNA, 732 bp, synthetic construct
  misc_feature 1..732: note = Description of Artificial Sequence: Synthetic coding sequence
  source 1..732: mol_type = other DNA
atgtctggagatgccaccaggaccctgggcaagggcagccagcccccaggccctgtgcctgagggcctcatccgcatctacagcatgaggttctgcccctacagccacaggacccggctggtgctgaaggccaaggacatcagacatgaggtggtgaacatcaacctgaggaacaagccagagtggtactacaccaagcaccccttcggccacatccctgtgctggagaccagccagtgccagctgatctatgagagcgtcatcgcctgtgagtacctggatgatgcctacccaggcaggaagctgttcccctatgacccctatgaaagagcccggcagaagatgctgctggagctgttctgcaaggtgccccacctgaccaaggaatgtctggtggccctgcgctgtggcagagaatgtaccaacctgaaggccgccctgcggcaggagttcagcaacctggaggagatcctggagtaccagaacaccaccttcttcggcggcacctgcatctccatgattgactacctgctgtggccctggtttgagcggctggatgtgtatggcatcctggactgtgtgagccacaccccagccctgcggctgtggatcagcgccatgaagtgggaccccaccgtgtgtgccctgctgatggacaagagcatcttccagggcttcctgaacctgtacttccagaacaaccccaatgcctttgattttggcctgtgctag

SEQ ID NO: 154116 - DNA, 648 bp, synthetic construct
  misc_feature 1..648: note = Description of Artificial Sequence: Synthetic coding sequence
  source 1..648: mol_type = other DNA
atgaggttctgcccctacagccacaggacccggctggtgctgaaggccaaggacatcagacatgaggtggtgaacatcaacctgaggaacaagccagagtggtactacaccaagcaccccttcggccacatccctgtgctggagaccagccagtgccagctgatctatgagagcgtcatcgcctgtgagtacctggatgatgcctacccaggcaggaagctgttcccctatgacccctatgaaagagcccggcagaagatgctgctggagctgttctgcaaggtgccccacctgaccaaggaatgtctggtggccctgcgctgtggcagagaatgtaccaacctgaaggccgccctgcggcaggagttcagcaacctggaggagatcctggagtaccagaacaccaccttcttcggcggcacctgcatctccatgattgactacctgctgtggccctggtttgagcggctggatgtgtatggcatcctggactgtgtgagccacaccccagccctgcggctgtggatcagcgccatgaagtgggaccccaccgtgtgtgccctgctgatggacaagagcatcttccagggcttcctgaacctgtacttccagaacaaccccaatgcctttgattttggcctgtgctag

SEQ ID NO: 154117 - DNA, 732 bp, synthetic construct; identical to SEQ ID NO: 154115
  misc_feature 1..732: note = Description of Artificial Sequence: Synthetic coding sequence
  source 1..732: mol_type = other DNA

SEQ ID NO: 154118 - DNA, 501 bp, synthetic construct
  misc_feature 1..501: note = Description of Artificial Sequence: Synthetic coding sequence
  source 1..501: mol_type = other DNA
atgtctggagatgccaccaggaccctgggcaagggcagccagcccccaggccctgtgcctgagggcctcatccgcatctacagcatgaggttctgcccctacagccacaggacccggctggtgctgaaggccaaggacatcagacatgaggtggtgaacatcaacctgaggaacaagccagagtggtactacaccaagcaccccttcggccacatccctgtgctggagaccagccagtgccagctgatctatgagagcgtcatcgcctgtgagtacctggatgatgcctacccaggcaggaagctgttcccctatgacccctatgaaagagcccggcagaagatgctgctggagctgttctgcaaggtgccccacctgaccaaggaatgtctggtggccctgcgctgtggcagagaatgtaccaacctgaaggccgccctgcggcaggagttcagcaacctggaggaggacaggaagaagaggaagttcatccctggatag

SEQ ID NO: 154119 - DNA, 366 bp, synthetic construct
  misc_feature 1..366: note = Description of Artificial Sequence: Synthetic coding sequence
  source 1..366: mol_type = other DNA
atgaggttctgcccctacagccacaggacccggctggtgctgaaggccaaggacatcagacatgaggtggtgaacatcaacctgaggaacaagccagagtggtactacaccaagcaccccttcggccacatccctgtgctggagaccagccagtgccagctgatctatgagagcgtcatcgcctgtgagtacctggatgatgcctacccaggcaggaagctgttcccctatgacccctatgaaagagcccggcagaagatgctgctggagctgttctgcaagctgtgtgagccccacgccagccctgctgccctggacatcagccatgaggtgggcccccacagcctgtgcagcagccacggctag

SEQ ID NO: 154120 - DNA, 630 bp, synthetic construct
  misc_feature 1..630: note = Description of Artificial Sequence: Synthetic coding sequence
  source 1..630: mol_type = other DNA
atgtctggagatgccaccaggaccctgggcaagggcagccagcccccaggccctgtgcctgagggcctcatccgcatctacagcatgaggttctgcccctacagccacaggacccggctggtgctgaaggccaaggacatcagacatgaggtggtgaacatcaacctgaggaacaagccagagtggtactacaccaagcaccccttcggccacatccctgtgctggagaccagccagtgccagctgatctatgagagcgtcatcgcctgtgagtacctggatgatgcctacccaggcaggaagctgttcccctatgacccctatgaaagagcccggcagaagatgctgctggagctgttctgcaagatcctggagtaccagaacaccaccttcttcggcggcacctgcatctccatgattgactacctgctgtggccctggtttgagcggctggatgtgtatggcatcctggactgtgtgagccacaccccagccctgcggctgtggatcagcgccatgaagtgggaccccaccgtgtgtgccctgctgatggacaagagcatcttccagggcttcctgaacctgtacttccagaacaaccccaatgcctttgattttggcctgtgctag

SEQ ID NO: 154121 - DNA, 723 bp, synthetic construct
  misc_feature 1..723: note = Description of Artificial Sequence: Synthetic coding sequence
  source 1..723: mol_type = other DNA
atgggcctggagctgtacctggacctgctgagccagccctgcagagctgtgtacatctttgccaagaagaatgacatcccctttgagctgcgcatcgtggacctgatcaagggccagcacctgagtgatgcctttgcccaggtgaaccccctgaagaaggtgcctgccctgaaggatggagacttcaccctgacagaatctgtggccatcctgctgtacctgaccaggaagtacaaggtgcctgactactggtacccccaggacctgcaggcccgggcccgggtggatgagtacctggcctggcagcacaccaccctgcggcgcagctgcctgcgggccctgtggcacaaggtgatgtttcctgtgttcctgggggagcctgtgagcccccagaccctggccgccaccctggccgagctggatgtgaccctgcagctgctggaggacaagttcctgcagaacaaggccttcctgaccggcccccacatcagcctggccgacctggtggccatcacagagctgatgcaccctgtgggcgccggctgccaggtgtttgagggccggcccaagctggccacctggaggcagagggtggaggccgctgtgggggaggacctcttccaggaggcccatgaagtcatcctgaaggccaaggacttccccccagctgaccccaccatcaagcagaagctgatgccctgggtgctggccatgatcagatag

SEQ ID NO: 154122 - DNA, 486 bp, synthetic construct
  misc_feature 1..486: note = Description of Artificial Sequence: Synthetic coding sequence
  source 1..486: mol_type = other DNA
atgggcctggagctgtacctggacctgctgagccagccctgcagagctgtgtacatctttgccaagaagaatgacatcccctttgagctgcgcatcgtggacctgatcaagggcgtgatgtttcctgtgttcctgggggagcctgtgagcccccagaccctggccgccaccctggccgagctggatgtgaccctgcagctgctggaggacaagttcctgcagaacaaggccttcctgaccggcccccacatcagcctggccgacctggtggccatcacagagctgatgcaccctgtgggcgccggctgccaggtgtttgagggccggcccaagctggccacctggaggcagagggtggaggccgctgtgggagaagatctcttccaggaggcccacgaggtgatcctgaaggccaaggacttccccccagctgaccccaccatcaagcagaagctgatgccctgggtgctggccatgatcagatag

SEQ ID NO: 154123 - DNA, 369 bp, synthetic construct
  misc_feature 1..369: note = Description of Artificial Sequence: Synthetic coding sequence
  source 1..369: mol_type = other DNA
atgtttcctgtgttcctgggggagcctgtgagcccccagaccctggccgccaccctggccgagctggatgtgaccctgcagctgctggaggacaagttcctgcagaacaaggccttcctgaccggcccccacatcagcctggccgacctggtggccatcacagagctgatgcaccctgtgggcgccggctgccaggtgtttgagggccggcccaagctggccacctggaggcagagggtggaggccgctgtgggggaggacctcttccaggaggcccatgaagtcatcctgaaggccaaggacttccccccagctgaccccaccatcaagcagaagctgatgccctgggtgctggccatgatcagatag

SEQ ID NO: 154124 - DNA, 198 bp, synthetic construct
  misc_feature 1..198: note = Description of Artificial Sequence: Synthetic coding sequence
  source 1..198: mol_type = other DNA
atgggcctggagctgtacctggacctgctgagccagccctgcagagctgtgtacatctttgccaagaagaatgacatcccctttgagctgcgcatcgtggacctgatcaagggccagcacctgagtgatgcctttgcccaggtgaaccccctgaagaaggtgcctgccctgaaggatggagacttcaccctgacctag

SEQ ID NO: 154125 - DNA, 219 bp, synthetic construct
  misc_feature 1..219: note = Description of Artificial Sequence: Synthetic coding sequence
  source 1..219: mol_type = other DNA
atgggcctggagctgtacctggacctgctgagccagccctgcagagctgtgtacatctttgccaagaagaatgacatcccctttgagctgcgcatcgtggacctgatcaaggcccggggctgctggctgcccagcctgcggcggcccacccaggccggccacatggctgctgcccggggcggcagcagcggcggcggccccctgcccggcggcccctag

SEQ ID NO: 154126 - DNA, 405 bp, synthetic construct
  misc_feature 1..405: note = Description of Artificial Sequence: Synthetic coding sequence
  source 1..405: mol_type = other DNA
atgcccttcctggagctggacaccaacctgcctgccaacagagtgcctgctggcctggagaagaggctgtgtgccgctgctgccagcatcctgggcaagccagctgacagagtgaatgtgacagtgcggcccggcctggccatggccctgagcggcagcacagagccctgtgcccagctgagcatcagcagcattggagtggtgggcacagctgaggacaacagaagccacagcgcccacttctttgagttcctgaccaaggagctggccctgggccaggaccgcttccccaccgtgctgagcaccagccctgctgcccatggaggcccccgctgccctggagagatcatcgagggcaagaagagctgcctgaatgaggaggccctcttcatctacttcatctag

SEQ ID NO: 154127 - DNA, 831 bp, synthetic construct
  misc_feature 1..831: note = Description of Artificial Sequence: Synthetic coding sequence
  source 1..831: mol_type = other DNA
atgcctgtgcctgcctcctggccccaccccccaggccccttcctgctgctgaccctgctgctgggcctgacagaggtggccggggaggaggagctgcagatgatccagcctgagaagctgctgctggtgacagtgggcaagacagccaccctgcactgcaccgtgaccagcctgctgcctgtgggccctgtgctgtggttccggggcgtgggccctggccgggagctgatctacaaccagaaggagggccacttcccccgggtgaccaccgtgtctgacctgaccaagaggaacaacatggacttcagcatccgcatcagcagcatcaccccagcagatgtgggcacctactactgtgtgaagttcaggaagggcagcccagaaaatgtggagttcaagagcggccctggaacagagatggccctgggcgccaagcccagcgcccctgtggtgctgggccctgctgcccggaccaccccagagcacacagtgtccttcacctgtgagagccacggcttcagcccccgggacatcaccctgaagtggttcaagaatggaaatgagctgagtgacttccagaccaacgtggaccccaccggccagagcgtggcctacagcatccgcagcacagcccgggtggtgctggacccctgggatgtgcgcagccaggtgatctgtgaggtggcccacgtgaccctgcagggcgaccccctgcggggcacagccaacctgtctgaggccatccggggccctgccagcagcctgacagccctgctgctgattgctgtgctgctgggccccatctacgtgccctggaagcagaagacctag

SEQ ID NO: 154128 - DNA, 1092 bp, synthetic construct
  misc_feature 1..1092: note = Description of Artificial Sequence: Synthetic coding sequence
  source 1..1092: mol_type = other DNA
atggccaccaactggggcagcctgctgcaggacaagcagcagctggaggagctggcccggcaggccgtggaccgggccctggccgagggcgtgctgctgcggaccagccaggagcccaccagcagcgaggtggtgtcctatgcccccttcaccctcttccccagcctggtgcccagcgccctgctggagcaggcctatgctgtgcagatggacttcaacctgctggtggatgctgtgtcccagaatgctgccttcctggagcagaccctgagcagcgccctggtgctgctgattgcccaggagaaggagaggaacatctttgaccagagggccattgaaaatgagctgctggccaggaacatccacgtgatccggaggacctttgaggacatcagcgagaagggcagcctggaccaggacagaagactctttgtggatggccaggagattgctgtggtgtacttcagagatggctacatgccccggcagtacagcctgcagaactgggaggcccggctgctgctggagaggagccacgccgccaagtgcccagacatcgccacccagctggccggcaccaagaaggtgcagcaggagctgagcaggcctggcatgctggagatgctgctgcccggccagcctgaggccgtggcccggctgcgggccacctttgctggcctgtacagcctggatgtgggggaggagggggaccaggccatcgccgaggccctggccgcccccagcagatttgtgctgaagccccagcgggagggcggcggcaacaacctgtatggagaggagatggtgcaggccctgaagcagctgaaggacagcgaggagcgggccagctacatcctgatggagaagattgagcctgagccctttgagaactgcctgctgcggcccggcagccctgcccgggtggtgcagtgcatcagcgagctgggcatcttcggcgtgtatgtgcggcaggagaagaccctggtgatgaacaagcacgtgggccacctgctgcggaccaaggccattgaacatgctgatggaggagtggccgccggcgtggccgtgctggacaacccctaccctgtgtag

SEQ ID NO: 154129 - DNA, 1041 bp, synthetic construct
  misc_feature 1..1041: note = Description of Artificial Sequence: Synthetic coding sequence
  source 1..1041: mol_type = other DNA
atgttccagaggtctgcagatggcagccctgccctgaagcagatcgagatcaacaccatcagcgccagctttggaggcctggccagcaggaccccagctgtgcacagacatgtgctgtctgtgctgagcaagaccaaggaggccggcaagatcctgagcaacaaccccagcaagggcctggccctgggcatcgccaaggcctgggagctgtatggcagccccaatgccctggtgctgctgattgcccaggagaaggagaggaacatctttgaccagagggccattgaaaatgagctgctggccaggaacatccacgtgatccggaggacctttgaggacatcagcgagaagggcagcctggaccaggaccggcggctgtttgtggatggccaggagattgctgtggtgtacttcagagatggctacatgccccggcagtacagcctgcagaactgggaggcccggctgctgctggagaggagccatgctgccaagtgcccagacatcgccacccagctggccggcaccaagaaggtgcagcaggagctgagccggcccggcatgctggagatgctgctgcccggccagcctgaggccgtggcccggctgcgggccacctttgctggcctgtacagcctggatgtgggggaggagggggaccaggccatcgccgaggccctggccgcccccagcagatttgtgctgaagccccagcgggagggcggcggcaacaacctgtatggagaggagatggtgcaggccctgaagcagctgaaggacagcgaggagcgggccagctacatcctgatggagaagattgagcctgagccctttgagaactgcctgctgcggcccggcagccctgcccgggtggtgcagtgcatcagcgagctgggcatctttggagtgtatgtgcggcaggagaagaccctggtgatgaacaagcacgtgggccacctgctgcggaccaaggccatcgagcacgcagatggcggcgtggccgccggcgtggccgtgctggacaacccctaccctgtgtag

SEQ ID NO: 154130 - DNA, 768 bp, synthetic construct
  misc_feature 1..768: note = Description of Artificial Sequence: Synthetic coding sequence
  source 1..768: mol_type = other DNA
atgagcagcatcggcaccggctatgacctgagcgccagcaccttctccccagatggccgggtcttccaggtggagtatgccatgaaggctgtggagaacagcagcacagccatcggcatccgctgcaaggatggagtggtgtttggagtggagaagctggtgctgagcaagctgtatgaggagggcagcaacaagaggctcttcaacgtggacagacatgtgggcatggctgtggccggcctgctggctgatgcccggagcctggccgacatcgcccgggaggaggccagcaacttccgcagcaactttggctacaacatccccctgaagcacctggccgacagagtggccatgtatgtgcacgcctacaccctgtacagcgctgtgcggcccttcggctgcagcttcatgctgggcagctacagcgtgaatgatggagcccagctgtacatgattgaccccagcggcgtgtcctatggctactggggctgtgccatcggcaaggcccggcaggccgccaagacagaaattgagaagctgcagatgaaggagatgacctgccgggacatcgtgaaggaggtggccaagatcatctacatcgtgcatgatgaggtgaaggacaaggcctttgagctggagctgtcctgggtgggggagctgaccaacggcagacatgaaattgtgcccaaggacatccgggaggaggccgagaagtatgccaaggagagcctgaaggaggaggatgaaagtgatgatgacaacatgtag

SEQ ID NO: 154131 - DNA, 525 bp, synthetic construct
  misc_feature 1..525: note = Description of Artificial Sequence: Synthetic coding sequence
  source 1..525: mol_type = other DNA
atgcaggccggcaagcccatcctgtacagctacttccgcagcagctgctcctggagggtgcgcatcgccctggccctgaagggcattgattatgaaacagtgcccatcaacctgatcaaggatggcggccagcagttcagcaaggacttccaggccctgaaccccatgaagcaggtgcccaccctgaagattgatggcatcaccatccaccagagcaacctgtctgtgctgaagcaggtgggggaggagatgcagctgacctgggcccagaatgccatcacctgtggcttcaatgccctggagcagatcctgcagagcacagctggcatctactgtgtgggagatgaggtgaccatggctgacctgtgcctggtgccccaggtggccaatgctgagcgcttcaaggtggacctgaccccctaccccaccatcagcagcatcaacaagaggctgctggtgctggaggccttccaggtgagccacccctgccggcagcctgacacccccacagagctgcgggcctag

SEQ ID NO: 154132 - DNA, 486 bp, synthetic construct
  misc_feature 1..486: note = Description of Artificial Sequence: Synthetic coding sequence
  source 1..486: mol_type = other DNA
atgaagcaggtgcccaccctgaagattgatggcatcaccatccaccagagcctggccatcatcgagtacctggaggagatgaggcccaccccccggctgctgccccaggaccccaagaagagggcctctgtgaggatgatcagtgacctgattgctgggggcatccagcccctgcagaacctgtctgtgctgaagcaggtgggggaggagatgcagctgacctgggcccagaatgccatcacctgtggcttcaatgccctggagcagatcctgcagagcacagctggcatctactgtgtgggagatgaggtgaccatggctgacctgtgcctggtgccccaggtggccaatgctgagcgcttcaaggtggacctgaccccctaccccaccatcagcagcatcaacaagaggctgctggtgctggaggccttccaggtgagccacccctgccggcagcctgacacccccacagagctgcgggcctag

SEQ ID NO: 154133 - DNA, 486 bp, synthetic construct; identical to SEQ ID NO: 154132
  misc_feature 1..486: note = Description of Artificial Sequence: Synthetic coding sequence
  source 1..486: mol_type = other DNA

SEQ ID NO: 154134 - DNA, 180 bp, synthetic construct
  misc_feature 1..180: note = Description of Artificial Sequence: Synthetic coding sequence
  source 1..180: mol_type = other DNA
atgaagcaggtgcccaccctgaagattgatggcatcaccatccaccagagcctggccatcatcgagtacctggaggagatgaggcccaccccccggctgctgccccaggaccccaagaagagggcctctgtgaggatgatcagtgacctgattgctgggggcatccagcccctgcagtag

SEQ ID NO: 154135 - DNA, 117 bp, synthetic construct
  misc_feature 1..117: note = Description of Artificial Sequence: Synthetic coding sequence
  source 1..117: mol_type = other DNA
atgaagcaggtgcccaccctgaagattgatggcatcaccatccaccagagcctggccatcatcgagtacctggaggagatgaggcccaccccccggctgctgccccaggacccctag

SEQ ID NO: 154136 - DNA, 486 bp, synthetic construct; identical to SEQ ID NO: 154132
  misc_feature 1..486: note = Description of Artificial Sequence: Synthetic coding sequence
  source 1..486: mol_type = other DNA

SEQ ID NO: 154137 - DNA, 387 bp, synthetic construct
  misc_feature 1..387: note = Description of Artificial Sequence: Synthetic coding sequence
  source 1..387: mol_type = other DNA
atggccggcaacctgctgtctggagctggaagaaggctgtgggactgggtgcccctggcctgccgctccttcagcctgggcgtgcccaggctcatcggcatccggctgaccctgcccccacccaaggtggtggaccgctggaatgagaagagggccatgtttggagtgtatgacaacatcggcatcctgggcaactttgagaagcaccccaaggagctgatccggggccccatctggctgcggggctggaagggaaatgagctgcagcgctgcatcaggaagaggaagatggtgggcagcaggatgtttgctgatgacctgcacaacctgaacaagaggatccgctacctgtacaagcacttcaacagacatggcaagttcagatag

SEQ ID NO: 154138 - DNA, 783 bp, synthetic construct
  misc_feature 1..783: note = Description of Artificial Sequence: Synthetic coding sequence
  source 1..783: mol_type = other DNA
atggaggagatgagggaccccagcaagatcaagtggggagatgctggagcagaatatgtggtggagagcactggagtcttcaccaccatggagaaggccggggcccacctgcagggcggggccaagagggtcatcatcagcgcccccagcgcagatgcccccatgtttgtgatgggcgtgaaccacgagaagtatgacaacagcctgaagatcatcagcaatgccagctgcaccaccaactgcctggcccccctggccaaggtgattcatgacaactttggaattgtggagggcctgatgaccaccgtgcacgccatcacagccacccagaagacagtggatggccccagcggcaagctgtggagagatggccgcggggccctgcagaacatcatcccagccagcactggagctgccaaggctgtgggcaaggtgattcctgagctgaatggcaagctgaccggcatggccttccgggtgcccacagccaacgtgtctgtggtggacctgacctgccgcctggagaagccagccaagtatgatgacatcaagaaggtggtgaagcaggccagcgagggccccctgaagggcatcctgggctacacagagcaccaggtggtgtccagtgacttcaacagcgacacccacagcagcacctttgatgctggggccggcatcgccctgaatgaccactttgtgaagctgatctcctggtatgacaatgaatttggctacagcaacagagtggtggacctgatggcccacatggccagcaaggagtag

SEQ ID NO: 154139 - DNA, 882 bp, synthetic construct
  misc_feature 1..882: note = Description of Artificial Sequence: Synthetic coding sequence
  source 1..882: mol_type = other DNA
atggtgtacatgttccagtatgacagcacccacggcaagttccatggaacagtgaaggcagaaaatggcaagctggtgatcaatggaaaccccatcaccatcttccaggagcgggaccccagcaagatcaagtggggagatgctggagcagaatatgtggtggagagcactggagtcttcaccaccatggagaaggccggggcccacctgcagggcggggccaagagggtcatcatcagcgcccccagcgcagatgcccccatgtttgtgatgggcgtgaaccacgagaagtatgacaacagcctgaagatcatcagcaatgccagctgcaccaccaactgcctggcccccctggccaaggtgattcatgacaactttggcatcgtggagggcctgatgaccaccgtgcacgccatcacagccacccagaagacagtggatggccccagcggcaagctgtggagagatggccgcggggccctgcagaacatcatcccagccagcactggagctgccaaggctgtgggcaaggtgattcctgagctgaatggcaagctgaccggcatggccttccgggtgcccacagccaacgtgtctgtggtggacctgacctgccgcctggagaagccagccaagtatgatgacatcaagaaggtggtgaagcaggccagcgagggccccctgaagggcatcctgggctacacagagcaccaggtggtgtccagtgacttcaacagcgacacccacagcagcacctttgatgctggagctggcatcgccctgaatgaccactttgtgaagctgatctcctggtatgacaatgaatttggctacagcaacagagtggtggacctgatggcccacatggccagcaaggagtag

SEQ ID NO: 154140 - DNA, 1008 bp, synthetic construct
  misc_feature 1..1008: note = Description of Artificial Sequence: Synthetic coding sequence
  source 1..1008: mol_type = other DNA
atgggcaaggtgaaggtgggcgtgaatggatttggccgcatcggccgcctggtgaccagggctgccttcaacagcggcaaggtggacatcgtggccatcaatgaccccttcatcgacctgaactacatggtgtacatgttccagtatgacagcacccacggcaagttccatggaacagtgaaggcagaaaatggcaagctggtgatcaatggaaaccccatcaccatcttccaggagcgggaccccagcaagatcaagtggggagatgctggagcagaatatgtggtggagagcactggagtcttcaccaccatggagaaggccggggcccacctgcagggcggggccaagagggtcatcatcagcgcccccagcgcagatgcccccatgtttgtgatgggcgtgaaccacgagaagtatgacaacagcctgaagatcatcagcaatgccagctgcaccaccaactgcctggcccccctggccaaggtgattcatgacaactttggcatcgtggagggcctgatgaccaccgtgcacgccatcacagccacccagaagacagtggatggccccagcggcaagctgtggagagatggccgcggggccctgcagaacatcatcccagccagcactggagctgccaaggctgtgggcaaggtgattcctgagctgaatggcaagctgaccggcatggccttccgggtgcccacagccaacgtgtctgtggtggacctgacctgccgcctggagaagccagccaagtatgatgacatcaagaaggtggtgaagcaggccagcgagggccccctgaagggcatcctgggctacacagagcaccaggtggtgtccagtgacttcaacagcgacacccacagcagcacctttgatgctggagctggcatcgccctgaatgaccactttgtgaagctgatctcctggtatgacaatgaatttggctacagcaacagagtggtggacctgatggcccacatggccagcaaggagtag

SEQ ID NO: 154141 - DNA, 1008 bp, synthetic construct; identical to SEQ ID NO: 154140
  misc_feature 1..1008: note = Description of Artificial Sequence: Synthetic coding sequence
  source 1..1008: mol_type = other DNA

SEQ ID NO: 154142 - DNA, 648 bp, synthetic construct
  misc_feature 1..648: note = Description of Artificial Sequence: Synthetic coding sequence
  source 1..648: mol_type = other DNA
atgggcaaggtgaaggtgggcgtgaatggatttggccgcatcggccgcctggtgaccagggctgccttcaacagcggcaaggtggacatcgtggccatcaatgaccccttcatcgacctgaactacatggtgtacatgttccagtatgacagcacccacggcaagttccatggaacagtgaaggcagaaaatggcaagctggtgatcaatggaaaccccatcaccatcttccaggagcgggaccccagcaagatcaagtggggagatgctggagcagaatatgtggtggagagcactggagtcttcaccaccatggagaaggccggggcccacctgcagggcggggccaagagggtcatcatcagcgcccccagcgcagatgcccccatgtttgtgatgggcgtgaaccacgagaagtatgacaacagcctgaagatcatcagcaatgccagctgcaccaccaactgcctggcccccctggccaaggtgattcatgacaactttggcatcgtggagggcctgatgaccaccgtgcacgccatcacagccacccagcgggaggcccactggcacggcctgccctgcccccactgccagagggtgtctgggggccctgacctgcccagcaggaagacctgccagatctag

SEQ ID NO: 154143 - DNA, 675 bp, synthetic construct
  misc_feature 1..675: note = Description of Artificial Sequence: Synthetic coding sequence
  source 1..675: mol_type = other DNA
atgaccctcttccacttcggcaactgctttgccctggcctacttcccctacttcatcacctacaagtgcagcggcctgtctgagtacaatgccttctggaagtgtgtgcaggccggcgtgacctacctgtttgtgcagctgtgcaagatgctgttcctggccaccttcttccccacctgggagggcggcatctatgacttcatcggggagttcatgaaggcctctgtggatgtggccgacctgattggcctgaacctggtgatgagcagaaatgctgggaagggggagtacaagatcatggtggccgccctgggctgggccacagctgagctgatcatgagccgctgcatccccctgtgggtgggcgcccggggcatcgagtttgactggaagtacatccagatgagcattgacagcaacatcagcctggtgcactacatcgtggccagcgcccaggtgtggatgatcaccaggtatgacctgtaccacaccttccggcctgctgtgctgctgctgatgttcctgtctgtgtacaaggcctttgtgatggagacctttgtgcacctgtgcagcctgggctcctgggccgccctgctggcccgggctgtggtgacaggcctgctggccctgagcaccctggccctgtatgtggccgtggtgaatgtgcacagctag

SEQ ID NO: 154144 - DNA, 1104 bp, synthetic construct
  misc_feature 1..1104: note = Description of Artificial Sequence: Synthetic coding sequence
  source 1..1104: mol_type = other DNA
atggctgctgccctgcaggtgctgccccggctggcccgggcccccctgcaccccctgctgtggaggggctctgtggcccggctggccagctccatggccctggccgagcaggcccggcagctgtttgagagcgctgtgggcgctgtgctgcccggccccatgctgcaccgggccctgagcctggaccccggcggccggcagctgaaggtgcgggacaggaacttccagctgcggcagaacctgtacctggtgggctttgggaaggctgtgctgggcatggctgctgctgctgaggagctgctgggccagcacctggtgcagggcgtcatctctgtgcccaagggcatccgggccgccatggagagagctgggaagcaggagatgctgctgaagccccacagccgggtgcaggtgtttgaaggagctgaggacaacctgcctgacagagatgccctgcgggccgccctggccatccagcagctggccgagggcctgacagcagatgacctgctgctggtgctgatcagcggcggcggcagcgccctgctgcctgcccccatcccccctgtgaccctggaggagaagcagaccctgacccggctgctggccgcccggggggccaccatccaggagctgaacaccatcaggaaggccctgagccagctgaagggcggcggcctggcccaggccgcctacccagcccaggtggtgtccctcatcctgagtgatgtggtgggggaccctgtggaggtgattgccagcggccccaccgtggccagcagccacaacgtgcaggactgcctgcacatcctgaacagatatggcctgcgggccgccctgcccaggtctgtgaagacagtgctgagcagagctgacagcgacccccacggcccccacacctgtggccacgtgctgaatgtcatcatcggcagcaatgtgctggccctggccgaggcccagaggcaggccgaggccctgggctaccaggccgtggtgctgtctgctgccatgcagggctggggcaccccagctgcccacagagatgaccgctaccagtgccacggccacccccccctggtgcctgctgcctctgtgatggcctag

SEQ ID NO: 154145 - DNA, 705 bp, synthetic construct
  misc_feature 1..705: note = Description of Artificial Sequence: Synthetic coding sequence
  source 1..705: mol_type = other DNA
atggctgctgccctgcaggtgctgccccggctggcccgggcccccctgcaccccctgctgtggaggggctctgtggcccggctggccagctccatggccctggccgagcaggcccggcagctgtttgagagcgctgtgggcgctgtgctgcccggccccatgctgcaccgggccctgagcctggaccccggcggccggcagctgaaggtgcgggacaggaacttccagctgcggcagaacctgtacctggtgggctttgggaaggctgtgctgggcatggctgctgctgctgaggagctgctgggccagcacctggtgcagggcgtcatctctgtgcccaagggcatccgggccgccatggagagagctgggaagcaggagatgctgctgaagccccacagccgggtgcaggtgtttgaaggagctgaggacaacctgcctgacagagatgccctgcgggccgccctggccatccagcagctggccgagggcctgacagcagatgacctgctgctggtgctgatcagcggcggggagccccaccctgtgcgctgtggcggcggcccctgtggcggggactgccagtggccccaccggggccagttcccccagtgtgcccggctgcctgcctacccccagagcctgcggcccccctgcagccctgccaccttctgtgaggactgtgctgtgtctggccgcctgtag

SEQ ID NO: 154146 - DNA, 1374 bp, synthetic construct
  misc_feature 1..1374: note = Description of Artificial Sequence: Synthetic coding sequence
  source 1..1374: mol_type = other DNA
atggctgctgccctgcaggtgctgccccggctggcccgggcccccctgcaccccctgctgtggaggggctctgtggcccggctggccagctccatggccctggccgagcaggcccggcagctgtttgagagcgctgtgggcgctgtgctgcccggccccatgctgcaccgggccctgagcctggaccccggcggccggcagctgaaggtgcgggacaggaacttccagctgcggcagaacctgtacctggtgggctttgggaaggctgtgctgggcatggctgctgctgctgaggagctgctgggccagcacctggtgcagggcgtcatctctgtgcccaagggcatccgggccgcccccatcccccctgtgaccctggaggagaagcagaccctgacccggctgctggccgcccggggggccaccatccaggagctgaacaccatcaggaaggccctgagccagctgaagggcggcggcctggcccaggccgcctacccagcccaggtggtgtccctcatcctgagtgatgtggtgggggaccctgtggaggtgattgccagcggccccaccgtggccagcagccacaacgtgcaggactgcctgcacatcctgaacagatatggcctgcgggccgccctgcccaggtctgtgaagacagtgctgagcagagctgacagcgacccccacggcccccacacctgtggccacgtgctgaatgtcatcatcggcagcaatgtgctggccctggccgaggcccagaggcaggccgaggccctgggctaccaggccgtggtgctgtctgctgccatgcagggagatgtgaagtccatggcccagttctacggcctgctggcccacgtggcccggacccggctgacccccagcatggccggggcctctgtggaggaggatgcccagctgcacgagctggccgctgagctgcagatcccagacctgcagctggaggaggccctggagaccatggcctggggccggggccctgtgtgcctgctggccggcggggagcccaccgtgcagctgcagggcagcggccggggcggcaggaaccaggagctggccctgcgggtgggcgctgagctgcggcgctggcccctgggccccattgatgtgctcttcctgagcggcggcacagatggccaggacggccccacagaggccgccggggcctgggtgaccccagagctggccagccaggccgctgctgagggcctggacatcgccaccttcctggcccacaatgacagccacaccttcttctgctgcctgcagggcggggcccacctgctgcacacaggcatgacaggcaccaacgtgatggacacccacctgctcttcctgcggcccaggtag

SEQ ID NO: 154147 - DNA, 1572 bp, synthetic construct
  misc_feature 1..1572: note = Description of Artificial Sequence: Synthetic coding sequence
  source 1..1572: mol_type = other DNA
atggctgctgccctgcaggtgctgccccggctggcccgggcccccctgcaccccctgctgtggaggggctctgtggcccggctggccagctccatggccctggccgagcaggcccggcagctgtttgagagcgctgtgggcgctgtgctgcccggccccatgctgcaccgggccctgagcctggaccccggcggccggcagctgaaggtgcgggacaggaacttccagctgcggcagaacctgtacctggtgggctttgggaaggctgtgctgggcatggctgctgctgctgaggagctgctgggccagcacctggtgcagggcgtcatctctgtgcccaagggcatccgggccgccatggagagagctgggaagcaggagatgctgctgaagccccacagccgggtgcaggtgtttgaaggagctgaggacaacctgcctgacagagatgccctgcgggccgccctggccatccagcagctggccgagggcctgacagcagatgacctgctgctggtgctgatcagcggcggcggcagcgccctgctgcctgcccccatcccccctgtgaccctggaggagaagcagaccctgacccggctgctggccgcccggggggccaccatccaggagctgaacaccatcaggaaggccctgagccagctgaagggcggcggcctggcccaggccgcctacccagcccaggtggtgtccctcatcctgagtgatgtggtgggggaccctgtggaggtgattgccagcggccccaccgtggccagcagccacaacgtgcaggactgcctgcacatcctgaacagatatggcctgcgggccgccctgcccaggtctgtgaagacagtgctgagcagagctgacagcgacccccacggcccccacacctgtggccacgtgctgaatgtcatcatcggcagcaatgtgctggccctggccgaggcccagaggcaggccgaggccctgggctaccaggccgtggtgctgtctgctgccatgcagggagatgtgaagtccatggcccagttctacggcctgctggcccacgtggcccggacccggctgacccccagcatggccggggcctctgtggaggaggatgcccagctgcacgagctggccgctgagctgcagatcccagacctgcagctggaggaggccctggagaccatggcctggggccggggccctgtgtgcctgctggccggcggggagcccaccgtgcagctgcagggcagcggccggggcggcaggaaccaggagctggccctgcgggtgggcgctgagctgcggcgctggcccctgggccccattgatgtgctcttcctgagcggcggcacagatggccaggacggccccacagaggccgccggggcctgggtgaccccagagctggccagccaggccgctgctgagggcctggacatcgccaccttcctggcccacaatgacagccacaccttcttctgctgcctgcagggcggggcccacctgctgcacacaggcatgacaggcaccaacgtgatggacacccacctgctcttcctgcggcccaggtag

SEQ ID NO: 154148 - DNA, 852 bp, synthetic construct
  misc_feature 1..852: note = Description of Artificial Sequence: Synthetic coding sequence
  source 1..852: mol_type = other DNA
atggagctgctgctgagccagagctgcatctggtggcccatggtgggggagggccgcaccatcatcagctgtggcatcaaggccatggagaggagcggcaactacctgatctggctgcagaagggggagatgctgctgaagccccacagccgggtgcaggtgtttgaaggagctgaggacaacctgcctgacagagatgccctgcgggccgccctggccatccagcagctggccgagggcctgacagcagatgacctgctgctggtgctgatcagcggcggcggcagcgccctgctgcctgcccccatcccccctgtgaccctggaggagaagcagaccctgacccggctgctggccgcccggggggccaccatccaggagctgaacaccatcaggaaggccctgagccagctgaagggcggcggcctggcccaggccgcctacccagcccaggtggtgtccctcatcctgagtgatgtggtgggggaccctgtggaggtgattgccagcggccccaccgtggccagcagccacaacgtgcaggactgcctgcacatcctgaacagatatggcctgcgggccgccctgcccaggtctgtgaagacagtgctgagcagagctgacagcgacccccacggcccccacacctgtggccacgtgctgaatgtcatcatcggcagcaatgtgctggccctggccgaggcccagaggcaggccgaggccctgggctaccaggccgtggtgctgtctgctgccatgcagggctggggcaccccagctgcccacagagatgaccgctaccagtgccacggccacccccccctggtgcctgctgcctctgtgatggcctag

SEQ ID NO: 154149 - DNA, 723 bp, synthetic construct
  misc_feature 1..723: note = Description of Artificial Sequence: Synthetic coding sequence
  source 1..723: mol_type = other DNA
atgctgctgaagccccacagccgggtgcaggtgtttgagggcgctgaggacaacctgcctgacagagatgccctgcgggccgccctggccatccagcagctggccgagggcctgacagcagatgacctgctgctggtgctgatcagcggcggcggcagcgccctgctgcctgcccccatcccccctgtgaccctggaggagaagcagaccctgacccggctgctggccgcccggggggccaccatccaggagctgaacaccatcaggaaggccctgagccagctgaagggcggcggcctggcccaggccgcctacccagcccaggtggtgtccctcatcctgagtgatgtggtgggggaccctgtggaggtgattgccagcggccccaccgtggccagcagccacaacgtgcaggactgcctgcacatcctgaacagatatggcctgcgggccgccctgcccaggtctgtgaagacagtgctgagcagagctgacagcgacccccacggcccccacacctgtggccacgtgctgaatgtcatcatcggcagcaatgtgctggccctggccgaggcccagaggcaggccgaggccctgggctaccaggccgtggtgctgtctgctgccatgcagggctggggcaccccagctgcccacagagatgaccgctaccagtgccacggccacccccccctggtgcctgctgcctctgtgatggcctag

SEQ ID NO: 154150 - DNA, 618 bp, synthetic construct
  misc_feature 1..618: note = Description of Artificial Sequence: Synthetic coding sequence
  source 1..618: mol_type = other DNA
atggctgctgccctgcaggtgctgccccggctggcccgggcccccctgcaccccctgctgtggaggggctctgtggcccggctggccagctccatggccctggccgagcaggcccggcagctgtttgagagcgctgtgggcgctgtgctgcccggccccatgctgcaccgggccctgagcctggaccccggcggccggcagctgaaggtgcgggacaggaacttccagctgcggcagaacctgtacctggtgggctttgggaaggctgtgctgggcatggctgctgctgctgaggagctgctgggccagcacctggtgcagggcgtcatctctgtgcccaagggcatccgggccgccatggagagagctgggaagcaggagatgctgctgaagccccacagccgggtgcaggtgtttgaaggagctgaggacaacctgcctgacagagatgccctgcgggccgccctggccatccagcagctggccgagggcctgacagcagatgacctgctgctggtgctgatcagcggctggggcaccccagctgcccacagagatgaccgctaccagtgccacggccacccccccctggtgcctgctgcctctgtgatggcctag

SEQ ID NO: 154151 - DNA, 705 bp, synthetic construct; identical to SEQ ID NO: 154145
  misc_feature 1..705: note = Description of Artificial Sequence: Synthetic coding sequence
  source 1..705: mol_type = other DNA

SEQ ID NO: 154152 - DNA, 285 bp, synthetic construct
  misc_feature 1..285: note = Description of Artificial Sequence: Synthetic coding sequence
  source 1..285: mol_type = other DNA
aagatcctggatgccatgaacagagactgtggcatccccctgagccacctgcaggtggatggcggcatgaccagcaacaagatcctgatgcagctgcaggccgacatcctgtacatccctgtggtgaagcccagcatgcctgagaccacagccctgggcgccgccatggccgccggggctgctgagggcgtgggcgtgtggagcctggagcctgaggacctgtctgctgtgaccatggagagatttgagccccagatcaatgctgagggcaccttcaaggagtag

SEQ ID NO: 154153 - DNA, 1662 bp, synthetic construct
  misc_feature 1..1662: note = Description of Artificial Sequence: Synthetic coding sequence
  source 1..1662: mol_type = other DNA
atggccgccagcaagaaggctgtgctgggccccctggtgggcgctgtggaccagggcaccagcagcacccgcttcctggtgttcaacagcaagacagctgagctgctgagccaccaccaggtggagatcaagcaggagttcccccgggagggctgggtggagcaggaccccaaggagatcctgcacagcgtgtatgagtgcatcgagaagacctgtgagaagctgggccagctgaacatcgacatcagcaacatcaaggccatcggcgtgagcaaccagcgggagaccaccgtggtgtgggacaagatcaccggggagcccctgtacaatgctgtggtgtggctggacctgcggacccagagcacagtggagagcctgagcaagagaattcctggcaacaacaactttgtgaagagcaagacaggcctgcccctgagcacctacttctctgctgtgaagctgcgctggctgctggacaacgtgaggaaggtgcagaaggctgtggaggagaagagggccctgtttggcaccatcgacagctggctgatctggagcctgactggaggagtgaatggaggagtgcactgcacagatgtgaccaatgccagcaggaccatgctgttcaacatccacagcctggagtgggacaagcagctgtgtgagttcttcggcatccccatggagatcctgcccaacgtgcgcagcagcagcgagatctacggcctgatgaaggccggggccctggagggcgtgcccatcagcggctgcctgggggaccagagcgctgccctggtgggccagatgtgcttccagatcggccaggccaagaacacctatggaacaggctgcttcctgctgtgcaacacaggccacaagtgtgtgttcagtgaccacggcctgctgaccaccgtggcctacaagctgggccgggacaagcctgtgtactatgccctggagggctctgtggccatcgccggggctgtgatccgctggctgcgggacaacctgggcatcatcaagaccagcgaggagattgagaagctggccaaggaggtgggcaccagctatggctgctactttgtgcctgccttcagcggcctgtatgccccctactgggagcccagcgcccggggcatcatctgtggcctgacccagttcaccaacaagtgccacatcgcctttgctgccctggaggccgtgtgcttccagacccgggagatcctggatgccatgaacagagactgtggcatccccctgagccacctgcaggtggatggcggcatgaccagcaacaagatcctgatgcagctgcaggccgacatcctgtacatccctgtggtgaagcccagcatgcctgagaccacagccctgggcgccgccatggctgctggagctgctgagggcgtgggcgtgtggagcctggagcctgaggacctgtctgctgtgaccatggagagatttgagccccagatcaatgctgaggagagcgagatccgctacagcacctggaagaaggctgtgatgaagtccatgggctgggtgaccacccagagccctgagagcggggaccccagcatcttctgcagcctgcccctgggcttcttcatcgtgtcctccatggtgatgctgattggagcccgctacatcagcggcatcccctag

SEQ ID NO: 154154 - DNA, 1575 bp, synthetic construct
  misc_feature 1..1575: note = Description of Artificial Sequence: Synthetic coding sequence
  source 1..1575: mol_type = other DNA
atggccgccagcaagaaggctgtgctgggccccctggtgggcgctgtggaccagggcaccagcagcacccgcttcctggtgttcaacagcaagacagctgagctgctgagccaccaccaggtggagatcaagcaggagttcccccgggagggctgggtggagcaggaccccaaggagatcctgcacagcgtgtatgagtgcatcgagaagacctgtgagaagctgggccagctgaacatcgacatcagcaacatcaaggccatcggcgtgagcaaccagcgggagaccaccgtggtgtgggacaagatcaccggggagcccctgtacaatgctgtggtgtggctggacctgcggacccagagcacagtggagagcctgagcaagagaattcctggcaacaacaactttgtgaagagcaagacaggcctgcccctgagcacctacttctctgctgtgaagctgcgctggctgctggacaacgtgaggaaggtgcagaaggctgtggaggagaagagggccctgtttggcaccatcgacagctggctgatctggagcctgactggaggagtgaatggaggagtgcactgcacagatgtgaccaatgccagcaggaccatgctgttcaacatccacagcctggagtgggacaagcagctgtgtgagttcttcggcatccccatggagatcctgcccaacgtgcgcagcagcagcgagatctacggcctgatgaaggccggggccctggagggcgtgcccatcagcggctgcctgggggaccagagcgctgccctggtgggccagatgtgcttccagatcggccaggccaagaacacctatggaacaggctgcttcctgctgtgcaacacaggccacaagtgtgtgttcagtgaccacggcctgctgaccaccgtggcctacaagctgggccgggacaagcctgtgtactatgccctggagggctctgtggccatcgccggggctgtgatccgctggctgcgggacaacctgggcatcatcaagaccagcgaggagattgagaagctggccaaggaggtgggcaccagctatggctgctactttgtgcctgccttcagcggcctgtatgccccctactgggagcccagcgcccggggcatcatctgtggcctgacccagttcaccaacaagtgccacatcgcctttgctgccctggaggccgtgtgcttccagacccgggagatcctggatgccatgaacagagactgtggcatccccctgagccacctgcaggtggatggcggcatgaccagcaacaagatcctgatgcagctgcaggccgacatcctgtacatccctgtggtgaagcccagcatgcctgagaccacagccctgggcgccgccatggctgctggagctgctgagggcgtgggcgtgtggagcctggagcctgaggacctgtctgctgtgaccatggagagatttgagccccagatcaatgctgaggagagcgagatccgctacagcacctggaagaaggctgtgatgaagtccatgggctgggtgaccacccagagccctgagagcggcatcccctag

SEQ ID NO: 154155 - DNA, 1593 bp, synthetic construct
  misc_feature 1..1593: note = Description of Artificial Sequence: Synthetic coding sequence
  source 1..1593: mol_type = other DNA
atggccgccagcaagaaggctgtgctgggccccctggtgggcgctgtggaccagggcaccagcagcacccgcttcctggtgttcaacagcaagacagctgagctgctgagccaccaccaggtggagatcaagcaggagttcccccgggagggctgggtggagcaggaccccaaggagatcctgcacagcgtgtatgagtgcatcgagaagacctgtgagaagctgggccagctgaacatcgacatcagcaacatcaaggccatcggcgtgagcaaccagcgggagaccaccgtggtgtgggacaagatcaccggggagcccctgtacaatgctgtggtgtggctggacctgcggacccagagcacagtggagagcctgagcaagagaattcctggcaacaacaactttgtgaagagcaagacaggcctgcccctgagcacctacttctctgctgtgaagctgcgctggctgctggacaacgtgaggaaggtgcagaaggctgtggaggagaagagggccctgtttggcaccatcgacagctggctgatctggagcctgactggaggagtgaatggaggagtgcactgcacagatgtgaccaatgccagcaggaccatgctgttcaacatccacagcctggagtgggacaagcagctgtgtgagttcttcggcatccccatggagatcctgcccaacgtgcgcagcagcagcgagatctacggcctgatgaagatcagccacagcgtgaaggccggggccctggagggcgtgcccatcagcggctgcctgggggaccagagcgctgccctggtgggccagatgtgcttccagatcggccaggccaagaacacctatggaacaggctgcttcctgctgtgcaacacaggccacaagtgtgtgttcagtgaccacggcctgctgaccaccgtggcctacaagctgggccgggacaagcctgtgtactatgccctggagggctctgtggccatcgccggggctgtgatccgctggctgcgggacaacctgggcatcatcaagaccagcgaggagattgagaagctggccaaggaggtgggcaccagctatggctgctactttgtgcctgccttcagcggcctgtatgccccctactgggagcccagcgcccggggcatcatctgtggcctgacccagttcaccaacaagtgccacatcgcctttgctgccctggaggccgtgtgcttccagacccgggagatcctggatgccatgaacagagactgtggcatccccctgagccacctgcaggtggatggcggcatgaccagcaacaagatcctgatgcagctgcaggccgacatcctgtacatccctgtggtgaagcccagcatgcctgagaccacagccctgggcgccgccatggctgctggagctgctgagggcgtgggcgtgtggagcctggagcctgaggacctgtctgctgtgaccatggagagatttgagccccagatcaatgctgaggagagcgagatccgctacagcacctggaagaaggctgtgatgaagtccatgggctgggtgaccacccagagccctgagagcggcatcccctag

SEQ ID NO: 154156 - DNA, 1065 bp, synthetic construct
  misc_feature 1..1065: note = Description of Artificial Sequence: Synthetic coding sequence
  source 1..1065: mol_type = other DNA
atgctgttcaacatccacagcctggagtgggacaagcagctgtgtgagttcttcggcatccccatggagatcctgcccaacgtgcgcagcagcagcgagatctacggcctgatgaagatcagccacagcgtgaaggccggggccctggagggcgtgcccatcagcggctgcctgggggaccagagcgctgccctggtgggccagatgtgcttccagatcggccaggccaagaacacctacggcaccggctgcttcctgctgtgcaacacaggccacaagtgtgtgttcagtgaccacggcctgctgaccaccgtggcctacaagctgggccgggacaagcctgtgtactatgccctggagggctctgtggccatcgccggggccgtcatccgctggctgcgggacaacctgggcatcatcaagaccagcgaggagattgagaagctggccaaggaggtgggcaccagctatggctgctactttgtgcctgccttcagcggcctgtatgccccctactgggagcccagcgcccggggcatcatctgtggcctgacccagttcaccaacaagtgccacatcgcctttgctgccctggaggccgtgtgcttccagacccgggagatcctggatgccatgaacagagactgtggcatccccctgagccacctgcaggtggatggcggcatgaccagcaacaagatcctgatgcagctgcaggccgacatcctgtacatccctgtggtgaagcccagcatgcctgagaccacagccctgggcgccgccatggccgccggggctgctgagggcgtgggcgtgtggagcctggagcctgaggacctgtctgctgtgaccatggagagatttgagccccagatcaatgctgaggagagcgagatccgctacagcacctggaagaaggctgtgatgaagtccatgggctgggtgaccacccagagccctgagagcggggaccccagcatcttctgcagcctgcccctgggcttcttcatcgtgtcctccatggtgatgctgattggagcccgctacatcagcggcatcccctag

SEQ ID NO: 154157 - DNA, 1104 bp, synthetic construct
  misc_feature 1..1104: note = Description of Artificial Sequence: Synthetic coding sequence
  source 1..1104: mol_type = other DNA
atggcctacctggacaacttcaagaccaatgcccggcacttcatcctgtttgtgaacatcagcagcctgaccggcggcgtgaatggaggagtgcactgcacagatgtgaccaatgccagcaggaccatgctgttcaacatccacagcctggagtgggacaagcagctgtgtgagttcttcggcatccccatggagatcctgcccaacgtgcgcagcagcagcgagatctacggcctgatgaagatcagccacagcgtgaaggccggggccctggagggcgtgcccatcagcggctgcctgggggaccagagcgctgccctggtgggccagatgtgcttccagatcggccaggccaagaacacctacggcaccggctgcttcctgctgtgcaacacaggccacaagtgtgtgttcagtgaccacggcctgctgaccaccgtggcctacaagctgggccgggacaagcctgtgtactatgccctggagggctctgtggccatcgccggggccgtcatccgctggctgcgggacaacctgggcatcatcaagaccagcgaggagattgagaagctggccaaggaggtgggcaccagctatggctgctactttgtgcctgccttcagcggcctgtatgccccctactgggagcccagcgcccggggcatcatctgtggcctgacccagttcaccaacaagtgccacatcgcctttgctgccctggaggccgtgtgcttccagacccgggagatcctggatgccatgaacagagactgtggcatccccctgagccacctgcaggtggatggcggcatgaccagcaacaagatcctgatgcagctgcaggccgacatcctgtacatccctgtggtgaagcccagcatgcctgagaccacagccctgggcgccgccatggccgccggggctgctgagggcgtgggcgtgtggagcctggagcctgaggacctgtctgctgtgaccatggagagatttgagccccagatcaatgctgaggagagcgagatccgctacagcacctggaagaaggctgtgatgaagtccatgggctgggtgaccacccagagccctgagagcggcatcccctag

SEQ ID NO: 154158 - DNA, 1680 bp, synthetic construct
  misc_feature 1..1680: note = Description of Artificial Sequence: Synthetic coding sequence
  source 1..1680: mol_type = other DNA
atggccgccagcaagaaggctgtgctgggccccctggtgggcgctgtggaccagggcaccagcagcacccgcttcctggtgttcaacagcaagacagctgagctgctgagccaccaccaggtggagatcaagcaggagttcccccgggagggctgggtggagcaggaccccaaggagatcctgcacagcgtgtatgagtgcatcgagaagacctgtgagaagctgggccagctgaacatcgacatcagcaacatcaaggccatcggcgtgagcaaccagcgggagaccaccgtggtgtgggacaagatcaccggggagcccctgtacaatgctgtggtgtggctggacctgcggacccagagcacagtggagagcctgagcaagagaattcctggcaacaacaactttgtgaagagcaagacaggcctgcccctgagcacctacttctctgctgtgaagctgcgctggctgctggacaacgtgaggaaggtgcagaaggctgtggaggagaagagggccctgtttggcaccatcgacagctggctgatctggagcctgactggaggagtgaatggaggagtgcactgcacagatgtgaccaatgccagcaggaccatgctgttcaacatccacagcctggagtgggacaagcagctgtgtgagttcttcggcatccccatggagatcctgcccaacgtgcgcagcagcagcgagatctacggcctgatgaccatccacaacagcaagaaggccggggccctggagggcgtgcccatcagcggctgcctgggggaccagagcgctgccctggtgggccagatgtgcttccagatcggccaggccaagaacacctatggaacaggctgcttcctgctgtgcaacacaggccacaagtgtgtgttcagtgaccacggcctgctgaccaccgtggcctacaagctgggccgggacaagcctgtgtactatgccctggagggctctgtggccatcgccggggctgtgatccgctggctgcgggacaacctgggcatcatcaagaccagcgaggagattgagaagctggccaaggaggtgggcaccagctatggctgctactttgtgcctgccttcagcggcctgtatgccccctactgggagcccagcgcccggggcatcatctgtggcctgacccagttcaccaacaagtgccacatcgcctttgctgccctggaggccgtgtgcttccagacccgggagatcctggatgccatgaacagagactgtggcatccccctgagccacctgcaggtggatggcggcatgaccagcaacaagatcctgatgcagctgcaggccgacatcctgtacatccctgtggtgaagcccagcatgcctgagaccacagccctgggcgccgccatggctgctggagctgctgagggcgtgggcgtgtggagcctggagcctgaggacctgtctgctgtgaccatggagagatttgagccccagatcaatgctgaggagagcgagatccgctacagcacctggaagaaggctgtgatgaagtccatgggctgggtgaccacccagagccctgagagcggggaccccagcatcttctgcagcctgcccctgggcttcttcatcgtgtcctccatggtgatgctgattggagcccgctacatcagcggcatcccctag

SEQ ID NO: 154159 - DNA, 1662 bp, synthetic construct
  misc_feature 1..1662: note = Description of Artificial Sequence: Synthetic coding sequence
  source 1..1662: mol_type = other DNA
atggccgcccccaagacagctgctgtgggccccctggtgggcgctgtggtgcagggcaccaacagcacccgcttcctggtgttcaacagcaagacagctgagctgctgagccaccacaaggtggagctgacccaggagttccccaaggagggctgggtggagcaggaccccaaggagatcctgcagagcgtgtatgagtgcatcgcccggacctgtgagaagctggatgagctgaacatcgacatcagcaacatcaaggctgtgggcgtgagcaaccagcgggagaccaccgtcatctgggacaagctgaccggggagcccctgtacaatgctgtggtgtggctggacctgcggacccagaccaccgtggaggacctgagcaagaagatccctggcaacagcaactttgtgaagagcaagacaggcctgcccctgagcacctacttctctgctgtgaagctgcgctggatgctggacaacgtgagaaatgtgcagaaggctgtggaggagggccgggccctgtttggcaccatcgacagctggctgatctggagcctgactggaggagtgaatggaggagtgcactgcacagatgtgaccaatgccagcaggaccatgctgttcaacatccacagcctggagtgggacaaggagctgtgtgacttctttgagatccccatggacctgctgcccaacgtgttcagcagcagcgagatctacggcctcatcaagacaggagccctggagggcgtgcccatcagcggctgcctgggggaccagtgtgccgccctggtgggccagatgtgcttccaggagggccaggccaagaacacctatggaacaggctgcttcctgctgtgcaacacaggcaggaaatgtgtgttcagcgagcacggcctgctgaccaccgtggcctacaagctgggccgggagaagccagcctactatgccctggagggctctgtggccatcgccggggctgtgatccgctggctgcgggacaacctgggcatcatcgagaccagcggggacatcgagcggctggccaaggaggtgggcaccagctatggctgctactttgtgcctgccttcagcggcctgtatgccccctactgggagcccagcgcccggggcatcctgtgtggcctgacccagttcaccaacaagtgccacatcgcctttgctgccctggaggccgtgtgcttccagacccgggagatcctggaggccatgaacagagactgtggcatccccctgcggcacctgcaggtggatggcggcatgaccaacaacaaggtgctgatgcagctgcaggccgacatcctgcacatccctgtgatcaagcccttcatgcctgagaccacagccctgggcgccgccatggctgctggagctgctgagggcgtgtctgtgtggagcctggagccccaggccctgtctgtgctgaggatggagagatttgagccccagatccaggccacagagagcgagatccgctatgccacctggaagaaggctgtgatgaagtccatgggctgggtgaccagccagagccctgagggcggggaccccagcatcttcagcagcctgcccctgggcttcttcatcgtgtcctccatggtgatgctgattggagcccgctacatcagcggcgtgccctag

SEQ ID NO: 154160 - DNA, 1050 bp, synthetic construct
  misc_feature 1..1050: note = Description of Artificial Sequence: Synthetic coding sequence
  source 1..1050: mol_type = other DNA
atggccagcaagaaggtgtgcatcgtgggcagcggcaactggggcagcgccatcgccaagatcgtgggcggcaatgctgcccagctggcccagtttgacccccgggtgaccatgtgggtgtttgaagaagatattggaggcaagaagctgacagagatcatcaacacccagcatgaaaatgtgaagtacctgcccggccacaagctgccccccaacgtggtggccgtgcctgatgtggtgcaggccgcagaagatgctgacatcctgatctttgtggtgccccaccagttcatcggcaagatctgtgaccagctgaagggccacctgaaggccaatgccaccggcatcagcctcatcaagggcgtggatgagggccccaacggcctgaagctgatcagcgaggtgattggagagcggctgggcatccccatgtctgtgctgatgggcgccaacatcgccagcgaggtggctgatgagaagttctgtgagaccaccatcggctgcaaggaccctgcccagggccagctgctgaaggagctgatgcagacccccaacttccgcatcaccgtggtgcaggaggtggacacagtggagatctgtggggccctgaagaatgtggtggccgtgggcgccggcttctgtgatggcctgggctttggagacaacaccaaggccgccgtcatccggctgggcctgatggagatgattgcctttgccaagctgttctgcagcggccctgtgtcctctgccaccttcctggagagctgtggggtggccgacctgatcaccacctgctacggcggcaggaacaggaaggtggccgaggcctttgccaggacaggcaagagcattgagcagctggagaaggagctgctgaatggccagaagctgcagggccctgagacagcccgggagctgtacagcatcctgcagcacaagggcctggtggacaagttccccctcttcatggctgtgtacaaggtgtgctatgagggccagcctgtgggggagttcatccactgcctgcagaaccaccctgagcacatgtag

SEQ ID NO: 154161 - DNA, 981 bp, synthetic construct
  misc_feature 1..981: note = Description of Artificial Sequence: Synthetic coding sequence
  source 1..981: mol_type = other DNA
atgcagacccccaacttccgcatcaccgtggtgcaggaggtggacacagtggagatctgtggggccctgaaggtgcggggggcccagaggcagctgtggggcgaggagaaggcccccaaggaggtgtggctgagcagcgcccggctgcaggtgctgcaggccctgaccatcgagcagtggttccccttccccaccatgagccacgcctacagaagaagctgccgcagcaaggcccgggccatccaggccgactacagcagcagtgaccggggccccccctgcagctgccccatcctggccccctgtggcaccccccaccccctggcccctgggggccagggcgacaaggagatgccccggctgatgggagacaagaccagcctgaccccccggcagaccaacggccagaactacggctcctggacagctgtggatggcctgtacaacggcatggtgcgctgggaggaccagctggagcggcgggtggtgttcaggaagtgcccccggggcggctccatgggccagggcctgaggaaaggagtgcagcagggcggcaagccccggggcggcagccggctgctgaagggccacaccctgtacctgagcagcgctgtgggcgtgacagcagatgagatgtccatgaggggcctgcacatgggccccatcggcggcggcctcttcacctatgacctgcacagcttcaagaatgtggtggccgtgggcgccggcttctgtgatggcctgggctttggagacaacaccaaggctgctgtgatccggctgggcctgatggagatgattgcctttgccaagctgttctgcagcggccctgtgagcagcgccaccttcctggagagctgtggggtggccgacctgatcaccacctgctatggaggcaggaacaggaaggtggccgaggcctttgccaggacaggcaaggtgggccctggccggcgggagaacagaggagctgccctgtag

SEQ ID NO: 154162 - DNA, 1056 bp, synthetic construct
  misc_feature 1..1056: note = Description of Artificial Sequence: Synthetic coding sequence
  source 1..1056: mol_type = other DNA
atggctgctgcccccctgaaggtgtgcatcgtgggcagcggcaactggggcagcgctgtggccaagatcatcggcaacaacgtgaagaagctgcagaagtttgccagcacagtgaagatgtgggtgtttgaggagaccgtgaatggaaggaagctgacagacatcatcaacaatgaccatgaaaatgtgaagtacctgcccggccacaagctgcctgaaaatgtggtggccatgagcaacctgtctgaggccgtgcaggatgctgacctgctggtgtttgtgatcccccaccagttcatccaccgcatctgtgatgagatcaccggccgggtgcccaagaaggccctgggcatcaccctcatcaagggcattgatgagggccctgagggcctgaagctgatcagtgacatcatccgggagaagatgggcatcgacatctctgtgctgatgggcgccaacatcgccaatgaggtggccgctgagaagttctgtgagaccaccatcggcagcaaggtgatggagaatggcctgctcttcaaggagctgctgcagacccccaacttccgcatcaccgtggtggatgatgctgacacagtggagctgtgtggggccctgaagaacatcgtggccgtgggcgccggcttctgtgatggcctgcgctgtggggacaacaccaaggccgccgtcatccggctgggcctgatggagatgattgcctttgcccgcatcttctgcaagggccaggtgtccacagccaccttcctggagagctgtggggtggccgacctgatcaccacctgctacggcggcaggaacagaagagtggccgaggcctttgccaggacaggcaagaccatcgaggagctggagaaggagatgctgaatggccagaagctgcagggcccccagaccagcgctgaggtgtaccgcatcctgaagcagaagggcctgctggacaagttccccctcttcaccgctgtgtaccagatctgctatgagagcaggcctgtgcaggagatgctgagctgcctgcagagccaccctgagcacacctag

SEQ ID NO: 154163 - DNA, 1860 bp, synthetic construct
  misc_feature 1..1860: note = Description of Artificial Sequence: Synthetic coding sequence
  source 1..1860: mol_type = other DNA
atggagagcagcagcagcagcaacagctacttctctgtgggccccaccagccccagcgctgtggtgctgctgtacagcctgagcaaggagagcctgcagagcgtggatgtgctgcgggaggaggtgtctgagatcctggatgagatgagccacaagctgcggctgggcgccatccgcttctgtgccttcaccctgagcaaggtgttcaagcagatcttcagcaaggtgtgtgtgaatgaggagggcatccagaagctgcagagggccatccaggagcaccctgtggtgctgctgcccagccacaggagctacatcgacttcctgatgctgtccttcctgctgtacaactatgacctgcctgtgcctgtgattgctgctggcatggacttcctgggcatgaagatggtgggggagctgctgaggatgtctggggccttcttcatgaggaggaccttcggcggcaacaagctgtactgggccgtgttttctgaatatgtgaagaccatgctgagaaatggctacgcccctgtggagttcttcctggagggcaccaggagccgcagcgccaagaccctgacccccaagtttggcctgctgaacatcgtgatggagcccttcttcaagcgggaggtgtttgacacctacctggtgcccatcagcatctcctatgacaagatcctggaggagaccctgtatgtgtatgagctgctgggcgtgcccaagcccaaggagagcaccaccggcctgctgaaggccaggaagatcctgtctgagaactttggcagcatccacgtgtactttggagaccctgtgtccctgcggagcctggccgccggccgcatgagccgcagcagctacaacctggtgccccgctacatcccccagaagcagagcgaggacatgcacgcctttgtgacagaggtggcctacaagatggagctgctgcagatcgagaacatggtgctgagcccctggaccctcatcgtggccgtgctgctgcagaaccggcccagcatggactttgatgccctggtggagaagaccctgtggctgaagggcctgacccaggccttcggcggcttcctgatctggccagacaacaagccagctgaggaggtggtgcctgccagcatcctgctgcacagcaacatcgccagcctggtgaaggaccaggtgatcctgaaggtggacagcggggacagcgaggtggtggatggcctgatgctgcagcacatcaccctgctgatgtgcagcgcctacagaaaccagctgctgaacatctttgtgcggcccagcctggtggccgtggccctgcagatgaccccaggcttcagaaaagaagatgtgtacagctgcttccgcttcctgagagatgtgtttgctgatgagttcatcttcctgcccggcaacaccctgaaggactttgaggagggctgctacctgctgtgcaagtctgaggccatccaggtgaccaccaaggacatcctggtgacagagaagggcaacacagtgctggagttcctggtgggcctcttcaagccctttgtggagagctaccagatcatctgcaagtacctgctgtctgaggaggaggaccacttcagcgaggagcagtacctggccgctgtgaggaagttcaccagccagctgctggaccagggcaccagccagtgctatgatgtgctgagcagtgatgtgcagaagaatgccctggccgcctgtgtgcggctgggcgtggtggagaagaagaagatcaacaacaactgcatcttcaacgtgaatgagcccgccaccaccaagctggaggagatgctgggctgcaagacccccatcggcaagccagccacagccaagctgtag

SEQ ID NO: 154164 - DNA, 2043 bp, synthetic construct
  misc_feature 1..2043: note = Description of Artificial Sequence: Synthetic coding sequence
  source 1..2043: mol_type = other DNA
atggagagcagcagcagcagcaacagctacttctctgtgggccccaccagccccagcgctgtggtgctgctgtacagcaaggagctgaagaagtgggatgaatttgaggacatcctggaggagcggcggcacgtgtctgacctgaagtttgccatgaagtgctacacccccctggtgtacaagggcatcaccccctgcaagcccatcgacatcaagtgcagcgtgctgaacagcgaggagatccactacgtgatcaagcagctgagcaaggagagcctgcagagcgtggatgtgctgcgggaggaggtgtctgagatcctggatgagatgagccacaagctgcggctgggcgccatccgcttctgtgccttcaccctgagcaaggtgttcaagcagatcttcagcaaggtgtgtgtgaatgaggagggcatccagaagctgcagagggccatccaggagcaccctgtggtgctgctgcccagccacaggagctacatcgacttcctgatgctgtccttcctgctgtacaactatgacctgcctgtgcctgtgattgctgctggcatggacttcctgggcatgaagatggtgggggagctgctgaggatgtctggggccttcttcatgaggaggacctttggaggcaacaagctgtactgggccgtgttttctgaatatgtgaagaccatgctgagaaatggctacgcccctgtggagttcttcctggagggcaccaggagccgcagcgccaagaccctgacccccaagtttggcctgctgaacatcgtgatggagcccttcttcaagcgggaggtgtttgacacctacctggtgcccatcagcatctcctatgacaagatcctggaggagaccctgtatgtgtatgagctgctgggcgtgcccaagcccaaggagagcaccaccggcctgctgaaggccaggaagatcctgtctgaaaattttggcagcatccacgtgtactttggagaccctgtgtccctgcggagcctggccgccggccgcatgagccgcagcagctacaacctggtgccccgctacatcccccagaagcagagcgaggacatgcacgcctttgtgacagaggtggcctacaagatggagctgctgcagatcgagaacatggtgctgagcccctggaccctgattgtggccgtgctgctgcagaaccggcccagcatggactttgatgccctggtggagaagaccctgtggctgaagggcctgacccaggcctttggaggcttcctgatctggccagacaacaagccagctgaggaggtggtgcctgccagcatcctgctgcacagcaacatcgccagcctggtgaaggaccaggtgatcctgaaggtggacagcggggacagcgaggtggtggatggcctgatgctgcagcacatcaccctgctgatgtgcagcgcctacagaaaccagctgctgaacatctttgtgcggcccagcctggtggccgtggccctgcagatgaccccaggcttcaggaaggaggatgtgtacagctgcttccgcttcctgagagatgtgtttgctgatgagttcatcttcctgcccggcaacaccctgaaggactttgaggagggctgctacctgctgtgcaagtctgaggccatccaggtgaccaccaaggacatcctggtgacagagaagggcaacacagtgctggagttcctggtgggcctcttcaagccctttgtggagagctaccagatcatctgcaagtacctgctgtctgaggaggaggaccacttcagcgaggagcagtacctggccgctgtgaggaagttcaccagccagctgctggaccagggcaccagccagtgctatgatgtgctgagcagtgatgtgcagaagaatgccctggccgcctgtgtgcggctgggcgtggtggagaagaagaagatcaacaacaactgcatcttcaacgtgaatgaaccagccaccaccaagctggaggagatgctgggctgcaagacccccatcggcaagccagccacagccaagctgtag

SEQ ID NO: 154165 - DNA, 1764 bp, synthetic construct
  misc_feature 1..1764: note = Description of Artificial Sequence: Synthetic coding sequence
  source 1..1764: mol_type = other DNA
atggagagcagcagcagcagcaacagctacttctctgtgggccccaccagccccagcgctgtggtgctgctgtacagcaaggagctgaagaagtgggatgaatttgaggacatcctggaggagcggcggcacgtgtctgacctgaagtttgccatgaagtgctacacccccctggtgtacaagggcatcaccccctgcaagcccatcgacatcaagtgcagcgtgctgaacagcgaggagatccactacgtgatcaagcagctgagcaaggagagcctgcagagcgtggatgtgctgcgggaggaggtgtctgagatcctggatgagatgagccacaagctgcggctgggcgccatccgcttctgtgccttcaccctgagcaaggtgttcaagcagatcttcagcaagctgcagagggccatccaggagcaccctgtggtgctgctgcccagccacaggagctacatcgacttcctgatgctgtccttcctgctgtacaactatgacctgcctgtgcctgtgattgctgctggcatggacttcctgggcatgaagatggtgggggagctgctgaggatgtctggggccttcttcatgaggaggacctttggaggcaacaagctgtactgggccgtgttttctgaatatgtgaagaccatgctgagaaatggctacgcccctgtggagttcttcctggagggcaccaggagccgcagcgccaagaccctgacccccaagtttggcctgctgaacatcgtgatggagcccttcttcaagcgggaggtgtttgacacctacctggtgcccatcagcatctcctatgacaagatcctggaggagaccctgtatgtgtatgagctgctgggcgtgcccaagcccaaggagagcaccaccggcctgctgaaggccaggaagatcctgtctgaaaattttggcagcatccacgtgtactttggagaccctgtgtccctgcggagcctggccgccggccgcatgagccgcagcagctacaacctggtgccccgctacatcccccagaagcagagcgaggacatgcacgcctttgtgacagaggtggcctacaagatggagctgctgcagatcgagaacatggtgctgagcccctggaccctgattgtggccgtgctgctgcagaaccggcccagcatggactttgatgccctggtggagaagaccctgtggctgaagggcctgacccaggcctttggaggcttcctgatctggccagacaacaagccagctgaggaggtggtgcctgccagcatcctgctgcacagcaacatcgccagcctggtgaaggaccaggtgatcctgaaggtggacagcggggacagcgaggtggtggatggcctgatgctgcagcacatcaccctgctgatgtgcagcgcctacagaaaccagctgctgaacatctttgtgcggcccagcctggtggccgtggccctgcagatgaccccaggcttcaggaaggaggatgtgtacagctgcttccgcttcctgagagatgtgtttgctgatgagttcatcttcctgcccggcaacaccctgaaggactttgaggagggctgctacctgctgtgcaagtctgaggccatccaggtgaccaccaaggacatcctggtgacagagaagggcaacacagtgctggagttcctggtgggcctcttcaagccctttgtggagagctaccagatcatctgcaagtacctgctgtctgaggaggaggaccacttcagcgagtag

SEQ ID NO: 154166 - DNA, 669 bp, synthetic construct
  misc_feature 1..669: note = Description of Artificial Sequence: Synthetic coding sequence
  source 1..669: mol_type = other DNA
atggagagcagcagcagcagcaacagctacttctctgtgggccccaccagccccagcgctgtggtgctgctgtacagcctgagcaaggagagcctgcagagcgtggatgtgctgcgggaggaggtgtctgagatcctggatgagatgagccacaagctgcggctgggcgccatccgcttctgtgccttcaccctgagcaaggtgttcaagcagatcttcagcaaggtgtgtgtgaatgaggagggcatccagaagctgcagagggccatccaggagcaccctgtggtgctgctgcccagccacaggagctacatcgacttcctgatgctgtccttcctgctgtacaactatgacctgcctgtgcctgtgattgctgctggcatggacttcctgggcatgaagatggtgggggagctgctgaggatgtctggggccttcttcatgaggaggaccttcggcggcaacaagctgtactgggccgtgttttctgaatatgtgaagaccatgctgagaaatggctacgcccctgtggagttcttcctggagggcaccaggagccgcagcgccaagaccctgacccccaagtttggcctgctgaacatcgtgatggagcccttcttcaagcgggaggtgtttgacacctacctggtgcccatcagcatctcctag

SEQ ID NO: 154167 - DNA, 870 bp, synthetic construct
  misc_feature 1..870: note = Description of Artificial Sequence: Synthetic coding sequence
  source 1..870: mol_type = other DNA
atgagcaggaacagcaggaagaccatcggcaaggtgcgggtggactacatcatcatcaagcccctgcccggctacagctgtgacatgaagagcagcttcagcaagtactggaagccccgcatccccctggatgtgggccacagaggagctggcaacagcaccaccacagcccagctggccaaggtgcaggagaacaccatcgccagcctgagaaatgctgccagccacggggccgcctttgtggagtttgatgtgcacctgagcaaggactttgtgcctgtggtgtaccatgacctgacctgctgcctgaccatgaagaagaacctgtggttccggaggaagatccccttccagaagatcagccacttcctgctgctgcgctgggtgcggcagaagcagaacaagtaccccatcctcttcctgacccagggcaagtctgagatctacccagagctgatggacctgcggagcaggaccacccccatcgccatgagctttgcccagtttgagaacctgctgggcatcaacgtgcacacagaggacctgctgaggaaccccagctacatccaggaggccaaggccaagggcctggtgatcttctgctggggagatgacaccaatgaccctgagaacagaaggaagctgaaggagctgggcgtgaatggcctcatctatgaccgcatctatgactggatgcctgagcagcccaacatcttccaggtggagcagctggagcggctgaagcaggagctgcctgagctgaagagctgcctgtgccccaccgtgtccagatttgtgcccagcagcctgtgtggggagagtgacatccacgtggatgccaatggaattgacaacgtggagaatgcctag

SEQ ID NO: 154168 - DNA, 2019 bp, synthetic construct
  misc_feature 1..2019: note = Description of Artificial Sequence: Synthetic coding sequence
  source 1..2019: mol_type = other DNA
atgacccccagccaggtggcctttgagatccggggcaccctgctgcccggggaggtgtttgccatctgtggcagctgtgatgccctgggcaactggaacccccagaatgctgtggccctgctgcctgaaaatgacaccggggagagcatgctgtggaaggccaccatcgtgctgagcagaggagtgtctgtgcagtaccgctacttcaagggctacttcctggagcccaagaccatcggcggcccctgccaggtgattgtgcacaagtgggagacccacctgcagcccaggagcatcacccccctggagagcgagatcatcattgatgatggccagtttggcatccacaatggagtggagaccctggacagcggctggctgacctgccagacagagatccggctgcggctgcactacagcgagaagccccctgtgtccatcaccaagaagaagctgaagaagagccgcttccgggtgaagctgaccctggagggcctggaggaggatgatgatgacagagtgagccccaccgtgctgcacaagatgagcaacagcctggagatcagcctcatcagtgacaatgagttcaagtgccgccacagccagccagaatgtggctacggcctgcagcctgaccgctggacagagtacagcatccagaccatggagccagacaacctggagctgatctttgacttctttgaggaggacctgtctgaacatgtggtgcagggagatgccctgcccggccacgtgggcacagcctgcctgctgagcagcaccatcgccgagagcggcaagtctgctggcatcctgaccctgcccatcatgagcaggaacagcaggaagaccatcggcaaggtgcgggtggactacatcatcatcaagcccctgcccggctacagctgtgacatgaagagcagcttcagcaagtactggaagccccgcatccccctggatgtgggccacagaggagctggcaacagcaccaccacagcccagctggccaaggtgcaggagaacaccatcgccagcctgagaaatgctgccagccacggggccgcctttgtggagtttgatgtgcacctgagcaaggactttgtgcctgtggtgtaccatgacctgacctgctgcctgaccatgaagaagaagtttgatgctgaccctgtggagctgtttgagatccctgtgaaggagctgacctttgaccagctgcagctgctgaagctgacccacgtgacagccctgaagagcaaggacaggaaggagagcgtggtgcaggaggagaacagcttcagcgagaaccagcccttccccagcctgaagatggtgctggagagcctgcctgaagatgtgggcttcaacatcgagatcaagtggatctgccagcagagagatggcatgtgggatggcaacctgagcacctactttgacatgaacctcttcctggacatcatcctgaagacagtgctggagaacagcggcaagagaagaattgtgttcagcagctttgatgctgacatctgcaccatggtgcggcagaagcagaacaagtaccccatcctcttcctgacccagggcaagtctgagatctacccagagctgatggacctgcggagcaggaccacccccatcgccatgagctttgcccagtttgagaacctgctgggcatcaacgtgcacacagaggacctgctgaggaaccccagctacatccaggaggccaaggccaagggcctggtgatcttctgctggggagatgacaccaatgaccctgaaaatagaaggaagctgaaggagctgggcgtgaatggcctcatctatgaccgcatctatgactggatgcctgagcagcccaacatcttccaggtggagcagctggagcggctgaagcaggagctgcctgagctgaagagctgcctgtgccccaccgtgtccagatttgtgcccagcagcctgtgtggggagagtgacatccacgtggatgccaacggcatcgacaacgtggagaatgcctag

SEQ ID NO: 154169 - DNA, 795 bp, synthetic construct
  misc_feature 1..795: note = Description of Artificial Sequence: Synthetic coding sequence
  source 1..795: mol_type = other DNA
tgatgtgacatgaagagcagcttcagcaagtactggaagccccgcatccccctggatgtgggccacagaggagctggcaacagcaccaccacagcccagctggccaaggtgcaggagaacaccatcgccagcctgagaaatgctgccagccatggagctgcctttgtggagtttgatgtgcacctgagcaaggactttgtgcctgtggtgtaccatgacctgacctgctgcctgaccatgaagaagaacctgtggttccggaggaagatccccttccagaagatcagccacttcctgctgctgcgctgggtgcggcagaagcagaacaagtaccccatcctcttcctgacccagggcaagtctgagatctacccagagctgatggacctgcggagcaggaccacccccatcgccatgagctttgcccagtttgagaacctgctgggcatcaacgtgcacacagaggacctgctgaggaaccccagctacatccaggaggccaaggccaagggcctggtgatcttctgctggggagatgacaccaatgaccctgaaaatagaaggaagctgaaggagctgggcgtgaatggcctcatctatgaccgcatctatgactggatgcctgagcagcccaacatcttccaggtggagcagctggagcggctgaagcaggagctgcctgagctgaagagctgcctgtgccccaccgtgtccagatttgtgcccagcagcctgtgtggggagagtgacatccacgtggatgccaacggcatcgacaacgtggagaatgcctag

SEQ ID NO: 154170 - DNA, 996 bp, synthetic construct
  misc_feature 1..996: note = Description of Artificial Sequence: Synthetic coding sequence
  source 1..996: mol_type = other DNA
atgtggctgtgggaggaccagggcggcctgctgggccccttctccttcctgctgctggtgctgctgctggtgaccaggagccctgtgaatgcctgcctgctgaccggcagcctgtttgtgctgctgcgggtcttctcctttgagcctgtgcccagctgccgggccctgcaggtgctgaagccccgggaccgcatcagcgccatcgcccaccggggcggcagccatgatgcccctgagaacaccctggccgccatccggcaggccgccaagaatggagccaccggggtggagctggacatcgagttcaccagtgatggcatccctgtgctgatgcatgacaacacagtggacaggaccacagatggcaccggccgcctgtgtgacctgacctttgagcagatcaggaagctgaacccagctgccaaccaccggctgagaaatgacttcccagatgagaagatccccaccctgcgggaggccgtggctgaatgtctgaaccacaacctgaccatcttctttgatgtgaagggccacgcccacaaggccacagaggccctgaagaagatgtacatggagttcccccagctgtacaacaacagcgtggtgtgcagcttcctgcctgaggtgatctacaagatgaggcagacagacagagatgtgatcacagccctgacccaccggccctggagcctgagccacactggagatggcaagcccaggtatgacaccttctggaagcacttcatctttgtgatgatggacatcctgctggactggagcatgcacaacatcctgtggtacctgtgtggcatcagcgccttcctgatgcagaaggactttgtgtccccagcctacctgaagaagtggagcgccaagggcatccaggtggtgggctggacagtgaacacctttgatgagaagagctactatgagagccacctgggcagcagctacatcacagacagcatggtggaggactgtgagccccacttctag

SEQ ID NO: 154171 - DNA, 1818 bp, synthetic construct
  misc_feature 1..1818: note = Description of Artificial Sequence: Synthetic coding sequence
  source 1..1818: mol_type = other DNA
atggtgcgccaccagcccctgcagtactatgagccccagctgtgcctgagctgcctgaccggcatctacggctgccgctggaagcgctaccagaggagccatgatgacaccaccccctgggagcggctgtggttcctgctgctgaccttcaccttcggcctgaccctgacctggctgtacttctggtgggaggtgcacaatgactatgatgagttcaactggtacctgtacaacaggatgggctactggagcgactggcctgtgcccatcctggtgaccacagctgctgcctttgcctacatcgccggcctgctggtgctggccctgtgccacatcgctgtgggccagcagatgaacctgcactggctgcacaagattggcctggtggtgatcctggccagcacagtggtggccatgtctgctgtggcccagctgtgggaggatgagtgggaggtgctgctgatcagcctgcagggcacagcccccttcctgcacgtgggcgctgtggccgctgtgaccatgctgtcctggatcgtggccggccagtttgcccgggcagagaggaccagcagccaggtgaccatcctgtgcaccttcttcaccgtggtgtttgccctgtacctggcccccctgaccatcagcagcccctgcatcatggagaagaaggacctgggccccaagccagccctgattggccacagaggagcccccatgctggcccctgagcacaccctgatgtccttcaggaaggccctggagcagaagctgtatggcctgcaggccgacatcaccatcagcctggatggagtgcccttcctgatgcatgacaccaccctgcggaggaccaccaacgtggaggaggagttccctgagctggcccggcggcctgcctccatgctgaactggaccaccctgcagaggctgaatgccggccagtggttcctgaagacagaccccttctggacagccagcagcctgagccccagcgaccaccgggaggcccagaaccagagcatctgcagcctggccgagctgctggagctggccaagggaaatgccaccctgctgctgaacctgcgggaccccccccgggagcacccctaccgcagcagcttcatcaacgtgaccctggaggccgtgctgcacagcggcttcccccagcaccaggtgatgtggctgcccagccggcagaggcccctggtgaggaaggtggcccctggcttccagcagaccagcggcagcaaggaggccgtggccagcctgcggcggggccacatccagaggctgaacctgcgctacacccaggtgtcccggcaggagctgcgggactatgcctcctggaacctgtctgtgaacctgtacacagtgaatgccccctggctgttcagcctgctgtggtgtgccggcgtgcccagcgtgaccagtgacaacagccacgccctgagccaggtgcccagccccctgtggatcatgcccccagatgagtactgcctgatgtgggtgacagctgacctggtgtccttcaccctgattgtgggcatctttgtgctgcagaagtggaggctgggcggcatccgcagctacaaccctgagcagatcatgctgtctgctgctgtgcggaggaccagcagagatgtgtccatcatgaaggagaagctgatcttcagcgagatcagtgatggagtggaggtgtctgatgtgctgtctgtgtgcagcgacaacagctatgacacctacgccaacagcacagccacccctgtgggcccccggggcggcggcagccacaccaagaccctcatcgagaggtctggaagatag

SEQ ID NO: 154172 - DNA, 1461 bp, synthetic construct
  misc_feature 1..1461: note = Description of Artificial Sequence: Synthetic coding sequence
  source 1..1461: mol_type = other DNA
atggtgcgccaccagcccctgcagtactatgagccccagctgtgcctgagctgcctgaccggcatctacggctgccgctggaagcgctaccagaggagccatgatgacaccaccccaggcacagcccccttcctgcacgtgggcgctgtggccgctgtgaccatgctgtcctggatcgtggccggccagtttgcccgggcagagaggaccagcagccaggtgaccatcctgtgcaccttcttcaccgtggtgtttgccctgtacctggcccccctgaccatcagcagcccctgcatcatggagaagaaggacctgggccccaagccagccctgattggccacagaggagcccccatgctggcccctgagcacaccctgatgtccttcaggaaggccctggagcagaagctgtatggcctgcaggccgacatcaccatcagcctggatggagtgcccttcctgatgcatgacaccaccctgcggaggaccaccaacgtggaggaggagttccctgagctggcccggcggcctgcctccatgctgaactggaccaccctgcagaggctgaatgccggccagtggttcctgaagacagaccccttctggacagccagcagcctgagccccagcgaccaccgggaggcccagaaccagagcatctgcagcctggccgagctgctggagctggccaagggaaatgccaccctgctgctgaacctgcgggaccccccccgggagcacccctaccgcagcagcttcatcaacgtgaccctggaggccgtgctgcacagcggcttcccccagcaccaggtgatgtggctgcccagccggcagaggcccctggtgaggaaggtggcccctggcttccagcagaccagcggcagcaaggaggccgtggccagcctgcggcggggccacatccagaggctgaacctgcgctacacccaggtgtcccggcaggagctgcgggactatgcctcctggaacctgtctgtgaacctgtacacagtgaatgccccctggctgttcagcctgctgtggtgtgccggcgtgcccagcgtgaccagtgacaacagccacgccctgagccaggtgcccagccccctgtggatcatgcccccagatgagtactgcctgatgtgggtgacagctgacctggtgtccttcaccctcatcgtgggcatctttgtgctgcagaagtggaggctgggcggcatccgcagctacaaccctgagcagatcatgctgtctgctgctgtgcggaggaccagcagagatgtgtccatcatgaaggagaagctgatcttcagcgagatcagtgatggagtggaggtgtctgatgtgctgtctgtgtgcagcgacaacagctatgacacctacgccaacagcacagccacccctgtgggcccccggggcggcggcagccacaccaagaccctgattgaaagaagtggccgctag

SEQ ID NO: 154173 - DNA, 408 bp, synthetic construct
  misc_feature 1..408: note = Description of Artificial Sequence: Synthetic coding sequence
  source 1..408: mol_type = other DNA
atggtgcgccaccagcccctgcagtactatgagccccagctgtgcctgagctgcctgaccggcatctacggctgccgctggaagcgctaccagaggagccatgatgacaccaccccctgggagcggctgtggttcctgctgctgaccttcaccttcggcctgaccctgacctggctgtacttctggtgggaggtgcacaatgactatgatgagttcaactggtacctgtacaacaggatgggctactggagcgactggcctgtgcccatcctggtgaccacagctgctgcctttgcctacatcgccggcctgctggtgctggccctgtgccacatcgctgtgggccagcagatgaacctgcactggctgcacaaggccagcagcggcctgcccctgagccccctgtag

SEQ ID NO: 154174 - DNA, 1404 bp, synthetic construct
  misc_feature 1..1404: note = Description of Artificial Sequence: Synthetic coding sequence
  source 1..1404: mol_type = other DNA
atgtctgctgtggcccagctgtgggaggatgagtgggaggtgctgctgatcagcctgcagggcacagcccccttcctgcacgtgggcgctgtggccgctgtgaccatgctgtcctggatcgtggccggccagtttgcccgggcagagaggaccagcagccaggtgaccatcctgtgcaccttcttcaccgtggtgtttgccctgtacctggcccccctgaccatcagcagcccctgcatcatggagaagaaggacctgggccccaagccagccctgattggccacagaggagcccccatgctggcccctgagcacaccctgatgtccttcaggaaggccctggagcagaagctgtatggcctgcaggccgacatcaccatcagcctggatggagtgcccttcctgatgcatgacaccaccctgcggaggaccaccaacgtggaggaggagttccctgagctggcccggcggcctgcctccatgctgaactggaccaccctgcagaggctgaatgccggccagtggttcctgaagacagaccccttctggacagccagcagcctgagccccagcgaccaccgggaggcccagaaccagagcatctgcagcctggccgagctgctggagctggccaagggaaatgccaccctgctgctgaacctgcgggaccccccccgggagcacccctaccgcagcagcttcatcaacgtgaccctggaggccgtgctgcacagcggcttcccccagcaccaggtgatgtggctgcccagccggcagaggcccctggtgaggaaggtggcccctggcttccagcagaccagcggcagcaaggaggccgtggccagcctgcggcggggccacatccagaggctgaacctgcgctacacccaggtgtcccggcaggagctgcgggactatgcctcctggaacctgtctgtgaacctgtacacagtgaatgccccctggctgttcagcctgctgtggtgtgccggcgtgcccagcgtgaccagtgacaacagccacgccctgagccaggtgcccagccccctgtggatcatgcccccagatgagtactgcctgatgtgggtgacagctgacctggtgtccttcaccctgattgtgggcatctttgtgctgcagaagtggaggctgggcggcatccgcagctacaaccctgagcagatcatgctgtctgctgctgtgcggaggaccagcagagatgtgtccatcatgaaggagaagctgatcttcagcgagatcagtgatggagtggaggtgtctgatgtgctgtctgtgtgcagcgacaacagctatgacacctacgccaacagcacagccacccctgtgggcccccggggcggcggcagccacaccaagaccctcatcgagaggtctggaagatag

SEQ ID NO: 154175 - DNA, 1818 bp, synthetic construct; identical to SEQ ID NO: 154171
  misc_feature 1..1818: note = Description of Artificial Sequence: Synthetic coding sequence
  source 1..1818: mol_type = other DNA

SEQ ID NO: 154176 - DNA, 222 bp, synthetic construct
  misc_feature 1..222: note = Description of Artificial Sequence: Synthetic coding sequence
  source 1..222: mol_type = other DNA
atggtgcgccaccagcccctgcagtactatgagccccagctgtgcctgagctgcctgaccggcatctacggctgccgctggaagcgctaccagaggagccatgatgacaccaccccctgggagcggctgtggttcctgctgctgaccttcaccttcggcctgaccctgacctggctgtacttctggtgggaggtgcacaatgactatgatgagttcaactag

SEQ ID NO: 154177 - DNA, 1461 bp, synthetic construct; identical to SEQ ID NO: 154172
  misc_feature 1..1461: note = Description of Artificial Sequence: Synthetic coding sequence
  source 1..1461: mol_type = other DNA

SEQ ID NO: 154178 - DNA, 1083 bp, synthetic construct
  misc_feature 1..1083: note = Description of Artificial Sequence: Synthetic coding sequence
  source 1..1083: mol_type = other DNA
atgtccttcaggaaggccctggagcagaagctgtatggcctgcaggccgacatcaccatcagcctggatggagtgcccttcctgatgcatgacaccaccctgcggaggaccaccaacgtggaggaggagttccctgagctggcccggcggcctgcctccatgctgaactggaccaccctgcagaggctgaatgccggccagtggttcctgaagacagaccccttctggacagccagcagcctgagccccagcgaccaccgggaggcccagaaccagagcatctgcagcctggccgagctgctggagctggccaagggaaatgccaccctgctgctgaacctgcgggaccccccccgggagcacccctaccgcagcagcttcatcaacgtgaccctggaggccgtgctgcacagcggcttcccccagcaccaggtgatgtggctgcccagccggcagaggcccctggtgaggaaggtggcccctggcttccagcagaccagcggcagcaaggaggccgtggccagcctgcggcggggccacatccagaggctgaacctgcgctacacccaggtgtcccggcaggagctgcgggactatgcctcctggaacctgtctgtgaacctgtacacagtgaatgccccctggctgttcagcctgctgtggtgtgccggcgtgcccagcgtgaccagtgacaacagccacgccctgagccaggtgcccagccccctgtggatcatgcccccagatgagtactgcctgatgtgggtgacagctgacctggtgtccttcaccctcatcgtgggcatctttgtgctgcagaagtggaggctgggcggcatccgcagctacaaccctgagcagatcatgctgtctgctgctgtgcggaggaccagcagagatgtgtccatcatgaaggagaagctgatcttcagcgagatcagtgatggagtggaggtgtctgatgtgctgtctgtgtgcagcgacaacagctatgacacctacgccaacagcacagccacccctgtgggcccccggggcggcggcagccacaccaagaccctgattgaaagaagtggccgctag

SEQ ID NO: 154179 - DNA, 1272 bp, synthetic construct
  misc_feature 1..1272: note = Description of Artificial Sequence: Synthetic coding sequence
  source 1..1272: mol_type = other DNA
atgctgcgggtgcgctgcctgcggggcggcagcagaggagctgaggccgtgcactacatcggcagccggctgggccgcaccctgaccggctgggtgcagaggaccttccagagcacccaggccgccacagccagcagcaggaacagctgtgccgcagatgacaaggccacagagcccctgcccaaggactgccctgtgagcagctacaatgagtgggaccccctggaggaggtgattgtgggccgggcagaaaatgcctgtgtgccccccttcaccatcgaggtgaaggccaacacctatgagaagtactggcccttctaccagaagcagggcggccactacttccccaaggaccacctgaagaaggctgtggccgagattgaggagatgtgcaacatcctgaagacagagggcgtgacagtgcggcggccagaccccatcgactggagcctgaagtacaagaccccagactttgagagcacaggcctgtacagcgccatgccccgggacatcctgattgtggtgggcaatgagatcatcgaggcccccatggcctggaggagccgcttctttgagtaccgggcctaccgcagcatcatcaaggactacttccacagaggagccaagtggaccacagcccccaagcccaccatggctgatgagctgtacaaccaggactaccccatccacagcgtggaggacagacacaagctggccgcccagggcaagtttgtgaccacagaatttgagccctgctttgatgctgctgacttcatccgggccggccgggacatctttgcccagaggagccaggtgaccaactacctgggcatcgagtggatgaggaggcacctggccccagactacagagtgcacatcatctccttcaaggaccccaaccccatgcacattgatgccaccttcaacatcatcggccctggcatcgtgctgagcaacccagaccggccctgccaccagattgacctcttcaagaaggccggctggaccatcatcaccccacccacccccatcatcccagatgaccaccccctgtggatgagcagcaagtggctgtccatgaatgtgctgatgctggatgagaagagggtgatggtggatgccaatgaggtgcccatccagaagatgtttgagaagctgggcatcaccaccatcaaggtgaacatcagaaatgccaacagcctgggcggcggcttccactgctggacctgtgatgtgagaagaagaggcaccctgcagagctacctggactag

SEQ ID NO: 154180 - DNA, 1176 bp, synthetic construct
  misc_feature 1..1176: note = Description of Artificial Sequence: Synthetic coding sequence
  source 1..1176: mol_type = other DNA
atgctgcgggtgcgctgcctgcggggcggcagcagaggagctgaggccgtgcactacatcggcagccggctgggccgcaccctgaccggctgggtgcagaggaccttccagagcacccaggccgccacagccagcagcaggaacagctgtgccgcagatgacaaggccacagagcccctgcccaaggactgccctgtgagcagctacaatgagtgggaccccctggaggaggtgattgtgggccgggcagaaaatgcctgtgtgccccccttcaccatcgaggtgaaggccaacacctatgagaagtactggcccttctaccagaagcagggcggccactacttccccaaggaccacctgaagaaggctgtggccgagattgaggagatgtgcaacatcctgaagacagagggcgtgacagtgcggcggccagaccccatcgactggagcctgaagtacaagaccccagactttgagagcacaggcctgtacagcgccatgccccgggacatcctgattgtggtgggcaatgagatcatcgaggcccccatggcctggaggagccgcttctttgagtaccgggcctaccgcagcatcatcaaggactacttccacagaggagccaagtggaccacagcccccaagcccaccatggctgatgagctgtacaaccaggactaccccatccacagcgtggaggacagacacaagctggccgcccagggcaagtttgtgaccacagaatttgagccctgctttgatgctgctgacttcatccgggccggccgggacatctttgcccagaggagccaggtgaccaactacctgggcatcgagtggatgaggaggcacctggccccagactacagagtgcacatcatctccttcaaggaccccaaccccatgcacattgatgccaccttcaacatcatcggccctggcatcgtgctgagcaacccagaccggccctgccaccagattgacctcttcaagaaggccggctggaccatcatcaccccacccacccccatcatcccagatgaccaccccctgtggatgagcagcaagtggctgtccatgaatgtgctgatgctggatgagaagagggtgatggtggatgccaatgaggtgcccatccagaagatgtttgagaagctgggcatgtacaacaagtag

SEQ ID NO: 154181 - DNA, 1260 bp, synthetic construct
  misc_feature 1..1260: note = Description of Artificial Sequence: Synthetic coding sequence
  source 1..1260: mol_type = other DNA
atgtggccaggaaatgcctggagggctgccctcttctgggtgccccggggccggcgggcccagagcgccctggcccagctgcggggcatcctggagggggagctggagggcatcagaggagctggcacctggaagtctgagagggtcatcaccagccggcagggcccccacatccgggtggatggagtgtctgggggcatcctgaacttctgtgccaacaactacctgggcctgagcagccaccctgaggtgatccaggccggcctgcaggccctggaggagtttggagctggcctgagctctgtgcgcttcatctgtggcacccagagcatccacaagaacctggaggccaagatcgcccgcttccaccagcgggaggatgccatcctgtaccccagctgctatgatgccaatgccggcctgtttgaggccctgctgaccccagaagatgctgtgctgagtgatgagctgaaccacgccagcatcattgatggcatccggctgtgcaaggcccacaagtaccgctaccgccacctggacatggctgacctggaggccaagctgcaggaggcccagaagcaccggctgcggctggtggccacagatggagccttctccatggatggagacatcgcccccctgcaggagatctgctgcctggccagccgctacggggccctggtgttcatggatgagtgccacgccaccggcttcctgggccccaccggccggggcacagatgagctgctgggcgtgatggaccaggtgaccatcatcaacagcaccctgggcaaggccctgggcggggccagcggcggctacaccaccggccctggccccctggtgtccctgctgcggcagagggcccggccctacctgttcagcaacagcctgcccccagctgtggtgggctgtgccagcaaggccctggacctgctgatgggcagcaacaccatcgtgcagagcatggccgccaagacccagcgcttccgcagcaagatggaggccgccggcttcaccatcagcggggccagccaccccatctgccctgtgatgctgggagatgcccggctggccagcaggatggctgatgacatgctgaagaggggcatcttcgtcatcggcttctcctaccctgtggtgcccaagggcaaggcccgcatccgggtgcagatctctgctgtgcacagtgaagaagatattgacagatgtgtggaggcctttgtggaggtgggccgcctgcatggagccctgccctag

SEQ ID NO: 154182 - DNA, 1338 bp, synthetic construct
  misc_feature 1..1338: note = Description of Artificial Sequence: Synthetic coding sequence
  source 1..1338: mol_type = other DNA
atgtggccaggaaatgcctggagggctgccctcttctgggtgccccggggccggcgggcccagagcgccctggcccagctgcggggcatcctggagggggagctggagggcatcagaggagctggcacctggaagtctgagagggtcatcaccagccggcagggcccccacatccgggtggatggagtgtctgggggccctggcaccgtcatcttccctggcctgcccctgccccacctgagctgctgcatccacctgctgtccttcaccagcggcatcctgaacttctgtgccaacaactacctgggcctgagcagccaccctgaggtgatccaggccggcctgcaggccctggaggagtttggagctggcctgagctctgtgcgcttcatctgtggcacccagagcatccacaagaacctggaggccaagatcgcccgcttccaccagcgggaggatgccatcctgtaccccagctgctatgatgccaatgccggcctgtttgaggccctgctgaccccagaagatgctgtgctgagtgatgagctgaaccacgccagcatcattgatggcatccggctgtgcaaggcccacaagtaccgctaccgccacctggacatggctgacctggaggccaagctgcaggaggcccagaagcaccggctgcggctggtggccacagatggagccttctccatggatggagacatcgcccccctgcaggagatctgctgcctggccagccgctacggggccctggtgttcatggatgagtgccacgccaccggcttcctgggccccaccggccggggcacagatgagctgctgggcgtgatggaccaggtgaccatcatcaacagcaccctgggcaaggccctgggcggggccagcggcggctacaccaccggccctggccccctggtgtccctgctgcggcagagggcccggccctacctgttcagcaacagcctgcccccagctgtggtgggctgtgccagcaaggccctggacctgctgatgggcagcaacaccatcgtgcagagcatggccgccaagacccagcgcttccgcagcaagatggaggccgccggcttcaccatcagcggggccagccaccccatctgccctgtgatgctgggagatgcccggctggccagcaggatggctgatgacatgctgaagaggggcatcttcgtcatcggcttctcctaccctgtggtgcccaagggcaaggcccgcatccgggtgcagatctctgctgtgcacagtgaagaagatattgacagatgtgtggaggcctttgtggaggtgggccgcctgcatggagccctgccctag

SEQ ID NO: 154183 - DNA, 744 bp, synthetic construct
  misc_feature 1..744: note = Description of Artificial Sequence: Synthetic coding sequence
  source 1..744: mol_type = other DNA
atgtggccaggaaatgcctggagggctgccctcttctgggtgccccggggccggcgggcccagagcgccctggcccagctgcggggcatcctggagggggagctggagggcatcagaggagctggcacctggaagtctgagagggtcatcaccagccggcagggcccccacatccgggtggatggagtgtctgggggccctggcaccgtcatcttccctggcctgcccctgccccacctgagctgctgcatccacctgctgtccttcaccagcggcatcctgaacttctgtgccaacaactacctgggcctgagcagccaccctgaggtgatccaggccggcctgcaggccctggaggagtttggagctggcctgagctctgtgcgcttcatctgtggcacccagagcatccacaagaacctggaggccaagatcgcccgcttccaccagcgggaggatgccatcctgtaccccagctgctatgatgccaatgccggcctgtttgaggccctgctgaccccagaagatgctgtgctgagtgatgagctgaaccacgccagcatcattgatggcatccggctgtgcaaggcccacaagtaccgctaccgccacctggacatggctgacctggaggccaagctgcaggaggcccagaagcaccggctgcggctggtggccacagatggagccttccacggctggaggcacaggaccccagctggggacctgctgccccggctgtag

SEQ ID NO: 154184 - DNA, 522 bp, synthetic construct
  misc_feature 1..522: note = Description of Artificial Sequence: Synthetic coding sequence
  source 1..522: mol_type = other DNA
atggccctgcgggtggtgcgctctgtgcgggccctgctgtgcaccctgcgggctgtgcccagccctgctgccccctgccccccccggccctggcagctgggcgtgggcgctgtgaggaccctgaggactggacctgccctgctgtctgtgaggaagttcacagagaagcatgagtgggtgaccacagaaaatggcatcggcaccgtgggcatcagcaactttgcccaggaggccctgggagatgtggtgtactgcagcctgcctgaggtgggcaccaagctgaacaagcaggatgaatttggagccctggagagcgtgaaggccgccagcgagctgtacagccccctgtctggagaggtgacagagatcaatgaggccctggctgaaaatcctggcctggtgaacaagagctgctatgaagatggctggctgatcaagatgaccctgagcaaccccagcgagctggatgagctgatgtctgaggaggcctatgagaagtacatcaagagcattgaggagtag

SEQ ID NO: 154185 - DNA, 3063 bp, synthetic construct
  misc_feature 1..3063: note = Description of Artificial Sequence: Synthetic coding sequence
  source 1..3063: mol_type = other DNA
atgcagagctgtgcccgggcctggggcctgcggctgggccggggcgtgggcggcggccggcggctggccggcggcagcggcccctgctgggcccccaggagccgggacagcagcagcggcggcggggacagcgctgctgctggggccagccggctgctggagcggctgctgcccaggcatgatgactttgcccggcggcacatcggccctggggacaaggaccagcgggagatgctgcagaccctgggcctggccagcattgatgagctgattgagaagacagtgcctgccaacatccggctgaagaggcccctgaagatggaggaccctgtgtgtgaaaatgagatcctggccaccctgcacgccatcagcagcaagaaccagatctggaggagctacatcggcatgggctactacaactgcagcgtgccccagaccatcctgaggaacctgctggagaacagcggctggatcacccagtacaccccctaccagcctgaggtgtcccagggccgcctggagagcctgctgaactaccagaccatggtgtgtgacatcaccggcctggacatggccaatgccagcctgctggatgagggcacagctgctgctgaggccctgcagctgtgctaccgccacaacaagaggaggaagttcctggtggacccccgctgccacccccagaccatcgctgtggtgcagacccgggccaagtacacaggagtgctgacagagctgaagctgccctgtgagatggacttcagcggcaaggatgtgtctggagtgctcttccagtacccagacacagagggcaaggtggaggacttcacagagctggtggagcgggcccaccagagcggcagcctggcctgctgtgccacagacctgctggccctgtgcatcctgcggcccccaggagaatttggagtggacatcgccctgggcagcagccagcgcttcggcgtgcccctgggctacggcggcccccatgctgccttctttgctgtgcgggagagcctggtgaggatgatgcctggccgcatggtgggcgtgaccagagatgccaccgggaaggaggtgtaccgcctggccctgcagacccgggagcagcacatcagaagagacaaggccaccagcaacatctgcacagcccaggccctgctggccaacatggccgccatgtttgccatctaccacggcagccacggcctggagcacatcgccaggagagtgcacaatgccaccctcatcctgtctgagggcctgaagagagctggccaccagctgcagcacgacctcttctttgacaccctgaagatccagtgtggctgcagcgtgaaggaggtgctgggccgggccgcccagaggcagatcaacttccggctgtttgaagatggcaccctgggcatcagcctggatgaaacagtgaatgagaaggacctggatgacctgctgtggatcttcggctgtgagagcagcgctgagctggtggccgagagcatgggagaggagtgccggggcatccctggctctgtgttcaagaggaccagccccttcctgacccaccaggtgttcaacagctaccacagcgagaccaacatcgtgcgctacatgaagaagctggagaacaaggacatcagcctggtgcacagcatgatccccctgggcagctgcaccatgaagctgaacagcagcagcgagctggcccccatcacctggaaggagtttgccaacatccacccctttgtgcccctggaccaggcccagggctaccagcagctgttccgggagctggagaaggacctgtgtgagctgaccggctatgaccaggtgtgcttccagcccaacagcggggcccagggcgagtatgccggcctggccaccatccgggcctacctgaaccagaagggggagggccacaggacagtgtgcctgatccccaagagcgcccacggcaccaacccagccagcgcccacatggccggcatgaagatccagcctgtggaggtggacaagtatggcaacattgatgctgtgcacctgaaggccatggtggacaagcacaaggagaacctggccgccatcatgatcacctaccccagcaccaatggagtgtttgaggagaacatcagtgatgtgtgtgacctgatccaccagcacggcggccaggtgtacctggatggagccaacatgaatgcccaggtgggcatctgcaggcctggggactttggaagtgatgtgagccacctgaacctgcacaagaccttctgcatcccccacggcggcggcggccctggcatgggccccatcggcgtgaagaagcacctggcccccttcctgcccaaccaccctgtgatcagcctgaagagaaatgaagatgcctgccctgtgggcaccgtgtctgctgccccctggggcagcagcagcatcctgcccatctcctgggcctacatcaagatgatgggcggcaagggcctgaagcaggccacagaaacagccatcctgaatgccaactacatggccaagaggctggagacccactaccgcatcctcttccggggggcccggggctacgtgggccacgagttcatcctggacacccggcccttcaagaagagcgccaacatcgaggccgtggatgtggccaagaggctgcaggactatggcttccacgcccccaccatgtcctggcctgtggccggcaccctgatggtggagcccacagaaagtgaggacaaggccgagctggaccgcttctgtgatgccatgatcagcatccggcaggagattgctgacatcgaggagggcagaattgacccccgggtgaaccccctgaagatgagcccccacagcctgacctgtgtgaccagcagccactgggaccggccctacagccgggaggtggccgccttccccctgccctttgtgaagccagagaacaagttctggcccaccatcgccagaattgatgacatctatggagaccagcacctggtgtgcacctgcccccccatggaggtgtatgagagccccttcagcgagcagaagagggccagcagctag

SEQ ID NO: 154186 - DNA, 888 bp, synthetic construct
  misc_feature 1..888: note = Description of Artificial Sequence: Synthetic coding sequence
  source 1..888: mol_type = other DNA
atggtggacagcgtgtaccgcaccaggagcctgggcgtggccgctgagggcctgcctgaccagtatgcagatggagaggccgcccgggtgtggcagctgtacatcggggacaccaggagcaggacagctgagtacaaggcctggctgctgggcctgctgcggcagcacggctgccagagggtgctggatgtggcctgtggcaccggggtggacagcatcatgctggtggaggagggcttctctgtgacctctgtggatgccagtgacaagatgctgaagtatgccctgaaggagcgctggaacagaagacatgagcccgcctttgacaagtgggtgattgaggaggccaactggatgaccctggacaaggatgtgccccagagcgctgagggcggctttgatgctgtgatctgcctgggcaacagctttgcccacctgcctgactgcaagggggaccagagcgagcaccggctggccctgaagaacatcgcctccatggtgcgggccggcggcctgctggtgattgaccacaggaactatgaccacatcctgagcacaggctgtgcccctcctgggaagaacatctactacaagagtgacctgaccaaggatgtgaccacctctgtgctgattgtgaacaacaaggcccacatggtgaccctggactacacagtgcaggtgcctggggccggccaggacggcagccctggcctgagcaagttccggctgagctactacccccactgcctggccagcttcacagagctgctgcaggccgcctttggaggcaagtgccagcacagcgtgctgggggacttcaagccctacaagccaggccagacctacatcccctgctacttcatccacgtgctgaagaggacagactag

SEQ ID NO: 154187 - DNA, 1350 bp, synthetic construct
  misc_feature 1..1350: note = Description of Artificial Sequence: Synthetic coding sequence
  source 1..1350: mol_type = other DNA
atgtacagcttcaacaccctgcggctgtacctgtgggagaccatcgtgttcttcagcctggccgccagcaaggaggccgaggccgcccggagcgcccccaagcccatgagccccagcgacttcctggacaagctgatgggccgcaccagcggctatgatgcccgcatccggcccaacttcaagggcccccctgtgaatgtgtcctgcaacatcttcatcaacagctttggcagcattgctgagaccaccatggactacagagtgaacatcttcctgcggcagcagtggaatgacccccggctggcctacaatgagtacccagatgacagcctggacctggaccccagcatgctggacagcatctggaagccagacctcttctttgccaatgagaagggggcccacttccacgagatcaccacagacaacaagctgctgcgcatcagcagaaatggaaatgtgctgtacagcatccgcatcaccctgaccctggcctgccccatggacctgaagaacttccccatggatgtgcagacctgcatcatgcagctggagagctttggctacaccatgaatgacctgatctttgagtggcaggagcagggcgctgtgcaggtggctgatggcctgaccctgccccagttcatcctgaaggaggagaaggacctgcgctactgcaccaagcactacaacacaggcaagttcacctgcatcgaggcccgcttccacctggagcggcagatgggctactacctgatccagatgtacatccccagcctgctgattgtcatcctgtcctggatctccttctggatcaacatggatgctgccccagcccgggtgggcctgggcatcaccaccgtgctgaccatgaccacccagagcagcggcagccgggccagcctgcccaaggtgtcctatgtgaaggccatcgacatctggatggctgtgtgcctgctgtttgtgttcagcgccctgctggagtatgctgctgtgaactttgtgtcccggcagcacaaggagctgctgcgcttccggaggaagagaagacaccacaaggaggatgaagctggggagggccgcttcaacttcagcgcctacggcatgggccctgcctgcctgcaggccaaggatggcatctctgtgaagggggccaacaacagcaacaccaccaaccccccaccagcccccagcaagagccctgaggagatgaggaagctgttcatccagagggccaagaagattgacaagatcagcagaattggcttccccatggccttcctgatcttcaacatgttctactggatcatctacaagatcgtgcggcgggaggatgtgcacaaccagtag

SEQ ID NO: 154188 - DNA, 1374 bp, synthetic construct
  misc_feature 1..1374: note = Description of Artificial Sequence: Synthetic coding sequence
  source 1..1374: mol_type = other DNA
atgtacagcttcaacaccctgcggctgtacctgtgggagaccatcgtgttcttcagcctggccgccagcaaggaggccgaggccgcccggagcgcccccaagcccatgagccccagcgacttcctggacaagctgatgggccgcaccagcggctatgatgcccgcatccggcccaacttcaagggcccccctgtgaatgtgtcctgcaacatcttcatcaacagctttggcagcattgctgagaccaccatggactacagagtgaacatcttcctgcggcagcagtggaatgacccccggctggcctacaatgagtacccagatgacagcctggacctggaccccagcatgctggacagcatctggaagccagacctcttctttgccaatgagaagggggcccacttccacgagatcaccacagacaacaagctgctgcgcatcagcagaaatggaaatgtgctgtacagcatccgcatcaccctgaccctggcctgccccatggacctgaagaacttccccatggatgtgcagacctgcatcatgcagctggagagctttggctacaccatgaatgacctgatctttgagtggcaggagcagggcgctgtgcaggtggctgatggcctgaccctgccccagttcatcctgaaggaggagaaggacctgcgctactgcaccaagcactacaacacaggcaagttcacctgcatcgaggcccgcttccacctggagcggcagatgggctactacctgatccagatgtacatccccagcctgctgattgtcatcctgtcctggatctccttctggatcaacatggatgctgccccagcccgggtgggcctgggcatcaccaccgtgctgaccatgaccacccagagcagcggcagccgggccagcctgcccaaggtgtcctatgtgaaggccatcgacatctggatggctgtgtgcctgctgtttgtgttcagcgccctgctggagtatgctgctgtgaactttgtgtcccggcagcacaaggagctgctgcgcttccggaggaagagaagacaccacaagagccccatgctgaacctcttccaggaggatgaagctggggagggccgcttcaacttcagcgcctacggcatgggccctgcctgcctgcaggccaaggatggcatctctgtgaagggggccaacaacagcaacaccaccaaccccccaccagcccccagcaagagccctgaggagatgaggaagctgttcatccagagggccaagaagattgacaagatcagcagaattggcttccccatggccttcctgatcttcaacatgttctactggatcatctacaagatcgtgcggcgggaggatgtgcacaaccagtag

SEQ ID NO: 154189 - DNA, 1101 bp, synthetic construct
  misc_feature 1..1101: note = Description of Artificial Sequence: Synthetic coding sequence
  source 1..1101: mol_type = other DNA
atggactacagagtgaacatcttcctgcggcagcagtggaatgacccccggctggcctacaatgagtacccagatgacagcctggacctggaccccagcatgctggacagcatctggaagccagacctcttctttgccaatgaaaaaggagcccacttccacgagatcaccacagacaacaagctgctgcgcatcagcagaaatggaaatgtgctgtacagcatccgcatcaccctgaccctggcctgccccatggacctgaagaacttccccatggatgtgcagacctgcatcatgcagctggagagctttggctacaccatgaatgacctgatctttgagtggcaggagcagggcgctgtgcaggtggctgatggcctgaccctgccccagttcatcctgaaggaggagaaggacctgcgctactgcaccaagcactacaacacaggcaagttcacctgcatcgaggcccgcttccacctggagcggcagatgggctactacctgatccagatgtacatccccagcctgctgattgtcatcctgtcctggatctccttctggatcaacatggatgctgccccagcccgggtgggcctgggcatcaccaccgtgctgaccatgaccacccagagcagcggcagccgggccagcctgcccaaggtgtcctatgtgaaggccatcgacatctggatggctgtgtgcctgctgtttgtgttttctgccctgctggagtatgctgctgtgaactttgtgtcccggcagcacaaggagctgctgcgcttccggaggaagaggaggcaccacaaggaggatgaggccggggagggccgcttcaacttcagcgcctacggcatgggccctgcctgcctgcaggccaaggatggcatctctgtgaagggggccaacaacagcaacaccaccaaccccccaccagcccccagcaagagccctgaggagatgaggaagctgttcatccagagggccaagaagattgacaagatcagccgcatcggcttccccatggccttcctgatcttcaacatgttctactggatcatctacaagatcgtgagaagagaagatgtgcacaaccagtag

SEQ ID NO: 154190 - DNA, 309 bp, synthetic construct
  misc_feature 1..309: note = Description of Artificial Sequence: Synthetic coding sequence
  source 1..309: mol_type = other DNA
atgtctgcccgggtgcgcagccgcagccggggcagaggagatggccaggaggccccagatgtggtggcctttgtggcccctggagagagccagcaggaggagcccccaacagacaaccaggacatcgagcccggccaggagcgggagggcaccccacccatcgaggagaggaaggtggagggggactgccaggagatggacctggagaagaccaggagtgaaagaggagatggcagtgatgtgaaggagaagaccccacccaaccccaagcacgccaagaccaaggaggccggagatggccagccctag

SEQ ID NO: 154191 - DNA, 1359 bp, synthetic construct
  misc_feature 1..1359: note = Description of Artificial Sequence: Synthetic coding sequence
  source 1..1359: mol_type = other DNA
atgaaccggcagctggtgaacatcctgacagccctgtttgccttcttcctggagaccaaccacttcagaacagccttctgcaaggaccatgacagccgcagcggcaagcagcccagccagaccctgagccccagcgacttcctggacaagctgatgggccgcaccagcggctatgatgcccgcatccggcccaacttcaagggcccccctgtgaatgtgacctgcaacatcttcatcaacagctttggcagcattgctgagaccaccatggactacagagtgaacatcttcctgcggcagcagtggaatgacagccggctggcctacagcgagtacccagatgacagcctggacctggaccccagcatgctggacagcatctggaagccagacctcttctttgccaatgagaagggggccaacttccatgatgtgaccacagacaacaagctgctgcgcatcagcaagaatggcaaggtgctgtacagcatccggctgaccctgaccctgagctgccccatggacctgaagaacttccccatggatgtgcagacctgcaccatgcagctggagagctttggctacaccatgaatgacctgatctttgagtggctgagtgatggccctgtgcaggtggccgagggcctgaccctgccccagttcatcctgaaggaggagaaggagctgggctactgcaccaagcactacaacacaggcaagttcacctgcatcgaggtgaagttccacctggagcggcagatgggctactacctgatccagatgtacatccccagcctgctgattgtcatcctgtcctgggtgtccttctggatcaacatggatgctgccccagcccgggtggccctgggcatcaccaccgtgctgaccatgaccacccagagcagcggcagccgggccagcctgcccaaggtgtcctatgtgaaggccatcgacatctggatggctgtgtgcctgctgtttgtgtttgctgccctgctggagtatgctgctgtgaactttgtgtcccggcagcacaaggagttcctgcggctgcggcggcggcagaagaggcagaacaaggaggaggatgtgacccgggagagccgcttcaacttcagcggctacggcatgggccactgcctgcaggtgaaggatggaacagctgtgaaggccaccccagccaaccccctgccccagccccccaaggatggagatgccatcaagaagaagtttgtggaccgggccaagagaattgacaccatcagccgggccgccttccccctggccttcctgatcttcaacatcttctactggatcacctacaagatcatcagacatgaagatgtgcacaagaagtag

SEQ ID NO: 154192 - DNA, 648 bp, synthetic construct
  misc_feature 1..648: note = Description of Artificial Sequence: Synthetic coding sequence
  source 1..648: mol_type = other DNA
atgaacctgcacatgaggatgacagccttctgcaaggaccatgacagccgcagcggcaagcagcccagccagaccctgagccccagcgacttcctggacaagctgatgggccgcaccagcggctatgatgcccgcatccggcccaacttcaagggcccccctgtgaatgtgacctgcaacatcttcatcaacagctttggatctgtgacagagaccaccatggactacagagtgaacatcttcctgcggcagcagtggaatgacagccggctggcctacagcgagtacccagatgacagcctggacctggaccccagcatgctggacagcatctggaagccagacctcttctttgccaatgagaagggggccaacttccatgatgtgaccacagacaacaagctgctgcgcatcagcaagaatggcaaggtgctgtacagcatccggctgaccctgaccctgagctgccccatggacctgaagaacttccccatggatgtgcagacctgcaccatgcagctggagagctttggctacaccatgaatgacctgatctttgagtggctgagtgatggccctgtgcaggtggccgagggcctgaccctgccccagttcatcctgaaggaggagaaggagctgggctactag

SEQ ID NO: 154193 - DNA, 1092 bp, synthetic construct
  misc_feature 1..1092: note = Description of Artificial Sequence: Synthetic coding sequence
  source 1..1092: mol_type = other DNA
atggactacagagtgaacatcttcctgcggcagcagtggaatgacagccggctggcctacagcgagtacccagatgacagcctggacctggaccccagcatgctggacagcatctggaagccagacctcttctttgccaatgaaaaaggagccaacttccatgatgtgaccacagacaacaagctgctgcgcatcagcaagaatggcaaggtgctgtacagcatccggctgaccctgaccctgagctgccccatggacctgaagaacttccccatggatgtgcagacctgcaccatgcagctggagagctttggctacaccatgaatgacctgatctttgagtggctgagtgatggccctgtgcaggtggccgagggcctgaccctgccccagttcatcctgaaggaggagaaggagctgggctactgcaccaagcactacaacacaggcaagttcacctgcatcgaggtgaagttccacctggagcggcagatgggctactacctgatccagatgtacatccccagcctgctgattgtcatcctgtcctgggtgtccttctggatcaacatggatgctgccccagcccgggtggccctgggcatcaccaccgtgctgaccatgaccacccagagcagcggcagccgggccagcctgcccaaggtgtcctatgtgaaggccatcgacatctggatggctgtgtgcctgctgtttgtgtttgctgccctgctggagtatgctgctgtgaactttgtgtcccggcagcacaaggagttcctgcggctgcggcggcggcagaagaggcagaacaaggaggaggatgtgacccgggagagccgcttcaacttcagcggctacggcatgggccactgcctgcaggtgaaggatggaacagctgtgaaggccaccccagccaaccccctgccccagccccccaaggatggagatgccatcaagaagaagtttgtggaccgggccaagagaattgacaccatcagcagagctgccttccccctggccttcctgatcttcaacatcttctactggatcacctacaagatcatcagacatgaagatgtgcacaagaagtag

SEQ ID NO: 154194 - DNA, 1395 bp, synthetic construct
  misc_feature 1..1395: note = Description of Artificial Sequence: Synthetic coding sequence
  source 1..1395: mol_type = other DNA
atggcccacgtgcgccacttccgcaccctggtgtctggcttctacttctgggaggccgccctgctgctgagcctggtggccaccaaggagacagattctgcccggagccgcagcgcccccatgagccccagcgacttcctggacaagctgatgggccgcaccagcggctatgatgcccgcatccggcccaacttcaagggcccccctgtgaatgtgacctgcaacatcttcatcaacagctttggcagcattgctgagaccaccatggactacagagtgaacatcttcctgcggcagaagtggaatgacccccggctggcctacagcgagtacccagatgacagcctggacctggaccccagcatgctggacagcatctggaagccagacctcttctttgccaatgaaaaaggagccaacttccacgaggtgaccacagacaacaagctgctgcgcatcttcaagaatggaaatgtgctgtacagcatccggctgaccctgaccctgagctgccccatggacctgaagaacttccccatggatgtgcagacctgcatcatgcagctggagagctttggctacaccatgaatgacctgatctttgagtggcaggatgaggcccctgtgcaggtggccgagggcctgaccctgccccagttcctgctgaaggaggagaaggacctgcgctactgcaccaagcactacaacacaggcaagttcacctgcatcgaggtgcgcttccacctggagcggcagatgggctactacctgatccagatgtacatccccagcctgctgattgtcatcctgtcctgggtgtccttctggatcaacatggatgctgccccagcccgggtggccctgggcatcaccaccgtgctgaccatgaccacccagagcagcggcagccgggccagcctgcccaaggtgtcctatgtgaaggccatcgacatctggatggctgtgtgcctgctgtttgtgttttctgccctgctggagtatgctgctgtgaactttgtgtcccggcagcacaaggagctgctgcgcttccggaggaagaggaagaacaagacagaggcctttgccctggagaagttctaccgcttcagtgacatggatgatgaggtgcgggagagccgcttctccttcaccgcctacggcatgggcccctgcctgcaggccaaggatggcatgacccccaagggccccaaccaccctgtgcaggtgatgcccaagagcccagatgagatgaggaaggtgttcatcgaccgggccaagaagattgacaccatcagccgggcctgcttccccctggccttcctgatcttcaacatcttctactgggtgatctacaagatcctgcggcatgaggacatccaccagcagcaggactag

SEQ ID NO: 154195 - DNA, 1350 bp, synthetic construct
  misc_feature 1..1350: note = Description of Artificial Sequence: Synthetic coding sequence
  source 1..1350: mol_type = other DNA
atggcccacgtgcgccacttccgcaccctggtgtctggcttctacttctgggaggccgccctgctgctgagcctggtggccaccaaggagacagattctgcccggagccgcagcgcccccatgagccccagcgacttcctggacaagctgatgggccgcaccagcggctatgatgcccgcatccggcccaacttcaagggcccccctgtgaatgtgacctgcaacatcttcatcaacagctttggcagcattgctgagaccaccatggactacagagtgaacatcttcctgcggcagaagtggaatgacccccggctggcctacagcgagtacccagatgacagcctggacctggaccccagcatgctggacagcatctggaagccagacctcttctttgccaatgaaaaaggagccaacttccacgaggtgaccacagacaacaagctgctgcgcatcttcaagaatggaaatgtgctgtacagcatccggctgaccctgaccctgagctgccccatggacctgaagaacttccccatggatgtgcagacctgcatcatgcagctggagagctttggctacaccatgaatgacctgatctttgagtggcaggatgaggcccctgtgcaggtggccgagggcctgaccctgccccagttcctgctgaaggaggagaaggacctgcgctactgcaccaagcactacaacacaggcaagttcacctgcatcgaggtgcgcttccacctggagcggcagatgggctactacctgatccagatgtacatccccagcctgctgattgtcatcctgtcctgggtgtccttctggatcaacatggatgctgccccagcccgggtggccctgggcatcaccaccgtgctgaccatgaccacccagagcagcggcagccgggccagcctgcccaaggtgtcctatgtgaaggccatcgacatctggatggctgtgtgcctgctgtttgtgttttctgccctgctggagtatgctgctgtgaactttgtgtcccggcagcacaaggagctgctgcgcttccggaggaagaggaagaacaaggatgatgaggtgcgggagagccgcttctccttcaccgcctacggcatgggcccctgcctgcaggccaaggatggcatgacccccaagggccccaaccaccctgtgcaggtgatgcccaagagcccagatgagatgaggaaggtgttcatcgaccgggccaagaagattgacaccatcagccgggcctgcttccccctggccttcctgatcttcaacatcttctactgggtgatctacaagatcctgcggcatgaggacatccaccagcagcaggactag

SEQ ID NO: 154196 - DNA, 1494 bp, synthetic construct
  misc_feature 1..1494: note = Description of Artificial Sequence: Synthetic coding sequence
  source 1..1494: mol_type = other DNA
atgaagttcctgctgaccacagccttcctgatcctgatcagcctgtgggtggaggaggcctacagcaaggagaagagcagcaagaagggcaagggcaagaagaagcagtacctgtgccccagccagcagagcgctgaggacctggcccgggtgcctgccaacagcaccagcaacatcctgaaccggctgctggtgtcctatgacccccgcatccggcccaacttcaagggcatccctgtggatgtggtggtgaacatcttcatcaacagctttggcagcatccaggagaccaccatggactacagagtgaacatcttcctgcggcagaagtggaatgacccccggctgaagctgcccagcgacttccggggcagtgatgccctgactgtggaccccaccatgtacaagtgcctgtggaagccagacctcttctttgccaatgagaagagcgccaacttccatgatgtgacccaggagaacatcctgctcttcatcttcagagatggagatgtgctggtgtccatgaggctgagcatcaccctgagctgccccctggacctgaccctcttccccatggacacccagcgctgcaagatgcagctggagagctttggctacaccacagatgacctgcgcttcatctggcagagcggggaccctgtgcagctggagaagatcgccctgccccagtttgacatcaagaaggaggacatcgagtatggcaactgcaccaagtactacaagggcaccggctactacacctgtgtggaggtgatcttcaccctgcggcggcaggtgggcttctacatgatgggcgtgtatgcccccaccctgctgattgtggtgctgtcctggctgtccttctggatcaacccagatgccagcgctgcccgggtgcccctgggcatcttctctgtgctgagcctggccagcgagtgcaccaccctggccgctgagctgcccaaggtgtcctatgtgaaggccctggatgtgtggctgattgcctgcctgctgtttggatttgccagcctggtggagtatgctgtggtgcaggtgatgctgaacaaccccaagagggtggaggccgagaaggccagaattgccaaggccgagcaggctgatggcaagggcggcaatgtggccaagaagaacacagtgaatggaacaggcacccctgtgcacatcagcaccctgcaggtgggggagacccgctgcaagaaggtgtgcaccagcaagagtgacctgcggagcaatgacttcagcatcgtgggcagcctgccccgggactttgagctgagcaactatgactgctacggcaagcccatcgaggtgaacaacggcctgggcaagagccaggccaagaacaacaagaagcccccaccagccaagcctgtgatccccacagctgccaagagaattgacctgtatgcccgggccctcttccccttctgcttcctgttcttcaacgtcatctactggagcatctacctgtag

SEQ ID NO: 154197 - DNA, 1494 bp, synthetic construct; identical to SEQ ID NO: 154196
  misc_feature 1..1494: note = Description of Artificial Sequence: Synthetic coding sequence
  source 1..1494: mol_type = other DNA

SEQ ID NO: 154198 - DNA, 912 bp, synthetic construct
  misc_feature 1..912: note = Description of Artificial Sequence: Synthetic coding sequence
  source 1..912: mol_type = other DNA
atgaagttcctgctgaccacagccttcctgatcctgatcagcctgtgggtggaggaggcctacagcaaggagaagagcagcaagaagggcaagggcaagaagaagcagtacctgtgccccagccagcagagcgctgaggacctggcccgggtgcctgccaacagcaccagcaacatcctgaaccggctgctggtgtcctatgacccccgcatccggcccaacttcaagggcatccctgtggatgtggtggtgaacatcttcatcaacagctttggcagcatccaggagaccaccatggactacagagtgaacatcttcctgcggcagaagtggaatgacccccggctgaagctgcccagcgacttccggggcagtgatgccctgactgtggaccccaccatgtacaagtgcctgtggaagccagacctcttctttgccaatgagaagagcgccaacttccatgatgtgacccaggagaacatcctgctcttcatcttcagagatggagatgtgctggtgtccatgaggctgagcatcaccctgagctgccccctggacctgaccctcttccccatggacacccagcgctgcaagatgcagctggagagctttggctacaccacagatgacctgcgcttcatctggcagagcggggaccctgtgcagctggagaagatcgccctgccccagtttgacatcaagaaggaggacatcgagtatggcaactgcaccaagtactacaagggcaccggctactacacctgtgtggaggtgatcttcaccctgcggcggcaggtgggcttctacatgatgggcgtgtatgcccccaccctgctgattgtggtgctgtcctggctgtccttctggatcaacccagatgccagcgctgcccgggtgcccctgggctggtag

SEQ ID NO: 154199 - DNA, 492 bp, synthetic construct
  misc_feature 1..492: note = Description of Artificial Sequence: Synthetic coding sequence
  source 1..492: mol_type = other DNA
atgatgctgcccctgcagggcgcccagatgctgcagatgctggagaagagcctgaggaagagcctgcctgccagcctgaaggtgtatggaacagtgttccacatcaaccacggcaaccccttcaacctgaaggctgtggtggacaagtggccagacttcaacacagtggtggtgtgcccccaggagcaggacatgacagatgacctggaccactacaccaacacctaccagatctacagcaaggacccccagaactgccaggagttcctgggcagccctgagctgatcaactggaagcagcacctgcagatccagagcagccagcccagcctgaatgaggccatccagaacctggccgccatcaagagcttcaaggtgaagcagacccagaggatcctgtacatggctgctgagacagccaaggagctgacccccttcctgctgaagagcaagatcctgagccccaacggcggcaagcccaaggccatgtag

SEQ ID NO: 154200 - DNA, 891 bp, synthetic construct
  misc_feature 1..891: note = Description of Artificial Sequence: Synthetic coding sequence
  source 1..891: mol_type = other DNA
atgatgctgcccctgcagggcgcccagatgctgcagatgctggagaagagcctgaggaagagcctgcctgccagcctgaaggtgtatggaacagtgttccacatcaaccacggcaaccccttcaacctgaaggctgtggtggacaagtggccagacttcaacacagtggtggtgtgcccccaggagcaggacatgacagatgacctggaccactacaccaacacctaccagatctacagcaaggacccccagaactgccaggagttcctgggcagccctgagctgatcaactggaagcagcacctgcagatccagagcagccagcccagcctgaatgaggccatccagaacctggccgccatcaagagcttcaaggtgaagcagacccagaggatcctgtacatggctgctgagacagccaaggagctgacccccttcctgctgaagagcaagatcctgagccccaacggcggcaagcccaaggccatcaaccaggagatgttcaagctgagctccatggatgtgacccacgcccacctggtgaacaagttctggcactttggaggaaatgaaagaagccagcgcttcatcgagcgctgcatccagaccttccccacctgctgcctgctgggccctgagggcacccctgtgtgctgggacctgatggaccagacaggagagatgaggatggccggcaccctgcctgagtaccgcctgcacggcctggtgacctacgtgatctacagccacgcccagaagctgggcaagctgggcttccctgtgtacagccacgtggactacagcaatgaggccatgcagaagatgagctacaccctgcagcacgtgcccatccccaggtcctggaaccagtggaactgtgtgcccctgtag

SEQ ID NO: 154201 - DNA, 891 bp, synthetic construct; identical to SEQ ID NO: 154200
  misc_feature 1..891: note = Description of Artificial Sequence: Synthetic coding sequence
  source 1..891: mol_type = other DNA

SEQ ID NO: 154202 - DNA, 2022 bp, synthetic construct
  misc_feature 1..2022: note = Description of Artificial Sequence: Synthetic coding sequence
  source 1..2022: mol_type = other DNA
atgcccctgaacagaaccctgtccatgagcagcctgcccggcctggaggactgggaggatgaatttgacctggagaatgctgtgctgtttgaggtggcctgggaggtggccaacaaggtgggcggcatctacacagtgctgcagaccaaggccaaggtgactggagatgagtggggagacaactacttcctggtgggcccctacacagagcagggcgtgaggacccaggtggagctgctggaggcccccaccccagccctgaagaggaccctggacagcatgaacagcaagggctgcaagttcctggcccagagcgaggagaagccccacgtggtggcccacttccacgagtggctggccggcgtgggcctgtgcctgtgccgggcccggcggctgcctgtggccaccatcttcaccacccacgccaccctgctgggccgctacctgtgtgccggggctgtggacttctacaacaacctggagaacttcaacgtggacaaggaggccggggagcggcagatctaccaccgctactgcatggagagagctgctgcccactgtgcccacgtgttcaccaccgtgtcccagatcacagccatcgaggcccagcacctgctgaagaggaagccagacatcgtgacccccaacggcctgaatgtgaagaagttcagcgccatgcatgagttccagaacctgcacgcccagagcaaggcccgcatccaggagtttgtgcggggccacttctacggccacctggacttcaacctggacaagaccctgtacttcttcatcgccggccgctatgagttcagcaacaagggagcagatgtgttcctggaggccctggcccggctgaactacctgctgcgggtgaatggcagcgagcagacagtggtggccttcttcatcatgcctgcccggaccaacaacttcaacgtggagaccctgaagggccaggccgtgaggaagcagctgtgggacacagccaacacagtgaaggagaagtttggaaggaagctgtatgagagcctgctggtgggcagcctgcctgacatgaacaagatgctggacaaggaggacttcaccatgatgaagagggccatctttgccacccagaggcagagcttcccccctgtgtgcacccacaacatgctggatgacagcagtgaccccatcctgaccaccatcagaagaattggcctcttcaacagcagcgctgacagagtgaaggtgatcttccaccctgagttcctgagcagcaccagccccctgctgcctgtggactatgaggagtttgtgcggggctgccacctgggcgtcttccccagctactatgagccctggggctacaccccagctgagtgcaccgtgatgggcatccccagcatcagcaccaacctgagcggcttcggctgcttcatggaggagcacatcgctgaccccagcgcctacggcatctacatcctggaccggcgcttccgcagcctggatgacagctgcagccagctgaccagcttcctgtacagcttctgccagcagagccggcggcagaggatcatccagaggaacagaacagagcggctgagtgacctgctggactggaagtacctgggccgctactacatgtctgcccggcacatggccctgagcaaggccttccctgagcacttcacctatgagcccaatgaagcagatgctgcccagggctaccgctaccccaggcctgcctctgtgccccccagccccagcctgagccgccacagcagcccccaccagagtgaagatgaggaggaccccagaaatggccccctggaggaggatggagagagatatgatgaagatgaggaggccgccaaggacagaagaaacatccgggcccctgagtggccccggcgggccagctgcaccagcagcaccagcggcagcaagaggaacagcgtggacacagccaccagcagcagcctgagcaccccatctgagcccctgagccccaccagcagcctgggggaggagaggaactag

SEQ ID NO: 154203 - DNA, 2214 bp, synthetic construct
  misc_feature 1..2214: note = Description of Artificial Sequence: Synthetic coding sequence
  source 1..2214: mol_type = other DNA
atgcccctgaacagaaccctgtccatgagcagcctgcccggcctggaggactgggaggatgaatttgacctggagaatgctgtgctgtttgaggtggcctgggaggtggccaacaaggtgggcggcatctacacagtgctgcagaccaaggccaaggtgactggagatgagtggggagacaactacttcctggtgggcccctacacagagcagggcgtgaggacccaggtggagctgctggaggcccccaccccagccctgaagaggaccctggacagcatgaacagcaagggctgcaaggtgtacttcggccgctggctgattgagggcggccccctggtggtgctgctggatgtgggcgccagcgcctgggccctggagcgctggaagggggagctgtgggacacctgcaacattggagtgccctggtatgaccgggaggccaatgatgctgtgctgtttggcttcctgaccacctggttcctgggggagttcctggcccagagcgaggagaagccccacgtggtggcccacttccacgagtggctggccggcgtgggcctgtgcctgtgccgggcccggcggctgcctgtggccaccatcttcaccacccacgccaccctgctgggccgctacctgtgtgccggggctgtggacttctacaacaacctggagaacttcaacgtggacaaggaggccggggagcggcagatctaccaccgctactgcatggagagagctgctgcccactgtgcccacgtgttcaccaccgtgtcccagatcacagccatcgaggcccagcacctgctgaagaggaagccagacatcgtgacccccaacggcctgaatgtgaagaagttcagcgccatgcatgagttccagaacctgcacgcccagagcaaggcccgcatccaggagtttgtgcggggccacttctacggccacctggacttcaacctggacaagaccctgtacttcttcatcgccggccgctatgagttcagcaacaagggagcagatgtgttcctggaggccctggcccggctgaactacctgctgcgggtgaatggcagcgagcagacagtggtggccttcttcatcatgcctgcccggaccaacaacttcaacgtggagaccctgaagggccaggccgtgaggaagcagctgtgggacacagccaacacagtgaaggagaagtttggaaggaagctgtatgagagcctgctggtgggcagcctgcctgacatgaacaagatgctggacaaggaggacttcaccatgatgaagagggccatctttgccacccagaggcagagcttcccccctgtgtgcacccacaacatgctggatgacagcagtgaccccatcctgaccaccatcagaagaattggcctcttcaacagcagcgctgacagagtgaaggtgatcttccaccctgagttcctgagcagcaccagccccctgctgcctgtggactatgaggagtttgtgcggggctgccacctgggcgtcttccccagctactatgagccctggggctacaccccagctgagtgcaccgtgatgggcatccccagcatcagcaccaacctgagcggcttcggctgcttcatggaggagcacatcgctgaccccagcgcctacggcatctacatcctggaccggcgcttccgcagcctggatgacagctgcagccagctgaccagcttcctgtacagcttctgccagcagagccggcggcagaggatcatccagaggaacagaacagagcggctgagtgacctgctggactggaagtacctgggccgctactacatgtctgcccggcacatggccctgagcaaggccttccctgagcacttcacctatgagcccaatgaagcagatgctgcccagggctaccgctaccccaggcctgcctctgtgccccccagccccagcctgagccgccacagcagcccccaccagagtgaagatgaggaggaccccagaaatggccccctggaggaggatggagagagatatgatgaagatgaggaggccgccaaggacagaagaaacatccgggcccctgagtggccccggcgggccagctgcaccagcagcaccagcggcagcaagaggaacagcgtggacacagccaccagcagcagcctgagcaccccatctgagcccctgagccccaccagcagcctgggggaggagaggaactag

SEQ ID NO: 154204 - DNA, 708 bp, synthetic construct
  misc_feature 1..708: note = Description of Artificial Sequence: Synthetic coding sequence
  source 1..708: mol_type = other DNA
atgaacagcacctggaggacccagtgcagcagcaagtggccaggccgctggctgaccagggtgtacttcggccgctggctgattgagggcggccccctggtggtgctgctggatgtgggcgccagcgcctgggccctggagcgctggaagggggagctgtgggacacctgcaacattggagtgccctggtatgaccgggaggccaatgatgctgtgctgtttggcttcctgaccacctggttcctgggggagttcctggcccagagcgaggagaagccccacgtggtggcccacttccacgagtggctggccggcgtgggcctgtgcctgtgccgggcccggcggctgcctgtggccaccatcttcaccacccacgccaccctgctgggccgctacctgtgtgccggggctgtggacttctacaacaacctggagaacttcaacgtggacaaggaggccggggagcggcagatctaccaccgctactgcatggagagagctgctgcccactgtgcccacgtgttcaccaccgtgtcccagatcacagccatcgaggcccagcacctgctgaagaggaagccaggcatctggaccagcacctggacccggccctacaccagcctgagccctgctgccatgagcagccccaccagggtgctgaccagctcctggaggcactggctgggcagcaccatctgcagcgagtag

SEQ ID NO: 154205 - DNA, 1974 bp, synthetic construct
  misc_feature 1..1974: note = Description of Artificial Sequence: Synthetic coding sequence
  source 1..1974: mol_type = other DNA
atgaacagcacctggaggacccagtgcagcagcaagtggccaggccgctggctgaccagggtgtacttcggccgctggctgattgagggcggccccctggtggtgctgctggatgtgggcgccagcgcctgggccctggagcgctggaagggggagctgtgggacacctgcaacattggagtgccctggtatgaccgggaggccaatgatgctgtgctgtttggcttcctgaccacctggttcctgggggagttcctggcccagagcgaggagaagccccacgtggtggcccacttccacgagtggctggccggcgtgggcctgtgcctgtgccgggcccggcggctgcctgtggccaccatcttcaccacccacgccaccctgctgggccgctacctgtgtgccggggctgtggacttctacaacaacctggagaacttcaacgtggacaaggaggccggggagcggcagatctaccaccgctactgcatggagagagctgctgcccactgtgcccacgtgttcaccaccgtgtcccagatcacagccatcgaggcccagcacctgctgaagaggaagccagacatcgtgacccccaacggcctgaatgtgaagaagttcagcgccatgcatgagttccagaacctgcacgcccagagcaaggcccgcatccaggagtttgtgcggggccacttctacggccacctggacttcaacctggacaagaccctgtacttcttcatcgccggccgctatgagttcagcaacaagggagcagatgtgttcctggaggccctggcccggctgaactacctgctgcgggtgaatggcagcgagcagacagtggtggccttcttcatcatgcctgcccggaccaacaacttcaacgtggagaccctgaagggccaggccgtgaggaagcagctgtgggacacagccaacacagtgaaggagaagtttggaaggaagctgtatgagagcctgctggtgggcagcctgcctgacatgaacaagatgctggacaaggaggacttcaccatgatgaagagggccatctttgccacccagaggcagagcttcccccctgtgtgcacccacaacatgctggatgacagcagtgaccccatcctgaccaccatcagaagaattggcctcttcaacagcagcgctgacagagtgaaggtgatcttccaccctgagttcctgagcagcaccagccccctgctgcctgtggactatgaggagtttgtgcggggctgccacctgggcgtcttccccagctactatgagccctggggctacaccccagctgagtgcaccgtgatgggcatccccagcatcagcaccaacctgagcggcttcggctgcttcatggaggagcacatcgctgaccccagcgcctacggcatctacatcctggaccggcgcttccgcagcctggatgacagctgcagccagctgaccagcttcctgtacagcttctgccagcagagccggcggcagaggatcatccagaggaacagaacagagcggctgagtgacctgctggactggaagtacctgggccgctactacatgtctgcccggcacatggccctgagcaaggccttccctgagcacttcacctatgagcccaatgaagcagatgctgcccagggctaccgctaccccaggcctgcctctgtgccccccagccccagcctgagccgccacagcagcccccaccagagtgaagatgaggaggaccccagaaatggccccctggaggaggatggagagagatatgatgaagatgaggaggccgccaaggacagaagaaacatccgggcccctgagtggccccggcgggccagctgcaccagcagcaccagcggcagcaagaggaacagcgtggacacagccaccagcagcagcctgagcaccccatctgagcccctgagccccaccagcagcctgggggaggagaggaactag

SEQ ID NO: 154206 - DNA, 1113 bp, synthetic construct
  misc_feature 1..1113: note = Description of Artificial Sequence: Synthetic coding sequence
  source 1..1113: mol_type = other DNA
atgcctgcccggaccaacaacttcaacgtggagaccctgaagggccaggccgtgaggaagcagctgtgggacacagccaacacagtgaaggagaagtttggaaggaagctgtatgagagcctgctggtgggcagcctgcctgacatgaacaagatgctggacaaggaggacttcaccatgatgaagagggccatctttgccacccagaggcagagcttcccccctgtgtgcacccacaacatgctggatgacagcagtgaccccatcctgaccaccatccgccgcatcggcctcttcaacagcagcgctgacagagtgaaggtgatcttccaccctgagttcctgagcagcaccagccccctgctgcctgtggactatgaggagtttgtgcggggctgccacctgggcgtcttccccagctactatgagccctggggctacaccccagcagaatgtactgtgatgggcatccccagcatcagcaccaacctgagcggcttcggctgcttcatggaggagcacatcgctgaccccagcgcctacggcatctacatcctggaccggcgcttccgcagcctggatgacagctgcagccagctgaccagcttcctgtacagcttctgccagcagagccggcggcagaggatcatccagaggaacagaacagagcggctgagtgacctgctggactggaagtacctgggccgctactacatgtctgcccggcacatggccctgagcaaggccttccctgagcacttcacctatgagcccaatgaagcagatgctgcccagggctaccgctaccccaggcctgcctctgtgccccccagccccagcctgagccgccacagcagcccccaccagagtgaagatgaggaggaccccagaaatggccccctggaggaggatggagagagatatgatgaagatgaggaggccgccaaggacagaagaaacatccgggcccctgagtggccccggcgggccagctgcaccagcagcaccagcggcagcaagagaaattctgtggacacagccaccagcagcagcctgagcacccccagcgagcccctgagccccaccagcagcctgggggaggagagaaattag

SEQ ID NO: 154207 - DNA, 1002 bp, synthetic construct
  misc_feature 1..1002: note = Description of Artificial Sequence: Synthetic coding sequence
  source 1..1002: mol_type = other DNA
atgacagaccaggcctttgtgaccctgaccaccaatgatgcctatgccaagggggccctggtgctgggcagcagcctgaagcagcacaggaccacccggcggctggtggtgctggccaccccccaggtgtctgacagcatgaggaaggtgctggagaccgtgtttgatgaggtgatcatggtggatgtgctggacagcggggacagcgcccacctgaccctgatgaagaggcctgagctgggcgtgaccctgaccaagctgcactgctggagcctgacccagtacagcaaatgtgtgttcatggatgctgacaccctggtgctggccaacattgatgacctgtttgaccgggaggagctgtctgctgccccagaccccggctggccagactgcttcaacagcggcgtgtttgtgtaccagcccagcgtggagacctacaaccagctgctgcacctggccagcgagcagggcagctttgatggaggagaccagggcatcctgaacaccttcttcagctcctgggccaccacagacatcaggaagcacctgcccttcatctacaacctgagcagcatcagcatctacagctacctgcctgccttcaaggtgtttggagccagcgccaaggtggtgcacttcctgggccgggtgaagccctggaactacacctatgaccccaagaccaagtctgtgaagtctgaggcccatgaccccaacatgacccaccctgagttcctgatcctgtggtggaacatcttcaccaccaacgtgctgcccctgctgcagcagtttggcctggtgaaggacacctgcagctatgtgaatgtggaggatgtgtctggggccatcagccacctgagcctgggggagatcccagccatggcccagccctttgtgtcctctgaggagaggaaggagcgctgggagcagggccaggccgactacatgggcgctgacagctttgacaacatcaagaggaagctggacacctacctgcagtag

SEQ ID NO: 154208 - DNA, 1053 bp, synthetic construct
  misc_feature 1..1053: note = Description of Artificial Sequence: Synthetic coding sequence
  source 1..1053: mol_type = other DNA
atgacagaccaggcctttgtgaccctgaccaccaatgatgcctatgccaagggggccctggtgctgggcagcagcctgaagcagcacaggaccacccggcggctggtggtgctggccaccccccaggtgtctgacagcatgaggaaggtgctggagaccgtgtttgatgaggtgatcatggtggatgtgctggacagcggggacagcgcccacctgaccctgatgaagaggcctgagctgggcgtgaccctgaccaagctgcactgctggagcctgacccagtacagcaaatgtgtgttcatggatgctgacaccctggtgctggccaacattgatgacctgtttgaccgggaggagctgtctgctgccccagaccccggctggccagactgcttcaacagcggcgtgtttgtgtaccagcccagcgtggagacctacaaccagctgctgcacctggccagcgagcagggcagctttgatggaggagaccagggcatcctgaacaccttcttcagctcctgggccaccacagacatcaggaagcacctgcccttcatctacaacctgagcagcatcagcatctacagctacctgcctgccttcaaggtgtttggagccagcgccaaggtggtgcacttcctgggccgggtgaagccctggaactacacctatgaccccaagaccaagtctgtgaagtctgaggcccatgaccccaacatgacccaccctgagttcctgatcctgtggtggaacatcttcaccaccaacgtgctgcccctgctgcagcagtttggcctggtgaaggacacctgcagctatgtgaatgtgctgagtgacctggtgtacaccctggccttcagctgtggcttctgcaggaaggaggatgtgtctggggccatcagccacctgagcctgggggagatcccagccatggcccagccctttgtgagcagcgaggagaggaaggagcgctgggagcagggccaggccgactacatgggcgctgacagctttgacaacatcaagaggaagctggacacctacctgcagtag

SEQ ID NO: 154209 - DNA, 840 bp, synthetic construct
  misc_feature 1..840: note = Description of Artificial Sequence: Synthetic coding sequence
  source 1..840: mol_type = other DNA
atgacagaccaggcctttgtgaccctgaccaccaatgatgcctatgccaagggggccctggtgctgggcagcagcctgaagcagcacaggaccacccggcggctggtggtgctggccaccccccaggtgtctgacagcatgaggaaggtgctggagaccgtgtttgatgaggtgatcatggtggatgtgctggacagcggggacagcgcccacctgaccctgatgaagaggcctgagctgggcgtgaccctgaccaagctgcactgctggagcctgacccagtacagcaaatgtgtgttcatggatgctgacaccctggtgctggccaacattgatgacctgtttgaccgggaggagctgtctgctgccccagaccccggctggccagactgcttcaacagcggcgtgtttgtgtaccagcccagcgtggagacctacaaccagctgctgcacctggccagcgagcagggcagctttgatggaggagaccagggcatcctgaacaccttcttcagctcctgggccaccacagacatcaggaagcacctgcccttcatctacaacctgagcagcatcagcatctacagctacctgcctgccttcaaggtgaagatgagccaggagccctaccacatctgccccctgggccgcagccagctgtggcacagccggctgtaccccaggaagaatggaagaaatgatggcaacagagcccggctcatcatctgggagcagatccccctgaccaccagccggggcaacctgaccctgaccagcagcaggaacacagccttcttctgtgagcacatccacttcaccagcctggtgtctgacacctag

SEQ ID NO: 154210 - DNA, 1398 bp, synthetic construct
  misc_feature 1..1398: note = Description of Artificial Sequence: Synthetic coding sequence
  source 1..1398: mol_type = other DNA
atgtctgaaacagagttccaccacggggcccaggccggcctggagctgctgcggagcagcaacagccccaccagcgccagccagagcgctggcatgacagtgacagaccaggcctttgtgaccctggccaccaatgacatctactgccagggcgccctggtgctgggccagagcctgcggcggcaccggctgaccaggaagctggtggtgctgatcaccccccaggtgagcagcctgctgcgggtcatcctgagcaaggtgtttgatgaagtcatcgaggtgaacctgattgattctgctgactacatccacctggccttcctgaagaggcctgagctgggcctgaccctgaccaagctgcactgctggaccctgacccactacagcaaatgtgtgttcctggatgctgacaccctggtgctgagcaatgtggatgagctgtttgacagaggagagttctctgctgccccagaccccggctggccagactgcttcaacagcggcgtgtttgtgttccagcccagcctgcacacccacaagctgctgctgcagcacgccatggagcacggcagctttgatggagctgaccagggcctgctgaacagcttcttcaggaactggagcaccacagacatccacaagcacctgcccttcatctacaacctgagcagcaacaccatgtacacctacagccctgccttcaagcagtttggcagcagcgccaaggtggtgcacttcctgggctccatgaagccctggaactacaagtacaacccccagagcggctctgtgctggagcagggcagcgccagcagcagccagcaccaggccgccttcctgcacctgtggtggacagtgtaccagaacaacgtgctgcccctgtacaagtctgtgcaggccggggaggcccgggccagccctggccacaccctgtgccacagtgatgtgggcggcccctgtgccgacagcgccagcggcgtgggggagccctgtgagaacagcaccccatctgctggggtgccctgtgccaacagccccctgggcagcaaccagcctgcccagggcctgcctgagcccacccagatcgtggatgagaccctgagcctgcctgagggcagaagaagtgaggacatgattgcctgcccagagacagagaccccagctgtgatcacctgtgaccccctgagccagcccagcccccagcctgctgacttcacagaaacagagaccatcctggtggacctggccgtgtctgtgtcccagatcagcattgaggagaaggtgaaggagctgagccctgaggaggagaggaggaagtgggaggagggcagaattgactacatgggcaaggatgcctttgcccgcatccaggagaagctggaccgcttcctgcagtag

SEQ ID NO: 154211 - DNA, 1506 bp, synthetic construct
  misc_feature 1..1506: note = Description of Artificial Sequence: Synthetic coding sequence
  source 1..1506: mol_type = other DNA
atgtctgaaacagagttccaccacggggcccaggccggcctggagctgctgcggagcagcaacagccccaccagcgccagccagagcgctggcatgacagtgacagaccaggcctttgtgaccctggccaccaatgacatctactgccagggcgccctggtgctgggccagagcctgcggcggcaccggctgaccaggaagctggtggtgctgatcaccccccaggtgagcagcctgctgcgggtcatcctgagcaaggtgtttgatgaagtcatcgaggtgaacctgattgattctgctgactacatccacctggccttcctgaagaggcctgagctgggcctgaccctgaccaagctgcactgctggaccctgacccactacagcaaatgtgtgttcctggatgctgacaccctggtgctgagcaatgtggatgagctgtttgacagaggagagttctctgctgccccagaccccggctggccagactgcttcaacagcggcgtgtttgtgttccagcccagcctgcacacccacaagctgctgctgcagcacgccatggagcacggcagctttgatggagctgaccagggcctgctgaacagcttcttcaggaactggagcaccacagacatccacaagcacctgcccttcatctacaacctgagcagcaacaccatgtacacctacagccctgccttcaagcagtttggcagcagcgccaaggtggtgcacttcctgggctccatgaagccctggaactacaagtacaacccccagagcggctctgtgctggagcagggcagcgccagcagcagccagcaccaggccgccttcctgcacctgtggtggacagtgtaccagaacaacgtgctgcccctgtacaagtctgtgcaggccggggaggcccgggccagccctggccacaccctgtgccacagtgatgtgggcggcccctgtgccgacagcgccagcggcgtgggggagccctgtgagaacagcaccccatctgctggggtgccctgtgccaacagccccctgggcagcaaccagcctgcccagggcctgcctgagcccacccagatcgtggatgagaccctgagcctgcctgagggcagaagaagtgaggacatgattgcctgcccagagacagagaccccagctgtgatcacctgtgaccccctgagccagcccagcccccagcctgctgacttcacagaaacagagaccatcctgcagcctgccaacaaggtggagagcgtgtcctctgaggagacctttgagcccagccaggagctgcctgctgaggccctgcgggaccccagcctgcaggatgccctggaggtggacctggccgtgtctgtgtcccagatcagcattgaggagaaggtgaaggagctgagccctgaggaggagaggaggaagtgggaggagggcagaattgactacatgggcaaggatgcctttgcccgcatccaggagaagctggaccgcttcctgcagtag

SEQ ID NO: 154212 - DNA, 1413 bp, synthetic construct
  misc_feature 1..1413: note = Description of Artificial Sequence: Synthetic coding sequence
  source 1..1413: mol_type = other DNA
atgtctgtgacagaccaggcctttgtgaccctggccaccaatgacatctactgccagggcgccctggtgctgggccagagcctgcggcggcaccggctgaccaggaagctggtggtgctgatcaccccccaggtgagcagcctgctgcgggtcatcctgagcaaggtgtttgatgaggtgattgaggtgaacctgattgacagcgctgactacatccacctggccttcctgaagaggcctgagctgggcctgaccctgaccaagctgcactgctggaccctgacccactacagcaaatgtgtgttcctggatgctgacaccctggtgctgagcaatgtggatgagctgtttgacagaggagagttctctgctgccccagaccccggctggccagactgcttcaacagcggcgtgtttgtgttccagcccagcctgcacacccacaagctgctgctgcagcacgccatggagcacggcagctttgatggagctgaccagggcctgctgaacagcttcttcaggaactggagcaccacagacatccacaagcacctgcccttcatctacaacctgagcagcaacaccatgtacacctacagccctgccttcaagcagtttggcagcagcgccaaggtggtgcacttcctgggctccatgaagccctggaactacaagtacaacccccagagcggctctgtgctggagcagggcagcgccagcagcagccagcaccaggccgccttcctgcacctgtggtggacagtgtaccagaacaacgtgctgcccctgtacaagtctgtgcaggccggggaggcccgggccagccctggccacaccctgtgccacagtgatgtgggcggcccctgtgccgacagcgccagcggcgtgggggagccctgtgagaacagcacccccagcgctggggtgccctgtgccaacagccccctgggcagcaaccagcctgcccagggcctgcctgagcccacccagatcgtggatgagaccctgagcctgcctgagggccgccgctctgaggacatgattgcctgcccagagacagagaccccagctgtgatcacctgtgaccccctgagccagcccagcccccagcctgctgacttcacagaaacagagaccatcctgcagcctgccaacaaggtggagagcgtgagcagcgaggagacctttgagcccagccaggagctgcctgctgaggccctgcgggaccccagcctgcaggatgccctggaggtggacctggccgtgtctgtgtcccagatcagcattgaggagaaggtgaaggagctgagccctgaggaggagaggaggaagtgggaggagggcagaattgactacatgggcaaggatgcctttgcccgcatccaggagaagctggaccgcttcctgcagtag

SEQ ID NO: 154213 - DNA, 417 bp, synthetic construct
  misc_feature 1..417: note = Description of Artificial Sequence: Synthetic coding sequence
  source 1..417: mol_type = other DNA
atgtctgtgacagaccaggcctttgtgaccctggccaccaatgacatctactgccagggcgccctggtgctgggccagagcctgcggcggcaccggctgaccaggaagctggtggtgctgatcaccccccaggtgagcagcctgctgcgggtcatcctgagcaaggtgtttgatgaggtgattgaggtgaacctgattgacagcgctgactacatccacctggccttcctgaagaggcctgagctgggcctgaccctgaccaagctgcactgctggaccctgacccactacagcaaatgtgtgttcctggatgctgacaccctggtgctgagcaatgtggatgagctgtttgacagaggagagttctctgctgccccagaccccggctggccagactgcttcaacagcggcgtgtag

SEQ ID NO: 154214 - DNA, 1293 bp, synthetic construct
  misc_feature 1..1293: note = Description of Artificial Sequence: Synthetic coding sequence
  source 1..1293: mol_type = other DNA
atgtctgaaacagagttccaccacggggcccaggccggcctggagctgctgcggagcagcaacagccccaccagcgccagccagagcgctggcatgacagtgacagaccaggcctttgtgaccctggccaccaatgacatctactgccagggcgccctggtgctgggccagagcctgcggcggcaccggctgaccaggaagctggtggtgctgatcaccccccaggtgagcagcctgctgcgggtcatcctgagcaaggtgtttgatgaagtcatcgaggtgaacctgattgattctgctgactacatccacctggccttcctgaagaggcctgagctgggcctgaccctgaccaagctgcactgctggaccctgacccactacagcaaatgtgtgttcctggatgctgacaccctggtgctgagcaatgtggatgagctgtttgacagaggagagttctctgctgccccagaccccggctggccagactgcttcaacagcggcgtgtttgtgttccagcccagcctgcacacccacaagctgctgctgcagcacgccatggagcacggcagctttgatggagctgaccagggcctgctgaacagcttcttcaggaactggagcaccacagacatccacaagcacctgcccttcatctacaacctgagcagcaacaccatgtacacctacagccctgccttcaagcagtttggcagcagcgccaaggtggtgcacttcctgggctccatgaagccctggaactacaagtacaacccccagagcggctctgtgctggagcagggcagcgccagcagcagccagcaccaggccgccttcctgcacctgtggtggacagtgtaccagaacaacgtgctgcccctgtacaagtctgtgcaggccggggaggcccgggccagccctggccacaccctgtgccacagtgatgtgggcggcccctgtgccgacagcgccagcggcgtgggggagccctgtgagaacagcaccccatctgctggggtgccctgtgccaacagccccctgggcagcaaccagcctgcccagggcctgcctgagcccacccagatcgtggatgagaccctgagcctgcctgagggcagaagaagtgaagatgtggacctggccgtgtctgtgtcccagatcagcattgaggagaaggtgaaggagctgagccctgaggaggagaggaggaagtgggaggagggcagaattgactacatgggcaaggatgcctttgcccgcatccaggagaagctggaccgcttcctgcagtag

SEQ ID NO: 154215 - DNA, 354 bp, synthetic construct
  misc_feature 1..354: note = Description of Artificial Sequence: Synthetic coding sequence
  source 1..354: mol_type = other DNA
atgtatggcaagatcatctttgtgctgctgctgagtgacacccacaagagggacacctatgctgccaccccccgggcccacgaggtgtctgagatctctgtgaggacagtgtacccacctgaggaggagaccggggagcgggtgcagctggcccaccacttcagcgagcctgagatcaccctcatcatcttcggcgtgatggccggcgtgattggcaccatcctgctgatctcctatggcatccggcggctcatcaagaagagccccagtgatgtgaagcccctgcccagcccagacacagatgtgcccctgagctctgtggagattgagaaccctgagaccagtgaccagtag

SEQ ID NO: 154216 - DNA, 453 bp, synthetic construct
  misc_feature 1..453: note = Description of Artificial Sequence: Synthetic coding sequence
  source 1..453: mol_type = other DNA
atgtatggcaagatcatctttgtgctgctgctgtctgagatcgtgtccatcagcgccctgagcaccacagaggtggccatgcacaccagcaccagcagctctgtgaccaagagctacatcagcagccagaccaatgacacccacaagagggacacctacgccgccaccccccgggcccacgaggtgtctgagatctctgtgaggacagtgtacccacctgaggaggagactggagagcgggtgcagctggcccaccacttcagcgagcctgagatcaccctcatcatctttggagtgatggccggggtcatcggcaccatcctgctgatctcctatggcatcagaagactcatcaagaagagccccagtgatgtgaagcccctgcccagcccagacacagatgtgcccctgagctctgtggagattgaaaatcctgagaccagtgaccagtag

SEQ ID NO: 154217 - DNA, 189 bp, synthetic construct
  misc_feature 1..189: note = Description of Artificial Sequence: Synthetic coding sequence
  source 1..189: mol_type = other DNA
atgtatggcaagatcatctttgtgctgctgctgtctgagatcgtgtccatcagcgccctgagcaccacagaggtggccatgcacaccagcaccagcagctctgtgaccaagagctacatcagcagccagaccaatggagagcgggtgcagctggcccaccacttcagcgagccagacttccacaactag

SEQ ID NO: 154218 - DNA, 357 bp, synthetic construct
  misc_feature 1..357: note = Description of Artificial Sequence: Synthetic coding sequence
  source 1..357: mol_type = other DNA
atgtatggcaagatcatctttgtgctgctgctgtctgagatcgtgtccatcagcgccctgagcaccacagaggtggccatgcacaccagcaccagcagctctgtgaccaagagctacatcagcagccagaccaatggagagcgggtgcagctggcccaccacttcagcgagcctgagatcaccctcatcatctttggagtgatggccggggtcatcggcaccatcctgctgatctcctatggcatcagaagactcatcaagaagagccccagtgatgtgaagcccctgcccagcccagacacagatgtgcccctgagctctgtggagattgaaaatcctgagaccagtgaccagtag

SEQ ID NO: 154219 - DNA, 414 bp, synthetic construct
  misc_feature 1..414: note = Description of Artificial Sequence: Synthetic coding sequence
  source 1..414: mol_type = other DNA
atgtatggcaagatcatctttgtgctgctgctgtctgagatcgtgtccatcagcgccctgagcaccacagaggtggccatgcacaccagcaccagcagctctgtgaccaagagctacatcagcagccagaccaatgacacccacaagagggacacctacgccgccaccccccgggcccacgaggtgtctgagatctctgtgaggacagtgtacccacctgaggaggagacagagatcaccctcatcatcttcggcgtgatggccggcgtgattggcaccatcctgctgatctcctatggcatccggcggctcatcaagaagagccccagtgatgtgaagcccctgcccagcccagacacagatgtgcccctgagctctgtggagattgagaaccctgagaccagtgaccagtag

SEQ ID NO: 154220 - DNA, 258 bp, synthetic construct
  misc_feature 1..258: note = Description of Artificial Sequence: Synthetic coding sequence
  source 1..258: mol_type = other DNA
atgtatggcaagatcatctttgtgctgctgctgagcggggagcgggtgcagctggcccaccacttcagcgagcctgagatcaccctcatcatcttcggcgtgatggccggcgtgattggcaccatcctgctgatctcctatggcatccggcggctcatcaagaagagccccagtgatgtgaagcccctgcccagcccagacacagatgtgcccctgagctctgtggagattgagaaccctgagaccagtgaccagtag

SEQ ID NO: 154221 - DNA, 375 bp, synthetic construct
  misc_feature 1..375: note = Description of Artificial Sequence: Synthetic coding sequence
  source 1..375: mol_type = other DNA
atgcacaccagcaccagcagctctgtgaccaagagctacatcagcagccagaccaatgacacccacaagagggacacctacgccgccaccccccgggcccacgaggtgtctgagatctctgtgaggacagtgtacccacctgaggaggagactggagagcgggtgcagctggcccaccacttcagcgagcctgagatcaccctcatcatctttggagtgatggccggggtcatcggcaccatcctgctgatctcctatggcatcagaagactcatcaagaagagccccagtgatgtgaagcccctgcccagcccagacacagatgtgcccctgagctctgtggagattgaaaatcctgagaccagtgaccagtag

SEQ ID NO: 154222 - DNA, 276 bp, synthetic construct
  misc_feature 1..276: note = Description of Artificial Sequence: Synthetic coding sequence
  source 1..276: mol_type = other DNA
atgtatggcaagatcatctttgtgctgctgctgtctgagatcgtgtccatcagcgccctgagcaccacagaggtggccatgcacaccagcaccagcagctctgtgaccaagagctacatcagcagccagaccaatggagagaccggccagctggtgcaccgcttcaccgtgcctgcccctgtggtgatcatcctgatcatcctgtgtgtgatggccggcatcatcggcaccatcctgctgatctcctacagcatccggcggctcatcaaggcctag

SEQ ID NO: 154223 - DNA, 276 bp, synthetic construct; identical to SEQ ID NO: 154222
  misc_feature 1..276: note = Description of Artificial Sequence: Synthetic coding sequence
  source 1..276: mol_type = other DNA

SEQ ID NO: 154224 - DNA, 177 bp, synthetic construct
  misc_feature 1..177: note = Description of Artificial Sequence: Synthetic coding sequence
  source 1..177: mol_type = other DNA
atgtatggcaagatcatctttgtgctgctgctgagcggggagaccggccagctggtgcaccgcttcaccgtgcctgcccctgtggtgatcatcctgatcatcctgtgtgtgatggccggcatcatcggcaccatcctgctgatctcctacagcatcagaagactcatcaaggcctag

SEQ ID NO: 154225 - DNA, 387 bp, synthetic construct
  misc_feature 1..387: note = Description of Artificial Sequence: Synthetic coding sequence
  source 1..387: mol_type = other DNA
atgtggagcaccaggagccccaacagcacagcctggcccctgagcctggagccagaccccggcatggccagcgccagcaccaccatgcacaccaccaccatcgccgagccagaccccggcatgagcggctggccagatggccgcatggagaccagcacccccaccatcatggacatcgtggtgattgctggggtgattgctgctgtggccatcgtgctggtgtccctgctgtttgtgatgctgcgctacatgtaccgccacaagggcacctaccacaccaatgaggccaagggcacagaatttgctgagagcgcagatgctgccctgcagggcgaccctgccctgcaggatgctggggacagcagcaggaaggagtacttcatctag

SEQ ID NO: 154226 - DNA, 324 bp, synthetic construct
  misc_feature 1..324: note = Description of Artificial Sequence: Synthetic coding sequence
  source 1..324: mol_type = other DNA
atggccagcgccagcaccaccatgcacaccaccaccatcgccgagccagaccccggcatgagcggctggccagatggccgcatggagaccagcacccccaccatcatggacatcgtggtgattgctggggtgattgctgctgtggccatcgtgctggtgtccctgctgtttgtgatgctgcgctacatgtaccgccacaagggcacctaccacaccaatgaggccaagggcacagaatttgctgagagcgcagatgctgccctgcagggcgaccctgccctgcaggatgctggggacagcagcaggaaggagtacttcatctag

SEQ ID NO: 154227 - DNA, 330 bp, synthetic construct
  misc_feature 1..330: note = Description of Artificial Sequence: Synthetic coding sequence
  source 1..330: mol_type = other DNA
atgtggagcaccaggagccccaacagcacagcctggcccctgagcctggagccagaccccggcatgagcggctggccagatggccgcatggagaccagcacccccaccatcatggacatcgtggtgattgctggggtgattgctgctgtggccatcgtgctggtgtccctgctgtttgtgatgctgcgctacatgtaccgccacaagggcacctaccacaccaatgaggccaagggcacagaatttgctgagagcgcagatgctgccctgcagggcgaccctgccctgcaggatgctggggacagcagcaggaaggagtacttcatctag

SEQ ID NO: 154228 - DNA, 237 bp, synthetic construct
  misc_feature 1..237: note = Description of Artificial Sequence: Synthetic coding sequence
  source 1..237: mol_type = other DNA
atgtatggcaagatcatctttgtgctgctgctgagcggcatcgtgtccatcagcgccagcagcaccactggagtggccatgcacaccagcaccagcagctctgtgaccaagagctacatcagcagccagaccaacggcatcaccctcatcaactggtgggccatggcccgggtcatctttgaggtgatgctggtggtggtgggcatgatcatcctgatctcctactgcatcagatag

SEQ ID NO: 154229 - DNA, 168 bp, synthetic construct
  misc_feature 1..168: note = Description of Artificial Sequence: Synthetic coding sequence
  source 1..168: mol_type = other DNA
atgtatggcaagatcatctttgtgctgctgctgagcggcatcgtgtccatcagcgccagcagcaccactggagtggccatgcacaccagcaccagcagctctgtgaccaagagctacatcagcagccagaccaatggagagcggggccagctggtgcaccgcttctag

SEQ ID NO: 154230 - DNA, 237 bp, synthetic construct; identical to SEQ ID NO: 154228
  misc_feature 1..237: note = Description of Artificial Sequence: Synthetic coding sequence
  source 1..237: mol_type = other DNA

SEQ ID NO: 154231 - DNA, 180 bp, synthetic construct
  misc_feature 1..180: note = Description of Artificial Sequence: Synthetic coding sequence
  source 1..180: mol_type = other DNA
atgtatggcaagatcatctttgtgctgctgctgagcggcatcgtgtccatcagcgccagcagcaccactggagtggccatgcacaccagcaccagcagctctgtgaccaagagctacatcagcagccagaccaacggctgtgtgattggcaacatcatctgcagcgacaagagcaagtag

SEQ ID NO: 154232 - DNA, 1605 bp, synthetic construct
  misc_feature 1..1605: note = Description of Artificial Sequence: Synthetic coding sequence
  source 1..1605: mol_type = other DNA
atgccccacctgatggagaggatggtgggcagcggcctgctgtggctggccctggtgtcctgcatcctgacccaggccagcgctgtgcagaggggctacggcaaccccatcgaggccagcagctatggcctggacctggactgtggggcccctggcaccccagaggcccacgtgtgctttgacccctgccagaactacaccctgctggatgagcccttccgcagcacagaaaattctgctggcagccagggctgtgacaagaacatgagcggctggtacagatttgtgggggagggcggcgtgaggatgtctgagacctgtgtgcaggtgcaccgctgccagacagatgcccccatgtggctgaatggcacccacccagccctgggagatggcatcaccaaccacacagcctgtgcccactggagcggcaactgctgcttctggaagacagaggtgctggtgaaggcctgccctgggggctaccacgtgtaccgcctggagggcaccccctggtgcaacctgcgctactgcacagaccccagcacagtggaggacaagtgtgagaaggcctgcaggcctgaggaggagtgcctggccctgaacagcacctggggctgcttctgccggcaggacctgaacagcagtgatgtgcacagcctgcagccccagctggactgtggcccccgggagatcaaggtgaaggtggacaagtgcctgctgggcggcctgggcctgggggaggaggtgattgcctacctgcgggaccccaactgcagcagcatcctgcagacagaggagaggaactgggtgtctgtgaccagccctgtgcaggccagcgcctgcaggaacatcctggagaggaaccagacccacgccatctacaagaacaccctgagcctggtgaatgacttcatcatccgggacaccatcctgaacatcaacttccagtgtgcctaccccctggacatgaaggtgtccctgcaggccgccctgcagcccatcgtgagcagcctgaatgtgtctgtggatggaaatggagagttcatcgtgaggatggccctcttccaggaccagaactacaccaacccctatgaaggagatgctgtggagctgtctgtggagagcgtgctgtatgtgggcgccatcctggagcagggcgacaccagccgcttcaacctggtgctgaggaactgctacgccacccccacagaggacaaggctgacctggtgaagtacttcatcatccggaacagctgcagcaaccagagggacagcaccatccacgtggaggagaatggccagagcagcgagagccgcttctctgtgcagatgttcatgtttgctggccactatgacctggtgttcctgcactgtgagatccacctgtgtgacagcctgaatgagcagtgccagcccagctgcagccgcagccaggtgcgctctgaggtgcctgccatcgacctggcccgggtgctggacctgggccccatcaccaggagaggagcccagagccctggggtgatgaatggcacccccagcacagctggcttcctggtggcctggcccatggtgctgctgactgtgctgctggcctggctgttctag

SEQ ID NO: 154233 - DNA, 1164 bp, synthetic construct
  misc_feature 1..1164: note = Description of Artificial Sequence: Synthetic coding sequence
  source 1..1164: mol_type = other DNA
atgccccacctgatggagaggatggtgggcagcggcctgctgtggctggccctggtgtcctgcatcctgacccaggccagcgctgtgcagagggaccccagcacagtggaggacaagtgtgagaaggcctgcaggcctgaggaggagtgcctggccctgaacagcacctggggctgcttctgccggcaggacctgaacagcagtgatgtgcacagcctgcagccccagctggactgtggcccccgggagatcaaggtgaaggtggacaagtgcctgctgggcggcctgggcctgggggaggaggtgattgcctacctgcgggaccccaactgcagcagcatcctgcagacagaggagaggaactgggtgtctgtgaccagccctgtgcaggccagcgcctgcaggaacatcctggagaggaaccagacccacgccatctacaagaacaccctgagcctggtgaatgacttcatcatccgggacaccatcctgaacatcaacttccagtgtgcctaccccctggacatgaaggtgtccctgcaggccgccctgcagcccatcgtgagcagcctgaatgtgtctgtggatggaaatggagagttcatcgtgaggatggccctcttccaggaccagaactacaccaacccctatgaaggagatgctgtggagctgtctgtggagagcgtgctgtatgtgggcgccatcctggagcagggcgacaccagccgcttcaacctggtgctgaggaactgctacgccacccccacagaggacaaggctgacctggtgaagtacttcatcatccggaacagctgcagcaaccagagggacagcaccatccacgtggaggagaatggccagagcagcgagagccgcttctctgtgcagatgttcatgtttgctggccactatgacctggtgttcctgcactgtgagatccacctgtgtgacagcctgaatgagcagtgccagcccagctgcagccgcagccaggtgcgctctgaggtgcctgccatcgacctggcccgggtgctggacctgggccccatcacccggcggggggcccagagccctggggtgatgaatggcacccccagcacagctggcttcctggtggcctggcccatggtgctgctgactgtgctgctggcctggctgttctag

SEQ ID NO: 154234 - DNA, 1173 bp, synthetic construct
  misc_feature 1..1173: note = Description of Artificial Sequence: Synthetic coding sequence
  source 1..1173: mol_type = other DNA
atgccccacctgatggagaggatggtgggcagcggcctgctgtggctggccctggtgtcctgcatcctgacccaggccagcgctgtgcagagggtgccccgggaccccagcacagtggaggacaagtgtgagaaggcctgcaggcctgaggaggagtgcctggccctgaacagcacctggggctgcttctgccggcaggacctgaacagcagtgatgtgcacagcctgcagccccagctggactgtggcccccgggagatcaaggtgaaggtggacaagtgcctgctgggcggcctgggcctgggggaggaggtgattgcctacctgcgggaccccaactgcagcagcatcctgcagacagaggagaggaactgggtgtctgtgaccagccctgtgcaggccagcgcctgcaggaacatcctggagaggaaccagacccacgccatctacaagaacaccctgagcctggtgaatgacttcatcatccgggacaccatcctgaacatcaacttccagtgtgcctaccccctggacatgaaggtgtccctgcaggccgccctgcagcccatcgtgagcagcctgaatgtgtctgtggatggaaatggagagttcatcgtgaggatggccctcttccaggaccagaactacaccaacccctatgaaggagatgctgtggagctgtctgtggagagcgtgctgtatgtgggcgccatcctggagcagggcgacaccagccgcttcaacctggtgctgaggaactgctacgccacccccacagaggacaaggctgacctggtgaagtacttcatcatccggaacagctgcagcaaccagagggacagcaccatccacgtggaggagaatggccagagcagcgagagccgcttctctgtgcagatgttcatgtttgctggccactatgacctggtgttcctgcactgtgagatccacctgtgtgacagcctgaatgagcagtgccagcccagctgcagccgcagccaggtgcgctctgaggtgcctgccatcgacctggcccgggtgctggacctgggccccatcaccaggagaggagcccagagccctggggtgatgaatggcacccccagcacagctggcttcctggtggcctggcccatggtgctgctgactgtgctgctggcctggctgttctag

SEQ ID NO: 154235 - DNA, 1614 bp, synthetic construct
  misc_feature 1..1614: note = Description of Artificial Sequence: Synthetic coding sequence
  source 1..1614: mol_type = other DNA
atgccccacctgatggagaggatggtgggcagcggcctgctgtggctggccctggtgtcctgcatcctgacccaggccagcgctgtgcagaggggctacggcaaccccatcgaggccagcagctatggcctggacctggactgtggggcccctggcaccccagaggcccacgtgtgctttgacccctgccagaactacaccctgctggatgagcccttccgcagcacagaaaattctgctggcagccagggctgtgacaagaacatgagcggctggtacagatttgtgggggagggcggcgtgaggatgtctgagacctgtgtgcaggtgcaccgctgccagacagatgcccccatgtggctgaatggcacccacccagccctgggagatggcatcaccaaccacacagcctgtgcccactggagcggcaactgctgcttctggaagacagaggtgctggtgaaggcctgccctgggggctaccacgtgtaccgcctggagggcaccccctggtgcaacctgcgctactgcaccgtgccccgggaccccagcacagtggaggacaagtgtgagaaggcctgcaggcctgaggaggagtgcctggccctgaacagcacctggggctgcttctgccggcaggacctgaacagcagtgatgtgcacagcctgcagccccagctggactgtggcccccgggagatcaaggtgaaggtggacaagtgcctgctgggcggcctgggcctgggggaggaggtgattgcctacctgcgggaccccaactgcagcagcatcctgcagacagaggagaggaactgggtgtctgtgaccagccctgtgcaggccagcgcctgcaggaacatcctggagaggaaccagacccacgccatctacaagaacaccctgagcctggtgaatgacttcatcatccgggacaccatcctgaacatcaacttccagtgtgcctaccccctggacatgaaggtgtccctgcaggccgccctgcagcccatcgtgagcagcctgaatgtgtctgtggatggaaatggagagttcatcgtgaggatggccctcttccaggaccagaactacaccaacccctatgaaggagatgctgtggagctgtctgtggagagcgtgctgtatgtgggcgccatcctggagcagggcgacaccagccgcttcaacctggtgctgaggaactgctacgccacccccacagaggacaaggctgacctggtgaagtacttcatcatccggaacagctgcagcaaccagagggacagcaccatccacgtggaggagaatggccagagcagcgagagccgcttctctgtgcagatgttcatgtttgctggccactatgacctggtgttcctgcactgtgagatccacctgtgtgacagcctgaatgagcagtgccagcccagctgcagccgcagccaggtgcgctctgaggtgcctgccatcgacctggcccgggtgctggacctgggccccatcacccggcggggggcccagagccctggggtgatgaatggcacccccagcacagctggcttcctggtggcctggcccatggtgctgctgactgtgctgctggcctggctgttctag

SEQ ID NO: 154236 - DNA, 1548 bp, synthetic construct
  misc_feature 1..1548: note = Description of Artificial Sequence: Synthetic coding sequence
  source 1..1548: mol_type = other DNA
atgaagatcaagtgtgagaagagcaggacccagagcagcgcccagcacgtgcagcacagcgcccacagcaccatcgtgtgcaggaagcacagccacaatgctgagacagctggccgggtggacatcgtgcggggcggccccttcttccaccaccccctgaggaagtggctgatcagcccccccctgaacaagcccagcgtgtggcccaggacccccatcatccctgtgcaccagctgcggcgggacacctgggtgggcaactgcaacaagaagacagcccacagccggctgcacagccacggctggccagaggaggagagatttgtgttcagcagcgagctgcacggcaagagcgcctacagcaaggtgacctgcatgccccacctgatggagaggatggtgggcagcggcctgctgtggctggccctggtgtcctgcatcctgacccaggccagcgctgtgcagagggaccacctggaccccagcacagtggaggacaagtgtgagaaggcctgcaggcctgaggaggagtgcctggccctgaacagcacctggggctgcttctgccggcaggacctgaacagcagtgatgtgcacagcctgcagccccagctggactgtggcccccgggagatcaaggtgaaggtggacaagtgcctgctgggcggcctgggcctgggggaggaggtgattgcctacctgcgggaccccaactgcagcagcatcctgcagacagaggagaggaactgggtgtctgtgaccagccctgtgcaggccagcgcctgcaggaacatcctggagaggaaccagacccacgccatctacaagaacaccctgagcctggtgaatgacttcatcatccgggacaccatcctgaacatcaacttccagtgtgcctaccccctggacatgaaggtgtccctgcaggccgccctgcagcccatcgtgagcagcctgaatgtgtctgtggatggaaatggagagttcatcgtgaggatggccctcttccaggaccagaactacaccaacccctatgaaggagatgctgtggagctgtctgtggagagcgtgctgtatgtgggcgccatcctggagcagggcgacaccagccgcttcaacctggtgctgaggaactgctacgccacccccacagaggacaaggctgacctggtgaagtacttcatcatccggaacagctgcagcaaccagagggacagcaccatccacgtggaggagaatggccagagcagcgagagccgcttctctgtgcagatgttcatgtttgctggccactatgacctggtgttcctgcactgtgagatccacctgtgtgacagcctgaatgagcagtgccagcccagctgcagccgcagccaggtgcgctctgaggtgcctgccatcgacctggcccgggtgctggacctgggccccatcacccggcggggggcccagagccctggggtgatgaatggcacccccagcacagctggcttcctggtggcctggcccatggtgctgctgactgtgctgctggcctggctgttctag

SEQ ID NO: 154237 - DNA, 1959 bp, synthetic construct
  misc_feature 1..1959: note = Description of Artificial Sequence: Synthetic coding sequence
  source 1..1959: mol_type = other DNA
atgcccctgctgctgctgctgctgctgctgcccagccccctgcacccccaccccatctgtgaggtgtccaaggtggccagccacctggaggtgaactgtgacaagaggaacctgacagccctgcccccagacctgcccaaggacaccaccatcctgcacctgtctgagaacctgctgtacaccttcagcctggccaccctgatgccctacacccggctgacccagctgaacctggacagatgtgagctgaccaagctgcaggtggatggcaccctgcctgtgctgggcaccctggacctgagccacaaccagctgcagagcctgcccctgctgggccagaccctgcctgccctgactgtgctggatgtgtccttcaaccggctgaccagcctgcccctgggcgccctgcggggcctgggggagctgcaggagctgtacctgaagggaaatgagctgaagaccctgcccccaggcctgctgacccccacccccaagctggagaagctgagcctggccaacaacaacctgacagagctgcctgctggcctgctgaatggcctggagaacctggacaccctgctgctgcaggagaacagcctgtacaccatccccaagggcttcttcggcagccacctgctgccctttgccttcctgcacggcaacccctggctgtgcaactgtgagatcctgtacttccgccgctggctgcaggacaatgcagaaaatgtgtatgtgtggaagcagggcgtggatgtgaaggccatgaccagcaatgtggcctctgtgcagtgtgacaacagcgacaagtttcctgtgtacaagtacccaggcaagggctgccccaccctgggagatgaaggagacacagacctgtatgactactacccagaggaggacacagaaggagacaaggtgcgggccaccaggacagtggtgaagttccccaccaaggcccacaccaccccctggggcctcttctacagctggagcacagccagcctggacagccagatgcccagcagcctgcaccccacccaggagagcaccaaggagcagaccaccttccccccacgctggacccccaacttcaccctgcacatggagagcatcaccttcagcaagacccccaagagcaccacagagcccacccccagccccaccaccagcgagcctgtgcctgagcccgcccccaacatgaccaccctggagcccacccccagccccaccaccccagagcccaccagcgagcccgcccccagccccaccaccccagagcccaccagcgagcccgcccccagccccaccaccccagagcccaccagcgagcccgcccccagccccaccaccccagagcccacccccatccccaccatcgccaccagccccaccatcctggtgtctgccaccagcctcatcacccccaagagcaccttcctgaccaccaccaagcctgtgtccctgctggagagcaccaagaagaccatccctgagctggaccagccccccaagctgcggggcgtgctgcagggccacctggagagcagcagaaatgaccccttcctgcacccagacttctgctgcctgctgcccctgggcttctacgtgctgggcctcttctggctgctgtttgcctctgtggtgctgatcctgctgctgtcctgggtgggccacgtgaagccccaggccctggacagcggccagggcgccgccctgaccacagccacccagaccacccacctggagctgcagaggggccggcaggtgacagtgccccgggcctggctgctcttcctgcggggcagcctgcccaccttccgcagcagcctcttcctgtgggtgcggcccaacggccgggtgggccccctggtggccggccggcggcccagcgccctgagccagggccggggccaggacctgctgagcacagtgtccatccgctacagcggccacagcctgtag

SEQ ID NO: 154238 - DNA, 1881 bp, synthetic construct
  misc_feature 1..1881: note = Description of Artificial Sequence: Synthetic coding sequence
  source 1..1881: mol_type = other DNA
atgcccctgctgctgctgctgctgctgctgcccagccccctgcacccccaccccatctgtgaggtgtccaaggtggccagccacctggaggtgaactgtgacaagaggaacctgacagccctgcccccagacctgcccaaggacaccaccatcctgcacctgtctgagaacctgctgtacaccttcagcctggccaccctgatgccctacacccggctgacccagctgaacctggacagatgtgagctgaccaagctgcaggtggatggcaccctgcctgtgctgggcaccctggacctgagccacaaccagctgcagagcctgcccctgctgggccagaccctgcctgccctgactgtgctggatgtgtccttcaaccggctgaccagcctgcccctgggcgccctgcggggcctgggggagctgcaggagctgtacctgaagggaaatgagctgaagaccctgcccccaggcctgctgacccccacccccaagctggagaagctgagcctggccaacaacaacctgacagagctgcctgctggcctgctgaatggcctggagaacctggacaccctgctgctgcaggagaacagcctgtacaccatccccaagggcttcttcggcagccacctgctgccctttgccttcctgcacggcaacccctggctgtgcaactgtgagatcctgtacttccgccgctggctgcaggacaatgcagaaaatgtgtatgtgtggaagcagggcgtggatgtgaaggccatgaccagcaatgtggcctctgtgcagtgtgacaacagcgacaagtttcctgtgtacaagtacccaggcaagggctgccccaccctgggagatgaaggagacacagacctgtatgactactacccagaggaggacacagaaggagacaaggtgcgggccaccaggacagtggtgaagttccccaccaaggcccacaccaccccctggggcctcttctacagctggagcacagccagcctggacagccagatgcccagcagcctgcaccccacccaggagagcaccaaggagcagaccaccttccccccacgctggacccccaacttcaccctgcacatggagagcatcaccttcagcaagacccccaagagcaccacagagcccacccccagccccaccaccagcgagcctgtgcctgagcccgcccccaacatgaccaccctggagcccacccccagccccaccaccccagagcccaccagcgagcccgcccccagccccaccaccccagagcccacccccatccccaccatcgccaccagccccaccatcctggtgtctgccaccagcctcatcacccccaagagcaccttcctgaccaccaccaagcctgtgtccctgctggagagcaccaagaagaccatccctgagctggaccagccccccaagctgcggggcgtgctgcagggccacctggagagcagcagaaatgaccccttcctgcacccagacttctgctgcctgctgcccctgggcttctacgtgctgggcctcttctggctgctgtttgcctctgtggtgctgatcctgctgctgtcctgggtgggccacgtgaagccccaggccctggacagcggccagggcgccgccctgaccacagccacccagaccacccacctggagctgcagaggggccggcaggtgacagtgccccgggcctggctgctcttcctgcggggcagcctgcccaccttccgcagcagcctcttcctgtgggtgcggcccaacggccgggtgggccccctggtggccggccggcggcccagcgccctgagccagggccggggccaggacctgctgagcacagtgtccatccgctacagcggccacagcctgtag

SEQ ID NO: 154239 - DNA, 621 bp, synthetic construct
  misc_feature 1..621: note = Description of Artificial Sequence: Synthetic coding sequence
  source 1..621: mol_type = other DNA
atgggcagcggccccaggggggccctgagcctgctgctgctgctgctggccccacccagcaggcctgctgctggctgcccagccccctgcagctgtgccggcaccctggtggactgtggcagaagaggcctgacctgggccagcctgcccacagccttccctgtggacaccacagagctggtgctgactggaaacaacctgacagccctgcccccaggcctgctggatgccctgcctgccctgaggacagcccacctgggcgccaacccctggaggtgtgactgccgcctggtgcccctgcgggcctggctggccggccggcctgagcgggccccctacagagacctgcgctgtgtggcccccccagccctgcggggccgcctgctgccctacctggccgaggatgagctgcgggccgcctgtgcccctggccccctgtgctggggcgccctggccgcccagctggccctgctgggcctgggcctgctgcacgccctgctgctggtgctgctgctgtgccgcctgcggcggctgcgggcccgggcccgggcccgggctgctgcccggctgagcctgacagaccccctggtggccgagagagctggaacagatgagagctag

SEQ ID NO: 154240 - DNA, 1230 bp, synthetic construct
  misc_feature 1..1230: note = Description of Artificial Sequence: Synthetic coding sequence
  source 1..1230: mol_type = other DNA
atgatccccagccgccacaccatgctgcgcttcctgcctgtgaatgctgccagctgccctggggacaggaggaccatgctggtgaatgtggccgccggcgtgcgggtgctgcgggtgcccctgcgggccggcggcagcggcagcctgagcggcctgcggcccccagccatcgtgtgctacctgcccctgcagagggccagcgccagcggcctcttcctggcccggccccagcactgcggccgctgtggccggggccggggcggggccgccctgagcctgggcagccctgcctatgccagccgctgccgggtgtccagagctgctgtgttcagcccctgggcccctgtgtccctggagagcggccgggcccctggctgcagcctgggccggcccggcctgcggggggccctggtggtgtggctgcagctgggggagacctgggtgcggctgcggggggacttccagcctgcctgtggggtggtgcgggtggagcggctggccggctacagagatgctggccaccagggcctggatggagctggccctgctgtgtgggtgctgagagatgtggcccaggtgcctgctgacagaagtgcctactgtggggccagcctggccggccccaggggggccctgagcctgctgctgctgctgctggccccacccagcaggcctgctgctggctgcccagccccctgcagctgtgccggcaccctggtggactgtggccggcggggcctgacctgggccagcctgcccacagccttccctgtggacaccacagagctggtgctgaccggcaacaacctgacagccctgcccccaggcctgctggatgccctgcctgccctgaggacagcccacctgggcgccaacccctggaggtgtgactgccgcctggtgcccctgcgggcctggctggccggccggcctgagcgggccccctacagagacctgcgctgtgtggcccccccagccctgcggggccgcctgctgccctacctggctgaagatgagctgcgggccgcctgtgcccctggccccctgtgctggggcgccctggccgcccagctggccctgctgggcctgggcctgctgcacgccctgctgctggtgctgctgctgtgccgcctgcggcggctgcgggcccgggcccgggcccgggccgccgcccggctgagcctgacagaccccctggtggccgagcgggccggcacagatgagagctag

SEQ ID NO: 154241 - DNA, 534 bp, synthetic construct
  misc_feature 1..534: note = Description of Artificial Sequence: Synthetic coding sequence
  source 1..534: mol_type = other DNA
atgcctgcctggggcgccctcttcctgctgtgggccacagctgaggccaccaaggactgccccagcccctgcacctgccgggccctggagaccatgggcctgtgggtggactgccggggccacggcctgacagccctgcctgccctgcctgcccggaccaggcacctgctgctggccaacaacagcctgcagagcgtgcccccaggggcctttgaccacctgccccagctgcagaccctggatgtgacccagaacccctggcactgtgactgcagcctgacctacctgcggctgtggctggaggacaggaccccagaggccctgctgcaggtgcgctgtgccagccccagcctggccgcccacggccccctgggccgcctgaccggctaccagctgggcagctgtggctggcagctgcaggcctcctgggtgcggcctggggtgctgtgggatgtggccctggtggccgtggccgccctgggcctggccctgctggccggcctgctgtgtgccaccacagaggccctggactag

SEQ ID NO: 154242 - DNA, 987 bp, synthetic construct
  misc_feature 1..987: note = Description of Artificial Sequence: Synthetic coding sequence
  source 1..987: mol_type = other DNA
atgaagccagccatggagacagctgctgaagaaaatacagagcagagccaggagaggaaggtgaacagcagagctgagatggagatcggccgctaccactggatgtacccaggcagcaagaaccaccagtaccaccctgtgcccaccctgggggaccgggccagccccctgagcagccctggctgctttgagtgctgcatcaagtgcctgggcggcgtgccctatgccagcctggtggccaccatcctgtgcttcagcggcgtggccctcttctgtggctgcggccacgtggccctggccggcaccgtggccatcctggagcagcacttcagcaccaatgccagtgaccacgccctgctgtctgaggtgatccagctgatgcagtatgtgatctacggcatcgccagcttcttcttcctgtatggcatcatcctgctggccgagggcttctacaccaccagcgctgtgaaggagctgcacggggagttcaagaccacagcctgtggccgctgcatcagcggcatgtttgtgttcctgacctacgtgctgggcgtggcctggctgggcgtgtttggcttctctgctgtgcctgtgttcatgttctacaacatctggagcacctgtgaggtgatcaagagcccccagaccaacggcaccaccggggtggagcagatctgtgtggacatccggcagtatggcatcatcccctggaatgccttccctgggaagatctgtggcagcgccctggagaacatctgcaacaccaatgagttctacatgagctaccacctgttcatcgtggcctgtgccggggccggggccaccgtgattgccctgatccacttcctgatgatcctgagcagcaactgggcctacctgaaggatgccagcaagatgcaggcctaccaggacatcaaggccaaggaggagcaggagctgcaggacatccagagccgcagcaaggagcagctgaacagctacacctag

SEQ ID NO: 154243 - DNA, 918 bp, synthetic construct
  misc_feature 1..918: note = Description of Artificial Sequence: Synthetic coding sequence
  source 1..918: mol_type = other DNA
atgaagccagccatggagacagctgctgaagaaaatacagagcagagccaggagaggaaggtgaacagcagagctgagatggagatcggccgctaccactggatgtacccaggcagcaagaaccaccagtaccaccctgtgcccaccctgggggaccgggccagccccctgagcagccctggctgctttgagtgctgcatcaagtgcctgggcggcgtgccctatgccagcctggtggccaccatcctgtgcttcagcggcgtggccctcttctgtggctgcggccacgtggccctggccggcaccgtggccatcctggagcagcacttcagcaccaatgccagtgaccacgccctgctgtctgaggtgatccagctgatgcagtatgtgatctacggcatcgccagcttcttcttcctgtatggcatcatcctgctggccgagggcttctacaccaccagcgctgtgaaggagctgcacggggagttcaagaccacagcctgtggccgctgcatcagcggcatgtttgtgttcctgacctacgtgctgggcgtggcctggctgggcgtgtttggcttctctgctgtgcctgtgttcatgttctacaacatctggagcacctgtgaggtgatcaagagcccccagaccaacggcaccaccggggtggagcagatctgtgtggacatccggcagtatggcatcatcccctggaatgccttccctgggaagatctgtggcagcgccctggagaacatctgcaacaccaatgagttctacatgagctaccacctgttcatcgtggcctgtgccggggccggggccaccgtgattgccctgctgatctacatgatggccaccacctacaactatgctgtgctgaagttcaagagccgggaggactgctgcaccaagttctag

SEQ ID NO: 154244 - DNA, 798 bp, synthetic construct
  misc_feature 1..798: note = Description of Artificial Sequence: Synthetic coding sequence
  source 1..798: mol_type = other DNA
atgaagccagccatggagacagctgctgaagaaaatacagagcagagccaggagaggaagggctgctttgagtgctgcatcaagtgcctgggcggcgtgccctatgccagcctggtggccaccatcctgtgcttcagcggcgtggccctcttctgtggctgcggccacgtggccctggccggcaccgtggccatcctggagcagcacttcagcaccaatgccagtgaccacgccctgctgtctgaggtgatccagctgatgcagtatgtgatctacggcatcgccagcttcttcttcctgtatggcatcatcctgctggccgagggcttctacaccaccagcgctgtgaaggagctgcacggggagttcaagaccacagcctgtggccgctgcatcagcggcatgtttgtgttcctgacctacgtgctgggcgtggcctggctgggcgtgtttggcttctctgctgtgcctgtgttcatgttctacaacatctggagcacctgtgaggtgatcaagagcccccagaccaacggcaccaccggggtggagcagatctgtgtggacatccggcagtatggcatcatcccctggaatgccttccctgggaagatctgtggcagcgccctggagaacatctgcaacaccaatgagttctacatgagctaccacctgttcatcgtggcctgtgccggggccggggccaccgtgattgccctgctgatctacatgatggccaccacctacaactatgctgtgctgaagttcaagagccgggaggactgctgcaccaagttctag

SEQ ID NO: 154245 - DNA, 540 bp, synthetic construct
  misc_feature 1..540: note = Description of Artificial Sequence: Synthetic coding sequence
  source 1..540: mol_type = other DNA
atgcagtatgtgatctacggcatcgccagcttcttcttcctgtatggcatcatcctgctggccgagggcttctacaccaccagcgctgtgaaggagctgcacggggagttcaagaccacagcctgtggccgctgcatcagcggcatgtttgtgttcctgacctacgtgctgggcgtggcctggctgggcgtgtttggcttctctgctgtgcctgtgttcatgttctacaacatctggagcacctgtgaggtgatcaagagcccccagaccaacggcaccaccggggtggagcagatctgtgtggacatccggcagtatggcatcatcccctggaatgccttccctgggaagatctgtggcagcgccctggagaacatctgcaacaccaatgagttctacatgagctaccacctgttcatcgtggcctgtgccggggccggggccaccgtgattgccctgctgatctacatgatggccaccacctacaactatgctgtgctgaagttcaagagccgggaggactgctgcaccaagttctag

SEQ ID NO: 154246 - DNA, 741 bp, synthetic construct
  misc_feature 1..741: note = Description of Artificial Sequence: Synthetic coding sequence
  source 1..741: mol_type = other DNA
atgggctgctttgagtgctgcatcaagtgcctgggcggcgtgccctatgccagcctggtggccaccatcctgtgcttctctggagtggccctcttctgtggctgcggccacgtggccctggccggcaccgtggccatcctggagcagcacttcagcaccaatgccagtgaccacgccctgctgtctgaggtgatccagctgatgcagtatgtgatctatggaattgccagcttcttcttcctgtatggcatcatcctgctggccgagggcttctacaccaccagcgctgtgaaggagctgcatggagagttcaagaccacagcctgtggccgctgcatcagcggcatgtttgtgttcctgacctacgtgctgggcgtggcctggctgggcgtgtttggcttctctgctgtgcctgtgttcatgttctacaacatctggagcacctgtgaggtgatcaagagcccccagaccaacggcaccactggagtggagcagatctgtgtggacatccggcagtatggcatcatcccctggaatgccttccctgggaagatctgtggcagcgccctggagaacatctgcaacaccaatgagttctacatgagctaccacctgttcatcgtggcctgtgccggggccggggccaccgtcatcgccctgctgatctacatgatggccaccacctacaactatgctgtgctgaagttcaagagccgggaggactgctgcaccaagttctag

SEQ ID NO: 154247 - DNA, 324 bp, synthetic construct
  misc_feature 1..324: note = Description of Artificial Sequence: Synthetic coding sequence
  source 1..324: mol_type = other DNA
atgaagccagccatggagacagctgctgaagaaaatacagagcagagccaggagaggaagggctgctttgagtgctgcatcaagtgcctgggcggcgtgccctatgccagcctggtggccaccatcctgtgcttcagcggcgtggccctcttctgtggctgcggccacgtggccctggccggcaccgtggccatcctggagcagcacttcagcaccaatgccagtgaccacgccctgctgtctgaggtgatccagctgatgcagtatgtgatctacggcatcgccagcttcttcttcctgtatggcatcatcctgctggcctag

SEQ ID NO: 154248 - DNA, 909 bp, synthetic construct
  misc_feature 1..909: note = Description of Artificial Sequence: Synthetic coding sequence
  source 1..909: mol_type = other DNA
atggagatcggccgctaccactggatgtacccaggcagcaagaaccaccagtaccaccctgtgcccaccctgggggaccgggccagccccctgagcagccctggctgctttgagtgctgcatcaagtgcctgggcggcgtgccctatgccagcctggtggccaccatcctgtgcttcagcggcgtggccctcttctgtggctgcggccacgtggccctggccggcaccgtggccatcctggagcagcacttcagcaccaatgccagtgaccacgccctgctgtctgaggtgatccagctgatgcagtatgtgatctacggcatcgccagcttcttcttcctgtatggcatcatcctgctggccgagggcttctacaccaccagcgctgtgaaggagctgcacggggagttcaagaccacagcctgtggccgctgcatcagcggcatgtttgtgttcctgacctacgtgctgggcgtggcctggctgggcgtgtttggcttctctgctgtgcctgtgttcatgttctacaacatctggagcacctgtgaggtgatcaagagcccccagaccaacggcaccaccggggtggagcagatctgtgtggacatccggcagtatggcatcatcccctggaatgccttccctgggaagatctgtggcagcgccctggagaacatctgcaacaccaatgagttctacatgagctaccacctgttcatcgtggcctgtgccggggccggggccaccgtgattgccctgatccacttcctgatgatcctgagcagcaactgggcctacctgaaggatgccagcaagatgcaggcctaccaggacatcaaggccaaggaggagcaggagctgcaggacatccagagccgcagcaaggagcagctgaacagctacacctag

SEQ ID NO: 154249 - DNA, 1863 bp, synthetic construct
  misc_feature 1..1863: note = Description of Artificial Sequence: Synthetic coding sequence
  source 1..1863: mol_type = other DNA
atgagccccagccccacagccctcttctgcctgggcctgtgcctgggccgggtgcctgcccagagcggccccctgcccaagcccagcctgcaggccctgcccagcagcctggtgcccctggagaagcctgtgaccctgcgctgccagggccccccaggagtggacctgtaccgcctggagaagctgagcagcagccgctaccaggaccaggccgtgctcttcatcccagccatgaagaggagcctggccggccgctaccgctgcagctaccagaatggcagcctgtggagcctgcccagcgaccagctggagctggtggccaccggggtgtttgccaagcccagcctgagcgcccagcccggccctgctgtgtcctctggaggagatgtgaccctgcagtgccagaccaggtatggctttgaccagtttgccctgtacaaggagggggaccctgccccctacaagaaccctgagcgctggtaccgggccagcttccccatcatcaccgtgacagctgcccacagcggcacctaccgctgctacagcttcagcagccgggacccctacctgtggagcgcccccagcgaccccctggagctggtggtgacaggcacctctgtgacccccagccggctgcccacagagccccccagccctgtggccgagttcagcgaggccacagctgagctgactgtgtccttcaccaatgaggtgttcaccacagagaccagccgcagcatcacagccagccccaaggagagtgacagccctgctggggagagctgcccccctgtgctgcaccagggccagcccggccctgacatgccccggggctgtgaccccaacaaccctgggggcgtgtctggccggggcctggcccagcctgaggaggccccagctgcccagggccagggctgtgccgaggccgccagcgcccccccagcccccccagctgaccctgagatcaagaggggcagcggctggaggcccaccggctgcagccagccccgggtgatgttcatgacagctgagccccaggcccggagctacccccgggagggctcctggcatggaagaaggctgaaggactggagggtgtggagcgtggaggccggcggccagaggctgcagctgtggaagaggggccacgccgccagctcctggtgcagcatccgggagcccttcggccagtgcctgtctgtgtgcctgcccctgtgcctgcgggcccccagcatctgggatggcaggaacctgtggaggccccaccccccaccctgcaccctgtggatgacctggtacccaggctggaccacctactggcccctgagcagcaccagcctcatctgggccccagatggcagcctgcgcttccctgccctgcgggtggacagcgtgcccagctctgtgcagaacccccctgtgctgcccttcggccccctgtgcagctgcctggtgttccccaggaacagccacccccacagcatcagccactgcggcctgaccaacctgctgagcagcctgaggacaggcctggccggcagcctgggcatgtccttcatcttcctgtctgtgaagctggcccgctgccccctgcccttcaccctggagaacaagatcagcctgtgcaacatggtgaagccccacctgtaccagcagaacaagaagacccagaagctggcccgctgtggcggggccagcctgtacagccagcagctgcggggcctgcgctgggagaatggcctgagcctgggcggccggggctgcagcgagctgcggagccaccactgcaccctggcccgggtgaccaagccagactttgtgtccaagaacacaggcatgaacatgagcatcaccctcatctag

SEQ ID NO: 154250 - DNA, 966 bp, synthetic construct
  misc_feature 1..966: note = Description of Artificial Sequence: Synthetic coding sequence
  source 1..966: mol_type = other DNA
atgagccccagccccacagccctcttctgcctgggcctgtgcctgggccgggtgcctgcccagagcggccccctgcccaagcccagcctgcaggccctgcccagcagcctggtgcccctggagaagcctgtgaccctgcgctgccagggccccccaggagtggacctgtaccgcctggagaagctgagcagcagccgctaccaggaccaggccgtgctcttcatcccagccatgaagaggagcctggccggccgctaccgctgcagctaccagaatggcagcctgtggagcctgcccagcgaccagctggagctggtggccaccggggtgtttgccaagcccagcctgagcgcccagcccggccctgctgtgtcctctggaggagatgtgaccctgcagtgccagaccaggtatggctttgaccagtttgccctgtacaaggagggggaccctgccccctacaagaaccctgagcgctggtaccgggccagcttccccatcatcaccgtgacagctgcccacagcggcacctaccgctgctacagcttcagcagccgggacccctacctgtggagcgcccccagcgaccccctggagctggtggtgacagagttcagcgaggccacagctgagctgactgtgtccttcaccaatgaggtgttcaccacagagaccagccgcagcatcacagccagccccaaggagagtgacagccctgctggccctgcccggcagtactacaccaagggcaacctggtgcgcatctgcctgggcgctgtgatcctgatcatcctggccggcttcctggccgaggactggcacagcaggaggaagaggctgcggcaccggggccgggctgtgcagaggcccctgccccccctgccccccctgcccctgaccaggaagagcaatggaggccaggacggcggccggcaggatgtgcacagccggggcctgtgcagctag

SEQ ID NO: 154251 - DNA, 1020 bp, synthetic construct
  misc_feature 1..1020: note = Description of Artificial Sequence: Synthetic coding sequence
  source 1..1020: mol_type = other DNA
atgagccccagccccacagccctcttctgcctgggcctgtgcctgggccgggtgcctgcccagagcggccccctgcccaagcccagcctgcaggccctgcccagcagcctggtgcccctggagaagcctgtgaccctgcgctgccagggccccccaggagtggacctgtaccgcctggagaagctgagcagcagccgctaccaggaccaggccgtgctcttcatcccagccatgaagaggagcctggccggccgctaccgctgcagctaccagaatggcagcctgtggagcctgcccagcgaccagctggagctggtggccaccggggtgtttgccaagcccagcctgagcgcccagcccggccctgctgtgtcctctggaggagatgtgaccctgcagtgccagaccaggtatggctttgaccagtttgccctgtacaaggagggggaccctgccccctacaagaaccctgagcgctggtaccgggccagcttccccatcatcaccgtgacagctgcccacagcggcacctaccgctgctacagcttcagcagccgggacccctacctgtggagcgcccccagcgaccccctggagctggtggtgacaggcacctctgtgacccccagccggctgcccacagagccccccagccctgtggccgagttcagcgaggccacagctgagctgactgtgtccttcaccaatgaggtgttcaccacagagaccagccgcagcatcacagccagccccaaggagagtgacagccctgctggccctgcccggcagtactacaccaagggcaacctggtgcgcatctgcctgggcgctgtgatcctgatcatcctggccggcttcctggccgaggactggcacagcaggaggaagaggctgcggcaccggggccgggctgtgcagaggcccctgccccccctgccccccctgcccctgaccaggaagagcaatggaggccaggacggcggccggcaggatgtgcacagccggggcctgtgcagctag

SEQ ID NO: 154252 - DNA, 1866 bp, synthetic construct
  misc_feature 1..1866: note = Description of Artificial Sequence: Synthetic coding sequence
  source 1..1866: mol_type = other DNA
atgggcctgctgagtgaccctgtgagaagaagagccctggcccggctggtgctgcggctgaatgcccccctgtgtgtgctgtcctatgtggccggcatcgcctggttcctggccctggtgttcccccccctgacccagaggacctacatgtctgaaaatgccatgggcagcaccatggtggaggagcagtttgctggaggagaccgggcccgggcctttgcccgggactttgctgcccacaggaagaagagcggggccctgcctgtggcctggctggagaggaccatgaggtctgtgggcctggaggtgtacacccagagcttcagcaggaagctgcccttcccagatgagacccatgagcgctacatggtgtctggcaccaacgtgtatggcatcctgcgggccccccgggccgccagcacagagagcctggtgctgactgtgccctgtggcagtgacagcaccaacagccaggccgtgggcctgctgctggccctggccgcccacttccggggccagatctactgggccaaggacatcgtgttcctggtgacagaacatgacctgctgggcacagaggcctggctggaggcctaccatgatgtgaatgtgacaggcatgcagagcagccccctgcagggccgggccggggccatccaggccgctgtggccctggagctgagcagtgatgtggtgaccagcctggatgtggccgtggagggcctgaatggccagctgcccaacctggacctgctgaacctcttccagaccttctgccagaagggcggcctgctgtgcaccctgcagggcaagctgcagcctgaggactggaccagcctggatggccccctgcagggcctgcagaccctgctgctgatggtgctgcggcaggccagcggccggccccacggcagccacggcctcttcctgcgctacagagtggaggccctgaccctgcggggcatcaacagcttccggcagtacaagtatgacctggtggccgtgggcaaggccctggagggcatgttcaggaagctgaaccacctgctggagcggctgcaccagagcttcttcctgtacctgctgcccggcctgagcagatttgtgtccatcggcctgtacatgcctgctgtgggcttcctgctgctggtgctgggcctgaaggccctggagctgtggatgcagctgcatgaagctggcatgggcctggaggagcccggcggggcccctggccccagcgtgcccctgccccccagccagggcgtgggcctggccagcctggtggcccccctgctgatcagccaggccatgggcctggccctgtatgtgctgcctgtgctgggccagcacgtggccacccagcacttccctgtggccgaggccgaggccgtggtgctgaccctgctggccatctatgctgctggcctggccctgccccacaacacccaccgggtggtgtccacccaggccccagaccggggctggatggccctgaagctggtggccctgatctacctggccctgcagctgggctgcatcgccctgaccaacttcagcctgggcttcctgctggccaccaccatggtgcccacagctgccctggccaagccccacggccccaggaccctgtatgctgccctgctggtgctgaccagccctgctgccaccctgctgggcagcctcttcctgtggagggagctgcaggaggcccccctgagcctggccgagggctggcagctgttcctggccgccctggcccagggcgtgctggagcaccacacctatggagccctgctcttccccctgctgagcctgggcctgtacccctgctggctgctcttctggaatgtgctcttctggaagtag

SEQ ID NO: 154253 - DNA, 1686 bp, synthetic construct
  misc_feature 1..1686: note = Description of Artificial Sequence: Synthetic coding sequence
  source 1..1686: mol_type = other DNA
atgggcctgctgagtgaccctgtgagaagaagagccctggcccggctggtgctgcggctgaatgcccccctgtgggccctgcctgtggcctggctggagaggaccatgaggtctgtgggcctggaggtgtacacccagagcttcagcaggaagctgcccttcccagatgagacccatgagcgctacatggtgtctggcaccaacgtgtatggcatcctgcgggccccccgggccgccagcacagagagcctggtgctgactgtgccctgtggcagtgacagcaccaacagccaggccgtgggcctgctgctggccctggccgcccacttccggggccagatctactgggccaaggacatcgtgttcctggtgacagaacatgacctgctgggcacagaggcctggctggaggcctaccatgatgtgaatgtgacaggcatgcagagcagccccctgcagggccgggccggggccatccaggccgctgtggccctggagctgagcagtgatgtggtgaccagcctggatgtggccgtggagggcctgaatggccagctgcccaacctggacctgctgaacctcttccagaccttctgccagaagggcggcctgctgtgcaccctgcagggcaagctgcagcctgaggactggaccagcctggatggccccctgcagggcctgcagaccctgctgctgatggtgctgcggcaggccagcggccggccccacggcagccacggcctcttcctgcgctacagagtggaggccctgaccctgcggggcatcaacagcttccggcagtacaagtatgacctggtggccgtgggcaaggccctggagggcatgttcaggaagctgaaccacctgctggagcggctgcaccagagcttcttcctgtacctgctgcccggcctgagcagatttgtgtccatcggcctgtacatgcctgctgtgggcttcctgctgctggtgctgggcctgaaggccctggagctgtggatgcagctgcatgaagctggcatgggcctggaggagcccggcggggcccctggccccagcgtgcccctgccccccagccagggcgtgggcctggccagcctggtggcccccctgctgatcagccaggccatgggcctggccctgtatgtgctgcctgtgctgggccagcacgtggccacccagcacttccctgtggccgaggccgaggccgtggtgctgaccctgctggccatctatgctgctggcctggccctgccccacaacacccaccgggtggtgtccacccaggccccagaccggggctggatggccctgaagctggtggccctgatctacctggccctgcagctgggctgcatcgccctgaccaacttcagcctgggcttcctgctggccaccaccatggtgcccacagctgccctggccaagccccacggccccaggaccctgtatgctgccctgctggtgctgaccagccctgctgccaccctgctgggcagcctcttcctgtggagggagctgcaggaggcccccctgagcctggccgagggctggcagctgttcctggccgccctggcccagggcgtgctggagcaccacacctatggagccctgctcttccccctgctgagcctgggcctgtacccctgctggctgctcttctggaatgtgctcttctggaagtag

SEQ ID NO: 154254 - DNA, 555 bp, synthetic construct
  misc_feature 1..555: note = Description of Artificial Sequence: Synthetic coding sequence
  source 1..555: mol_type = other DNA
atgaaggccctgggcgctgtgctgctggccctgctgctgtgtggccggcccggccggggccagacccagcaggaggaggaggaggaggatgaagatcatggcccagatgattatgatgaagaagatgaagatgaggtggaggaggaggagaccaaccggctgcccggcggccgcagccgggtgctgctgcgctgctacacctgcaagagcctgcccagagatgagcgctgcaacctgacccagaactgcagccacggccagacctgcaccaccctgattgcccacggcaacacagagagcggcctgctgaccacccacagcacctggtgcacagacagctgccagcccatcaccaagacagtggagggcacccaggtgaccatgacctgctgccagagcagcctgtgcaatgtgcccccctggcagagcagccgggtgcaggaccccaccgggaagggggccggcggcccccggggcagcagcgagaccgtgggcgccgccctgctgctgaacctgctggccggcctgggcgccatgggcgcccggcggccctag

SEQ ID NO: 154255 - DNA, 582 bp, synthetic construct
  misc_feature 1..582: note = Description of Artificial Sequence: Synthetic coding sequence
  source 1..582: mol_type = other DNA
atgggcaagcagaacagcaagctgcggcctgaggtgatgcaggacctgctggagagcacagacttcacagaacatgagatccaggagtggtacaagggcttcctgcgggactgccccagcggccacctgtccatggaggagttcaagaagatctacggcaacttcttcccctatggagatgccagcaagtttgctgagcacgtgttccgcacctttgatgccaatggagatggcaccatcgacttccgggagttcatcatcgccctgtctgtgaccagccggggcaagctggagcagaagctgaagtgggccttctccatgtatgacctggatggaaatggctacatcagcaaggccgagatgctggagatcgtgcaggccatctacaagatggtgtcctctgtgatgaagatgccagaagatgagagcaccccagagaagaggacagagaagatcttccggcagatggacaccaacagagatggcaagctgagcctggaggagttcatccggggggccaagagtgaccccagcatcgtgcggctgctgcagtgtgaccccagcagcgctggccagttctag

SEQ ID NO: 154256 - DNA, 756 bp, synthetic construct
  misc_feature 1..756: note = Description of Artificial Sequence: Synthetic coding sequence
  source 1..756: mol_type = other DNA
atgtctgcctacggcatgcccatgtacaagagcggggacctggtgtttgccaagctgaagggctacgcccactggccagccagaattgagcacatgacccagcccaaccgctaccaggtgttcttcttcggcacccatgaaacagccttcctgagccccaagaggctcttcccctacaaggagtgcaaggagaagtttgggaagcccaacaagaggcggggcttctctgctggcctgtgggagattgagaacaaccccaccgtgcaggccagtgactgccccctggccagcgagaagggcagcggagatggcccctggccagagcctgaggccgcagaaggagatgaggacaagcccacccacgccggcggcggcggagatgagctgggcaagccagatgatgacaagcccacagaggaggagaagggccccctgaagaggtctgctggggaccccccagaagatgcccccaagaggcccaaggaggccgccccagaccaggaggaggaggccgaggccgagagagctgctgaggccgagagagctgctgctgctgctgctgccacagctgtggatgaggagagccccttcctggtggccgtggagaatggaagtgcccccagcgagcccggcctggtgtgtgagcccccccagcctgaggaggaggagctgcgggaggaggaggtggctgatgaggaggccagccaggagtggcacgccgaggcccctgggggcggggaccgggacagcctgtag

SEQ ID NO: 154257 - DNA, 531 bp, synthetic construct
  misc_feature 1..531: note = Description of Artificial Sequence: Synthetic coding sequence
  source 1..531: mol_type = other DNA
atgtctgccttccggctgtggccaggcctgctgatcatgctgggcagcctgtgccaccggggcagcccctgtggcctgagcacccacgtggagatcggccaccgggccctggagttcctgcagctgcacaacggccgggtgaactaccgggagctgctgctggagcaccaggatgcctaccaggccggcatcgtgtttcctgactgcttctaccccagcatctgcaagggcggcaagttccatgatgtgtctgagagcacccactggacccccttcctgaatgcctctgtgcactacatccgggagaactaccccctgccctgggagaaggacacagagaagctggtggccttcctgtttggcatcaccagccacatggccgcagatgtgtcctggcacagcctgggcctggagcagggcttcctgcggaccatgggcgccatcgacttccacggcagctacagcgaggcccacagcgctggggactttggaacagtgtacctgcacctgctgaacttcctggtggtgtag

SEQ ID NO: 154258 - DNA, 831 bp, synthetic construct
  misc_feature 1..831: note = Description of Artificial Sequence: Synthetic coding sequence
  source 1..831: mol_type = other DNA
atgaacagcaagaggatgctgctgctggtgctgtttgccttcagcctgatgctggtggagcgctacttcaggaaccaccaggtggaggagctgcggctgagtgactggttccaccccaggaagaggccagatgtgatcaccaagacagactggctggcccctgtgctgtgggagggcacctttgacagaagagtgctggagaagcactacagaagaagaaacatcaccgtgggcctggccgtgtttgccaccggccgctttgctgaggagtacctgcggcccttcctgcacagcgccaacaagcacttcatgacaggctacagagtcatcttctacatcatggtggatgccttcttcaagctgcctgacatcgagcccagccccctgcggaccttcaaggccttcaaggtgggcacagagcgctggtggctggatggccccctggtgcacgtgaagagcctgggggagcacatcgccagccacatccaggatgaggtggacttcctgttctccatggccgccaaccaggtgttccagaatgaatttggagtggagaccctgggccccctggtggcccagctgcacgcctggtggtacttcaggaacaccaagaacttcccctatgaaagaagacccaccagcgctgcctgcatccccttcggccagggcgacttctactacggcaacctgatggtgggcggcaccccccacaacatcctggacttcatcaaggagtacctgaatggagtcatccatgacatcaagaatggcctgaacagcacctatgagaagcacctgaacaagtacttctacctgaacaagcccacctag

SEQ ID NO: 154259 - DNA, 2166 bp, synthetic construct
  misc_feature 1..2166: note = Description of Artificial Sequence: Synthetic coding sequence
  source 1..2166: mol_type = other DNA
atgctgccccggggccggccccgggccctgggcgctgctgccctgctgctgctgctgctgctgctgggcttcctgctgtttggaggagacctgggctgtgaaagaagagagcccggcggccgggccggggcccctggctgcttccctggccccctgatgccccgggtgcccccagatggccgcctgcggcgggccgccgccctggatggagaccccggggccggccctggggaccacaacagaagtgactgtggcccccagcccccacctccacccaagtgtgagctgctgcacgtggccatcgtgtgtgccggccacaacagcagcagagatgtgatcaccctggtgaagtccatgctgttctacaggaagaaccccctgcacctgcacctggtgacagatgctgtggccaggaacatcctggagaccctcttccacacctggatggtgcctgctgtgcgggtgtccttctaccacgccgaccagctgaagccccaggtgtcctggatccccaacaagcactacagcggcctgtatggcctgatgaagctggtgctgcccagcgccctgcctgctgagctggcccgggtcatcgtgctggacacagatgtgacctttgccagtgacatcagcgagctgtgggccctgtttgcccacttcagtgacacccaggccatcggcctggtggagaaccagagcgactggtacctgggcaacctgtggaagaaccaccggccctggccagccctgggccggggcttcaacacaggagtcatcctgctgcggctggaccggctgcggcaggccggctgggagcagatgtggaggctgacagcccggcgggagctgctgagcctgcctgccaccagcctggccgaccaggacatcttcaatgctgtgatcaaggagcaccctggcctggtgcagaggctgccctgtgtgtggaatgtgcagctgagtgaccacaccctggccgagcgctgctacagcgaggccagtgacctgaaggtgatccactggaacagccccaagaagctgcgggtgaagaacaagcacgtggagttcttcaggaacttctacctgaccttcctggagtatgatggcaacctgctgcggcgggagctgtttgtgtgccccagccagcccccacctggagctgagcagctgcagcaggccctggcccagctggatgaggaggacccctgctttgagttccggcagcagcagctgactgtgcaccgggtgcacgtgaccttcctgccccatgagcccccaccaccccggccccatgatgtgaccctggtggcccagctgtccatggaccggctgcagatgctggaggccctgtgccgccactggccaggccccatgagcctggccctgtacctgacagatgctgaggcccagcagttcctgcactttgtggaggccagccctgtgctggccgcccggcaggatgtggcctaccacgtggtgtaccgggagggccccctgtaccctgtgaaccagctgagaaatgtggccctggcccaggccctgaccccctacgtgttcctgagtgacatcgacttcctgcctgcctacagcctgtatgactacctgcgggccagcattgagcagctgggcctgggcagcaggaggaaggccgccctggtggtgcctgcctttgagaccctgcgctaccgcttctccttcccccacagcaaggtggagctgctggccctgctggatgctggcaccctgtacaccttccgctaccacgagtggccccggggccacgcccccacagattatgcccgctggagggaggcccaggccccctacagagtgcagtgggccgccaactatgagccctacgtggtggtgccccgggactgccccaggtatgaccccaggtttgtgggcttcggctggaacaaggtggcccacatcgtggagctggatgcccaggagtatgagctgctggtgctgcctgaggccttcaccatccacctgccccacgcccccagcctggacatcagccgcttccgcagcagccccacctacagagactgcctgcaggccctgaaggatgagttccaccaggacctgagccgccaccacggggccgccgccctgaagtacctgcctgccctgcagcagccccagagccctgcccggggctag

SEQ ID NO: 154260 - DNA, 870 bp, synthetic construct
  misc_feature 1..870: note = Description of Artificial Sequence: Synthetic coding sequence
  source 1..870: mol_type = other DNA
atgtggaggctgacagcccggcgggagctgctgagcctgcctgccaccagcctggccgaccaggacatcttcaatgctgtgatcaaggagcaccctggcctggtgcagaggctgccctgtgtgtggaatgtgcagctgagtgaccacaccctggccgagcgctgctacagcgaggccagtgacctgaaggtgatccactggaacagccccaagaagctgcgggtgaagaacaagcacgtggagttcttcaggaacttctacctgaccttcctggagtatgatggcaacctgctgcggcgggagctgtttgtgtgccccagccagcccccacctggagctgagcagctgcagcaggccctggcccagctggatgaggaggacccctgctttgagttccggcagcagcagctgactgtgcaccgggtgcacgtgaccttcctgccccatgagcccccaccaccccggccccatgatgtgaccctggtggcccagctgtccatggaccggctgcagatgctggaggccctgtgccgccactggccaggccccatgagcctggccctgtacctgacagatgctgaggcccagcagttcctgcactttgtggaggccagccctgtgctggccgcccggcaggatgtggcctaccacgtggtgtaccgggagggccccctgtaccctgtgaaccagctgagaaatgtggccctggcccaggccctgaccccctacgtgttcctgagtgacatcgacttcctgcctgcctacagcctgtatgactacctgcgggaggcccgggccggcttcaacagcagcagcacctgtggctgtgcccaccccagccaccaggcccgctggcccatggtggtgtag

SEQ ID NO: 154261 - DNA, 2166 bp, synthetic construct; identical to SEQ ID NO: 154259
  misc_feature 1..2166: note = Description of Artificial Sequence: Synthetic coding sequence
  source 1..2166: mol_type = other DNA

SEQ ID NO: 154262 - DNA, 2166 bp, synthetic construct; identical to SEQ ID NO: 154259
  misc_feature 1..2166: note = Description of Artificial Sequence: Synthetic coding sequence
  source 1..2166: mol_type = other DNA

SEQ ID NO: 154263 - DNA, 2073 bp, synthetic construct
  misc_feature 1..2073: note = Description of Artificial Sequence: Synthetic coding sequence
  source 1..2073: mol_type = other DNA
atgctgccccggggccggccccgggccctgggcgctgctgccctgctgctgctgctgctgctgctgggcttcctgctgtttgatggccgcctgcggcgggctgctgccctggatggagaccctggagctggccctggggaccacaacagaagtgactgtggcccccagcccccacctccacccaagtgtgagctgctgcacgtggccatcgtgtgtgccggccacaacagcagcagagatgtgatcaccctggtgaagtccatgctgttctacaggaagaaccccctgcacctgcacctggtgacagatgctgtggccaggaacatcctggagaccctcttccacacctggatggtgcctgctgtgcgggtgtccttctaccacgccgaccagctgaagccccaggtgtcctggatccccaacaagcactacagcggcctgtatggcctgatgaagctggtgctgcccagcgccctgcctgctgagctggcccgggtgattgtgctggacacagatgtgacctttgccagtgacatcagcgagctgtgggccctgtttgcccacttcagtgacacccaggccatcggcctggtggagaaccagagcgactggtacctgggcaacctgtggaagaaccaccggccctggccagccctgggccggggcttcaacacaggagtcatcctgctgcggctggaccggctgcggcaggccggctgggagcagatgtggaggctgacagcccggcgggagctgctgagcctgcctgccaccagcctggccgaccaggacatcttcaatgctgtgatcaaggagcaccctggcctggtgcagaggctgccctgtgtgtggaatgtgcagctgagtgaccacaccctggccgagcgctgctacagcgaggccagtgacctgaaggtgatccactggaacagccccaagaagctgcgggtgaagaacaagcacgtggagttcttcaggaacttctacctgaccttcctggagtatgatggcaacctgctgcggcgggagctgtttgtgtgccccagccagcccccacctggagctgagcagctgcagcaggccctggcccagctggatgaggaggacccctgctttgagttccggcagcagcagctgactgtgcaccgggtgcacgtgaccttcctgccccatgagcccccaccaccccggccccatgatgtgaccctggtggcccagctgtccatggaccggctgcagatgctggaggccctgtgccgccactggccaggccccatgagcctggccctgtacctgacagatgctgaggcccagcagttcctgcactttgtggaggccagccctgtgctggccgcccggcaggatgtggcctaccacgtggtgtaccgggagggccccctgtaccctgtgaaccagctgagaaatgtggccctggcccaggccctgaccccctacgtgttcctgagtgacatcgacttcctgcctgcctacagcctgtatgactacctgcgggccagcattgagcagctgggcctgggcagcaggaggaaggccgccctggtggtgcctgcctttgagaccctgcgctaccgcttctccttcccccacagcaaggtggagctgctggccctgctggatgctggcaccctgtacaccttccgctaccacgagtggccccggggccacgcccccacagattatgcccgctggagggaggcccaggccccctacagagtgcagtgggccgccaactatgagccctacgtggtggtgccccgggactgccccaggtatgaccccaggtttgtgggcttcggctggaacaaggtggcccacatcgtggagctggatgcccaggagtatgagctgctggtgctgcctgaggccttcaccatccacctgccccacgcccccagcctggacatcagccgcttccgcagcagccccacctacagagactgcctgcaggccctgaaggatgagttccaccaggacctgagccgccaccacggggctgctgccctgaagtacctgcctgccctgcagcagccccagagccctgcccggggctag

SEQ ID NO: 154264 - DNA, 1122 bp, synthetic construct
  misc_feature 1..1122: note = Description of Artificial Sequence: Synthetic coding sequence
  source 1..1122: mol_type = other DNA
atgagcatcctgatcatcgaggccttctacggcggcagccacaagcagctggtggacctgctgcaggaggagctgggggactgtgtggtgtacaccctgcctgccaagaagtggcactggagggcccggaccagcgccctgtacttcagccagaccatccccatcagcgagcactaccgcaccctgtttgccagctctgtgctgaacctgacagagctggccgccctgcggccagacctgggcaagctgaagaagatcctgtacttccacgagaaccagctgatctaccctgtgaagaagtgccaggagcgggacttccagtatggctacaaccagatcctgagctgcctggtggctgatgtggtggtgttcaacagcgtcttcaacatggagagcttcctgacctccatgggcaagttcatgaagctgatcccagaccaccggcccaaggacctggagagcatcatccggcccaagtgccaggtgatctacttccccatccgcttcccagatgtgagccgcttcatgcccaagcacaagaccacccacctgaagaagatgctgggcctgaagggaaatggaggagctgtgctgtccatggccctgcccttccagcctgagcagagggacagcgaggacctgctgaagaacttcaacagtgaatgtgacacccactgcggcctggacacagcccggcaggagtacctgggcaacagcctgcggcaggagagtgacctgaagaagagcaccagcagtgacaacagcagcagccaccacggggagaacaagcagaacctgactgtggacccctgtgacatcctgggcggcgtggacaaccagcagaggctgctgcacatcgtgtggccccaccgctggctggaggccgtgtactgcggctgctaccccctgtgccccaaggacctggtgtacccagagatcttccctgctgagtacctgtacagcaccccagagcagctgagcaagaggctgcagaacttctgcaagaggccagacatcatcaggaagcacctgtacaagggggagatcgcccccttctcctgggccgccctgcacggcaagttccgcagcctgctgaccacagagccccgggaggacctgtag

SEQ ID NO: 154265 - DNA, 1377 bp, synthetic construct
  misc_feature 1..1377: note = Description of Artificial Sequence: Synthetic coding sequence
  source 1..1377: mol_type = other DNA
atgagcatcctgatcatcgaggccttctacggcggcagccacaagcagctggtggacctgctgcaggaggagctgggggactgtgtggtgtacaccctgcctgccaagaagtggcactggagggcccggaccagcgccctgtacttcagccagaccatccccatcagcgagcactaccgcaccctgtttgccagctctgtgctgaacctgacagagctggccgccctgcggccagacctgggcaagctgaagaagatcctgtacttccacgagaaccagctgatctaccctgtgaagaagtgccaggagcgggacttccagtatggctacaaccagatcctgagctgcctggtggctgatgtggtggtgttcaacagcgtcttcaacatggagagcttcctgacctccatgggcaagttcatgaagctgatcccagaccaccggcccaaggacctggagagcatcatccggcccaagtgccaggtgatctacttccccatccgcttcccagatgtgagccgcttcatgcccaagcacaagaccacccacctgaagaagatgctgggcctgaagggaaatggaggagctgtgctgtccatggccctgcccttccagcctgagcagagggacagcgaggacctgctgaagaacttcaacagtgaatgtgacacccactgcggcctggacacagcccggcaggagtacctgggcaacagcctgcggcaggagagtgacctgaagaagagcaccagcagtgacaacagcagcagccaccacggggagaacaagcagaacctgactgtggacccctgtgacatcctgggcggcgtggacaaccagcagaggctgctgcacatcgtgtggccccaccgctgggagcatgacaaggaccctgagagcttcttcaaggtgctgatgcacctgaaggacctgggcctgaacttccacgtgtctgtgctgggggagaccttcacagatgtgcctgacatcttcagcgaggccaagaaggccctgggcagctctgtgctgcactggggctacctgcccagcaaggatgactacttccaggtgctgtgcatggctgatgtggtgatcagcacagccaagcatgagttctttggagtggccatgctggaggccgtgtactgcggctgctaccccctgtgccccaaggacctggtgtacccagagatcttccctgctgagtacctgtacagcaccccagagcagctgagcaagaggctgcagaacttctgcaagaggccagacatcatcaggaagcacctgtacaagggggagatcgcccccttctcctgggccgccctgcacggcaagttccgcagcctgctgaccacagagccccgggaggacctgtag

SEQ ID NO: 154266 - DNA, 1122 bp, synthetic construct; identical to SEQ ID NO: 154264
  misc_feature 1..1122: note = Description of Artificial Sequence: Synthetic coding sequence
  source 1..1122: mol_type = other DNA

SEQ ID NO: 154267 - DNA, 1377 bp, synthetic construct; identical to SEQ ID NO: 154265
  misc_feature 1..1377: note = Description of Artificial Sequence: Synthetic coding sequence
  source 1..1377: mol_type = other DNA

SEQ ID NO: 154268 - DNA, 1377 bp, synthetic construct; identical to SEQ ID NO: 154265
  misc_feature 1..1377: note = Description of Artificial Sequence: Synthetic coding sequence
  source 1..1377: mol_type = other DNA

SEQ ID NO: 154269 - DNA, 300 bp, synthetic construct
  misc_feature 1..300: note = Description of Artificial Sequence: Synthetic coding sequence
  source 1..300: mol_type = other DNA
atgagcatcctgatcatcgaggccttctacggcggcagccacaagcagctggtggacctgctgcaggaggagctgggggactgtgtggtgtacaccctgcctgccaagaagtggcactggagggcccggaccagcgccctgtacttcagccagaccatccccatcagcgagcactaccgcaccctgtttgccagctctgtgctgaacctgacagagctggccgccctgcggccagacctgggcaagctgaagaagatcctgtacttccacgagaaccagctgatctaccctgtgaagtag

SEQ ID NO: 154270 - DNA, 522 bp, synthetic construct
  misc_feature 1..522: note = Description of Artificial Sequence: Synthetic coding sequence
  source 1..522: mol_type = other DNA
atgagcatcctgatcatcgaggccttctacggcggcagccacaagcagctggtggacctgctgcaggaggagctgggggactgtgtggtgtacaccctgcctgccaagaagtggcactggagggcccggaccagcgccctgtacttcagccagaccatccccatcagcgagcactaccgcaccctgtttgccagctctgtgctgaacctgacagagctggccgccctgcggccagacctgggcaagctgaagaagatcctgtacttccacgagaaccagctgatctaccctgtgaagaagtgccaggagcgggacttccagtatggctacaaccagatcctgagctgcctggtggctgatgtggtggtgttcaacagcgtcttcaacatggagagcttcctgacctccatgggcaagttcatgaagctgatcccagaccaccggcccaaggacctggagagcatcatccggcccaagtgccaggtgatctacttccccatccgcttcccagatgtgtcctag

SEQ ID NO: 154271 - DNA, 1377 bp, synthetic construct; identical to SEQ ID NO: 154265
  misc_feature 1..1377: note = Description of Artificial Sequence: Synthetic coding sequence
  source 1..1377: mol_type = other DNA

SEQ ID NO: 154272 - DNA, 2220 bp, synthetic construct
  misc_feature 1..2220: note = Description of Artificial Sequence: Synthetic coding sequence
  source 1..2220: mol_type = other DNA
atgcccagccccaggcctgtgctgctgcggggggcccgggccgccctgctgctgctgctgcccccccggctgctggcccggcccagcctgctgctgcggcgcagcctgtctgctgccagctgcccccccatcagcctgcctgctgctgccagccgcagctccatggatggagctggagctgaggaggtgctggcccccctgcggctggccgtgcggcagcagggcgacctggtgaggaagctgaaggaggacaaggccccccaggtggatgtggacaaggctgtggccgagctgaaggccaggaagagggtgctggaggccaaggagctggccctgcagcccaaggatgacatcgtggaccgggccaagatggaggacaccctgaagaggcgcttcttctatgaccaggcctttgccatctatggaggagtgtctggcctgtatgactttggacctgtgggctgtgccctgaagaacaacatcatccagacctggaggcagcacttcatccaggaggagcagatcctggagattgactgcaccatgctgaccccagagcctgtgctgaagaccagcggccacgtggacaagtttgctgacttcatggtgaaggatgtgaagaatggagagtgcttccgggctgaccacctgctgaaggcccacctgcagaagctgatgtctgacaagaagtgcagcgtggagaagaagtctgagatggagagcgtgctggcccagctggacaactacggccagcaggagctggccgacctgtttgtgaactacaacgtgaagagccccatcactggaaatgacctgagcccccctgtgtccttcaacctgatgttcaagaccttcatcggccctgggggcaacatgcctggctacctgcggcctgagacagcccagggcatcttcctgaacttcaagaggctgctggagttcaaccagggcaagctgccctttgctgctgcccagatcggcaacagcttcagaaatgagatcagccccaggagcggcctcatccgggtgcgggagttcaccatggccgagattgagcactttgtggaccccagcgagaaggaccaccccaagttccagaatgtggccgacctgcacctgtacctgtacagcgccaaggcccaggtgtctggccagagcgccaggaagatgaggctgggagatgctgtggagcagggcgtcatcaacaacacagtgctgggctacttcatcggccgcatctacctgtacctgaccaaggtgggcatcagcccagacaagctgcgcttccggcagcacatggagaatgagatggcccactacgcctgtgactgctgggatgctgagagcaagaccagctatggctggattgagatcgtgggctgtgccgacaggagctgctatgacctgagctgccacgcccgggccaccaaggtgcccctggtggccgagaagcccctgaaggagcccaagacagtgaatgtggtgcagtttgagcccagcaaaggagccatcggcaaggcctacaagaaggatgccaagctggtgatggagtacctggccatctgtgatgagtgctacatcacagagatggagatgctgctgaatgaaaaaggagagttcaccatcgagacagagggcaagaccttccagctgaccaaggacatgatcaacgtgaagcgcttccagaagaccctgtatgtggaggaggtggtgcccaacgtgattgagcccagctttggcctgggccgcatcatgtacacagtgtttgagcacaccttccacgtgcgggagggagatgagcagaggaccttcttctccttccctgctgtggtggcccccttcaagtgcagcgtgctgcccctgagccagaaccaggagttcatgccctttgtgaaggagctgtctgaggccctgaccaggcatggagtgagccacaaggtggatgacagcagcggcagcatcggccgccgctatgccaggacagatgaaattggagtggccttcggcgtgaccatcgactttgacacagtgaacaagaccccccacacagccaccctgcgggaccgggacagcatgaggcagatccgggcagagatcagcgagctgcccagcatcgtgcaggacctggccaatggaaacatcacctgggcagatgtggaggcccgctaccccctgtttgagggccaggagaccgggaagaaggagaccatcgaggagtag

SEQ ID NO: 154273 - DNA, 555 bp, synthetic construct
  misc_feature 1..555: note = Description of Artificial Sequence: Synthetic coding sequence
  source 1..555: mol_type = other DNA
atggccgagccccagccccccagcggcggcctgacagatgaagctgccctgagctgctgcagtgatgctgaccccagcaccaaggacttcctgctgcagcagaccatgctgcgggtgaaggaccccaagaagagcctggacttctacaccagggtgctgggcatgaccctcatccagaagtgtgacttccccatcatgaagttcagcctgtacttcctggcctatgaggacaagaatgacatccccaaggagaaggatgagaagatcgcctgggccctgagcaggaaggccaccctggagctgacccacaactggggcacagaagatgatgagacccagagctaccacaatggaaacagcgacccccggggcttcggccacatcggcattgctgtgcctgatgtgtacagcgcctgcaagagatttgaggagctgggcgtgaagtttgtgaagaagccagatgatggcaagatgaagggcctggccttcatccaggaccctgatggctactggattgagatcctgaaccccaacaagatggccaccctgatgtag

SEQ ID NO: 154274 - DNA, 987 bp, synthetic construct
  misc_feature 1..987: note = Description of Artificial Sequence: Synthetic coding sequence
  source 1..987: mol_type = other DNA
atgaggcctgtgcggctgatgaaggtgtttgtgacccggcgcatcccagctgagggccgggtggccctggcccgggctgctgactgtgaggtggagcagtgggacagtgatgagcccatcccagccaaggagctggagcggggcgtggccggggcccacggcctgctgtgcctgctgagtgaccacgtggacaagaggatcctggatgctgctggggccaacctgaaggtgatcagcaccatgtctgtgggcatcgaccacctggccctggatgagatcaagaagaggggcatccgggtgggctacaccccagatgtgctgacagacaccacagctgagctggccgtgtccctgctgctgaccacctgccggcggctgcctgaggccatcgaggaggtgaagaatggaggctggacctcctggaagcccctgtggctgtgtggctacggcctgacccagagcacagtgggcatcatcggcctgggccgcatcggccaggccatcgcccggcggctgaagccctttggagtgcagcgcttcctgtacacaggccggcagcccaggcctgaggaggccgctgagttccaggccgagtttgtgtccaccccagagctggccgcccagagcgacttcatcgtggtggcctgcagcctgaccccagccacagagggcctgtgcaacaaggacttcttccagaagatgaaggagacagctgtgttcatcaacatcagcagaggagatgtggtgaaccaggatgacctgtaccaggccctggccagcggcaagattgctgctgctggcctggatgtgaccagccctgagcccctgcccaccaaccaccccctgctgaccctgaagaactgtgtgatcctgccccacatcggcagcgccacccacaggaccaggaacaccatgagcctgctggccgccaacaacctgctggccggcctgcggggggagcccatgcccagcgagctgaagctgtag

SEQ ID NO: 154275 - DNA, 1188 bp, synthetic construct
  misc_feature 1..1188: note = Description of Artificial Sequence: Synthetic coding sequence
  source 1..1188: mol_type = other DNA
atgaggcctgtgcggctgatgaaggtgtttgtgacccggcgcatcccagctgagggccgggtggccctggcccgggctgctgactgtgaggtggagcagtgggacagtgatgagcccatcccagccaaggagctggagcggggcgtggccggggcccacggcctgctgtgcctgctgagtgaccacgtggacaagaggatcctggatgctgctggggccaacctgaaggtgatcagcaccatgtctgtgggcatcgaccacctggccctggatgagatcaagaagaggggcatccgggtgggctacaccccagatgtgctgacagacaccacagctgagctggccgtgtccctgctgctgaccacctgccggcggctgcctgaggccatcgaggaggtgaagaatggaggctggacctcctggaagcccctgtggctgtgtggctacggcctgacccagagcacagtgggcatcatcggcctgggccgcatcggccaggccatcgcccggcggctgaagccctttggagtgcagcgcttcctgtacacaggccggcagcccaggcctgaggaggccgctgagttccaggccgagtttgtgtccaccccagagctggccgcccagagcgacttcatcgtggtggcctgcagcctgaccccagccacagagggcctgtgcaacaaggacttcttccagaagatgaaggagacagctgtgttcatcaacatcagccgctacccccgggccaccctgcccagcaagccaggagaggagcccagccccctgctgcccagcggggacttcctgccccggggcctgctggtgcggccccaggccgagctggccggcttccacaagcccaacaaccagctgaggaacagctgggagtacacccggcccccctaccgggaggaggagcccagcgagtgggcctggcctgtgtgcttctctgctgtggcccccacccggcggggcctggcccacagctctgtggccagcggctctgtgccccgggagcccctgcaggcccactaccccccaccccagagagctggcctggaggacctgaagggccccctggaggccgccagccacacagctgagcccggctttgtgtggctgtggttcagtgacaccctgaacctgatgctgctgggcggccagaccctgaagctgacctggagctag

SEQ ID NO: 154276 - DNA, 759 bp, synthetic construct
  misc_feature 1..759: note = Description of Artificial Sequence: Synthetic coding sequence
  source 1..759: mol_type = other DNA
atgctgggcggcgtgcccaccctgtgtggcactggaaatgagacctggaccctgctggccctgggccaggccatcgcccggcggctgaagcccttcggcgtgcagcgcttcctgtacacaggccggcagcccaggcctgaggaggccgctgagttccaggccgagtttgtgtccaccccagagctggccgcccagagcgacttcatcgtggtggcctgcagcctgaccccagccacagagggcctgtgcaacaaggacttcttccagaagatgaaggagacagctgtgttcatcaacatcagccgctacccccgggccaccctgcccagcaagccaggagaggagcccagccccctgctgcccagcggggacttcctgccccggggcctgctggtgcggccccaggccgagctggccggcttccacaagcccaacaaccagctgagaaattcctgggagtacaccaggcctccctaccgggaggaggagcccagcgagtgggcctggcctgtgtgcttctctgctgtggcccccacccggcggggcctggcccacagctctgtggccagcggctctgtgccccgggagcccctgcaggcccactaccccccaccccagagagctggcctggaggacctgaagggccccctggaggccgccagccacacagctgagcccggctttgtgtggctgtggttcagtgacaccctgaacctgatgctgctgggcggccagaccctgaagctgacctggagctag

SEQ ID NO: 154277 - DNA, 1677 bp, synthetic construct
  misc_feature 1..1677: note = Description of Artificial Sequence: Synthetic coding sequence
  source 1..1677: mol_type = other DNA
atggagctgcgggcccggggctggtggctgctgtgtgccgctgctgccctggtggcctgtgcccggggggaccctgccagcaagagccgcagctgtggggaggtgcggcagatctatggagccaagggcttcagcctgagtgatgtgccccaggccgagatctctggagagcacctgcgcatctgcccccagggctacacctgctgcaccagcgagatggaggagaacctggccaacagaagccatgctgagctggagacagccctgcgggacagcagccgggtgctgcaggccatgctggccacccagctgcggagctttgatgaccacttccagcacctgctgaatgacagcgagaggaccctgcaggccaccttccctggggccttcggggagctgtacacccagaatgcccgggccttccgggacctgtacagcgagctgcggctgtactacagaggagccaacctgcacctggaggagaccctggccgagttctgggcccggctgctggagcggctcttcaagcagctgcacccccagctgctgctgcctgatgactacctggactgcctgggcaagcaggccgaggccctgcggccctttggagaggccccccgggagctgcggctgcgggccacccgggcctttgtggccgcccggagctttgtgcagggcctgggcgtggccagtgatgtggtgaggaaggtggcccaggtgcccctgggcccagaatgttccagagctgtgatgaagctggtgtactgtgcccactgcctgggcgtgcctggggcccggccctgcccagactactgcagaaatgtgctgaagggctgcctggccaaccaggccgacctggatgctgagtggaggaacctgctggacagcatggtgctgatcacagacaagttctggggcaccagcggcgtggagagcgtcatcggctctgtgcacacctggctggccgaggccatcaatgccctgcaggacaacagagacaccctgacagccaaggtgatccagggctgcggcaaccccaaggtgaacccccagggccctggccctgaggagaagagaagaagaggcaagctggccccccgggagcggccccccagcggcaccctggagaagctggtgtctgaggccaaggcccagctgagagatgtgcaggacttctggatcagcctgcccggcaccctgtgcagcgagaagatggccctgagcacagccagtgatgaccgctgctggaatggcatggcccggggccgctacctgcctgaggtgatgggagatggcctggccaaccagatcaacaaccctgaggtggaggtggacatcaccaagccagacatgaccatccggcagcagatcatgcagctgaagatcatgaccaaccggctgcggagcgcctacaatggaaatgatgtggacttccaggatgccagtgatgatggcagcggcagcggcagcggagatggctgcctggatgacctgtgcagcaggaaggtgtccaggaagagcagcagcagcaggacccccctgacccacgccctgcccggcctgtctgagcaggagggccagaagaccagcgctgccagctgcccccagccccccaccttcctgctgcccctgctgctcttcctggccctgactgtggcccggccccgctggaggtag

SEQ ID NO: 154278 - DNA, 1743 bp, synthetic construct
  misc_feature 1..1743: note = Description of Artificial Sequence: Synthetic coding sequence
  source 1..1743: mol_type = other DNA
atggccggcaccgtgaggacagcctgcctggtggtggccatgctgctgagcctggacttccctggccaggcccagcccccacctcctcctccagatgccacctgccaccaggtgcgctccttcttccagaggctgcagcccggcctgaagtgggtgcctgagacccctgtgcccggcagtgacctgcaggtgtgcctgcccaagggccccacctgctgcagcaggaagatggaggagaagtaccagctgacagcccggctgaacatggagcagctgctgcagagcgcctccatggagctgaagttcctgatcatccagaatgctgctgtgttccaggaggcctttgaaattgtggtgagacatgccaagaactacaccaatgccatgttcaagaacaactaccccagcctgaccccccaggcctttgaatttgtgggggagttcttcacagatgtgtccctgtacatcctgggcagtgacatcaacgtggatgacatggtgaatgagctgtttgacagcctcttccctgtgatctacacccagctgatgaaccctggcctgcctgacagcgccctggacatcaatgaatgtctgcggggggcccggcgggacctgaaggtgtttggaaacttccccaagctgatcatgacccaggtgtccaagagcctgcaggtgacccgcatcttcctgcaggccctgaacctgggcattgaagtcatcaacaccacagaccacctgaagttcagcaaggactgtggccgcatgctgaccaggatgtggtactgcagctactgccagggcctgatgatggtgaagccctgtggcggctactgcaatgtggtgatgcagggctgcatggccggcgtggtggagattgacaagtactggagggagtacatcctgagcctggaggagctggtgaatggcatgtaccgcatctatgacatggagaatgtgctgctgggcctcttcagcaccatccatgacagcatccagtatgtgcagaagaatgctgggaagctgaccaccaccatcggcaagctgtgtgcccacagccagcagaggcagtacagaagtgcctactacccagaggacctcttcatcgacaagaaggtgctgaaggtggcccacgtggagcacgaggagaccctgagcagcagaagaagagagctgatccagaagctgaagagcttcatctccttctacagcgccctgcccggctacatctgcagccacagccctgtggctgaaaatgacaccctgtgctggaatggccaggagctggtggagcgctacagccagaaggccgccagaaatggcatgaagaaccagttcaacctgcacgagctgaagatgaagggccctgagcctgtggtgtcccagatcatcgacaagctgaagcacatcaaccagctgctgcggaccatgtccatgcccaagggccgggtgctggacaagaacctggatgaggagggctttgaaagtggggactgtggagatgatgaagatgagtgcatcggcggcagcggagatggcatgatcaaggtgaagaaccagctgcgcttcctggccgagctggcctatgacctggatgtggatgatgcccctggcaacagccagcaggccacccccaaggacaatgagatcagcaccttccacaacctgggcaatgtgcacagccccctgaagctgctgacctccatggccatctctgtggtgtgcttcttcttcctggtgcactag

SEQ ID NO: 154279 - DNA, 1812 bp, synthetic construct
  misc_feature 1..1812: note = Description of Artificial Sequence: Synthetic coding sequence
  source 1..1812: mol_type = other DNA
atggccggcaccgtgaggacagcctgcctggtggtggccatgctgctgagcctggacttccctggccaggcccagcccccacctcctcctccagatgccacctgccaccaggtgcgctccttcttccagaggctgcagcccggcctgaagtgggtgcctgagacccctgtgcccggcagtgacctgcaggtgtgcctgcccaagggccccacctgctgcagcaggaagatggaggagaagtaccagctgacagcccggctgaacatggagcagctgctgcagagcgcctccatggagctgaagttcctgatcatccagaatgctgctgtgttccaggaggcctttgaaattgtggtgagacatgccaagaactacaccaatgccatgttcaagaacaactaccccagcctgaccccccaggcctttgaatttgtgggggagttcttcacagatgtgtccctgtacatcctgggcagtgacatcaacgtggatgacatggtgaatgagctgtttgacagcctcttccctgtgatctacacccagctgatgaaccctggcctgcctgacagcgccctggacatcaatgaatgtctgcggggggcccggcgggacctgaaggtgtttggaaacttccccaagctgatcatgacccaggtgtccaagagcctgcaggtgacccgcatcttcctgcaggccctgaacctgggcattgaagtcatcaacaccacagaccacctgaagttcagcaaggactgtggccgcatgctgaccaggatgtggtactgcagctactgccagggcctgatgatggtgaagccctgtggcggctactgcaatgtggtgatgcagggctgcatggccggcgtggtggagattgacaagtactggagggagtacatcctgagcctggaggagctggtgaatggcatgtaccgcatctatgacatggagaatgtgctgctgggcctcttcagcaccatccatgacagcatccagtatgtgcagaagaatgctgggaagctgaccaccacagaaacagagaagaagatctggcacttcaagtaccccatcttcttcctgtgcatcggcctggacctgcagatcggcaagctgtgtgcccacagccagcagaggcagtaccgcagcgcctactacccagaagatctcttcatcgacaagaaggtgctgaaggtggcccacgtggagcacgaggagaccctgagcagcagaagaagagagctgatccagaagctgaagagcttcatctccttctacagcgccctgcccggctacatctgcagccacagccctgtggccgagaatgacaccctgtgctggaatggccaggagctggtggagcgctacagccagaaggccgccagaaatggcatgaagaaccagttcaacctgcacgagctgaagatgaagggccctgagcctgtggtgtcccagatcatcgacaagctgaagcacatcaaccagctgctgcggaccatgtccatgcccaagggccgggtgctggacaagaacctggatgaggagggctttgagagcggggactgtggagatgatgaagatgaatgtattggaggcagcggagatggcatgatcaaggtgaagaaccagctgcgcttcctggccgagctggcctatgacctggatgtggatgatgcccctggcaacagccagcaggccacccccaaggacaatgagatcagcaccttccacaacctgggcaatgtgcacagccccctgaagctgctgacctccatggccatctctgtggtgtgcttcttcttcctggtgcactag

SEQ ID NO: 154280 - DNA, 771 bp, synthetic construct
  misc_feature 1..771: note = Description of Artificial Sequence: Synthetic coding sequence
  source 1..771: mol_type = other DNA
tgaaaaccctgtggcggctactgcaatgtggtgatgcagggctgcatggccggcgtggtggagattgacaagtactggagggagtacatcctgagcctggaggagctggtgaatggcatgtaccgcatctatgacatggagaatgtgctgctgggcctcttcagcaccatccatgacagcatccagtatgtgcagaagaatgctgggaagctgaccaccaccatcggcaagctgtgtgcccacagccagcagaggcagtacagaagtgcctactacccagaggacctcttcatcgacaagaaggtgctgaaggtggcccacgtggagcacgaggagaccctgagcagcagaagaagagagctgatccagaagctgaagagcttcatctccttctacagcgccctgcccggctacatctgcagccacagccctgtggctgaaaatgacaccctgtgctggaatggccaggagctggtggagcgctacagccagaaggccgccagaaatggcatgaagaaccagttcaacctgcacgagctgaagatgaagggccctgagcctgtggtgtcccagatcatcgacaagctgaagcacatcaaccagctgctgcggaccatgtccatgcccaagggccgggtgctggacaagaacctggatgaggagggctttgaaagtggggactgtggagatgatgaagatgagtgcatcggcggcagcggagatggcatgatcaaggtgaagaaccagctgcgcttcctggccggcaactag

SEQ ID NO: 154281 - DNA, 1581 bp, synthetic construct
  misc_feature 1..1581: note = Description of Artificial Sequence: Synthetic coding sequence
  source 1..1581: mol_type = other DNA
atggccggcaccgtgaggacagcctgcctggtggtggccatgctgctgagcctggacttccctggccaggcccagcccccacctcctcctccagatgccacctgccaccaggtgcgctccttcttccagaggctgcagcccggcctgaagtgggtgcctgagacccctgtgcctgaggcctttgaaattgtggtgagacatgccaagaactacaccaatgccatgttcaagaacaactaccccagcctgaccccccaggcctttgaatttgtgggggagttcttcacagatgtgtccctgtacatcctgggcagtgacatcaacgtggatgacatggtgaatgagctgtttgacagcctcttccctgtgatctacacccagctgatgaaccctggcctgcctgacagcgccctggacatcaatgaatgtctgcggggggcccggcgggacctgaaggtgtttggaaacttccccaagctgatcatgacccaggtgtccaagagcctgcaggtgacccgcatcttcctgcaggccctgaacctgggcattgaagtcatcaacaccacagaccacctgaagttcagcaaggactgtggccgcatgctgaccaggatgtggtactgcagctactgccagggcctgatgatggtgaagccctgtggcggctactgcaatgtggtgatgcagggctgcatggccggcgtggtggagattgacaagtactggagggagtacatcctgagcctggaggagctggtgaatggcatgtaccgcatctatgacatggagaatgtgctgctgggcctcttcagcaccatccatgacagcatccagtatgtgcagaagaatgctgggaagctgaccaccaccatcggcaagctgtgtgcccacagccagcagaggcagtacagaagtgcctactacccagaggacctcttcatcgacaagaaggtgctgaaggtggcccacgtggagcacgaggagaccctgagcagcagaagaagagagctgatccagaagctgaagagcttcatctccttctacagcgccctgcccggctacatctgcagccacagccctgtggctgaaaatgacaccctgtgctggaatggccaggagctggtggagcgctacagccagaaggccgccagaaatggcatgaagaaccagttcaacctgcacgagctgaagatgaagggccctgagcctgtggtgtcccagatcatcgacaagctgaagcacatcaaccagctgctgcggaccatgtccatgcccaagggccgggtgctggacaagaacctggatgaggagggctttgaaagtggggactgtggagatgatgaagatgagtgcatcggcggcagcggagatggcatgatcaaggtgaagaaccagctgcgcttcctggccgagctggcctatgacctggatgtggatgatgcccctggcaacagccagcaggccacccccaaggacaatgagatcagcaccttccacaacctgggcaatgtgcacagccccctgaagctgctgacctccatggccatctctgtggtgtgcttcttcttcctggtgcactag

SEQ ID NO: 154282 - DNA, 1671 bp, synthetic construct
  misc_feature 1..1671: note = Description of Artificial Sequence: Synthetic coding sequence
  source 1..1671: mol_type = other DNA
atggcccgcttcggcctgcctgccctgctgtgcaccctggccgtgctgtctgctgccctgctggccgctgagctgaagagcaagagctgcagcgaggtgcggcggctgtatgtgtccaagggcttcaacaagaatgatgcccccctgcacgagatcaatggagaccacctgaagatctgcccccagggcagcacctgctgcagccaggagatggaggagaagtacagcctgcagagcaaggatgacttcaagtctgtggtgtctgagcagtgcaaccacctgcaggccgtgtttgccagccgctacaagaagtttgatgagttcttcaaggagctgctggagaatgctgagaagagcctgaatgacatgtttgtgaagacctacggccacctgtacatgcagaacagcgagctgttcaaggacctgtttgtggagctgaagcgctactacgtggtgggcaatgtgaacctggaggagatgctgaatgacttctgggcccggctgctggagaggatgttccggctggtgaacagccagtaccacttcacagatgagtacctggagtgtgtgtccaagtacacagagcagctgaagccctttggagatgtgcccaggaagctgaagctgcaggtgacccgggcctttgtggccgcccggacctttgcccagggcctggccgtggccggagatgtggtgtccaaggtgtctgtggtgaaccccacagcccagtgcacccacgccctgctgaagatgatctactgcagccactgccggggcctggtgacagtgaagccctgctacaactactgcagcaacatcatgaggggctgcctggccaaccagggcgacctggactttgagtggaacaacttcattgatgccatgctgatggtggccgagcggctggagggccccttcaacatcgagagcgtgatggaccccattgatgtgaagatcagtgatgccatcatgaacatgcaggacaacagcgtgcaggtgtcccagaaggtgttccagggctgcggcccccccaagcccctgcctgctggccgcatcagccgcagcatcagcgagagcgccttcagcgcccgcttccggccccaccaccctgaggagcggcccaccacagctgctggcaccagcctggaccggctggtgacagatgtgaaggagaagctgaagcaggccaagaagttctggagcagcctgcccagcaatgtgtgcaatgatgagaggatggctgctggaaatggaaatgaagatgactgctggaatggcaagggcaagagccgctacctgtttgctgtgactggaaatggcctggccaaccagggcaacaaccctgaggtgcaggtggacaccagcaagccagacatcctgatcctgcggcagatcatggccctgcgggtgatgaccagcaagatgaagaatgcctacaatggaaatgatgtggacttctttgacatcagtgatgagagcagcggggagggcagcggcagcggctgtgagtaccagcagtgccccagcgagtttgactacaatgccacagaccatgctgggaagagcgccaatgagaaggctgacagcgctggggtgcggcctggggcccaggcctacctgctgaccgtcttctgcatcctcttcctggtgatgcagcgggagtggaggtag

SEQ ID NO: 154283 - DNA, 1461 bp, synthetic construct
  misc_feature 1..1461: note = Description of Artificial Sequence: Synthetic coding sequence
  source 1..1461: mol_type = other DNA
atggaggagaagtacagcctgcagagcaaggatgacttcaagtctgtggtgtctgagcagtgcaaccacctgcaggccgtgtttgccagccgctacaagaagtttgatgagttcttcaaggagctgctggagaatgctgagaagagcctgaatgacatgtttgtgaagacctacggccacctgtacatgcagaacagcgagctgttcaaggacctgtttgtggagctgaagcgctactacgtggtgggcaatgtgaacctggaggagatgctgaatgacttctgggcccggctgctggagaggatgttccggctggtgaacagccagtaccacttcacagatgagtacctggagtgtgtgtccaagtacacagagcagctgaagccctttggagatgtgcccaggaagctgaagctgcaggtgacccgggcctttgtggccgcccggacctttgcccagggcctggccgtggccggagatgtggtgtccaaggtgtctgtggtgaaccccacagcccagtgcacccacgccctgctgaagatgatctactgcagccactgccggggcctggtgacagtgaagccctgctacaactactgcagcaacatcatgaggggctgcctggccaaccagggcgacctggactttgagtggaacaacttcattgatgccatgctgatggtggccgagcggctggagggccccttcaacatcgagagcgtgatggaccccattgatgtgaagatcagtgatgccatcatgaacatgcaggacaacagcgtgcaggtgtcccagaaggtgttccagggctgcggcccccccaagcccctgcctgctggccgcatcagccgcagcatcagcgagagcgccttcagcgcccgcttccggccccaccaccctgaggagcggcccaccacagctgctggcaccagcctggaccggctggtgacagatgtgaaggagaagctgaagcaggccaagaagttctggagcagcctgcccagcaatgtgtgcaatgatgagaggatggctgctggaaatggaaatgaagatgactgctggaatggcaagggcaagagccgctacctgtttgctgtgactggaaatggcctggccaaccagggcaacaaccctgaggtgcaggtggacaccagcaagccagacatcctgatcctgcggcagatcatggccctgcgggtgatgaccagcaagatgaagaatgcctacaatggaaatgatgtggacttctttgacatcagtgatgagagcagcggggagggcagcggcagcggctgtgagtaccagcagtgccccagcgagtttgactacaatgccacagaccatgctgggaagagcgccaatgagaaggctgacagcgctggggtgcggcctggggcccaggcctacctgctgaccgtcttctgcatcctcttcctggtgatgcagcgggagtggaggtag

SEQ ID NO: 154284 - DNA, 1653 bp, synthetic construct
  misc_feature 1..1653: note = Description of Artificial Sequence: Synthetic coding sequence
  source 1..1653: mol_type = other DNA
atggcccgcttcggcctgcctgccctgctgtgcaccctggccgtgctgtctgctgccctgctggccgctgagctgaagagcaagagctgcagcgaggtgcggcggctgtatgtgtccaagggcttcaacaagaatgatgcccccctgcacgagatcaatggagaccacgaggacctgagccctggcttctacctgctgctgagcagagatggcggctacagcctgcagagcaaggatgacttcaagtctgtggtgtctgagcagtgcaaccacctgcaggccgtgtttgccagccgctacaagaagtttgatgagttcttcaaggagctgctggagaatgctgagaagagcctgaatgacatgtttgtgaagacctacggccacctgtacatgcagaacagcgagctgttcaaggacctgtttgtggagctgaagcgctactacgtggtgggcaatgtgaacctggaggagatgctgaatgacttctgggcccggctgctggagaggatgttccggctggtgaacagccagtaccacttcacagatgagtacctggagtgtgtgtccaagtacacagagcagctgaagccctttggagatgtgcccaggaagctgaagctgcaggtgacccgggcctttgtggccgcccggacctttgcccagggcctggccgtggccggagatgtggtgtccaaggtgtctgtgcccagctgcacccacgccctgctgaagatgatctactgcagccactgccggggcctggtgacagtgaagccctgctacaactactgcagcaacatcatgaggggctgcctggccaaccagggcgacctggactttgagtggaacaacttcattgatgccatgctgatggtggccgagcggctggagggccccttcaacatcgagagcgtgatggaccccattgatgtgaagatcagtgatgccatcatgaacatgcaggacaacagcgtgcaggtgtcccagaaggtgttccagggctgcggcccccccaagcccctgcctgctggccgcatcagccgcagcatcagcgagagcgccttcagcgcccgcttccggccccaccaccctgaggagcggcccaccacagctgctggcaccagcctggaccggctggtgacagatgtgaaggagaagctgaagcaggccaagaagttctggagcagcctgcccagcaatgtgtgcaatgatgagaggatggctgctggaaatggaaatgaagatgactgctggaatggcaagggcaagagccgctacctgtttgctgtgactggaaatggcctggccaaccagggcaacaaccctgaggtgcaggtggacaccagcaagccagacatcctgatcctgcggcagatcatggccctgcgggtgatgaccagcaagatgaagaatgcctacaatggaaatgatgtggacttctttgacatcagtgatgagagcagcggggagggcagcggcagcggctgtgagtaccagcagtgccccagcgagtttgactacaatgccacagaccatgctgggaagagcgccaatgagaaggctgacagcgctggggtgcggcctggggcccaggcctacctgctgaccgtcttctgcatcctcttcctggtgatgcagcgggagtggaggtag

SEQ ID NO: 154285 - DNA, 1719 bp, synthetic construct
  misc_feature 1..1719: note = Description of Artificial Sequence: Synthetic coding sequence
  source 1..1719: mol_type = other DNA
atggatgcccagacctggcctgtgggcttccgctgcctgctgctgctggccctggtgggcagcgcccggtctgagggcgtgcagacctgtgaggaggtgaggaagctgttccagtggaggctgctgggcgctgtgcggggcctgcctgacagcccccgggccggccctgacctgcaggtgtgcatcagcaagaagcccacctgctgcaccaggaagatggaggagcgctaccagattgctgcccggcaggacatgcagcagttcctgcagaccagcagcagcaccctgaagttcctgatcagcagaaatgctgctgccttccaggagaccctggagaccctcatcaagcaggccgagaactacaccagcatcctcttctgcagcacctacagaaacatggccctggaggccgccgcctctgtgcaggagttcttcacagatgtgggcctgtacctgtttggagcagatgtgaaccctgaggagtttgtgaaccgcttctttgacagcctcttccccctggtgtacaaccacctgatcaaccctggggtgacagacagcagcctggagtacagcgagtgcatccgcatggccaggagagatgtgagccccttcggcaacatcccccagagggtgatgggccagatgggccgcagcctgctgcccagcaggaccttcctgcaggccctgaacctgggcattgaagtcatcaacaccacagactacctgcacttcagcaaagaatgttcccgggccctgctgaagatgcagtactgcccccactgccagggcctggccctgaccaagccctgcatgggctactgcctgaatgtgatgaggggctgcctggcccacatggccgagctgaacccccactggcacgcctacatccgcagcctggaggagctgagtgatgccatgcacggcacctatgacatcggccacgtgctgctgaacttccacctgctggtgaatgatgctgtgctgcaggcccacctgaatggccagaagctgctggagcaggtgaaccgcatctgtggccggcctgtgaggacccccacccagagcccccgctgcagctttgaccagagcaaggagaagcacggcatgaagaccaccaccaggaacagcgaggagaccctggccaacagaaggaaggagttcatcaacagcctgcggctgtaccgctccttctacggcggcctggccgaccagctgtgtgccaatgagctggccgctgctgatggcctgccctgctggaatggagaggacatcgtgaagagctacacccagagggtggtgggcaatggcatcaaggcccagagcggcaaccctgaggtgaaggtgaagggcattgatcctgtgatcaaccagatcatcgacaagctgaagcacgtggtgcagctgctgcagggccgcagccccaagccagacaagtgggagctgctgcagctgggcagcggcggcggcatggtggagcaggtgtctggggactgtgatgatgaagatggctgcggcggcagcggcagcggggaggtgaagaggaccctgaagatcacagactggatgccagatgacatgaacttcagtgatgtgaagcagatccaccagacagacaccggcagcaccctggacaccaccggggccggctgtgctgtggccacagagagcatgaccttcaccctcatctctgtggtgatgctgctgcccggcatctggtag

SEQ ID NO: 154286 - DNA, 1668 bp, synthetic construct
  misc_feature 1..1668: note = Description of Artificial Sequence: Synthetic coding sequence
  source 1..1668: mol_type = other DNA
atgcccagctggattggagctgtgatcctgcccctgctgggcctgctgctgagcctgcctgctggagcagatgtgaaggcccggagctgtggggaggtgcggcaggcctatggagccaagggcttcagcctggccgacatcccctaccaggagattgctggggagcacctgcgcatctgcccccaggagtacacctgctgcaccacagagatggaggacaagctgagccagcagagcaagctggagtttgagaacctggtggaggagaccagccactttgtgaggaccacctttgtgagccgccacaagaagtttgatgagttcttccgggagctgctggagaatgctgagaagagcctgaatgacatgtttgtgaggacctacggcatgctgtacatgcagaacagcgaggtgttccaggacctcttcacagagctgaagcgctactacacaggaggaaatgtgaacctggaggagatgctgaatgacttctgggcccggctgctggagaggatgttccagctgatcaacccccagtaccacttcagcgaggactacctggagtgtgtgtccaagtacacagaccagctgaagccctttggagatgtgcccaggaagctgaagatccaggtgacccgggccttcatcgccgcccggacctttgtgcagggcctgactgtgggccgggaggtggccaacagagtgtccaaggtgagccccaccccaggctgcatccgggccctgatgaagatgctgtactgcccctactgccggggcctgcccaccgtgcggccctgcaacaactactgcctgaatgtgatgaagggctgcctggccaaccaggccgacctggacacagagtggaacctcttcattgatgccatgctgctggtggccgagcggctggagggccccttcaacatcgagagcgtgatggaccccattgatgtgaagatcagcgaggccatcatgaacatgcaggagaacagcatgcaggtgtctgccaaggtgttccagggctgcggccagcccaagccagccccagccctgcggagcgcccggagcgcccctgagaacttcaacacccgcttccggccctacaaccctgaggagcggcccaccacagctgctggcaccagcctggaccggctggtgacagacatcaaggagaagctgaagctgagcaagaaggtgtggagcgccctgccctacaccatctgcaaggatgaatctgtgacagctggcaccagcaatgaggaggagtgctggaatggccacagcaaggcccgctacctgcctgagatcatgaatgatggcctgaccaaccagatcaacaaccctgaggtggatgtggacatcaccaggccagacaccttcatccggcagcagatcatggccctgcgggtgatgaccaacaagctgaagaatgcctacaatggaaatgatgtgaacttccaggacaccagtgatgagagcagcggcagcggcagcggcagcggctgcatggatgatgtgtgccccacagaatttgaatttgtgaccacagaggccccagctgtggaccctgaccggcgggaggtggacagcagcgctgcccagaggggccacagcctgctgtcctggagcctgacctgcatcgtgctggccctgcagaggctgtgcaggtag

SEQ ID NO: 154287 - DNA, 582 bp, synthetic construct
  misc_feature 1..582: note = Description of Artificial Sequence: Synthetic coding sequence
  source 1..582: mol_type = other DNA
atgcagagcctgatgcaggcccccctgctgattgccctgggcctgctgctggccgccccagcccaggcccacctgaagaagcccagccagctgagcagcttctcctgggacaactgtgatgagggcaaggaccctgctgtgatccgcagcctgaccctggagccagaccccatcatcgtgcctggaaatgtgaccctgtctgtgatgggcagcacctctgtgcccctgagcagccccctgaaggtggacctggtgctggagaaggaggtggccggcctgtggatcaagatcccctgcacagactacatcggcagctgcacctttgagcacttctgtgatgtgctggacatgctgatccccactggagagccctgcccagagcccctgcggacctacggcctgccctgccactgccccttcaaggagggcacctacagcctgcccaagtcagaatttgtggtgcctgacctggagctgcccagctggctgaccactggaaactaccgcatcgagagcgtgctgagcagcagcggcaagaggctgggctgcatcaagattgctgccagcctgaagggcatctag

SEQ ID NO: 154288 - DNA, 1140 bp, synthetic construct
  misc_feature 1..1140: note = Description of Artificial Sequence: Synthetic coding sequence
  source 1..1140: mol_type = other DNA
atgggctgcctgggcaacagcaagacagaggaccagagaaatgaggagaaggcccagcgggaggccaacaagaagattgagaagcagctgcagaaggacaagcaggtgtaccgggccacccaccggctgctgctgctgggcgctggggagagcggcaagagcaccatcgtgaagcagatgaggatcctgcacgtgaatggcttcaatggagatgagaaggccaccaaggtgcaggacatcaagaacaacctgaaggaggccatcgagaccatcgtggccgccatgagcaacctggtgccccctgtggagctggccaaccctgagaaccagttccgggtggactacatcctgtctgtgatgaatgtgcctgactttgacttccccccagagttctatgagcacgccaaggccctgtgggaggatgaaggagtgcgggcctgctatgaaagaagcaatgagtaccagctgattgactgtgcccagtacttcctggacaagattgatgtgatcaagcaggccgactatgtgcccagcgaccaggacctgctgcgctgccgggtgctgaccagcggcatctttgagaccaagttccaggtggacaaggtgaacttccacatgtttgatgtgggcggccagagagatgagaggaggaagtggatccagtgcttcaatgatgtgacagccatcatctttgtggtggccagcagcagctacaacatggtgatccgggaggacaaccagaccaaccggctgcaggaggccctgaacctcttcaagagcatctggaacaaccgctggctgcggaccatcagcgtcatcctcttcctgaacaagcaggacctgctggccgagaaggtgctggccggcaagagcaagattgaggactacttccctgagtttgcccgctacaccaccccagaagatgccaccccagagcctggagaggacccccgggtgacccgggccaagtacttcatcagagatgagttcctgcgcatcagcacagccagcggagatggccgccactactgctacccccacttcacctgtgctgtggacacagagaacatccggcgggtcttcaatgactgccgggacatcatccagaggatgcacctgcggcagtatgagctgctgtag

SEQ ID NO: 154289 - DNA, 1143 bp, synthetic construct
  misc_feature 1..1143: note = Description of Artificial Sequence: Synthetic coding sequence
  source 1..1143: mol_type = other DNA
atgggctgcctgggcaacagcaagacagaggaccagagaaatgaggagaaggcccagcgggaggccaacaagaagattgagaagcagctgcagaaggacaagcaggtgtaccgggccacccaccggctgctgctgctgggcgctggggagagcggcaagagcaccatcgtgaagcagatgaggatcctgcacgtgaatggcttcaatggagacagcgagaaggccaccaaggtgcaggacatcaagaacaacctgaaggaggccatcgagaccatcgtggccgccatgagcaacctggtgccccctgtggagctggccaaccctgagaaccagttccgggtggactacatcctgtctgtgatgaatgtgcctgactttgacttccccccagagttctatgaacatgccaaggccctgtgggaggatgagggcgtgcgggcctgctatgaaagaagcaatgagtaccagctgattgactgtgcccagtacttcctggacaagattgatgtgatcaagcaggccgactatgtgcccagcgaccaggacctgctgcgctgccgggtgctgaccagcggcatctttgagaccaagttccaggtggacaaggtgaacttccacatgtttgatgtgggcggccagagagatgaaagaaggaagtggatccagtgcttcaatgatgtgacagccatcatctttgtggtggccagcagcagctacaacatggtgatccgggaggacaaccagaccaaccggctgcaggaggccctgaacctcttcaagagcatctggaacaaccgctggctgcggaccatcagcgtcatcctcttcctgaacaagcaggacctgctggccgagaaggtgctggccggcaagagcaagattgaggactacttccctgagtttgcccgctacaccaccccagaagatgccaccccagagcccggggaggacccccgggtgacccgggccaagtacttcatcagagatgagttcctgcgcatcagcacagccagcggagatggccgccactactgctacccccacttcacctgtgctgtggacacagagaacatcagaagagtcttcaatgactgccgggacatcatccagaggatgcacctgcggcagtatgagctgctgtag

SEQ ID NO: 154290 - DNA, 738 bp, synthetic construct
  misc_feature 1..738: note = Description of Artificial Sequence: Synthetic coding sequence
  source 1..738: mol_type = other DNA
atggacagaagaagccgggcccagcagtggaggcgggcccggcacaactacaatgacctgtgcccccccatcggccggcgggccgccacagccctgctgtggctgagctgcagcatcgccctgctgcgggccctggccaccagcaatgcccgggcccagcagagagctgctgcccagcagaggaggagcttcctgaatgcccaccacaggtctggggcccaggtgtttcctgagagccctgagagcgagagtgaccacgagcacgaggaggccgacctggagctgagcctgcctgaatgtctggagtatgaggaggagtttgattatgaaacagaaagtgaaacagaaagtgaaattgaaagtgaaacagactttgaaacagagcctgagacagcccccaccacagagcctgagacagagccagaagatgaccggggccctgtggtgcccaagcacagcaccttcggccagagcctgacccagaggctgcacgccctgaagctgcggagcccagatgccagccccagccgggccccacccagcacccaggagccccagagcccccgggagggggaggagctgaagccagaggacaaggacccccgggaccctgaggagagcaaggagcccaaggaggagaagcagaggcggcgctgcaagcccaagaagcccaccaggagagatgccagccctgagagccccagcaagaagggccccatccccatcagaagacactag

SEQ ID NO: 154291 - DNA, 1188 bp, synthetic construct
  misc_feature 1..1188: note = Description of Artificial Sequence: Synthetic coding sequence
  source 1..1188: mol_type = other DNA
atgggctgcctgggcaacagcaagacagaggaccagagaaatgaggagaaggcccagcgggaggccaacaagaagattgagaagcagctgcagaaggacaagcaggtgtaccgggccacccaccggctgctgctgctgggcgctggggagagcggcaagagcaccatcgtgaagcagatgaggatcctgcacgtgaatggcttcaatggagagggcggggaggaggacccccaggccgcccggagcaacagtgatggcagcgagaaggccaccaaggtgcaggacatcaagaacaacctgaaggaggccatcgagaccatcgtggccgccatgagcaacctggtgccccctgtggagctggccaaccctgagaaccagttccgggtggactacatcctgtctgtgatgaatgtgcctgactttgacttccccccagagttctatgagcacgccaaggccctgtgggaggatgaaggagtgcgggcctgctatgaaagaagcaatgagtaccagctgattgactgtgcccagtacttcctggacaagattgatgtgatcaagcaggccgactatgtgcccagcgaccaggacctgctgcgctgccgggtgctgaccagcggcatctttgagaccaagttccaggtggacaaggtgaacttccacatgtttgatgtgggcggccagagagatgagaggaggaagtggatccagtgcttcaatgatgtgacagccatcatctttgtggtggccagcagcagctacaacatggtgatccgggaggacaaccagaccaaccggctgcaggaggccctgaacctcttcaagagcatctggaacaaccgctggctgcggaccatcagcgtcatcctcttcctgaacaagcaggacctgctggccgagaaggtgctggccggcaagagcaagattgaggactacttccctgagtttgcccgctacaccaccccagaagatgccaccccagagcctggagaggacccccgggtgacccgggccaagtacttcatcagagatgagttcctgcgcatcagcacagccagcggagatggccgccactactgctacccccacttcacctgtgctgtggacacagagaacatccggcgggtcttcaatgactgccgggacatcatccagaggatgcacctgcggcagtatgagctgctgtag

SEQ ID NO: 154292 - DNA, 738 bp, synthetic construct; identical to SEQ ID NO: 154290
  misc_feature 1..738: note = Description of Artificial Sequence: Synthetic coding sequence
  source 1..738: mol_type = other DNA

SEQ ID NO: 154293 - DNA, 483 bp, synthetic construct
  misc_feature 1..483: note = Description of Artificial Sequence: Synthetic coding sequence
  source 1..483: mol_type = other DNA
atgggctgcctgggcaacagcaagacagaggaccagagaaatgaggagaaggcccagcgggaggccaacaaggaggacaaccagaccaaccggctgcaggaggccctgaacctcttcaagagcatctggaacaaccgctggctgcggaccatcagcgtcatcctcttcctgaacaagcaggacctgctggccgagaaggtgctggccggcaagagcaagattgaggactacttccctgagtttgcccgctacaccaccccagaagatgccaccccagagcccggggaggacccccgggtgacccgggccaagtacttcatcagagatgagttcctgcgcatcagcacagccagcggagatggccgccactactgctacccccacttcacctgtgctgtggacacagagaacatcagaagagtcttcaatgactgccgggacatcatccagaggatgcacctgcggcagtatgagctgctgtag

SEQ ID NO: 154294 - DNA, 1185 bp, synthetic construct
  misc_feature 1..1185: note = Description of Artificial Sequence: Synthetic coding sequence
  source 1..1185: mol_type = other DNA
atgggctgcctgggcaacagcaagacagaggaccagagaaatgaggagaaggcccagcgggaggccaacaagaagattgagaagcagctgcagaaggacaagcaggtgtaccgggccacccaccggctgctgctgctgggcgctggggagagcggcaagagcaccatcgtgaagcagatgaggatcctgcacgtgaatggcttcaatggagagggcggggaggaggacccccaggccgcccggagcaacagtgatggagagaaggccaccaaggtgcaggacatcaagaacaacctgaaggaggccatcgagaccatcgtggccgccatgagcaacctggtgccccctgtggagctggccaaccctgagaaccagttccgggtggactacatcctgtctgtgatgaatgtgcctgactttgacttccccccagagttctatgaacatgccaaggccctgtgggaggatgagggcgtgcgggcctgctatgaaagaagcaatgagtaccagctgattgactgtgcccagtacttcctggacaagattgatgtgatcaagcaggccgactatgtgcccagcgaccaggacctgctgcgctgccgggtgctgaccagcggcatctttgagaccaagttccaggtggacaaggtgaacttccacatgtttgatgtgggcggccagagagatgaaagaaggaagtggatccagtgcttcaatgatgtgacagccatcatctttgtggtggccagcagcagctacaacatggtgatccgggaggacaaccagaccaaccggctgcaggaggccctgaacctcttcaagagcatctggaacaaccgctggctgcggaccatcagcgtcatcctcttcctgaacaagcaggacctgctggccgagaaggtgctggccggcaagagcaagattgaggactacttccctgagtttgcccgctacaccaccccagaagatgccaccccagagcccggggaggacccccgggtgacccgggccaagtacttcatcagagatgagttcctgcgcatcagcacagccagcggagatggccgccactactgctacccccacttcacctgtgctgtggacacagagaacatcagaagagtcttcaatgactgccgggacatcatccagaggatgcacctgcggcagtatgagctgctgtag

SEQ ID NO: 154295 - DNA, 1143 bp, synthetic construct; identical to SEQ ID NO: 154289
  misc_feature 1..1143: note = Description of Artificial Sequence: Synthetic coding sequence
  source 1..1143: mol_type = other DNA

SEQ ID NO: 154296 - DNA, 738 bp, synthetic construct; identical to SEQ ID NO: 154290
  misc_feature 1..738: note = Description of Artificial Sequence: Synthetic coding sequence
  source 1..738: mol_type = other DNA

SEQ ID NO: 154297 - DNA, 3114 bp, synthetic construct
  misc_feature 1..3114: note = Description of Artificial Sequence: Synthetic coding sequence
  source 1..3114: mol_type = other DNA
atgggcgtgaggaactgcctgtatggcaacaacatgagcggccagagggacatccccccagagatcggggagcagcctgagcagccccccctggaggcccctggagctgctgcccctggagctggccccagccctgctgaggagatggagacagagcccccccacaatgagcccatccctgtggagaatgatggagaggcctgtggccccccagaggtgtcccggcccaacttccaggtgctgaacccagccttccgggaggccggggcccacggcagctacagccccccacctgaggaggccatgccctttgaggccgagcagcccagcctgggcggcttctggcccaccctggagcagcccggcttccccagcggcgtgcatgctggcctggaggccttcggccctgccctgatggagcccggggccttcagcggggcccggcccggcctgggcggctacagccccccacctgaggaggccatgccctttgaatttgaccagcctgcccagaggggctgcagccagctgctgctgcaggtgcctgacctggcccctgggggccctggagctgctggggtgcctggggcccctcctgaggagccccaggccctgcggcctgccaaggccggcagccggggcggctacagccccccacctgaggagaccatgccctttgagctggatggagagggctttggagatgacagccccccacctggcctgagcagggtcatcgcccaggtggatggcagcagccagtttgctgctgtggccgccagcagcgctgtgcggctgaccccagctgccaatgccccacccctgtgggtgcctggggccatcggcagccccagccaggaggccgtgcggccccccagcaacttcaccggcagcagcccctggatggagatcagcggccccccatttgaaattggcagcgccccagctggggtggatgacacccctgtgaacatggacagcccccccatcgccctggatggcccccccatcaaggtgtctggggccccagacaagcgggagagagctgagcggccccctgtggaggaggaggccgctgagatggagggcgctgctgatgctgctgagggcggcaaggtgcccagccctggctacggcagccctgctgctggagctgccagcgctgacacagctgcccgggccgccccagctgccccagctgaccctgacagcggggccaccccagaagatcctgattctggaacagccccagctgaccctgacagcggggcctttgctgctgaccctgattctggagctgccccagctgccccagctgaccctgattctggagctgccccagatgccccagctgaccctgattctggagctgccccagatgccccagctgaccctgatgctggagctgcccctgaggccccagctgccccagctgctgctgagacccgggccgcccacgtggccccagctgccccagatgctggggcccccacagccccagctgccagcgccaccagggctgcccaggtgagaagagctgccagcgctgccccagccagcggggcccggaggaagatccacctgcggccccccagccctgagatccaggccgctgacccccccaccccccggcccacccgggccagcgcctggaggggcaagtctgagagcagccggggcagaagagtgtactatgatgagggcgtggccagcagtgatgatgacagcagtggagatgaaagtgatgatggcaccagcggctgcctgcgctggttccagcacagaagaaacagaagaagaaggaagccccagaggaacctgctgaggaacttcctggtgcaggccttcggcggctgcttcggccgctctgagagcccccagcccaaggccagccgcagcctgaaggtgaagaaggtgcccctggccgagaagaggcggcagatgaggaaggaggccctggagaagagggcccagaagagagctgagaagaagaggagcaagctgattgacaagcagctgcaggatgagaagatgggctacatgtgcacccaccggctgctgctgctgggcgctggggagagcggcaagagcaccatcgtgaagcagatgaggatcctgcacgtgaatggcttcaacggggagggcggggaggaggacccccaggccgcccggagcaacagtgatggagagaaggccaccaaggtgcaggacatcaagaacaacctgaaggaggccatcgagaccatcgtggccgccatgagcaacctggtgccccctgtggagctggccaaccctgagaaccagttccgggtggactacatcctgtctgtgatgaatgtgcctgactttgacttccccccagagttctatgagcacgccaaggccctgtgggaggatgaaggagtgcgggcctgctatgaaagaagcaatgagtaccagctgattgactgtgcccagtacttcctggacaagattgatgtgatcaagcaggccgactatgtgcccagcgaccaggacctgctgcgctgccgggtgctgaccagcggcatctttgagaccaagttccaggtggacaaggtgaacttccacatgtttgatgtgggcggccagagagatgagaggaggaagtggatccagtgcttcaatgatgtgacagccatcatctttgtggtggccagcagcagctacaacatggtgatccgggaggacaaccagaccaaccggctgcaggaggccctgaacctcttcaagagcatctggaacaaccgctggctgcggaccatcagcgtcatcctcttcctgaacaagcaggacctgctggccgagaaggtgctggccggcaagagcaagattgaggactacttccctgagtttgcccgctacaccaccccagaagatgccaccccagagcctggagaggacccccgggtgacccgggccaagtacttcatcagagatgagttcctgcgcatcagcacagccagcggagatggccgccactactgctacccccacttcacctgtgctgtggacacagagaacatccggcgggtcttcaatgactgccgggacatcatccagaggatgcacctgcggcagtatgagctgctgtag

SEQ ID NO: 154298 - DNA, 342 bp, synthetic construct
  misc_feature 1..342: note = Description of Artificial Sequence: Synthetic coding sequence
  source 1..342: mol_type = other DNA
tgaacaacagagcctgagacagagccagaagatgaccggggccctgtggtgcccaagcacagcaccttcggccagagcctgacccagaggctgcacgccctgaagctgcggagcccagatgccagccccagccgggccccacccagcacccaggagccccagagcccccgggagggggaggagctgaagccagaggacaaggacccccgggaccctgaggagagcaaggagcccaaggaggagaagcagaggcggcgctgcaagcccaagaagcccaccaggagagatgccagccctgagagccccagcaagaagggccccatccccatcagaagacactag

SEQ ID NO: 154299 - DNA, 501 bp, synthetic construct
  misc_feature 1..501: note = Description of Artificial Sequence: Synthetic coding sequence
  source 1..501: mol_type = other DNA
cctgagagcgagagtgaccatgaacatgaggaggccgacctggagctgagcctgcctgagtgcctggagtatgaggaggagtttgattatgaaacagagagcgagacagagagcgagattgagagcgagacagactttgaaacagagcctgagacagcccccaccacagagcctgagacagagccagaagatgaccggggccctgtggtgcccaagcacagcaccttcggccagagcctgacccagaggctgcacgccctgaagctgcggagcccagatgccagccccagccgggccccacccagcacccaggagccccagagcccccgggagggggaggagctgaagccagaggacaaggacccccgggaccctgaggagagcaaggagcccaaggaggagaagcagaggcggcgctgcaagcccaagaagcccaccaggagagatgccagccctgagagccccagcaagaagggccccatccccatccgccgccactag

SEQ ID NO: 154300 - DNA, 5580 bp, synthetic construct
  misc_feature 1..5580: note = Description of Artificial Sequence: Synthetic coding sequence
  source 1..5580: mol_type = other DNA
atggtggacaagaacatctacatcatccagggcgagatcaacatcgtggtgggcgccatcaagagaaatgcccgctggagcacccacacccccctggatgaggagcgggaccccctgctgcacagctttggccacctgaaggaggtgctgaacagcatcacagagctgtctgaaattgagcccaacgtgttcctgcggcccttcctggaggtgatccgctctgaggacaccaccggccccatcaccggcctggccctgacctctgtgaacaagttcctgtcctatgccctgattgaccccacccatgagggcacagctgagggcatggagaacatggctgatgctgtgacccacgccaggtttgtgggcacagatcctgccagtgatgaggtggtgctgatgaagatcctgcaggtgctgcggaccctgctgctgacccctgtgggcgcccacctgaccaatgaatctgtgtgtgagatcatgcagagctgcttccgcatctgctttgagatgaggctgtctgagctgctgaggaagtctgctgagcacaccctggtggacatggtgcagctgctcttcacccggctgccccagttcaaggaggagcccaagaactacgtgggcaccaacatgaagaagctgaagatgagagctgggggcatgtctgacagcagcaagtggaagaagcagaagaggagcccccggccccccaggcacatgaccaaggtgaccccaggcagcgagctgcccaccccaaatggcaccaccctgagcagcaacctgaccggcggcatgcccttcattgatgtgcccacccccatcagcagcgccagcagcgaggccgccagcgctgtggtgagccccagcacagacagcggcctggagttcagcagccagaccaccagcaaggaggacctgacagacctggagcagcccggcagccctggctacagcacagccacagagcccggcagcagcgagctgggcgtgcctgagcagcctgacctgcaggagggcacccacgtggagaagagccagagcgcctctgtggagagcatccctgaggtgctggaggagtgcaccagccctgctgaccacagcgacagcgcctctgtgcatgacatggactatgtgaacccccggggcgtgcgcttcacccagagcagccagaaggagggcacagccctggtgccctacggcctgccctgcatccgggagctgttccgcttcctgatcagcctgaccaacccccatgacagacacaacagcgaggtgatgatccacatgggcctgcacctgctgactgtggccctggagagcgcccctgtggcccagtgccagaccctgctgggcctcatcaaggatgagatgtgccgccacctgttccagctgctgagcattgagcggctgaacctgtatgctgccagcctgcgggtgtgcttcctgctgtttgagagcatgagggagcacctgaagttccagatggagatgtacatcaagaagctgatggagatcatcaccgtggagaaccccaagatgccctatgagatgaaggagatggccctggaggccatcgtgcagctgtggaggatccccagctttgtgacagagctgtacatcaactatgactgtgactactactgcagcaacctgtttgaggagctgaccaagctgctgagcaagaatgccttccctgtgtctggccagctgtacaccacccacctgctgagcctggatgccctgctgactgtgattgacagcacagaggcccactgccaggccaaggtgctgaacagcctgacccagcaggagaagaaggagacagcccggcccagctgtgaaattgtggatggcacccgggaggccagcaacacagagaggacagccagtgatggcaaggctgtgggcatggccagtgacatccctggcctgcacctgcccggcggcggccgcctgcccccagagcacggcaagagcggctgcagcgacctggaggaggccgtggacagcggggctgacaagaagtttgccaggaagccaccccgcttcagctgcctgctgcctgacccccgggagctgattgagatcaagaacaagaagaagctgctgatcactggaacagagcagttcaaccagaagcccaagaagggcatccagttcctgcaggagaagggcctgctgaccatccccatggacaacacagaggtggcccagtggctgcgggagaacccccggctggacaagaagatgattggagaatttgtgtctgacaggaagaacatcgacctgctggagagctttgtgtccaccttctccttccagggcctgcggctggatgaggccctgcggctgtacctggaggccttccggctgcccggggaggcccctgtgatccagaggctgctggaggccttcacagagcgctggatgaactgcaatggcagcccctttgccaacagtgatgcctgcttcagcctggcctatgctgtgatcatgctgaacacagaccagcacaaccacaacgtgaggaagcagaatgcccccatgaccctggaggagttcaggaagaacctgaagggcgtgaatggaggcaaggactttgagcaggacatcctggaggacatgtaccacgccatcaagaatgaggagatcgtgatgcctgaggagcagacaggcctggtgcgggagaactacgtgtggaatgtgctgctgcacagaggagccaccccagagggcatcttcctgcgggtgcccacagccagctatgacctggacctcttcaccatgacctggggccccaccatcgccgccctgtcctatgtgtttgacaagagcctggaggagaccatcatccagaaggccatcagcggcttcagaaaatgtgccatgatcagcgcccactacggcctgagtgatgtgtttgacaacctgatcatcagcctgtgcaagttcaccgccctgagcagcgagagcattgagaacctgcccagcgtgtttggcagcaaccccaaggcccacatcgccgccaagacagtgttccacctggcccacagacatggagacatcctgcgggagggctggaagaacatcatggaggccatgctgcagctgttccgggcccagctgctgcccaaggccatgattgaggtggaggactttgtggaccccaacgggaagatcagcctgcagcgggaggagacccccagcaacagaggagagagcacagtgctgagctttgtgtcctggctgaccctgagcggccctgagcagagctctgtgcggggccccagcacagagaaccaggaggccaagagggtggccctggagtgcatcaagcagtgtgaccctgagaagatgatcacagagagcaagttcctgcagctggagagcctgcaggagctgatgaaggccctggtgtctgtgaccccagatgaggagacctatgatgaagaagatgctgccttctgcctggagatgctgctgagaattgtgctggagaacagagacagagtgggctgtgtgtggcagacagtgcgggaccacctgtaccacctgtgtgtgcaggcccaggacttctgcttcctggtggagagagctgtggtgggcctgctgcggctggccatccggctgctgcggcgggaggagatcagcgcccaggtgctgctgagcctgcgcatcctgctgctgatgaagcccagcgtgctgagccgggtgagccaccaggtggcctacggcctgcacgagctgctgaagaccaatgctgccaacatccacagcggagatgactgggccaccctcttcaccctgctggagtgcatcggcagcggcgtgaagcccccagctgccctgcaggccacagcccgggcagatgccccagatgctggggcccagagcgacagcgagctgcccagctaccaccagaatgatgtgtccctggaccggggctacaccagtgacagcgaggtgtacacagaccacggccggcctgggaagatccacaggtctgccacagatgctgatgtggtgaacagcggctggctggtggtgggcaaggatgatgtggacaacagcaagccaggccccagccggcccggccccagccccctcatcaaccagtacagcctgactgtgggcctggacctgggcccccatgacaccaagagcctgctgaagtgtgtggagagcctgtccttcatcgtgagagatgctgcccacatcaccccagacaactttgagctgtgtgtgaagaccctgcgcatctttgtggaggccagcctgaatggaggctgcaagagccaggagaagaggggcaagagccacaagtatgacagcaaaggaaaccgcttcaagaagaagagcaaggagggctccatgctgcggcggcccaggaccagcagccagcacgccagccggggcggccagagtgatgatgatgaagatgagggcgtgcctgccagctaccacacagtgtccctgcaggtgtcccaggacctgctggacctgatgcacaccctgcacaccagggctgccagcatctacagctcctgggccgaggagcagaggcacctggagactggaggccagaagattgaggccgacagcaggaccctgtgggcccactgctggtgccccctgctgcagggcatcgcctgcctgtgctgtgatgcccggcggcaggtgaggatgcaggccctgacctacctgcagagggccctgctggtgcatgacctgcagaagctggatgccctggagtgggagagctgcttcaacaaggtgctcttccccctgctgaccaagctgctggagaacatcagccctgcagatgtgggcggcatggaggagaccaggatgagggccagcaccctgctgagcaaggtgttcctgcagcacctgagccccctgctgagcctgagcacctttgctgccctgtggctgaccatcctggacttcatggacaagtacatgcatgctggcagcagtgacctgctgtctgaggccatccctgagagcctgaagaacatgctgctggtgatggacacagctgagatcttccacagcgcagatgcccggggcggcggccccagcgccctgtgggagatcacctgggagagaattgactgcttcctgccccacctgagagatgagctgttcaagcagaccgtcatccaggaccccatgcccatggagccccagggccagaagcccctggccagcgcccacctgaccagcgctgctggggacaccaggaccccaggccaccccccacctcctgagatccccagcgagctgggcgcctgtgactttgagaagccagagagcccccgggccgccagcagcagcagccctggcagccctgtggccagcagccccagccggctgagccccaccccagatggccccccacccctggcccagcccccactcatcctgcagcccctggccagccccctgcaggtgggcgtgccccccatgaccctgcccatcatcctgaacccagccctgattgaggccaccagccctgtgcccctgctggccaccccccggcccacagaccccatccccaccagcgaggtgaactag

SEQ ID NO: 154301 - DNA, 1749 bp, synthetic construct
  misc_feature 1..1749: note = Description of Artificial Sequence: Synthetic coding sequence
  source 1..1749: mol_type = other DNA
atgggcggcagcagccctgtgaccagcaaggccatcgtggatgctgatggccgcatctacatccggaactggcagggcggcatcctgagcggcggctttgagaagaaccccaagcccatcttcacagagggcaagaaccagctggagatccagaacctgcaggaggactgggaccactttgagcccctgctgagcagcctgctgcggaggatgcctgagctggagaccctggagatcatgaagctggtgaactgcccagagaccttcaccccagacatgcgctgcatcatgggagagagccctgctgtgcagggctactttgtgctggccggcatgaacagcgctggcctgagctttggaggaggagctgggaagtacctggccgagtggatggtgcacggctaccccagtgaaaatgtgtgggagctggacctgaagagatttggagccctgcagagcagcaggaccttcctgcggcaccgggtgatggaggtgatgcccctgatgtatgacctgaaggtgccccgctgggacttccagacaggccggcagctgcggaccagccccctgtatgaccggctggatgcccagggcgcccgctggatggagaagcacggctttgagcggcccaagtactttgtgcccccagacaaggacctgctggccctggagcagagcaagaccttctacaagccagactggtttgatattgtggagagcgaggtgaagtgctgcaaggaggccgtgtgtgtgattgacatgagcagcttcaccaagtttgagatcaccagcactggagaccaggccctggaggtgctgcagtacctgttcagcaatgacctggatgtgcctgtgggccacatcgtgcacacaggcatgctgaatgaaggaggcggctatgaaaatgactgcagcatcgcccggctgaacaagaggagcttcttcatgatcagccccacagaccagcaggtgcactgctgggcctggctgaagaagcacatgcccaaggacagcaacctgctgctggaggatgtgacctggaagtacacagccctgaacctgattggccccagggctgtggatgtgctgtctgagctgtcctatgcccccatgaccccagaccacttccccagcctcttctgcaaggagatgtctgtgggctacgccaacggcatccgggtgatgtccatgacccacactggagagcccggcttcatgctgtacatccccatcgagggcatggacttcatcggcagagatgccctgctgcagcagaagcagaatggagtgtacaagaggctgaccatgttcatcctggatgaccatgacagcgacctggacctgtggccctggtggggcgagcccatctacagaaatggccagtatgtgggcaagaccaccagcagcgcctacagctacagcctggagcggcacgtgtgcctgggctttgtgcacaacttctctgaagatactggagaggagcaggtggtgacagctgacttcatcaacagaggagaatatgaaattgatattgctggctaccgcttccaggccaaggccaagctgtaccctgtggccagcctcttcacccagaagaggaggaaggatgacatggagctgagcgccttcctggccctgcccccacctccacccaacatccacagcggcctcttcttccccagccaccccagcctgtccttctcctggtggcaggaggtgtgcctgaccggccagaagcaggccccctag

SEQ ID NO: 154302 - DNA, 3540 bp, synthetic construct
  misc_feature 1..3540: note = Description of Artificial Sequence: Synthetic coding sequence
  source 1..3540: mol_type = other DNA
atggccgcctgtggccgggtgcggaggatgttccggctgtctgctgccctgcacctgctgctgctgtttgctgctggagctgagaagctgcccggccagggcgtgcacagccagggccagggccctggggccaactttgtgtcctttgtgggccaggccggcggcggcggccctgctggccagcagctgccccagctgccccagagcagccagctgcagcagcagcagcagcagcagcagcagcagcagcagccccagcccccccagccccccttccctgctgggggccccccagcccggcggggcggggccggggccggcggcggctggaagctggccgaggaggagagctgccgggaggatgtgaccagggtgtgccccaagcacacctggagcaacaacctggccgtgctggagtgcctgcaggatgtgcgggagccagaaaatgagatcagcagtgactgcaaccacctgctgtggaactacaagctgaacctgaccacagaccccaagtttgagagcgtggcccgggaggtgtgcaagagcaccatcacagagatcaaggaatgtgctgatgagcctgtgggcaagggctacatggtgtcctgcctggtggaccaccggggcaacatcacagagtaccagtgccaccagtacatcaccaagatgacagccatcatcttcagtgactaccgcctcatctgtggcttcatggatgactgcaagaatgacatcaacatcctgaagtgtggcagcatccggctgggggagaaggatgcccacagccagggcgaggtggtgtcctgcctggagaagggcctggtgaaggaggccgaggagcgggagcccaagatccaggtgtctgagctgtgcaagaaggccatcctgcgggtggccgagctgagcagtgatgacttccacctggacagacacctgtactttgcctgcagagatgaccgggagcgcttctgtgagaacacccaggccggggagggccgggtgtacaagtgcctcttcaaccacaagtttgaggagagcatgtctgagaagtgccgggaggccctgaccacccggcagaagctgattgcccaggactacaaggtgtcctacagcctggccaagagctgcaagagtgacctgaagaagtaccgctgcaatgtggagaacctgcccaggagccgggaggcccggctgagctacctgctgatgtgcctggagagcgctgtgcaccggggccggcaggtgtcctctgagtgccagggcgagatgctggactacagaaggatgctgatggaggacttcagcctgagccctgagatcatcctgagctgccgcggggagattgagcaccactgcagcggcctgcacaggaagggccgcaccctgcactgcctgatgaaggtggtgcggggggagaagggcaacctgggcatgaactgccagcaggccctgcagaccctcatccaggagacagatcctggagctgactacagaattgaccgggccctgaatgaggcctgtgagagcgtcatccagacagcctgcaagcacatccgcagcggggaccccatgatcctgagctgcctgatggagcacctgtacacagagaagatggtggaggactgtgagcaccggctgctggagctgcagtacttcatcagccgggactggaagctggaccctgtgctgtacaggaagtgccagggagatgccagccggctgtgccacacccacggctggaatgagaccagcgagttcatgccccagggcgctgtgttcagctgcctgtacagacatgcctacagaacagaggagcagggccggcggctgagcagagaatgtagagctgaggtgcagaggatcctgcaccagagggccatggatgtgaagctggaccctgccctgcaggacaagtgcctgattgacctgggcaagtggtgcagcgagaagacagaaacaggccaggagctggagtgcctgcaggaccacctggatgacctggtggtggagtgccgggacatcgtgggcaacctgacagagctggagagcgaggacatccagatcgaggccctgctgatgagggcctgtgagcccatcatccagaacttctgccatgatgtggccgacaaccagattgacagcggggacctgatggagtgcctgatccagaacaagcaccagaaggacatgaatgaaaaatgtgccatcggcgtgacccacttccagctggtgcagatgaaggacttccgcttctcctacaagttcaagatggcctgcaaggaggatgtgctgaagctgtgccccaacatcaagaagaaggtggatgtggtgatctgcctgagcaccaccgtgagaaatgacaccctgcaggaggccaaggagcaccgggtgtccctgaagtgccggcggcagctgcgggtggaggagctggagatgacagaggacatccggctggagccagacctgtatgaggcctgcaagagtgacatcaagaacttctgcagcgctgtgcagtatggaaatgcccagatcatcgagtgcctgaaggagaacaagaagcagctgagcacccgctgccaccagaaggtgttcaagctgcaggagacagagatgatggaccctgagctggactacaccctgatgagggtgtgcaagcagatgatcaagcgcttctgcccagaggccgacagcaagaccatgctgcagtgcctgaagcagaacaagaacagcgagctgatggaccccaagtgcaagcagatgatcaccaagaggcagatcacccagaacacagactaccgcctgaaccccatgctgaggaaggcctgcaaggctgacatccccaagttctgccacggcatcctgaccaaggccaaggatgattctgagctggagggccaggtgatcagctgcctgaagctgcgctatgctgaccagaggctgagcagtgactgtgaggaccagatccgcatcatcatccaggagagcgccctggactaccgcctggacccccagctgcagctgcactgcagtgatgagatcagcagcctgtgtgccgaggaggccgccgcccaggagcagacaggccaggtggaggagtgcctgaaggtgaacctgctgaagatcaagacagagctgtgcaagaaggaggtgctgaacatgctgaaggagagcaaggctgacatctttgtggaccctgtgctgcacacagcctgtgccctggacatcaagcaccactgtgccgccatcaccccaggccggggccggcagatgagctgcctgatggaggccctggaggacaagagggtgcggctgcagcctgagtgcaagaagaggctgaatgaccgcatcgagatgtggagctatgctgccaaggtggccccagcagatggcttcagtgacctggccatgcaggtgatgaccagccccagcaagaactacatcctgagcgtcatcagcggcagcatctgcatcctcttcctgattggcctgatgtgtggccgcatcaccaagagggtgacccgggagctgaaggacagatag

SEQ ID NO: 154303 - DNA, 3579 bp, synthetic construct
  misc_feature 1..3579: note = Description of Artificial Sequence: Synthetic coding sequence
  source 1..3579: mol_type = other DNA
atggccgcctgtggccgggtgcggaggatgttccggctgtctgctgccctgcacctgctgctgctgtttgctgctggagctgagaagctgcccggccagggcgtgcacagccagggccagggccctggggccaactttgtgtcctttgtgggccaggccggcggcggcggccctgctggccagcagctgccccagctgccccagagcagccagctgcagcagcagcagcagcagcagcagcagcagcagcagccccagcccccccagccccccttccctgctgggggccccccagcccggcggggcggggccggggccggcggcggctggaagctggccgaggaggagagctgccgggaggatgtgaccagggtgtgccccaagcacacctggagcaacaacctggccgtgctggagtgcctgcaggatgtgcgggagctgctgtggaactacaagctgaacctgaccacagaccccaagtttgaatctgtggcccgggaggtgtgcaagagcaccatcacagagatcaaggaatgtgctgatgagcctgtgggcaagggctacatggtgtcctgcctggtggaccaccggggcaacatcacagagtaccagtgccaccagtacatcaccaagatgacagccatcatcttcagtgactaccgcctcatctgtggcttcatggatgactgcaagaatgacatcaacatcctgaagtgtggcagcatccggctgggggagaaggatgcccacagccagggcgaggtggtgtcctgcctggagaagggcctggtgaaggaggccgaggagcgggagcccaagatccaggtgtctgagctgtgcaagaaggccatcctgcgggtggccgagctgagcagtgatgacttccacctggacagacacctgtactttgcctgcagagatgaccgggagcgcttctgtgagaacacccaggccggggagggccgggtgtacaagtgcctcttcaaccacaagtttgaggagagcatgtctgagaagtgccgggaggccctgaccacccggcagaagctgattgcccaggactacaaggtgtcctacagcctggccaagagctgcaagagtgacctgaagaagtaccgctgcaatgtggagaacctgcccaggagccgggaggcccggctgagctacctgctgatgtgcctggagagcgctgtgcaccggggccggcaggtgtcctctgagtgccagggcgagatgctggactacagaaggatgctgatggaggacttcagcctgagccctgagatcatcctgagctgccgcggggagattgagcaccactgcagcggcctgcacaggaaaggaagaaccctgcactgcctgatgaaggtggtgcggggggagaagggcaacctgggcatgaactgccagcaggccctgcagaccctcatccaggagacagaccccggggctgactacagaattgaccgggccctgaatgaggcctgtgagagcgtcatccagacagcctgcaagcacatccgcagcggggaccccatgatcctgagctgcctgatggagcacctgtacacagagaagatggtggaggactgtgagcaccggctgctggagctgcagtacttcatcagccgggactggaagctggaccctgtgctgtacaggaagtgccagggagatgccagccggctgtgccacacccacggctggaatgagaccagcgagttcatgccccagggcgctgtgttcagctgcctgtacagacatgcctacagaacagaggagcagggccgccgcctgagccgggagtgcagagctgaggtgcagaggatcctgcaccagagggccatggatgtgaagctggaccctgccctgcaggacaagtgcctgattgacctgggcaagtggtgcagcgagaagacagagaccggccaggagctggagtgcctgcaggaccacctggatgacctggtggtggagtgccgggacatcgtgggcaacctgacagagctggagagcgaggacatccagatcgaggccctgctgatgagggcctgtgagcccatcatccagaacttctgccatgatgtggccgacaaccagattgattctggggacctgatggagtgcctgatccagaacaagcaccagaaggacatgaatgagaagtgtgccatcggcgtgacccacttccagctggtgcagatgaaggacttccgcttctcctacaagttcaagatggcctgcaaggaggatgtgctgaagctgtgccccaacatcaagaagaaggtggatgtggtgatctgcctgagcaccaccgtgagaaatgacaccctgcaggaggccaaggagcaccgggtgtccctgaagtgccggcggcagctgcgggtggaggagctggagatgacagaggacatccggctggagccagacctgtatgaggcctgcaagagtgacatcaagaacttctgcagcgctgtgcagtatggaaatgcccagatcattgaatgtctgaaggagaacaagaagcagctgagcacccgctgccaccagaaggtgttcaagctgcaggagacagagatgatggaccctgagctggactacaccctgatgagggtgtgcaagcagatgatcaagcgcttctgcccagaggccgacagcaagaccatgctgcagtgcctgaagcagaacaagaacagcgagctgatggaccccaagtgcaagcagatgatcaccaagaggcagatcacccagaacacagactaccgcctgaaccccatgctgaggaaggcctgcaaggctgacatccccaagttctgccacggcatcctgaccaaggccaaggatgacagcgagctggagggccaggtgatcagctgcctgaagctgcgctatgctgaccagaggctgagcagtgactgtgaggaccagatccgcatcatcatccaggagagcgccctggactaccgcctggacccccagctgcagctgcactgcagtgatgagatcagcagcctgtgtgccgaggaggccgccgcccaggagcagacaggccaggtggaggagtgcctgaaggtgaacctgctgaagatcaagacagagctgtgcaagaaggaggtgctgaacatgctgaaggagagcaaggctgacatctttgtggaccctgtgctgcacacagcctgtgccctggacatcaagcaccactgtgccgccatcaccccaggccggggccggcagatgagctgcctgatggaggccctggaggacaagagggtgcggctgcagcctgagtgcaagaagaggctgaatgacagaattgagatgtggagctatgctgccaaggtggccccagcagatggcttcagtgacctggccatgcaggtgatgaccagccccagcaagaactacatcctgagcgtcatcagcggcagcatctgcatcctcttcctgattggcctgatgtgtggccgcatcaccaagagggtgacccgggagctgaaggaccggctgcagtacagaagtgagaccatggcctacaagggcctggtgtggagccaggatgtgacaggcagccctgcctag

SEQ ID NO: 154304 - DNA, 2091 bp, synthetic construct
  misc_feature 1..2091: note = Description of Artificial Sequence: Synthetic coding sequence
  source 1..2091: mol_type = other DNA
atgggaaatggcatgtgcagcaggaagcagaagaggatcttccagaccctgctgctgctgactgtggtgtttggcttcctgtatggagccatgctgtactatgagctgcagacccagctgaggaaggccgaggccgtggccctgaagtaccagcagcaccaggagagcctgagcgcccagctgcaggtggtgtatgagcacaggagccggctggagaagagcctgcagaaggagcggctggagcacaagaaggccaaggaggacttcctggtgtacaagctggaggcccaggagaccctgaacaagggccggcaggacagcaacagccgctacagcgccctgaatgtgcagcaccagatgctgaagagccagcacgaggagctgaagaagcagcacagcgacctggaggaggagcacaggaagcagggcgaggacttcagcaggaccttcaatgaccacaagcagaagtacctgcagctgcagcaggagaaggagcaggagctgagcaagctgaaggagaccgtgtacaacctgcgggaggagaaccggcagctgaggaaggcccaccaggacatccacacccagctgcaggatgtgaagcagcagcacaagaacctgctgtctgagcacgagcagctggtggtgaccctggaggaccacaagagcgccctggccgccgcccagacccaggtggccgagtacaagcagctgaaggacaccctgaaccgcatccccagcctgaggaagccagaccctgctgagcagcagaatgtgacccaggtggcccacagcccccagggctacaacacagcccgggagaagcccacccgggaggtgcaggaggtgtccaggaacaatgatgtgtggcagaaccacgaggccgtgcccggccgggcagaggacaccaagctgtatgcccccacccacaaggaggccgagttccaggcccctcctgagcccatccagcaggaggtggagcggcgggagcctgaggagcaccaggtggaggaggagcacaggaaggccctggaggaggaggagatggagcaggtgggccaggccgagcacctggaggaggagcatgaccccagccctgaggagcaggaccgggagtggaaggagcagcacgagcagcgggaggccgccaacctgctggagggccacgcccgggcagaggtgtaccccagcgccaagcccatgatcaagttccagagcccctatgaggagcagctggagcagcagaggctggccgtgcagcaggtggaggaggcccagcagctgcgggagcaccaggaggccctgcaccagcagaggctgcagggccacctgctgcggcagcaggagcagcagcagcagcaggtggcccgggagatggccctgcagaggcaggccgagctggaggagggccggccccagcaccaggagcagctgcggcagcaggcccactatgatgccatggacaatgacatcgtgcagggcgctgaggaccagggcatccagggcgaggagggcgcctatgaaagagacaaccagcaccaggatgaggccgagggggaccccggcaacagacatgagccccgggagcagggcccccgggaggccgaccctgagagcgaggccgacagagctgctgtggaggacatcaacccagcagatgaccccaacaaccagggagaagatgaatttgaggaggccgagcaggtgcgggaggagaacctgcctgatgaaaatgaggagcagaagcagagcaaccagaagcaggagaacacagaggtggaggagcacctggtgatggccggcaacccagaccagcaggaggacaacgtggatgagcagtaccaggaggaggccgaggaggaggtgcaggaggacctgacagaggagaagaagcgggagctggagcacaatgctgaggagacctatggagaaaatgatgagaacacagatgacaagaacaatgatggagaggagcaggaggtgagagatgacaaccggcccaagggccgggaggagcactatgaggaggaggaggaggaggaggaggatggagctgctgtggccgagaagagccaccggcgggcagagatgtag

SEQ ID NO: 154305 - DNA, 897 bp, synthetic construct
  misc_feature 1..897: note = Description of Artificial Sequence: Synthetic coding sequence
  source 1..897: mol_type = other DNA
atgaccagcctgacccagaggagcagcggcctggtgcagaggagaacagaggccagcagaaatgctgctgacaaggagagagctgctgggggcggggccggcagcagtgaagatgatgcccagagcagaagagatgagcaggatgatgatgacaagggggacagcaaggagacccggctgaccctgatggaggaggtgctgctgctgggcctgaaggaccgggagggctacaccagcttctggaatgactgcatcagcagcggcctgcggggctgcatgctgattgagctggccctgcggggccgcctgcagctggaggcctgtggcatgaggaggaagagcctgctgaccaggaaggtgatctgcaagagtgatgcccccactggagatgtgctgctggatgaggccctgaagcacgtgaaggagacccagcccccagagaccgtgcagaactggattgagctgctgtctggagagacctggaaccccctgaagctgcactaccagctgagaaatgtgcgggagcggctggccaagaacctggtggagaagggcgtgctgaccacagagaagcagaacttcctgctgtttgacatgaccacccaccccctgaccaacaacaacatcaagcagaggctcatcaagaaggtgcaggaggccgtgctggacaagtgggtgaatgacccccacaggatggaccggcggctgctggccctgatctacctggcccacgccagtgatgtgctggagaatgcctttgcccccctgctggatgagcagtatgacctggccaccaagagggtgcggcagctgctggacctggaccctgaggtggagtgcctgaaggccaacaccaatgaggtgctgtgggccgtggtggccgccttcaccaagtag

SEQ ID NO: 154306 - DNA, 846 bp, synthetic construct
  misc_feature 1..846: note = Description of Artificial Sequence: Synthetic coding sequence
  source 1..846: mol_type = other DNA
atgaccagcctgacccagaggagcagcggcctggtgcagaggagaacagaggccagcagaaatgctgctgacagcagaagagatgagcaggatgatgatgacaagggggacagcaaggagacccggctgaccctgatggaggaggtgctgctgctgggcctgaaggaccgggagggctacaccagcttctggaatgactgcatcagcagcggcctgcggggctgcatgctgattgagctggccctgcggggccgcctgcagctggaggcctgtggcatgaggaggaagagcctgctgaccaggaaggtgatctgcaagagtgatgcccccactggagatgtgctgctggatgaggccctgaagcacgtgaaggagacccagcccccagagaccgtgcagaactggattgagctgctgagcggggagacctggaaccccctgaagctgcactaccagctgagaaatgtgcgggagcggctggccaagaacctggtggagaagggcgtgctgaccacagagaagcagaacttcctgctgtttgacatgaccacccaccccctgaccaacaacaacatcaagcagaggctcatcaagaaggtgcaggaggccgtgctggacaagtgggtgaatgacccccacaggatggaccggcggctgctggccctgatctacctggcccacgccagtgatgtgctggagaatgcctttgcccccctgctggatgagcagtatgacctggccaccaagagggtgcggcagctgctggacctggaccctgaggtggagtgcctgaaggccaacaccaatgaggtgctgtgggccgtggtggccgccttcaccaagtag

SEQ ID NO: 154307 - DNA, 858 bp, synthetic construct
  misc_feature 1..858: note = Description of Artificial Sequence: Synthetic coding sequence
  source 1..858: mol_type = other DNA
atgaccaccctgacccaccgggccaggagaacagagatcagcaagaacagcgagaagaagatggagagcgaggaggacagcaactgggagaagagcccagacaatgaagacagcggggacagcaaggacatccggctgaccctgatggaggaggtgctgctgctgggcctgaaggacaaggagggctacaccagcttctggaatgactgcatcagcagcggcctgcggggcggcatcctgattgagctggccatgaggggccgcatctacctggagccccccaccatgaggaagaagaggctgctggacaggaaggtgctgctgaagagtgacagccccactggagatgtgctgctggatgagaccctgaagcacatcaaggccacagagcccacagagaccgtgcagacctggattgagctgctgactggagagacctggaaccccttcaagctgcagtaccagctgagaaatgtgcgggagagaattgccaagaacctggtggagaagggcatcctgaccacagagaagcagaacttcctgctgtttgacatgaccacccaccctgtgaccaacaccacagagaagcagaggctggtgaagaagctgcaggacagcgtgctggagcgctgggtgaatgacccccagaggatggacaagaggaccctggccctgctggtgctggcccacagcagtgatgtgctggagaatgtgttcagcagcctgacagatgacaagtatgatgtggccatgaacagagccaaggacctggtggagctggaccctgaggtggagggcaccaagcccagcgccacagagatgatctgggccgtgctggccgccttcaacaagagctag

SEQ ID NO: 154308 - DNA, 924 bp, synthetic construct
  misc_feature 1..924: note = Description of Artificial Sequence: Synthetic coding sequence
  source 1..924: mol_type = other DNA
atgaccaccctgacccaccgggccaggagaacagagatcagcaagaacagcgagaagaagatggagagcgaggaggacagcaactgggagaagagcccagacaatgaagacagcggggacagcaaggacatccggctgaccctgatggaggaggtgctgctgctgggcctgaaggacaaggaggccaacatcaacagctggatcacccgctggctgacccctgtgatcccagccctgtggggcgctgagggctacaccagcttctggaatgactgcatcagcagcggcctgcggggcggcatcctgattgagctggccatgaggggccgcatctacctggagccccccaccatgaggaagaagaggctgctggacaggaaggtgctgctgaagagtgacagccccactggagatgtgctgctggatgagaccctgaagcacatcaaggccacagagcccacagagaccgtgcagacctggattgagctgctgactggagagacctggaaccccttcaagctgcagtaccagctgagaaatgtgcgggagagaattgccaagaacctggtggagaagggcatcctgaccacagagaagcagaacttcctgctgtttgacatgaccacccaccctgtgaccaacaccacagagaagcagaggctggtgaagaagctgcaggacagcgtgctggagcgctgggtgaatgacccccagaggatggacaagaggaccctggccctgctggtgctggcccacagcagtgatgtgctggagaatgtgttcagcagcctgacagatgacaagtatgatgtggccatgaacagagccaaggacctggtggagctggaccctgaggtggagggcaccaagcccagcgccacagagatgatctgggccgtgctggccgccttcaacaagagctag

SEQ ID NO: 154309 - DNA, 810 bp, synthetic construct
  misc_feature 1..810: note = Description of Artificial Sequence: Synthetic coding sequence
  source 1..810: mol_type = other DNA
atgaccaccctgacccaccgggccaggagaacagagatcagcaagaacagcgagaagaagatggagagcgaggaggacagcaactgggagaagagcccagacaatgaagacagcggggacagcaaggacatccggctgaccctgatggaggaggtgctgctgctgggcctgaaggacaaggaggccaacatcaacagctggatcacccgctggctgacccctgtgatcccagccctgtggggcgctgagggctacaccagcttctggaatgactgcatcagcagcggcctgcggggcggcatcctgattgagctggccatgaggggccgcatctacctggagccccccaccatgaggaagaagaggctgctggacaggaaggtgctgctgaagagtgacagccccactggagatgtgctgctggatgagaccctgaagcacatcaaggccacagagcccacagagaccgtgcagacctggattgagctgctgactggagagacctggaaccccttcaagctgcagtaccagctgagaaatgtgcgggagagaattgccaagaacctggtggagaagggcatcctgaccacagagaagcagaacttcctgctgtttgacatgaccacccaccctgtgaccaacaccacagagaagcagaggctggtgaagaagctgcaggacagcgtgctggagcgctgggtgaatgacccccagaggatggacaagaggaccctggccctgctggtgctggcccacagcagtgatgtgctggagaatgtgttcagcagcctgacagatgacaagtactag

SEQ ID NO: 154310 - DNA, 726 bp, synthetic construct
  misc_feature 1..726: note = Description of Artificial Sequence: Synthetic coding sequence
  source 1..726: mol_type = other DNA
atgaccaccctgacccaccgggccaggagaacagagatcagcaagaacagcgagaagaagatggagagcgaggaggacagcaactgggagaagagcccagacaatgaagacagcggggacagcaaggacatccggctgaccctgatggaggaggtgctgctgctgggcctgaaggacaaggaggtgctgctgaagagtgacagccccactggagatgtgctgctggatgagaccctgaagcacatcaaggccacagagcccacagagaccgtgcagacctggattgagctgctgactggagagacctggaaccccttcaagctgcagtaccagctgagaaatgtgcgggagagaattgccaagaacctggtggagaagggcatcctgaccacagagaagcagaacttcctgctgtttgacatgaccacccaccctgtgaccaacaccacagagaagcagaggctggtgaagaagctgcaggacagcgtgctggagcgctgggtgaatgacccccagaggatggacaagaggaccctggccctgctggtgctggcccacagcagtgatgtgctggagaatgtgttcagcagcctgacagatgacaagtatgatgtggccatgaacagagccaaggacctggtggagctggaccctgaggtggagggcaccaagcccagcgccacagagatgatctgggccgtgctggccgccttcaacaagagctag

SEQ ID NO: 154311 - DNA, 1323 bp, synthetic construct
  misc_feature 1..1323: note = Description of Artificial Sequence: Synthetic coding sequence
  source 1..1323: mol_type = other DNA
atgggcctgggcgtgtctgctgagcagcctgctggaggagctgagggcttccacctgcacggcgtgcaggagaacagccctgcccagcaggccggcctggagccctactttgacttcatcatcaccatcggccacagccggctgaacaaggaaaatgacaccctgaaggccctgctgaaggccaacgtggagaagcctgtgaagctggaggtgttcaacatgaagaccatgagggtgcgggaggtggaggtggtgcccagcaacatgtggggcggccagggcctgctgggcgcctctgtgcgcttctgcagcttccggcgggccagcgagcaggtgtggcacgtgctggatgtggagcccagcagccctgctgccctggccggcctgcggccctacacagattatgtggtgggcagtgaccagatcctgcaggagagcgaggacttcttcaccctgattgagagccatgagggcaagcccctgaagctgatggtgtacaacagcaagagtgacagctgccgggaggtgacagtgaccccaaatgctgcctggggcggggagggcagcctgggctgcggcatcggctacggctacctgcaccgcatccccacccagccccccagctaccacaagaagcccccaggcaccccaccacccagcgccctgcccctgggcgcccctcctccagatgccctgcccccaggccccaccccagaggacagccccagcctggagaccggcagccggcagagcgactacatggaggccctgctgcaggcccctggcagctccatggaggaccccctgcccggccctggcagccccagccacagcgccccagaccctgatggcctgccccacttcatggagacccccctgcagcccccacctcctgtgcagagggtgatggaccccggcttcctggatgtgtctggcatcagcctgctggacaacagcaatgcctctgtgtggcccagcctgcccagcagcacagagctgaccaccacagctgtgtccaccagcggccctgaggacatctgcagcagcagcagcagccatgagcggggcggggaggccacctggagcggcagcgagtttgaggtgtccttcctggacagccctggggcccaggcccaggccgaccacctgccccagctgaccctgcctgacagcctgaccagcgctgccagcccagaagatggcctgtctgctgagctgctggaggcccaggccgaggaggagcccgccagcacagagggcctggacacaggaacagaagctgagggcctggacagccaggcccagatcagcaccacagaatag

SEQ ID NO: 154312 - DNA, 4143 bp, synthetic construct
  misc_feature 1..4143: note = Description of Artificial Sequence: Synthetic coding sequence
  source 1..4143: mol_type = other DNA
atggccagcggcagagatgagaggcctccctggaggctgggccgcctgctgctgctgatgtgcctgctgctgctgggcagcagcgcccgggccgcccacatcaagaaggccgaggccaccaccaccaccaccagcgctggagctgaggccgctgagggccagtttgaccgctactaccacgaggaggagctggagagcgccctgcgggaggccgctgctgctggcctgcccggcctggcccggctcttcagcatcggccgctctgtggagggccggcccctgtgggtgctgcggctgacagctggcctgggcagcctcatcccagaaggagatgctggcccagatgctgctggcccagatgctgctggccccctgctgcccggccggccccaggtgaagctggtgggcaacatgcatggagatgaaacagtgtcccggcaggtgctgatctacctggcccgggagctggccgccggctacagaagaggagacccccggctggtgcggctgctgaacaccacagatgtgtacctgctgcccagcctgaacccagatggctttgagcgggcccgggagggggactgtggctttggagatggcggccccagcggggccagcggccgggacaacagccggggccgggacctgaacagaagcttcccagaccagttcagcactggagagcccccagccctggatgaggtgcctgaggtgcgggccctgattgagtggatcagaagaaacaagtttgtgctgagcggcaacctgcatggaggctctgtggtggccagctacccctttgatgacagccctgagcacaaggccaccggcatctacagcaagaccagtgatgatgaggtgttcaagtacctggccaaggcctatgccagcaaccaccccatcatgaagacaggagagccccactgccctggagatgaagatgagaccttcaaggatggcatcaccaatggagcccactggtatgatgtggagggcggcatgcaggactacaactacgtgtgggccaactgctttgagatcaccctggagctgagctgctgcaagtaccccccagccagccagctgcggcaggagtgggagaacaaccgggagagcctcatcaccctgattgagaaggtgcacatcggcgtgaagggctttgtgaaggacagcatcactggaagtggcctggagaatgccaccatctctgtggccggcatcaaccacaacatcaccaccggccgctttggagacttctaccgcctgctggtgcccggcacctacaacctgactgtggtgctgaccggctacatgcccctgactgtgaccaacgtggtggtgaaggagggccctgccacagaggtggacttcagcctgcggcccaccgtgaccagcgtcatcccagacaccacagaagctgtgtccacagccagcacagtggccatccccaacatcctgagcggcaccagcagcagctaccagcccatccagcccaaggacttccaccaccaccacttcccagacatggagatcttcctgcggagatttgccaatgagtaccccaacatcacccggctgtacagcctgggcaagtctgtggagagccgggagctgtatgtgatggagatcagtgacaaccctggggtgcatgagcccggggagcctgagttcaagtacatcggcaacatgcacggcaatgaggtggtgggccgggagctgctgctgaacctgattgagtacctgtgcaagaactttggaacagatcctgaggtgacagacctggtgcacaacacccgcatccacctgatgcccagcatgaacccagatggctatgagaagagccaggagggggacagcatctctgtgattggaagaaacaacagcaacaactttgacctgaacagaaacttcccagaccagtttgtgcagatcacagaccccacccagcctgagaccatcgctgtgatgtcctggatgaagagctacccctttgtgctgagcgccaacctgcatggaggcagcctggtggtgaactacccctttgatgatgatgagcagggcctggccacctacagcaagagcccagatgatgctgtgttccagcagatcgccctgagctacagcaaggagaacagccagatgttccagggccggccctgcaagaacatgtacccaaatgagtacttcccccacggcatcaccaatggagcctcctggtacaacgtgcctgggggcatgcaggactggaactacctgcagaccaactgctttgaggtgaccatcgagctgggctgtgtgaagtaccccctggagaaggagctgcccaacttctgggagcagaacagaagaagcctcatccagttcatgaagcaggtgcaccagggcgtgcggggctttgtgctggatgccacagatggccggggcatcctgaatgccaccatctctgtggccgagatcaaccaccctgtgaccacctacaagacaggagactactggaggctgctggtgcccggcacctacaagatcacagccagcgcccggggctacaaccctgtgaccaagaatgtgacagtgaagtctgagggcgccatccaggtgaacttcaccctggtgcgcagcagcacagacagcaacaatgaaagcaagaagggcaaaggagccagcagcagcaccaatgatgccagtgaccccaccaccaaggagtttgagaccctcatcaaggacctgtctgcagaaaatggcctggagagcctgatgctgcggagcagcagcaacctggccctggccctgtaccgctaccacagctacaaggacctgtctgagttcctgcggggcctggtgatgaactacccccacatcaccaacctgaccaacctgggccagagcacagagtaccgccacatctggagcctggagatcagcaacaagcccaacgtgtctgagcctgaggagcccaagatccgctttgtggccggcatccacggcaatgcccctgtgggcacagagctgctgctggccctggccgagttcctgtgcctgaactacaagaagaacccagctgtgacccagctggtggacaggacccgcatcgtcatcgtgcccagcctgaacccagatggccgggagcgggcccaggagaaggactgcaccagcaagattggccagaccaatgcccggggcaaggacctggacacagacttcaccaacaatgccagccagcctgagaccaaggccatcattgaaaatctcatccagaagcaggacttcagcctgtctgtggccctggatggcggctccatgctggtgacctacccctatgacaagcctgtgcagacagtggagaacaaggagaccctgaagcacctggccagcctgtatgccaacaaccaccccagcatgcacatgggccagcccagctgccccaacaagagtgatgagaacatccctggaggagtgatgagaggagctgagtggcacagccacctgggctccatgaaggactacagcgtgacctacggccactgcccagagatcaccgtgtacaccagctgctgctacttccccagcgctgcccggctgcccagcctgtgggccgacaacaagaggagcctgctgtccatgctggtggaggtgcacaagggcgtgcacggctttgtgaaggacaagacaggcaagcccatcagcaaggccgtcatcgtgctgaatgaaggcatcaaggtgcagaccaaggagggcggctacttccacgtgctgctggcccctggggtgcacaacatcatcgccatcgcagatggctaccagcagcagcacagccaggtgtttgtgcaccatgatgctgccagctctgtggtgattgtgtttgacacagacaaccgcatcttcggcctgccccgggagctggtggtgacagtgtctggggccaccatgtctgccctgatcctgacagcctgcatcatctggtgcatctgcagcatcaagagcaacagacacaaggatggcttccaccggctgcggcagcaccatgatgaatatgaagatgagatccgcatgatgagcacaggcagcaagaagagcctgctgagccatgagttccaggatgaaacagacacagaggaggagaccctgtacagcagcaagcactag

SEQ ID NO: 154313 - DNA, 558 bp, synthetic construct
  misc_feature 1..558: note = Description of Artificial Sequence: Synthetic coding sequence
  source 1..558: mol_type = other DNA
atgtttgagaccatggccattgaaattgagcagctgctggcccggctgactggagtgaatgacaagatggccgagtacaccaacagcgctggggtgcccagcctgaatgctgccctgatgcacaccctgcagaggcaccgggacatcctgcaggactacacccatgagttccacaagaccaaggccaacttcatggccatccgggagcgggagaacctgatgggctctgtgaggaaggacatcgagagctacaagagcggcagcggcgtgaacaacagaagaacagagctgttcctgaaggagcatgaccacctgaggaacagcgacaggctcatcgaggagaccatcagcatcgccatggccaccaaggagaacatgaccagccagaggggcatgctgaagagcatccacagcaagatgaacaccctggccaaccgcttccctgctgtgaacagcctcatccagaggatcaacctgaggaagaggcgggacagcctcatcctgggcggcgtcatcggcatctgcaccatcctgctgctgctgtatgccttccactag

SEQ ID NO: 154314 - DNA, 525 bp, synthetic construct
  misc_feature 1..525: note = Description of Artificial Sequence: Synthetic coding sequence
  source 1..525: mol_type = other DNA
atggctgctggcaccagcagctactgggaggacctgaggaagcaggcccggcagctggagaatgagctggacctgaagctggtgtccttcagcaagctgtgcaccagctacagccacagcagcaccagagatggccggcgggacagcagtgacaccacccccctgctgaatggcagcagccaggacaggatgtttgagaccatggccatcgagattgagcagctgctggcccggctgactggagtgaatgacaagatggccgagtacaccaacagcgctggggtgcccagcctgaatgctgccctgatgcacaccctgcagaggcaccgggacatcctgcaggactacacccatgagttccacaagaccaaggccaacttcatggccatccgggagcgggagaacctgatgggctctgtgaggaaggacatcgagagctacaagagcggcagcggcgtgaacaacagaagaacagagctgttcctgaaggagcatgaccacctgaggaagggcttccagtggtag

SEQ ID NO: 154315 - DNA, 747 bp, synthetic construct
  misc_feature 1..747: note = Description of Artificial Sequence: Synthetic coding sequence
  source 1..747: mol_type = other DNA
atggctgctggcaccagcagctactgggaggacctgaggaagcaggcccggcagctggagaatgagctggacctgaagctggtgtccttcagcaagctgtgcaccagctacagccacagcagcaccagagatggccggcgggacagcagtgacaccacccccctgctgaatggcagcagccaggacaggatgtttgagaccatggccatcgagattgagcagctgctggcccggctgactggagtgaatgacaagatggccgagtacaccaacagcgctggggtgcccagcctgaatgctgccctgatgcacaccctgcagaggcaccgggacatcctgcaggactacacccatgagttccacaagaccaaggccaacttcatggccatccgggagcgggagaacctgatgggctctgtgaggaaggacatcgagagctacaagagcggcagcggcgtgaacaacagaagaacagagctgttcctgaaggagcatgaccacctgaggaacagcgaccggctgattgaggagaccatcagcatcgccatggccaccaaggagaacatgaccagccagaggggcatgctgaagagcatccacagcaagatgaacaccctggccaaccgcttccctgctgtgaacagcctcatccagaggatcaacctgaggaagagaagagacagcctcatcctgggcggcgtgattggcatctgcaccatcctgctgctgctgtatgccttccactag

SEQ ID NO: 154316 - DNA, 528 bp, synthetic construct
  misc_feature 1..528: note = Description of Artificial Sequence: Synthetic coding sequence
  source 1..528: mol_type = other DNA
atggctgctggcaccagcagctactgggaggacctgaggaagcaggcccggcagctggagaatgagctggacctgaagctggtgtccttcagcaagctgtgcaccagctacagccacagcagcaccagagatggccggcgggaccgctacagcagtgacaccacccccctgctgaatggcagcagccaggacaggatgtttgagaccatggccatcgagattgagcagctgctggcccggctgactggagtgaatgacaagatggccgagtacaccaacagcgctggggtgcccagcctgaatgctgccctgatgcacaccctgcagaggcaccgggacatcctgcaggtgatctactgggccagagatgtgttcatcatcaccggggtgtgggtgttcttcttcaacccctgcatcggctacgtgcacatctacctgaagggccagcgggagaagtctgagaagatcaatgccatgctgaagggcctggtgctgctcttcttcggcgtgaccatcatcaagttctag

SEQ ID NO: 154317 - DNA, 558 bp, synthetic construct; identical to SEQ ID NO: 154313
  misc_feature 1..558: note = Description of Artificial Sequence: Synthetic coding sequence
  source 1..558: mol_type = other DNA

SEQ ID NO: 154318 - DNA, 1350 bp, synthetic construct
  misc_feature 1..1350: note = Description of Artificial Sequence: Synthetic coding sequence
  source 1..1350: mol_type = other DNA
atgaccagcttctacagcaccagcagctgccccctgggctgcaccatggcccctggggccagaaatgtgtttgtgagccccattgatgtgggctgccagcctgtggccgaggccaatgctgcctccatgtgcctgctggccaacgtggcccacgccaacagagtgcgggtgggcagcacccccctgggccggcccagcctgtgcctgccccccaccagccacacagcctgccccctgcccggcacctgccacatccctggcaacatcggcatctgtggggcctacggcaagaacaccctgaatggacatgagaaggagaccatgaagttcctgaatgaccggctggccaactacctggagaaggtgcggcagctggagcaggagaatgctgagctggagaccaccctgctggagaggagcaaatgtcatgagagcacagtgtgcccagactaccagagctacttccgcaccatcgaggagctgcagcagaagatcctgtgcagcaaggcagaaaatgcccggctcatcgtgcagattgacaatgccaagctggccgcagatgacttccgcatcaagctggagagcgagaggagcctgcaccagctggtggaggccgacaagtgtggcacccagaagctgctggatgatgccaccctggccaaggctgacctggaggcccagcaggagagcctgaaggaggagcagctgagcctgaagagcaaccacgagcaggaggtgaagatcctgcggagccagctgggggagaagttcagaattgagctggacatcgagcccaccatcgacctgaacagagtgctgggggagatgagggcccagtatgaggccatggtggagaccaaccaccaggatgtggagcagtggttccaggcccagagcgagggcatcagcctgcaggccatgagctgcagcgaggagctgcagtgctgccagagcgagatcctggagctgcgctgcaccgtgaatgccctggaggtggagcggcaggcccagcacaccctgaaggactgcctgcagaacagcctgtgtgaggccgaggacagatatggaacagagctggcccagatgcagagcctcatcagcaacctggaggagcagctgtctgagatccgggctgacctggagcggcagaaccaggagtaccaggtgctgctggatgtgaaggcccggctggagaatgaaattgccacctacagaaacctgctggagagcgaggactgcaagctgccctgcaacccctgcagcaccccagccagctgcaccagctgccccagctgtggccctgtgactggaggcagccccagcggccatggagcctccatgggccgctag

SEQ ID NO: 154319 - DNA, 639 bp, synthetic construct
  misc_feature 1..639: note = Description of Artificial Sequence: Synthetic coding sequence
  source 1..639: mol_type = other DNA
atggaccccctcttccagcagacccacaagcaggtgcatgagatccagagctgcatgggccgcctggagacagctgacaagcagagcgtgcacatcgtggagaatgagatccaggccagcattgaccagatcttcagccggctggagcggctggagatcctgagcagcaaggagccccccaacaagaggcagaatgcccggctgcgggtggaccagctgaagtatgatgtgcagcacctgcagacagccctgaggaacttccagcacagaagacatgcccgggagcagcaggagcggcagcgggaggagctgctgagcaggaccttcaccaccaatgacagcgacaccaccatccccatggatgagagcctgcagttcaacagcagcctgcagaaggtgcacaacggcatggatgacctgatcctggatggccacaacatcctggatggcctgcggacccagaggctgaccctgaagggcacccagaagaagatcctggacatcgccaacatgctgggcctgagcaacacagtgatgaggctcatcgagaagagggccttccaggacaagtacttcatgattggaggcatgctgctgacctgtgtggtgatgttcctggtggtgcagtacctgacctag

SEQ ID NO: 154320 - DNA, 588 bp, synthetic construct
  misc_feature 1..588: note = Description of Artificial Sequence: Synthetic coding sequence
  source 1..588: mol_type = other DNA
atggaccccctcttccagcagacccacaagcaggtgcatgagatccagagctgcatgggccgcctggagacagctgacaagcagagcgtgcacatcgtggagaatgagatccaggccagcattgaccagatcttcagccggctggagcggctggagatcctgagcagcaaggagccccccaacaagaggcagaatgcccggctgcgggtggaccagctgaagtatgatgtgcagcacctgcagacagccctgaggaacttccagcacagaagacatgcccgggagcagcaggagcggcagcgggaggagctgctgagcaggaccttcaccaccaatgacagcgacaccaccatccccatggatgagagcctgcagttcaacagcagcctgcagaaggtgcacaacggcatggatgacctgatcctggatggccacaacatcctggatggcctgcggacccagaggctgaccctgaaggtgggcagcctgctgggggaccgggagaaggccagctgcttcagcctcatccagcagttcagcaactgtgtgtacatcctgatcacctgcccccagatcgtcatcttctag

SEQ ID NO: 154321 - DNA, 699 bp, synthetic construct
  misc_feature 1..699: note = Description of Artificial Sequence: Synthetic coding sequence
  source 1..699: mol_type = other DNA
atggaccccctcttccagcagacccacaagcaggtgcatgagatccagagctgcatgggccgcctggagacagctgacaagcagagcgtgcacatcgtggagaatgagatccaggccagcattgaccagatcttcagccggctggagcggctggagatcctgagcagcaaggagccccccaacaagaggcagaatgcccggctgcgggtggaccagctgaagtatgatgtgcagcacctgcagacagccctgaggaacttccagcacagaagacatgcccgggagcagcaggagcggcagcgggaggagctgctgagcaggaccttcaccaccaatgacagcgacaccaccatccccatggatgagagcctgcagttcaacagcagcctgcagaaggtgcacaacggcatggatgacctgatcctggatggccacaacatcctggatggcctgcggacccagaggctgaccctgaagggcacccagaagaagatcctggacatcgccaacatgctgggcctgagcaacacagtgatgaggctcatcgagaagagggccttccaggacaagtacttcatgattgagaccaggagccaccacgtggcccagaatggacctgagctgctgagcagccgggaccccccagccagcgccagccgctctgctggcatcatcgagttcagcgagaagatcacctag

SEQ ID NO: 154322 - DNA, 984 bp, synthetic construct
  misc_feature 1..984: note = Description of Artificial Sequence: Synthetic coding sequence
  source 1..984: mol_type = other DNA
atggctgctgctgctgccatggccgagcaggagagcgccagaaatggaggcaggaacagaggaggagtgcagagggtggagggcaagctgcgggcctctgtggagaagggggactactatgaggcccaccagatgtaccgcaccctcttcttccgctacatgagccagagcaagcacacagaggcccgggagctgatgtacagcggggccctgctcttcttcagccacggccagcagaacagcgctgctgacctgtccatgctggtgctggagagcctggagaaggccgaggtggaggtggctgatgagctgctggagaacctggccaaggtgttcagcctgatggaccccaacagccctgagcgggtgacctttgtgtcccgggccctgaagtggagcagcggcggcagcggcaagctgggccacccccggctgcaccagctgctggccctgaccctgtggaaggagcagaactactgtgagagccgctaccacttcctgcacagcgcagatggagagggctgtgccaacatgctggtggagtacagcaccagccggggcttccgctctgaggtggacatgtttgtggcccaggccgtgctgcagttcctgtgcctgaagaacaagagcagcgcctctgtggtgttcaccacctacacccagaagcaccccagcattgaagatggccccccatttgtggagcccctgctgaacttcatctggttcctgctgctggccgtggatggcggcaagctgactgtgttcaccgtgctgtgtgagcagtaccagcccagcctgcggcgggaccccatgtacaatgagtacctggacagaattggccagctgttcttcggcgtgccccccaagcagaccagcagctatggaggcctgctgggcaacctgctgaccagcctgatgggcagcagcgagcaggaggatggagaggagagccccagtgatggcagccccatcgagctggactag

SEQ ID NO: 154323 - DNA, 1779 bp, synthetic construct
  misc_feature 1..1779: note = Description of Artificial Sequence: Synthetic coding sequence
  source 1..1779: mol_type = other DNA
atggccctgcctgaggaggccaagatcaaggatgcctaccacatgctgaagaggcagggcatcgtgcagagcgacccccccatccctgtggacaggaccctcatccccagccccccaccccggcccaagaaccctgtgtttgatgatgaggagaagagcaagctgctggccaagctgctgaagagcaagaacccagatgacctgcaggaggccaacaagctgatcaagtccatggtgaaggaggatgaggcccgcatccagaaggtgaccaagaggctgcacaccctggaggaggtgaacaacaacgtgcggctgctgtctgagatgctgctgcactacagccaggaggacagcagtgatggagaccgggagctgatgaaggagctgtttgaccagtgtgagaacaagaggaggaccctcttcaagctggccagcgagacagaggacaatgacaacagcctgggggacatcctgcaggccagtgacaacctgagcagggtcatcaacagctacaagaccatcatcgagggccaggtgatcaatggagaggtggccaccctgaccctgcctgacagcgagggcaacagccagtgcagcaaccagggcaccctgattgacctggccgagctggacaccaccaacagcctgagctctgtgctggccccagcccccaccccacccagcagcggcatccccatcctgcccccaccaccccaggccagcggccccccaagaagccgcagcagcagccaggccgaggccaccctgggccccagcagcaccagcaatgccctgtcctggctggatgaggagctgctgtgcctgggcctggccgaccctgccccaaatgtgccccccaaggagagcgctggcaacagccagtggcacctgctgcagcgggagcagagcgacctggacttcttcagcccccggcccggcacagctgcctgtggggccagtgatgcccccctgctgcagcccagcgcccccagcagcagcagcagccaggcccccctgcccccacccttccctgcccctgtggtgcctgcctctgtgcctgcccccagcgctggcagcagcctcttcagcactggagtggccccagccctggcccccaaggtggagcctgctgtgcccggccaccacggcctggccctgggcaacagcgccctgcaccacctggatgccctggaccagctgctggaggaggccaaggtgaccagcggcctggtgaagcccaccaccagccccctcatccccaccaccaccccagcccggcccctgctgcccttcagcactggacctggcagccccctcttccagcccctgtccttccagagccagggcagcccccccaagggccctgagctgagcctggccagcatccacgtgcccctggagagcatcaagcccagcagcgccctgcctgtgacagcctatgacaagaatggcttccgcatcctcttccactttgccaaggagtgccccccaggccgcccagatgtgctggtggtggtggtgtccatgctgaacacagcccccctgcctgtgaagagcatcgtgctgcaggccgctgtgcccaagtccatgaaggtgaagctgcagccccccagcggcacagagctgagccccttcagccccatccagcccccagctgccatcacccaggtgatgctgctggccaaccccctgaagaagcaggtgctgtccttcctgggcaaggcctgcctgcagccctggggccaggccatcctgctgaccaccagctgcctggcctag

SEQ ID NO: 154324 - DNA, 1956 bp, synthetic construct
  misc_feature 1..1956: note = Description of Artificial Sequence: Synthetic coding sequence
  source 1..1956: mol_type = other DNA
atgaagaactgtggccgccgcttccacaatgaggtgggcaagttccgcttcctgaatgaactcatcaaggtggtgagccccaagtacctgggggacagagtgtctgagaaggtgaagaccaaggtgattgagctgctgtacagctggaccatggccctgcctgaggaggccaagatcaaggatgcctaccacatgctgaagaggcagggcatcgtgcagagcgacccccccatccctgtggacaggaccctcatccccagccccccaccccggcccaagaaccctgtgtttgatgatgaggagaagagcaagctgctggccaagctgctgaagagcaagaacccagatgacctgcaggaggccaacaagctgatcaagtccatggtgaaggaggatgaggcccgcatccagaaggtgaccaagaggctgcacaccctggaggaggtgaacaacaacgtgcggctgctgtctgagatgctgctgcactacagccaggaggacagcagtgatggagaccgggagctgatgaaggagctgtttgaccagtgtgagaacaagaggaggaccctcttcaagctggccagcgagacagaggacaatgacaacagcctgggggacatcctgcaggccagtgacaacctgagcagggtcatcaacagctacaagaccatcatcgagggccaggtgatcaatggagaggtggccaccctgaccctgcctgacagcgagggcaacagccagtgcagcaaccagggcaccctgattgacctggccgagctggacaccaccaacagcctgagctctgtgctggccccagcccccaccccacccagcagcggcatccccatcctgcccccaccaccccaggccagcggccccccaagaagccgcagcagcagccaggccgaggccaccctgggccccagcagcaccagcaatgccctgtcctggctggatgaggagctgctgtgcctgggcctggccgaccctgccccaaatgtgccccccaaggagagcgctggcaacagccagtggcacctgctgcagcgggagcagagcgacctggacttcttcagcccccggcccggcacagctgcctgtggggccagtgatgcccccctgctgcagcccagcgcccccagcagcagcagcagccaggcccccctgcccccacccttccctgcccctgtggtgcctgcctctgtgcctgcccccagcgctggcagcagcctcttcagcactggagtggccccagccctggcccccaaggtggagcctgctgtgcccggccaccacggcctggccctgggcaacagcgccctgcaccacctggatgccctggaccagctgctggaggaggccaaggtgaccagcggcctggtgaagcccaccaccagccccctcatccccaccaccaccccagcccggcccctgctgcccttcagcactggacctggcagccccctcttccagcccctgtccttccagagccagggcagcccccccaagggccctgagctgagcctggccagcatccacgtgcccctggagagcatcaagcccagcagcgccctgcctgtgacagcctatgacaagaatggcttccgcatcctcttccactttgccaaggagtgccccccaggccgcccagatgtgctggtggtggtggtgtccatgctgaacacagcccccctgcctgtgaagagcatcgtgctgcaggccgctgtgcccaagtccatgaaggtgaagctgcagccccccagcggcacagagctgagccccttcagccccatccagcccccagctgccatcacccaggtgatgctgctggccaaccccctgaaggagaaggtgcggctgcgctacaagctgacctttgccctgggggagcagctgagcacagaggtgggggaggtggaccagtttcctcctgtggagcagtggggcaacctgtag

SEQ ID NO: 154325 - DNA, 1365 bp, synthetic construct
  misc_feature 1..1365: note = Description of Artificial Sequence: Synthetic coding sequence
  source 1..1365: mol_type = other DNA
atgtctgctgggggcccctgcccagctgctgctgggggcggccctggaggagccagctgcagcgtgggcgcccctggaggagtgtccatgttccgctggctggaggtgctggagaaggagtttgacaaggcctttgtggatgtggacctgctgctgggggagattgatcctgaccaggccgacatcacctatgagggccggcagaagatgaccagcctgagcagctgctttgcccagctgtgccacaaggcccagagcgtgtcccagatcaaccacaagctggaggcccagctggtggacctgaagtctgagctgacagagacccaggccgagaaggtggtgctggagaaggaggtgcatgaccagctgctgcagctgcacagcatccagctgcagctgcacgccaagacaggccagagcgctgacagcggcaccatcaaggccaagctggagcgggagctggaggccaacaagaaggagaagatgaaggaggcccagctggaggccgaggtgaagctgctgaggaaagaaaatgaggccctgcggcggcacatcgctgtgctgcaggccgaggtgtatggagcccggctggccgccaagtacctggacaaggagctggccggccgggtgcagcagatccagctgctgggccgggacatgaagggccctgcccatgacaagctgtggaaccagctggaggccgagatccacctgcaccgccacaagacagtcatccgggcctgccggggcagaaatgacctgaagaggcccatgcaggcccctcctggccatgaccaggacagcctgaagaagagccagggcgtgggccccatcaggaaggtgctgctgctgaaggaggaccacgagggcctgggcatcagcatcaccggcggcaaggagcacggcgtgcccatcctgatcagcgagatccaccctggccagcctgctgacagatgtggcggcctgcacgtgggagatgccatcctggccgtgaatggagtgaacctgcgggacaccaagcacaaggaggccgtgaccatcctgagccagcagagaggagaaattgaatttgaggtggtgtatgtggcccctgaggtggacagtgatgatgaaaatgtggagtatgaagatgaaagtggccaccgctaccgcctgtacctggatgagctggagggcggcggcaaccctggggccagctgcaaggacaccagcggggagatcaaggtgctgcagggcttcaacaagaaggctgtgacagacacccatgaaaatggagacctgggcacagccagcgagacccccctggatgatggagccagcaagctggatgacctgcacaccctgtaccacaagaagagctactag

SEQ ID NO: 154326 - DNA, 1389 bp, synthetic construct
  misc_feature 1..1389: note = Description of Artificial Sequence: Synthetic coding sequence
  source 1..1389: mol_type = other DNA
atgtctgctgggggcccctgcccagctgctgctgggggcggccctggaggagccagctgcagcgtgggcgcccctggaggagtgtccatgttccgctggctggaggtgctggagaaggagtttgacaaggcctttgtggatgtggacctgctgctgggggagattgatcctgaccaggccgacatcacctatgagggccggcagaagatgaccagcctgagcagctgctttgcccagctgtgccacaaggcccagagcgtgtcccagatcaaccacaagctggaggcccagctggtggacctgaagtctgagctgacagagacccaggccgagaaggtggtgctggagaaggaggtgcatgaccagctgctgcagctgcacagcatccagctgcagctgcacgccaagacaggccagagcgctgacagcggcaccatcaaggccaagctgagcggccccagcgtggaggagctggagcgggagctggaggccaacaagaaggagaagatgaaggaggcccagctggaggccgaggtgaagctgctgaggaaagaaaatgaggccctgcggcggcacatcgctgtgctgcaggccgaggtgtatggagcccggctggccgccaagtacctggacaaggagctggccggccgggtgcagcagatccagctgctgggccgggacatgaagggccctgcccatgacaagctgtggaaccagctggaggccgagatccacctgcaccgccacaagacagtcatccgggcctgccggggcagaaatgacctgaagaggcccatgcaggcccctcctggccatgaccaggacagcctgaagaagagccagggcgtgggccccatcaggaaggtgctgctgctgaaggaggaccacgagggcctgggcatcagcatcaccggcggcaaggagcacggcgtgcccatcctgatcagcgagatccaccctggccagcctgctgacagatgtggcggcctgcacgtgggagatgccatcctggccgtgaatggagtgaacctgcgggacaccaagcacaaggaggccgtgaccatcctgagccagcagagaggagaaattgaatttgaggtggtgtatgtggcccctgaggtggacagtgatgatgaaaatgtggagtatgaagatgaaagtggccaccgctaccgcctgtacctggatgagctggagggcggcggcaaccctggggccagctgcaaggacaccagcggggagatcaaggtgctgcagggcttcaacaagaaggctgtgacagacacccatgaaaatggagacctgggcacagccagcgagacccccctggatgatggagccagcaagctggatgacctgcacaccctgtaccacaagaagagctactag

SEQ ID NO: 154327 - DNA, 1389 bp, synthetic construct
  misc_feature 1..1389: note = Description of Artificial Sequence: Synthetic coding sequence
  source 1..1389: mol_type = other DNA
atgtctgctgggggcccctgcccagctgctgctgggggcggccctggaggagccagctgcagcgtgggcgcccctggaggagtgtccatgttccgctggctggaggtgctggagaaggagtttgacaaggcctttgtggatgtggacctgctgctgggggagattgatcctgaccaggccgacatcacctatgagggccggcagaagatgaccagcctgagcagctgctttgcccagctgtgccacaaggcccagagcgtgtcccagatcaaccacaagctggaggcccagctggtggacctgaagtctgagctgacagagacccaggccgagaaggtggtgctggagaaggaggtgcatgaccagctgctgcagctgcacagcatccagctgcagctgcacgccaagacaggccagagcgctgacagcggcaccatcaaggccaagctggtgagccgcagcagcagcaagatggagcgggagctggaggccaacaagaaggagaagatgaaggaggcccagctggaggccgaggtgaagctgctgaggaaagaaaatgaggccctgcggcggcacatcgctgtgctgcaggccgaggtgtatggagcccggctggccgccaagtacctggacaaggagctggccggccgggtgcagcagatccagctgctgggccgggacatgaagggccctgcccatgacaagctgtggaaccagctggaggccgagatccacctgcaccgccacaagacagtcatccgggcctgccggggcagaaatgacctgaagaggcccatgcaggcccctcctggccatgaccaggacagcctgaagaagagccagggcgtgggccccatcaggaaggtgctgctgctgaaggaggaccacgagggcctgggcatcagcatcaccggcggcaaggagcacggcgtgcccatcctgatcagcgagatccaccctggccagcctgctgacagatgtggcggcctgcacgtgggagatgccatcctggccgtgaatggagtgaacctgcgggacaccaagcacaaggaggccgtgaccatcctgagccagcagagaggagaaattgaatttgaggtggtgtatgtggcccctgaggtggacagtgatgatgaaaatgtggagtatgaagatgaaagtggccaccgctaccgcctgtacctggatgagctggagggcggcggcaaccctggggccagctgcaaggacaccagcggggagatcaaggtgctgcagggcttcaacaagaaggctgtgacagacacccatgaaaatggagacctgggcacagccagcgagacccccctggatgatggagccagcaagctggatgacctgcacaccctgtaccacaagaagagctactag

SEQ ID NO: 154328 - DNA, 1659 bp, synthetic construct
  misc_feature 1..1659: note = Description of Artificial Sequence: Synthetic coding sequence
  source 1..1659: mol_type = other DNA
atggagcccgccatggagcctgagaccctggaggcccgcatcaacagagccaccaaccccctgaacaaggagctggactgggccagcatcaatggcttctgtgagcagctgaatgaagattttgagggcccccccctggccacccggctgctggcccacaagatccagagcccccaggagtgggaggccatccaggccctgactgtgctggagacctgcatgaagagctgtgggaagcgcttccatgatgaggtgggcaagttccgcttcctgaatgagctgatcaaggtggtgagccccaagtacctgggcagcaggaccagcgagaaggtgaagaacaagatcctggagctgctgtacagctggacagtgggcctgcctgaggaggtgaagattgctgaggcctaccagatgctgaagaagcagggcatcgtgaagagtgaccccaagctgcctgatgacaccaccttccccctgcccccaccccggcccaagaatgtcatctttgaagatgaggagaagagcaagatgctggcccggctgctgaagagcagccaccctgaggacctgcgggccgccaacaagctgatcaaggagatggtgcaggaggaccagaagaggatggagaagatcagcaagagggtgaatgccatcgaggaggtgaacaacaacgtgaagctgctgacagagatggtgatgagccacagccagggcggcgctgctgctggcagcagcgaggacctgatgaaggagctgtaccagagatgtgagaggatgaggcccaccctcttccggctggccagtgacacagaagataatgatgaggccctgggcctgagtgaccccaccccacccagcggccccagcctggatggcaccggctggaacagcttccagagcagtgatgccacagagcccccagccccagccctggcccaggcccccagcatggagagccggcccccagcccagaccagcctgcctgccagcagcggcctggatgacctggacctgctgggcaagaccctgctgcagcagagcctgcccccagagagccagcaggtgcgctgggagaagcagcagcccaccccccggctgaccctgcgggacctgcagaacaagagcagcagctgcagcagccccagcagcagcgccaccagcctgctgcacacagtgtccccagagccccccaggcctccccagcagcctgtgcccacagagctgagcctggccagcatcaccgtgcccctggagagcatcaagcccagcaacatcctgcctgtgacagtgtatgaccagcacggcttccgcatcctcttccactttgcccgggaccccctgcccggccgcagtgatgtgctggtggtggtggtgtccatgctgagcacagccccccagcccatcagaaatattgtgttccagagcgctgtgcccaaggtgatgaaggtgaagctgcagcccccatctggaacagagctgcctgccttcaaccccatcgtgcaccccagcgccatcacccaggtgctgctgctggccaacccccagaaggagaaggtgcggctgcgctacaagctgaccttcaccatgggagaccagacctacaatgagatgggagatgtggaccagttccccccacctgagacctggggcagcctgtag

SEQ ID NO: 154329 - DNA, 117 bp, synthetic construct
  misc_feature 1..117: note = Description of Artificial Sequence: Synthetic coding sequence
  source 1..117: mol_type = other DNA
atgaagagctgtgggaagcgcttccatgatgaggtgggcaagttccgcttcctgaatgaactcatcaaggtggtgagccccaagtacctgggcagcaggaccagcgagaaggtgtag

SEQ ID NO: 154330 - DNA, 1821 bp, synthetic construct
  misc_feature 1..1821: note = Description of Artificial Sequence: Synthetic coding sequence
  source 1..1821: mol_type = other DNA
atggagcccgccatggagcctgagaccctggaggcccgcatcaacagagccaccaaccccctgaacaaggagctggactgggccagcatcaatggcttctgtgagcagctgaatgaagattttgagggcccccccctggccacccggctgctggcccacaagatccagagcccccaggagtgggaggccatccaggccctgacctacctgggcagcaggaccagcgagaaggtgaagaacaagatcctggagctgctgtacagctggacagtgggcctgcctgaggaggtgaagattgctgaggcctaccagatgctgaagaagcagggcatcgtgaagagtgaccccaagctgcctgatgacaccaccttccccctgcccccaccccggcccaagaatgtcatctttgaagatgaggagaagagcaagatgctggcccggctgctgaagagcagccaccctgaggacctgcgggccgccaacaagctgatcaaggagatggtgcaggaggaccagaagaggatggagaagatcagcaagagggtgaatgccatcgaggaggtgaacaacaacgtgaagctgctgacagagatggtgatgagccacagccagggcggcgctgctgctggcagcagcgaggacctgatgaaggagctgtaccagagatgtgagaggatgaggcccaccctcttccggctggccagtgacacagaggacaatgatgaggccctggccgagatcctgcaggccaatgacaacctgacccaggtgatcaacctgtacaagcagctggtgcggggggaggaggtgaatggagatgccacagctggcagcatccctggcagcaccagcgccctgctggacctgagcggcctggacctgcccccagctggcaccacctacccagccatgcccaccaggcctggagagcaggccagccctgagcagcccagcgcctctgtgtccctgctggatgatgagctgatgagcctgggcctgagtgaccccaccccacccagcggccccagcctggatggcaccggctggaacagcttccagagcagtgatgccacagagcccccagccccagccctggcccaggcccccagcatggagagccggcccccagcccagaccagcctgcctgccagcagcggcctggatgacctggacctgctgggcaagaccctgctgcagcagagcctgcccccagagagccagcaggtgcgctgggagaagcagcagcccaccccccggctgaccctgcgggacctgcagaacaagagcagcagctgcagcagccccagcagcagcgccaccagcctgctgcacacagtgtccccagagccccccaggcctccccagcagcctgtgcccacagagctgagcctggccagcatcaccgtgcccctggagagcatcaagcccagcaacatcctgcctgtgacagtgtatgaccagcacggcttccgcatcctcttccactttgcccgggaccccctgcccggccgcagtgatgtgctggtggtggtggtgtccatgctgagcacagccccccagcccatcagaaatattgtgttccagagcgctgtgcccaaggtgatgaaggtgaagctgcagcccccatctggaacagagctgcctgccttcaaccccatcgtgcaccccagcgccatcacccaggtgctgctgctggccaacccccagaaggagaaggtgcggctgcgctacaagctgaccttcaccatgggagaccagacctacaatgagatgggagatgtggaccagttccccccacctgagacctggggcagcctgtag

SEQ ID NO: 154331 - DNA, 1920 bp, synthetic construct
  misc_feature 1..1920: note = Description of Artificial Sequence: Synthetic coding sequence
  source 1..1920: mol_type = other DNA
atggagcccgccatggagcctgagaccctggaggcccgcatcaacagagccaccaaccccctgaacaaggagctggactgggccagcatcaatggcttctgtgagcagctgaatgaagattttgagggcccccccctggccacccggctgctggcccacaagatccagagcccccaggagtgggaggccatccaggccctgactgtgctggagacctgcatgaagagctgtgggaagcgcttccatgatgaggtgggcaagttccgcttcctgaatgagctgatcaaggtggtgagccccaagtacctgggcagcaggaccagcgagaaggtgaagaacaagatcctggagctgctgtacagctggacagtgggcctgcctgaggaggtgaagattgctgaggcctaccagatgctgaagaagcagggcatcgtgaagagtgaccccaagctgcctgatgacaccaccttccccctgcccccaccccggcccaagaatgtcatctttgaagatgaggagaagagcaagatgctggcccggctgctgaagagcagccaccctgaggacctgcgggccgccaacaagctgatcaaggagatggtgcaggaggaccagaagaggatggagaagatcagcaagagggtgaatgccatcgaggaggtgaacaacaacgtgaagctgctgacagagatggtgatgagccacagccagggcggcgctgctgctggcagcagcgaggacctgatgaaggagctgtaccagagatgtgagaggatgaggcccaccctcttccggctggccagtgacacagaagataatgatgaggccctggccgagatcctgcaggccaatgacaacctgacccaggtgatcaacctgtacaagcagctggtgcggggggaggaggtgaatggagatgccacagctggcagcatccctggcagcaccagcgccctgctggacctgagcggcctggacctgcccccagctggcaccacctacccagccatgcccaccaggcctggagagcaggccagccctgagcagcccagcgcctctgtgtccctgctggatgatgagctgatgagcctgggcctgagtgaccccaccccaccttctggccccagcctggatggcaccggctggaacagcttccagagcagtgatgccacagagcccccagccccagccctggcccaggcccccagcatggagagccggcccccagcccagaccagcctgcctgccagcagcggcctggatgacctggacctgctgggcaagaccctgctgcagcagagcctgcccccagagagccagcaggtgcgctgggagaagcagcagcccaccccccggctgaccctgcgggacctgcagaacaagagcagcagctgcagcagccccagcagcagcgccaccagcctgctgcacacagtgtccccagagcccccccggcccccccagcagcctgtgcccacagagctgagcctggccagcatcaccgtgcccctggagagcatcaagcccagcaacatcctgcctgtgacagtgtatgaccagcacggcttccgcatcctcttccactttgcccgggaccccctgcccggccgcagtgatgtgctggtggtggtggtgtccatgctgagcacagccccccagcccatccggaacatcgtgttccagagcgctgtgcccaaggtgatgaaggtgaagctgcagccccccagcggcacagagctgcctgccttcaaccccatcgtgcaccccagcgccatcacccaggtgctgctgctggccaacccccagaaggagaaggtgcggctgcgctacaagctgaccttcaccatgggagaccagacctacaatgagatgggagatgtggaccagtttcctcctcctgagacctggggcagcctgtag

SEQ ID NO: 154332 - DNA, 1971 bp, synthetic construct
  misc_feature 1..1971: note = Description of Artificial Sequence: Synthetic coding sequence
  source 1..1971: mol_type = other DNA
atggagcccgccatggagcctgagaccctggaggcccgcatcaacagagccaccaaccccctgaacaaggagctggactgggccagcatcaatggcttctgtgagcagctgaatgaagattttgagggcccccccctggccacccggctgctggcccacaagatccagagcccccaggagtgggaggccatccaggccctgactgtgcggcggggggaggccaccatccggcccccaccctgtgatgacaccaaggtgctggagacctgcatgaagagctgtgggaagcgcttccatgatgaggtgggcaagttccgcttcctgaatgaactcatcaaggtggtgagccccaagtacctgggcagcaggaccagcgagaaggtgaagaacaagatcctggagctgctgtacagctggacagtgggcctgcctgaggaggtgaagattgctgaggcctaccagatgctgaagaagcagggcatcgtgaagagtgaccccaagctgcctgatgacaccaccttccccctgcccccaccccggcccaagaatgtcatctttgaagatgaggagaagagcaagatgctggcccggctgctgaagagcagccaccctgaggacctgcgggccgccaacaagctgatcaaggagatggtgcaggaggaccagaagaggatggagaagatcagcaagagggtgaatgccatcgaggaggtgaacaacaacgtgaagctgctgacagagatggtgatgagccacagccagggcggcgctgctgctggcagcagcgaggacctgatgaaggagctgtaccagagatgtgagaggatgaggcccaccctcttccggctggccagtgacacagaggacaatgatgaggccctggccgagatcctgcaggccaatgacaacctgacccaggtgatcaacctgtacaagcagctggtgcggggggaggaggtgaatggagatgccacagctggcagcatccctggcagcaccagcgccctgctggacctgagcggcctggacctgcccccagctggcaccacctacccagccatgcccaccaggcctggagagcaggccagccctgagcagcccagcgcctctgtgtccctgctggatgatgagctgatgagcctgggcctgagtgaccccaccccacccagcggccccagcctggatggcaccggctggaacagcttccagagcagtgatgccacagagcccccagccccagccctggcccaggcccccagcatggagagccggcccccagcccagaccagcctgcctgccagcagcggcctggatgacctggacctgctgggcaagaccctgctgcagcagagcctgcccccagagagccagcaggtgcgctgggagaagcagcagcccaccccccggctgaccctgcgggacctgcagaacaagagcagcagctgcagcagccccagcagcagcgccaccagcctgctgcacacagtgtccccagagccccccaggcctccccagcagcctgtgcccacagagctgagcctggccagcatcaccgtgcccctggagagcatcaagcccagcaacatcctgcctgtgacagtgtatgaccagcacggcttccgcatcctcttccactttgcccgggaccccctgcccggccgcagtgatgtgctggtggtggtggtgtccatgctgagcacagccccccagcccatcagaaatattgtgttccagagcgctgtgcccaaggtgatgaaggtgaagctgcagcccccatctggaacagagctgcctgccttcaaccccatcgtgcaccccagcgccatcacccaggtgctgctgctggccaacccccagaaggagaaggtgcggctgcgctacaagctgaccttcaccatgggagaccagacctacaatgagatgggagatgtggaccagttccccccacctgagacctggggcagcctgtag

SEQ ID NO: 154333 - DNA, 1701 bp, synthetic construct
  misc_feature 1..1701: note = Description of Artificial Sequence: Synthetic coding sequence
  source 1..1701: mol_type = other DNA
atgaagagctgtgggaagcgcttccatgatgaggtgggcaagttccgcttcctgaatgaactcatcaaggtggtgagccccaagtacctgggcagcaggaccagcgagaaggtgaagaacaagatcctggagctgctgtacagctggacagtgggcctgcctgaggaggtgaagattgctgaggcctaccagatgctgaagaagcagggcatcgtgaagagtgaccccaagctgcctgatgacaccaccttccccctgcccccaccccggcccaagaatgtcatctttgaagatgaggagaagagcaagatgctggcccggctgctgaagagcagccaccctgaggacctgcgggccgccaacaagctgatcaaggagatggtgcaggaggaccagaagaggatggagaagatcagcaagagggtgaatgccatcgaggaggtgaacaacaacgtgaagctgctgacagagatggtgatgagccacagccagggcggcgctgctgctggcagcagcgaggacctgatgaaggagctgtaccagagatgtgagaggatgaggcccaccctcttccggctggccagtgacacagaggacaatgatgaggccctggccgagatcctgcaggccaatgacaacctgacccaggtgatcaacctgtacaagcagctggtgcggggggaggaggtgaatggagatgccacagctggcagcatccctggcagcaccagcgccctgctggacctgagcggcctggacctgcccccagctggcaccacctacccagccatgcccaccaggcctggagagcaggccagccctgagcagcccagcgcctctgtgtccctgctggatgatgagctgatgagcctgggcctgagtgaccccaccccacccagcggccccagcctggatggcaccggctggaacagcttccagagcagtgatgccacagagcccccagccccagccctggcccaggcccccagcatggagagccggcccccagcccagaccagcctgcctgccagcagcggcctggatgacctggacctgctgggcaagaccctgctgcagcagagcctgcccccagagagccagcaggtgcgctgggagaagcagcagcccaccccccggctgaccctgcgggacctgcagaacaagagcagcagctgcagcagccccagcagcagcgccaccagcctgctgcacacagtgtccccagagccccccaggcctccccagcagcctgtgcccacagagctgagcctggccagcatcaccgtgcccctggagagcatcaagcccagcaacatcctgcctgtgacagtgtatgaccagcacggcttccgcatcctcttccactttgcccgggaccccctgcccggccgcagtgatgtgctggtggtggtggtgtccatgctgagcacagccccccagcccatcagaaatattgtgttccagagcgctgtgcccaaggtgatgaaggtgaagctgcagcccccatctggaacagagctgcctgccttcaaccccatcgtgcaccccagcgccatcacccaggtgctgctgctggccaacccccagaaggagaaggtgcggctgcgctacaagctgaccttcaccatgggagaccagacctacaatgagatgggagatgtggaccagttccccccacctgagacctggggcagcctgtag

SEQ ID NO: 154334 - DNA, 123 bp, synthetic construct
  misc_feature 1..123: note = Description of Artificial Sequence: Synthetic coding sequence
  source 1..123: mol_type = other DNA
atgaagagctgtgggaagcgcttccatgatgaggtgggcaagttccgcttcctgaatgaactcatcaaggtggtgagccccaagtacctgggcagcaggaccagcgagaaggtgaagaactag

SEQ ID NO: 154335 - DNA, 330 bp, synthetic construct
  misc_feature 1..330: note = Description of Artificial Sequence: Synthetic coding sequence
  source 1..330: mol_type = other DNA
atgaagagctgtgggaagcgcttccatgatgaggtgggcaagttccgcttcctgaatgaactcatcaaggtggtgagccccaagtacctgggcagcaggaccagcgagaaggtgaagaacaagatcctggagctgctgtacagctggacagtgggcctgcctgaggaggtgaagattgctgaggcctaccagatgctgaagaagcagggcatcgtgaagagtgaccccaagctgcctgatgacaccaccttccccctgcccccaccccggcccaagaatgtcatctttgaagatgaggagaagagcaagatgctggcccggctgctgtag

SEQ ID NO: 154336 - DNA, 270 bp, synthetic construct
  misc_feature 1..270: note = Description of Artificial Sequence: Synthetic coding sequence
  source 1..270: mol_type = other DNA
atggagcccgccatggagcctgagaccctggaggcccgcatcaacagagccaccaaccccctgaacaaggagctggactgggccagcatcaatggcttctgtgagcagctgaatgaagattttgagggcccccccctggccacccggctgctggcccacaagatccagagcccccaggagtgggaggccatccaggccctgactgtgcggcggggggaggccaccatccggcccccaccctgtgatgacaccaagggcggccaggactag

SEQ ID NO: 154337 - DNA, 330 bp, synthetic construct; identical to SEQ ID NO: 154335
  misc_feature 1..330: note = Description of Artificial Sequence: Synthetic coding sequence
  source 1..330: mol_type = other DNA

SEQ ID NO: 154338 - DNA, 327 bp, synthetic construct
  misc_feature 1..327: note = Description of Artificial Sequence: Synthetic coding sequence
  source 1..327: mol_type = other DNA
atgaagagctgtgggaagcgcttccatgatgaggtgggcaagttccgcttcctgaatgaactcatcaaggtggtgagccccaagtacctgggcagcaggaccagcgagaaggtgaagaacaagatcctggagctgctgtacagctggacagtgggcctgcctgaggaggtgaagattgctgaggcctaccagatgctgaagaagcagggcatcgtgaagagtgaccccaagctgcctgatgacaccaccttccccctgcccccaccccggcccaagaatgtcatctttgaagatgaggagaagagcaagatgctggcccggctgtag

SEQ ID NO: 154339 - DNA, 57 bp, synthetic construct
  misc_feature 1..57: note = Description of Artificial Sequence: Synthetic coding sequence
  source 1..57: mol_type = other DNA
atgaagagctgtgggaagcgcttccatgatgaggtgggcaagttccgcttcctgtag

SEQ ID NO: 154340 - DNA, 183 bp, synthetic construct
  misc_feature 1..183: note = Description of Artificial Sequence: Synthetic coding sequence
  source 1..183: mol_type = other DNA
atgaagagctgtgggaagcgcttccatgatgaggtgggcaagttccgcttcctgaatgaactcatcaaggtggtgagccccaagtacctgggcagcaggaccagcgagaaggtgaagaacaagatcctggagctgctgtacagctggacagtgggcctgcctgaggaggtgaagatcgcctag

SEQ ID NO: 154341 - DNA, 87 bp, synthetic construct
  misc_feature 1..87: note = Description of Artificial Sequence: Synthetic coding sequence
  source 1..87: mol_type = other DNA
atgaagagctgtgggaagcgcttccatgatgaggtgggcaagttccgcttcctgaatgaactcatcaaggtggtgagccccaagtag

SEQ ID NO: 154342 - DNA, 741 bp, synthetic construct
  misc_feature 1..741: note = Description of Artificial Sequence: Synthetic coding sequence
  source 1..741: mol_type = other DNA
atgaccccaggcacagccaacagagccaccaaccccctgaacaaggagctggactgggccagcatcaatggcttctgtgagcagctgaatgaagattttgagggcccccccctggccacccggctgctggcccacaagatccagagcccccaggagtgggaggccatccaggccctgactgtgctggagacctgcatgaagagctgtgggaagcgcttccatgatgaggtgggcaagttccgcttcctgaatgagctgatcaaggtggtgagccccaagtacctgggcagcaggaccagcgagaaggtgaagaacaagatcctggagctgctgtacagctggacagtgggcctgcctgaggaggtgaagattgctgaggcctaccagatgctgaagaagcagggcatcgtgaagagtgaccccaagctgcctgatgacaccaccttccccctgcccccaccccggcccaagaatgtcatctttgaagatgaggagaagagcaagatgctggcccggctgctgaagagcagccaccctgaggacctgcgggccgccaacaagctgatcaaggagatggtgcaggaggaccagaagaggatggagaagatcagcaagagggtgaatgccatcgaggaggtgaacaacaacgtgaagctgctgacagagatggtgatgagccacagccagggcggcgctgctgctggcagcagcgaggacctgatgaaggagctgtaccagtag

SEQ ID NO: 154343 - DNA, 213 bp, synthetic construct
  misc_feature 1..213: note = Description of Artificial Sequence: Synthetic coding sequence
  source 1..213: mol_type = other DNA
atgaagagctgtgggaagcgcttccatgatgaggtgggcaagttccgcttcctgaatgaactcatcaaggtggtgagccccaagtacctgggcagcaggaccagcgagaaggtgaagaacaagatcctggagctgctgtacagctggacagtgggcctgcctgaggaggtgaagattgctgaggcctaccagatgctgaagaagcagggctag

SEQ ID NO: 154344 - DNA, 2172 bp, synthetic construct
  misc_feature 1..2172: note = Description of Artificial Sequence: Synthetic coding sequence
  source 1..2172: mol_type = other DNA
atggccgaggccgagggggagagcctggagagctggctgaacaaggccaccaaccccagcaaccggcaggaggactgggagtacatcatcggcttctgtgaccagatcaacaaggagctggagggcccccagattgctgtgcggctgctggcccacaagatccagagcccccaggagtgggaggccctgcaggccctgactgtgctggaggcctgcatgaagaactgtggccgccgcttccacaatgaggtgggcaagttccgcttcctgaatgaactcatcaaggtggtgagccccaagtacctgggggacagagtgtctgagaaggtgaagaccaaggtgattgagctgctgtacagctggaccatggccctgcctgaggaggccaagatcaaggatgcctaccacatgctgaagaggcagggcatcgtgcagagcgacccccccatccctgtggacaggaccctcatccccagccccccaccccggcccaagaaccctgtgtttgatgatgaggagaagagcaagctgctggccaagctgctgaagagcaagaacccagatgacctgcaggaggccaacaagctgatcaagtccatggtgaaggaggatgaggcccgcatccagaaggtgaccaagaggctgcacaccctggaggaggtgaacaacaacgtgcggctgctgtctgagatgctgctgcactacagccaggaggacagcagtgatggagaccgggagctgatgaaggagctgtttgaccagtgtgagaacaagaggaggaccctcttcaagctggccagcgagacagaggacaatgacaacagcctgggggacatcctgcaggccagtgacaacctgagcagggtcatcaacagctacaagaccatcatcgagggccaggtgatcaatggagaggtggccaccctgaccctgcctgacagcgagggcaacagccagtgcagcaaccagggcaccctgattgacctggccgagctggacaccaccaacagcctgagctctgtgctggccccagcccccaccccacccagcagcggcatccccatcctgcccccaccaccccaggccagcggccccccaagaagccgcagcagcagccaggccgaggccaccctgggccccagcagcaccagcaatgccctgtcctggctggatgaggagctgctgtgcctgggcctggccgaccctgccccaaatgtgccccccaaggagagcgctggcaacagccagtggcacctgctgcagcgggagcagagcgacctggacttcttcagcccccggcccggcacagctgcctgtggggccagtgatgcccccctgctgcagcccagcgcccccagcagcagcagcagccaggcccccctgcccccacccttccctgcccctgtggtgcctgcctctgtgcctgcccccagcgctggcagcagcctcttcagcactggagtggccccagccctggcccccaaggtggagcctgctgtgcccggccaccacggcctggccctgggcaacagcgccctgcaccacctggatgccctggaccagctgctggaggaggccaaggtgaccagcggcctggtgaagcccaccaccagccccctcatccccaccaccaccccagcccggcccctgctgcccttcagcactggacctggcagccccctcttccagcccctgtccttccagagccagggcagcccccccaagggccctgagctgagcctggccagcatccacgtgcccctggagagcatcaagcccagcagcgccctgcctgtgacagcctatgacaagaatggcttccgcatcctcttccactttgccaaggagtgccccccaggccgcccagatgtgctggtggtggtggtgtccatgctgaacacagcccccctgcctgtgaagagcatcgtgctgcaggccgctgtgcccaagtccatgaaggtgaagctgcagccccccagcggcacagagctgagccccttcagccccatccagcccccagctgccatcacccaggtgatgctgctggccaaccccctgaaggagaaggtgcggctgcgctacaagctgacctttgccctgggggagcagctgagcacagaggtgggggaggtggaccagtttcctcctgtggagcagtggggcaacctgtag

SEQ ID NO: 154345 - DNA, 2073 bp, synthetic construct
  misc_feature 1..2073: note = Description of Artificial Sequence: Synthetic coding sequence
  source 1..2073: mol_type = other DNA
atggccgaggccgagggggagagcctggagagctggctgaacaaggccaccaaccccagcaaccggcaggaggactgggagtacatcatcggcttctgtgaccagatcaacaaggagctggagggcccccagattgctgtgcggctgctggcccacaagatccagagcccccaggagtgggaggccctgcaggccctgacctacctgggggacagagtgtctgagaaggtgaagaccaaggtgattgagctgctgtacagctggaccatggccctgcctgaggaggccaagatcaaggatgcctaccacatgctgaagaggcagggcatcgtgcagagcgacccccccatccctgtggacaggaccctcatccccagccccccaccccggcccaagaaccctgtgtttgatgatgaggagaagagcaagctgctggccaagctgctgaagagcaagaacccagatgacctgcaggaggccaacaagctgatcaagtccatggtgaaggaggatgaggcccgcatccagaaggtgaccaagaggctgcacaccctggaggaggtgaacaacaacgtgcggctgctgtctgagatgctgctgcactacagccaggaggacagcagtgatggagaccgggagctgatgaaggagctgtttgaccagtgtgagaacaagaggaggaccctcttcaagctggccagcgagacagaagataatgacaacagcctgggggacatcctgcaggccagtgacaacctgagcagggtcatcaacagctacaagaccatcatcgagggccaggtgatcaacggggaggtggccaccctgaccctgcctgattctgagggcaacagccagtgcagcaaccagggcaccctgattgacctggccgagctggacaccaccaacagcctgagctctgtgctggccccagcccccaccccacccagcagcggcatccccatcctgcccccaccaccccaggccagcggcccccccaggagccgcagcagcagccaggccgaggccaccctgggccccagcagcaccagcaatgccctgtcctggctggatgaggagctgctgtgcctgggcctggccgaccctgcccccaacgtgccccccaaggagagcgctggcaacagccagtggcacctgctgcagcgggagcagagcgacctggacttcttcagccccaggcctggaacagctgcctgtggggccagtgatgcccccctgctgcagcccagcgcccccagcagcagcagcagccaggcccccctgcccccacccttccctgcccctgtggtgcctgcctctgtgcctgcccccagcgctggcagcagcctcttcagcactggagtggccccagccctggcccccaaggtggagcctgctgtgcccggccaccacggcctggccctgggcaacagcgccctgcaccacctggatgccctggaccagctgctggaggaggccaaggtgaccagcggcctggtgaagcccaccaccagccccctcatccccaccaccaccccagcccggcccctgctgcccttcagcacaggccctggcagccccctcttccagcccctgtccttccagagccagggcagcccccccaagggccctgagctgagcctggccagcatccacgtgcccctggagagcatcaagcccagcagcgccctgcctgtgacagcctatgacaagaatggcttccgcatcctcttccactttgccaaggaatgtcctcctggccgcccagatgtgctggtggtggtggtgtccatgctgaacacagcccccctgcctgtgaagagcatcgtgctgcaggccgctgtgcccaagtccatgaaggtgaagctgcagcccccatctggaacagagctgagccccttcagccccatccagcccccagctgccatcacccaggtgatgctgctggccaaccccctgaaggagaaggtgcggctgcgctacaagctgacctttgccctgggggagcagctgagcacagaggtgggggaggtggaccagttcccccctgtggagcagtggggcaacctgtag

SEQ ID NO: 154346 - DNA, 1956 bp, synthetic construct; identical to SEQ ID NO: 154324
  misc_feature 1..1956: note = Description of Artificial Sequence: Synthetic coding sequence
  source 1..1956: mol_type = other DNA

SEQ ID NO: 154347 - DNA, 462 bp, synthetic construct
  misc_feature 1..462: note = Description of Artificial Sequence: Synthetic coding sequence
  source 1..462: mol_type = other DNA
atggccgaggccgagggggagagcctggagagctggctgaacaaggccaccaaccccagcaaccggcaggaggactgggagtacatcatcggcttctgtgaccagatcaacaaggagctggagggcccccagattgctgtgcggctgctggcccacaagatccagagcccccaggagtgggaggccctgcaggccctgactgtgctggaggcctgcatgaagaactgtggccgccgcttccacaatgaggtgggcaagttccgcttcctgaatgaactcatcaaggtggtgagccccaagtacctgggggacagagtgtctgagaaggtgaagaccaaggtgattgagctgctgtacagctggaccatggccctgcctgaggaggccaagatcaaggatgcctaccacatgctgaagaggcaggccttcagccaggccgctgagaagcagaagcccaggtag

SEQ ID NO: 154348 - DNA, 1806 bp, synthetic construct
  misc_feature 1..1806: note = Description of Artificial Sequence: Synthetic coding sequence
  source 1..1806: mol_type = other DNA
atggccctgcctgaggaggccaagatcaaggatgcctaccacatgctgaagaggcagggcatcgtgcagagcgacccccccatccctgtggacaggaccctcatccccagccccccaccccggcccaagaaccctgtgtttgatgatgaggagaagagcaagctgctggccaagctgctgaagagcaagaacccagatgacctgcaggaggccaacaagctgatcaagtccatggtgaaggaggatgaggcccgcatccagaaggtgaccaagaggctgcacaccctggaggaggtgaacaacaacgtgcggctgctgtctgagatgctgctgcactacagccaggaggacagcagtgatggagaccgggagctgatgaaggagctgtttgaccagtgtgagaacaagaggaggaccctcttcaagctggccagcgagacagaggacaatgacaacagcctgggggacatcctgcaggccagtgacaacctgagcagggtcatcaacagctacaagaccatcatcgagggccaggtgatcaatggagaggtggccaccctgaccctgcctgacagcgagggcaacagccagtgcagcaaccagggcaccctgattgacctggccgagctggacaccaccaacagcctgagctctgtgctggccccagcccccaccccacccagcagcggcatccccatcctgcccccaccaccccaggccagcggccccccaagaagccgcagcagcagccaggccgaggccaccctgggccccagcagcaccagcaatgccctgtcctggctggatgaggagctgctgtgcctgggcctggccgaccctgccccaaatgtgccccccaaggagagcgctggcaacagccagtggcacctgctgcagcgggagcagagcgacctggacttcttcagcccccggcccggcacagctgcctgtggggccagtgatgcccccctgctgcagcccagcgcccccagcagcagcagcagccaggcccccctgcccccacccttccctgcccctgtggtgcctgcctctgtgcctgcccccagcgctggcagcagcctcttcagcactggagtggccccagccctggcccccaaggtggagcctgctgtgcccggccaccacggcctggccctgggcaacagcgccctgcaccacctggatgccctggaccagctgctggaggaggccaaggtgaccagcggcctggtgaagcccaccaccagccccctcatccccaccaccaccccagcccggcccctgctgcccttcagcactggacctggcagccccctcttccagcccctgtccttccagagccagggcagcccccccaagggccctgagctgagcctggccagcatccacgtgcccctggagagcatcaagcccagcagcgccctgcctgtgacagcctatgacaagaatggcttccgcatcctcttccactttgccaaggagtgccccccaggccgcccagatgtgctggtggtggtggtgtccatgctgaacacagcccccctgcctgtgaagagcatcgtgctgcaggccgctgtgcccaagtccatgaaggtgaagctgcagccccccagcggcacagagctgagccccttcagccccatccagcccccagctgccatcacccaggtgatgctgctggccaaccccctgaaggagaaggtgcggctgcgctacaagctgacctttgccctgggggagcagctgagcacagaggtgggggaggtggaccagtttcctcctgtggagcagtggggcaacctgtag

SEQ ID NO: 154349 - DNA, 918 bp, synthetic construct
  misc_feature 1..918: note = Description of Artificial Sequence: Synthetic coding sequence
  source 1..918: mol_type = other DNA
atggctgctggcctggcccggctgctgctgctgctgggcctgtctgctgggggccctgccccagctggggccgccaagatgaaggtggtggaggagcccaatgccttcggcgtgaacaaccccttcctgccccaggccagccggctgcaggccaagagggaccccagccctgtgtctggccctgtgcacctgttccggctgagcggcaagtgcttcagcctggtggagagcacctacaagtatgagttctgccccttccacaacgtgacccagcacgagcagaccttccgctggaatgcctacagcggcatcctgggcatctggcatgagtgggagatcgccaacaacaccttcaccggcatgtggatgagagatggagatgcctgccgcagccgcagccggcagagcaaggtggagctggcctgtgggaagagcaaccggctggcccacgtgtctgagcccagcacctgtgtgtatgccctgacctttgagacccccctggtgtgccacccccacgccctgctggtgtaccccaccctgcctgaggccctgcagaggcagtgggaccaggtggagcaggacctggctgatgagctgatcaccccccagggccacgagaagctgctgcggaccctgtttgaagatgctggctacctgaagaccccagaggagaatgagcccacccagctggagggcggccctgacagcctgggctttgagaccctggagaactgcaggaaggcccacaaggagctgagcaaggagatcaagaggctgaagggcctgctgacccagcacggcatcccctacacccggcccacagagaccagcaacctggagcacctgggccacgagaccccccgggccaagagccctgagcagctgcggggggaccccggcctgcggggcagcctgtag

SEQ ID NO: 154350 - DNA, 4497 bp, synthetic construct; identical to SEQ ID NO: 146687
  misc_feature 1..4497: note = Description of Artificial Sequence: Synthetic coding sequence
  source 1..4497: mol_type = other DNA

SEQ ID NO: 154351 - DNA, 4173 bp, synthetic construct
  misc_feature 1..4173: note = Description of Artificial Sequence: Synthetic coding sequence
  source 1..4173: mol_type = other DNA
atggatggagccagcgctgagcaggacggcctgcaggaggacaggagccacagcggccccagcagcctgcctgaggcccccctgaagcccccaggccccctggtgcccccagaccagcaggacaaggtgcagtgtgccgaggtgaacagagccagcacagaaggagagagcccagatggccctggccagggcggcctgtgccagaatggccccaccccacccttcccagacccccccagcagcctggaccccaccaccagccctgtgggcccagatgccagccctggggtggccggcttccatgacaacctgaggaagagccagggcaccagcgctgagggctctgtgaggaaggaggccctgcagagcctgcggctgagcctgcccatgcaggagacccagctgtgcagcacagacagccccctgcccctggagaaggaggagcaggtgcggctgcaggccaggaagtggctggaggagcagctgaagcagtacagagtgaagaggcagcaggagaggagcagccagcctgccaccaagaccaggctcttcagcaccctggaccctgagctgatgctgaaccctgagaacctgccccgggccagcaccctggccatgaccaaggagtacagcttcctgcggacctctgtgccccggggccccaaggtgggcagcctgggcctgcctgcccacccccgggagaagaagaccagcaagagcagcaagatccgcagcctggccgactacagaacagaggacagcaatgccggcaacagcggcggcaatgtgcctgccccagacagcaccaagggcagcctgaagcagaacagaagcagcgctgcctctgtggtgtctgagatcagcctgagcccagacacagatgaccggctggagaacaccagcctggccggggacagcgtgtctgaggtggatggaaatgacagcgacagcagcagctacagcagcgccagcacccggggcacctacggcatcctgagcaagacagtgggcacccaggacaccccctacatggtgaatggccaggagatcccagctgacaccctgggccagttccccagcatcaaggatgtgctgcaggccgctgctgctgagcaccaggaccagggccaggaggtgaatggagaggtgcgcagccggcgggacagcatctgcagctctgtgtccctggagagcagcgctgctgagacccaggaggagatgctgcaggtgctgaaggagaagatgaggctggagggccagctggaggccctgagcctggaggccagccaggccctgaaggagaaggccgagctgcaggcccagctggccgccctgagcaccaagctgcaggcccaggtggagtgcagccacagcagccagcagaggcaggacagcctgagcagcgaggtggacaccctgaagcagagctgctgggacctggagcgggccatgacagacctgcagaacatgctggaggccaagaatgccagcctggccagcagcaacaatgacctgcaggtggccgaggagcagtaccagaggctgatggccaaggtggaggacatgcagaggtccatgctgagcaaggacaacacagtgcatgacctgcggcagcagatgacagccctgcagagccagctgcagcaggtgcagctggagaggaccaccctgaccagcaagctgaaggccagccaggccgagatcagcagcctgcagagcgtgcggcagtggtaccagcagcagctggccctggcccaggaggcccgggtgcggctgcagggcgagatggcccacatccaggtgggccagatgacccaggccggcctgctggagcacctgaagctggagaatgtgtccctgagccagcagctgacagagacccagcaccgctccatgaaggagaagggcagaattgctgcccagctgcagggcattgaagctgacatgctggaccaggaggccgccttcatgcagatccaggaggccaagaccatggtggaggaggacctgcagaggcggctggaggagtttgaaggagagcgggagcggctgcagaggatggctgacagcgctgccagcctggagcagcagctggagcaggtgaagctgaccctgctgcagagggaccagcagctggaggccctgcagcaggagcacctggacctgatgaagcagctgaccctgacccaggaggccctgcagagccgggagcagagcctggatgccctgcagacccactatgatgagctgcaggcccggctgggggagctgcagggcgaggccgccagccgggaggacaccatctgcctgctgcagaatgagaagatcatcctggaggccgccctgcaggccgccaagagcggcaaggaggagctggacagaggagcccggcggctggaggagggcacagaggagaccagcgagaccctggagaagctgcgggaggagctggccatcaagagcggccaggtggagcacctgcagcaggagacagctgccctgaagaagcagatgcagaagatcaaggagcagttcctgcagcagaaggtgatggtggaggcctacagaagagatgccaccagcaaggaccagctgatcagcgagctgaaggccaccaggaagaggctggacagcgagctgaaggagctgcggcaggagctgatgcaggtgcatggagagaagaggacagctgaggccgagctgagccggctgcaccgggaggtggcccaggtgcggcagcacatggctgacctggagggccacctgcagagcgcccagaaggagagagatgagatggagacccacctgcagagcctgcagtttgacaaggagcagatggtggccgtgacagaggccaatgaggccctgaagaagcagatcgaggagctgcagcaggaggccaggaaggccatcacagagcagaagcagaagatgaggcggctgggcagtgacctgaccagcgcccagaaggagatgaagaccaagcacaaggcctatgaaaatgctgtgggcatcctgagccggcggctgcaggaggccctggccgccaaggaggccgcagatgctgagctgggccagctgcgggcccagggcggcagcagtgacagcagcctggccctgcacgagcgcatccaggccctggaggccgagctgcaggccgtgagccacagcaagaccctgctggagaaggagctgcaggaggtgattgccctgaccagccaggagctggaggagagccgggagaaggtgctggagctggaggatgagctgcaggagagccggggcttcaggaagaagatcaagaggctggaggagagcaacaagaagctggccctggagctggagcacgagaagggcaagctgaccggcctgggccagagcaatgctgccctgcgggagcacaacagcatcctggagacagccctggccaagcgggaggccgacctggtgcagctgaacctgcaggtgcaggccgtgctgcagaggaaggaggaggaggaccggcagatgaagcacctggtgcaggccctgcaggccagcctggagaaggagaaggagaaggtgaacagcctgaaggagcaggtggccgccgccaaggtggaggccggccacaacagaagacacttcaaggccgccagcctggagctgtctgaggtgaagaaggagctgcaggccaaggagcacctggtgcagaagctgcaggccgaggctgatgacctgcagatccgggagggcaagcacagccaggagatcgcccagttccaggccgagctggccgaggcccgggcccagctgcagctgctgcagaagcagctggatgagcagctgagcaagcagcctgtgggcaaccaggagatggagaacctgaagtgggaggtggaccagaaggagcgggagatccagagcctgaagcagcagctggacctgacagagcagcagggcaggaaggagctggagggcctgcagcagctgctgcagaatgtgaagtctgagctggagatggcccaggaggacctgtccatgacccagaaggacaagttcatgctgcaggccaaggtgtctgagctgaagaacaacatgaagaccctgctgcagcagaaccagcagctgaagctggacctgcggcggggggccgccaagacagtgctgcggcctgccagcctgcctggatag

SEQ ID NO: 154352 - DNA, 3405 bp, synthetic construct
  misc_feature 1..3405: note = Description of Artificial Sequence: Synthetic coding sequence
  source 1..3405: mol_type = other DNA
atggatggagccagcgctgagcaggacggcctgcaggaggacaggagccacagcggccccagcagcctgcctgaggcccccctgaagcccccaggccccctggtgcccccagaccagcaggacaaggtgcagtgtgccgaggtgaacagagccagcacagaaggagagagcccagatggccctggccagggcggcctgtgccagaatggccccaccccacccttcccagacccccccagcagcctggaccccaccaccagccctgtgggcccagatgccagccctggggtggccggcttccatgacaacctgaggaagagccagggcaccagcgctgagggctctgtgaggaaggaggccctgcagagcctgcggctgagcctgcccatgcaggagacccagctgtgcagcacagacagccccctgcccctggagaaggaggagcaggtgcggctgcaggccaggaagtggctggaggagcagctgaagcagtacagagtgaagaggcagcaggagaggagcagccagcctgccaccaagaccaggctcttcagcaccctggaccctgagctgatgctgaaccctgagaacctgccccgggccagcaccctggccatgaccaaggagtacagcttcctgcggacctctgtgccccggggccccaaggtgggcagcctgggcctgcctgcccacccccgggagaagaagaccagcaagagcagcaagatccgcagcctggccgactacagaacagaggacagcaatgccggcaacagcggcggcaatgtgcctgccccagacagcaccaagggcagcctgaagcagaacagaagcagcgctgcctctgtggtgtctgagatcagcctgagcccagacacagatgaccggctggagaacaccagcctggccggggacagcgtgtctgaggtggatggaaatgacagcgacagcagcagctacagcagcgccagcacccggggcacctacggcatcctgagcaagacagtgggcacccaggacaccccctacatggtgaatggccaggagatcccagctgacaccctgggccagttccccagcatcaaggatgtgctgcaggccgctgctgctgagcaccaggaccagggccaggaggtgaatggagaggtgcgcagccggcgggacagcatctgcagctctgtgtccctggagagcagcgctgctgagacccaggaggagatgctgcaggtgctgaaggagaagatgaggctggagggccagctggaggccctgagcctggaggccagccaggccctgaaggagaaggccgagctgcaggcccagctggccgccctgagcaccaagctgcaggcccaggtggagtgcagccacagcagccagcagaggcaggacagcctgagcagcgaggtggacaccctgaagcagagctgctgggacctggagcgggccatgacagacctgcagaacatgctggaggccaagaatgccagcctggccagcagcaacaatgacctgcaggtggccgaggagcagtaccagaggctgatggccaaggtggaggacatgcagaggtccatgctgagcaaggacaacacagtgcatgacctgcggcagcagatgacagccctgcagagccagctgcagcaggtgcagctggagaggaccaccctgaccagcaagctgaaggccagccaggccgagatcagcagcctgcagagcgtgcggcagtggtaccagcagcagctggccctggcccaggaggcccgggtgcggctgcagggcgagatggcccacatccaggtgggccagatgacccaggccggcctgctggagcacctgaagctggagaatgtgtccctgagccagcagctgacagagacccagcaccgctccatgaaggagaagggcagaattgctgcccagctgcagggcattgaagctgacatgctggaccaggaggccgccttcatgcagatccaggaggccaagaccatggtggaggaggacctgcagaggcggctggaggagtttgaaggagagcgggagcggctgcagaggatggctgacagcgctgccagcctggagcagcagctggagcaggtgaagctgaccctgctgcagagggaccagcagctggaggccctgcagcaggagcacctggacctgatgaagcagctgaccctgacccaggaggccctgcagagccgggagcagagcctggatgccctgcagacccactatgatgagctgcaggcccggctgggggagctgcagggcgaggccgccagccgggaggacaccatctgcctgctgcagaatgagaagatcatcctggaggccgccctgcaggccgccaagagcggcaaggaggagctggacagaggagcccggcggctggaggagggcacagaggagaccagcgagaccctggagaagctgcgggaggagctggccatcaagagcggccaggtggagcacctgcagcaggagacagctgccctgaagaagcagatgcagaagatcaaggagcagttcctgcagcagaaggtgatggtggaggcctacagaagagatgccaccagcaaggaccagctgatcagcgagctgaaggccaccaggaagaggctggacagcgagctgaaggagctgcggcaggagctgatgcaggtgcatggagagaagaggacagctgaggccgagctgagccggctgcaccgggaggtggcccaggtgcggcagcacatggctgacctggagggccacctgcagagcgcccagaaggagagagatgagatggagacccacctgcagagcctgcagtttgacaaggagcagatggtggccgtgacagaggccaatgaggccctgaagaagcagatcgaggagctgcagcaggaggccaggaaggccatcacagagcagaagcagaagatgaggcggctgggcagtgacctgaccagcgcccagaaggagatgaagaccaagcacaaggcctatgaaaatgctgtgggcatcctgagccggcggctgcaggaggccctggccgccaaggaggccgcagatgctgagctgggccagctgcgggcccagggcggcagcagtgacagcagcctggccctgcacgagcgcatccaggccctggaggccgagctgcaggccgtgagccacagcaagaccctgctggagaaggagctgcaggaggtgattgccctgaccagccaggagctggaggagagccgggagaaggtgctggagctggaggatgaggtgcggcccggccacctgctgtggaggcagagaggagctggccacgtgtccccaggccacgccgccacccgggagaccaggaggaccaagctgcaccgggtgcccagcgtggccacctttggagtggccaccttctag

SEQ ID NO: 154353 - DNA, 6693 bp, synthetic construct
  misc_feature 1..6693: note = Description of Artificial Sequence: Synthetic coding sequence
  source 1..6693: mol_type = other DNA
atgttcaagaagctgaagcagaagatcagcgaggagcagcagcagctgcagcaggccctggccccagcccaggccagcagcaacagcagcacccccaccaggatgaggagcaggaccagcagcttcacagagcagctggatgagggcacccccaaccgggagagcggggacacccagagctttgcccagaagctgcagctgcgggtgcccagcgtggagagcctcttccgcagccccatcaaggagagcctcttccgcagcagcagcaaggagagcctggtgaggaccagcagccgggagagcctgaaccggctggacctggacagcagcacagccagctttgacccccccagcgacatggacagcgaggccgaggacctggtgggcaacagcgacagcctgaacaaggagcagctgatccagaggctgcggaggatggagaggagcctgagcagctaccggggcaagtacagcgagctggtgacagcctaccagatgctgcagcgggagaagaagaagctgcagggcatcctgagccagagccaggacaagagcctgcggagaattgctgagctgcgggaggagctgcagatggaccagcaggccaagaagcacctgcaggaggagtttgatgccagcctggaggagaaggaccagtacatctctgtgctgcagacccaggtgtccctgctgaagcagaggctgagaaatggccccatgaatgtggatgtgctgaagcccctgccccagctggagccccaggccgaggtgttcaccaaggaggagaaccctgagagtgatggagagcctgtggtggaggatggcacctctgtgaagaccctggagaccctgcagcagagggtgaagaggcaggagaacctgctgaagcgctgcaaggagaccatccagagccacaaggagcagtgcaccctgctgaccagcgagaaggaggccctgcaggagcagctggatgagcggctgcaggagctggagaagatcaaggacctgcacatggccgagaagaccaagctgatcacccagctgagagatgccaagaacctgattgagcagctggagcaggacaagggcatggtgattgctgagaccaagaggcagatgcatgagaccctggagatgaaggaggaggagatcgcccagctgcggagccgcatcaagcagatgaccacccagggcgaggagctgcgggagcagaaggagaagtcagaaagagctgcctttgaggagctggagaaggccctgagcacagcccagaagacagaggaggcccggaggaagctgaaggccgagatggatgagcagatcaagaccatcgagaagaccagcgaggaggagcgcatcagcctgcagcaggagctgagccgggtgaagcaggaggtggtggatgtgatgaagaagagcagcgaggagcagatcgccaagctgcagaagctgcacgagaaggagctggccaggaaggagcaggagctgaccaagaagctgcagacccgggagcgggagttccaggagcagatgaaggtggccctggagaagagccagagcgagtacctgaagatcagccaggagaaggagcagcaggagagcctggccctggaggagctggagctgcagaagaaggccatcctgacagaaagtgagaacaagctgcgggacctgcagcaggaggccgagacctaccgcacccgcatcctggagctggagagcagcctggagaagagcctgcaggagaacaagaaccagagcaaggacctggccgtgcacctggaggccgagaagaacaagcacaacaaggagatcaccgtgatggtggagaagcacaagacagagctggagagcctgaagcaccagcaggatgccctgtggacagagaagctgcaggtgctgaagcagcagtaccagacagagatggagaagctgcgggagaagtgtgagcaggagaaggagaccctgctgaaggacaaggagatcatcttccaggcccacatcgaggagatgaatgagaagaccctggagaagctggatgtgaagcagacagagctggagagcctgagcagcgagctgtctgaggtgctgaaggcccggcacaagctggaggaggagctgtctgtgctgaaggaccagacagacaagatgaagcaggagctggaggccaagatggatgagcagaagaaccaccaccagcagcaggtggacagcatcatcaaggagcacgaggtgtccatccagaggacagagaaggccctgaaggaccagatcaaccagctggagctgctgctgaaggagcgggacaagcacctgaaggagcaccaggcccacgtggagaacctggaggccgacatcaagaggtctgagggggagctgcagcaggccagcgccaagctggatgtgttccagagctaccagagcgccacccatgagcagaccaaggcctatgaggagcagctggcccagctgcagcagaagctgctggacctggagacagagcgcatcctgctgaccaagcaggtggccgaggtggaggcccagaagaaggatgtgtgcacagagctggatgcccacaagatccaggtgcaggacctgatgcagcagctggagaagcagaacagcgagatggagcagaaggtgaagagcctgacccaggtgtatgagagcaagctggaggatggcaacaaggagcaggagcagaccaagcagatcctggtggagaaggagaacatgatcctgcagatgagggagggccagaagaaggagattgagatcctgacccagaagctgagcgccaaggaggacagcatccacatcctgaatgaggagtatgagaccaagttcaagaaccaggagaagaagatggagaaggtgaagcagaaggccaaggagatgcaggagaccctgaagaagaagctgctggaccaggaggccaagctgaagaaggagctggagaacacagccctggagctgagccagaaggagaagcagttcaatgccaagatgctggagatggcccaggccaacagcgctggcatcagtgatgctgtgtcccggctggagaccaaccagaaggagcagatcgagagcctgacagaggtgcacagaagagagctgaatgatgtgatcagcatctgggagaagaagctgaaccagcaggccgaggagctgcaggagatccacgagatccagctgcaggagaaggagcaggaggtggccgagctgaagcagaagatcctgctgtttggctgtgagaaggaggagatgaacaaggagatcacctggctgaaggaggagggcgtgaagcaggacaccaccctgaatgagctgcaggagcagctgaagcagaagagcgcccacgtgaacagcctggcccaggatgagaccaagctgaaggcccacctggagaagctggaggtggacctgaacaagagcctgaaggagaacaccttcctgcaggagcagctggtggagctgaagatgctggccgaggaggacaagaggaaggtgtctgagctgaccagcaagctgaagaccacagatgaggagttccagagcctgaagagcagccatgagaagagcaacaagagcctggaggacaagagcctggagttcaagaagctgtctgaggagctggccatccagctggacatctgctgcaagaagacagaggccctgctggaggccaagaccaatgaactcatcaacatcagcagcagcaagaccaatgccatcctgagccgcatcagccactgccagcacaggaccaccaaggtgaaggaggccctgctgatcaagacctgcaccgtgtctgagctggaggcccagctgcggcagctgacagaggagcagaacaccctgaacatctccttccagcaggccacccaccagctggaggagaaggagaaccagatcaagtccatgaaggctgacatcgagagcctggtgacagagaaggaggccctgcagaaggagggcggcaaccagcagcaggccgccagcgagaaggagagctgcatcacccagctgaagaaggagctgtctgagaacatcaatgctgtgaccctgatgaaggaggagctgaaggagaagaaggtggagatcagcagcctgagcaagcagctgacagacctgaatgtgcagctgcagaacagcatcagcctgtctgagaaggaggccgccatcagcagcctgaggaagcagtatgatgaggagaagtgtgagctgctggaccaggtgcaggacctgtccttcaaggtggacaccctgagcaaggagaagatcagcgccctggagcaggtggatgactggagcaacaagttcagcgagtggaagaagaaggcccagagccgcttcacccagcaccagaacacagtgaaggagctgcagatccagctggagctgaagagcaaggaggcctatgagaaggatgagcagatcaacctgctgaaggaggagctggaccagcagaacaagagatttgactgcctgaagggggagatggaggatgacaagagcaagatggagaagaaggagagcaacctggagacagagctgaagagccagacagcccgcatcatggagctggaggaccacatcacccagaagaccattgaaattgagagcctgaatgaggtgctgaagaactacaaccagcagaaggacatcgagcacaaggagctggtgcagaagctgcagcacttccaggagctgggggaggagaaggacaacagagtgaaggaggccgaggagaagatcctgaccctggagaaccaggtgtacagcatgaaggccgagctggagaccaagaagaaggagctggagcacgtgaacctgtctgtgaagagcaaggaggaggagctgaaggccctggaggaccggctggagagcgagagcgctgccaagctggccgagctgaagaggaaggccgagcagaagattgctgccatcaagaagcagctgctgagccagatggaggagaaggaggagcagtacaagaagggcacagagagccacctgtctgagctgaacaccaagctgcaggagcgggagcgggaggtgcacatcctggaggagaagctgaagtctgtggagagcagccagagcgagaccctgattgtgcccaggtctgccaagaatgtggccgcctacacagagcaggaggaggccgacagccagggctgtgtgcagaagacctatgaggagaagatctctgtgctgcagaggaacctgacagagaaggagaagctgctgcagagggtgggccaggagaaggaggagaccgtgagcagccactttgagatgcgctgccagtaccaggagcggctcatcaagctggagcacgccgaggccaagcagcacgaggaccagagcatgattggccacctgcaggaggagctggaggagaagaacaagaagtacagcctgattgtggcccagcacgtggagaaggagggcggcaagaacaacatccaggccaagcagaacctggagaatgtgtttgatgatgtgcagaagaccctgcaggagaaggagctgacctgccagatcctggagcagaagatcaaggagctggacagctgcctggtgcggcagaaggaggtgcaccgggtggagatggaggagctgaccagcaaatatgagaagctgcaggccctgcagcagatggatggaagaaacaagcccacagagctgctggaggagaacacagaggagaagagcaagagccacctggtgcagcccaagctgctgagcaacatggaggcccagcacaatgacctggagttcaagctggccggggctgagcgggagaagcagaagctgggcaaggagatcgtgcggctgcagaaggacctgaggatgctgaggaaggagcaccagcaggagctggagatcctgaagaaggagtatgaccaggagcgggaggagaagatcaagcaggagcaggaggacctggagctgaagcacaacagcaccctgaagcagctgatgagggagttcaacacccagctggcccagaaggagcaggagctggagatgaccatcaaggagaccatcaacaaggcccaggaggtggaggccgagctgctggagagccaccaggaggagaccaaccagctgctgaagaagattgctgagaaggatgatgacctgaagaggacagccaagagatatgaggagatcctggatgcccgggaggaggagatgacagccaaggtgcgggacctgcagacccagctggaggagctgcagaagaagtaccagcagaagctggagcaggaggagaaccctggaaatgacaacgtgaccatcatggagctgcagacccagctggcccagaagaccaccctcatcagtgacagcaagctgaaggagcaggagttccgggagcagatccacaacctggaggaccggctgaagaagtatgagaagaatgtgtatgccaccaccgtgggcaccccctacaagggcggcaacctgtaccacacagatgtgtccctgtttggagagcccacagaatttgagtacctgaggaaggtgctgtttgagtacatgatgggccgggagaccaagaccatggccaaggtgatcaccaccgtgctgaagttcccagatgaccagacccagaagatcctggagcgggaggatgcccggctgatgttcaccagccccaggagcggcatcttctag

SEQ ID NO: 154354 - DNA, 6732 bp, synthetic construct
  misc_feature 1..6732: note = Description of Artificial Sequence: Synthetic coding sequence
  source 1..6732: mol_type = other DNA
atgttcaagaagctgaagcagaagatcagcgaggagcagcagcagctgcagcaggccctggccccagcccaggccagcagcaacagcagcacccccaccaggatgaggagcaggaccagcagcttcacagagcagctggatgagggcacccccaaccgggagaatgccagcacccacgccagcaagagcccagacagcgtgaatggcagcgagcccagcatcccccagagcggggacacccagagctttgcccagaagctgcagctgcgggtgcccagcgtggagagcctcttccgcagccccatcaaggagagcctcttccgcagcagcagcaaggagagcctggtgaggaccagcagccgggagagcctgaaccggctggacctggacagcagcacagccagctttgacccccccagcgacatggacagcgaggccgaggacctggtgggcaacagcgacagcctgaacaaggagcagctgatccagaggctgcggaggatggagaggagcctgagcagctaccggggcaagtacagcgagctggtgacagcctaccagatgctgcagcgggagaagaagaagctgcagggcatcctgagccagagccaggacaagagcctgcggagaattgctgagctgcgggaggagctgcagatggaccagcaggccaagaagcacctgcaggaggagtttgatgccagcctggaggagaaggaccagtacatctctgtgctgcagacccaggtgtccctgctgaagcagaggctgagaaatggccccatgaatgtggatgtgctgaagcccctgccccagctggagccccaggccgaggtgttcaccaaggaggagaaccctgagagtgatggagagcctgtggtggaggatggcacctctgtgaagaccctggagaccctgcagcagagggtgaagaggcaggagaacctgctgaagcgctgcaaggagaccatccagagccacaaggagcagtgcaccctgctgaccagcgagaaggaggccctgcaggagcagctggatgagcggctgcaggagctggagaagatcaaggacctgcacatggccgagaagaccaagctgatcacccagctgagagatgccaagaacctgattgagcagctggagcaggacaagggcatggtgattgctgagaccaagaggcagatgcatgagaccctggagatgaaggaggaggagatcgcccagctgcggagccgcatcaagcagatgaccacccagggcgaggagctgcgggagcagaaggagaagtcagaaagagctgcctttgaggagctggagaaggccctgagcacagcccagaagacagaggaggcccggaggaagctgaaggccgagatggatgagcagatcaagaccatcgagaagaccagcgaggaggagcgcatcagcctgcagcaggagctgagccgggtgaagcaggaggtggtggatgtgatgaagaagagcagcgaggagcagatcgccaagctgcagaagctgcacgagaaggagctggccaggaaggagcaggagctgaccaagaagctgcagacccgggagcgggagttccaggagcagatgaaggtggccctggagaagagccagagcgagtacctgaagatcagccaggagaaggagcagcaggagagcctggccctggaggagctggagctgcagaagaaggccatcctgacagaaagtgagaacaagctgcgggacctgcagcaggaggccgagacctaccgcacccgcatcctggagctggagagcagcctggagaagagcctgcaggagaacaagaaccagagcaaggacctggccgtgcacctggaggccgagaagaacaagcacaacaaggagatcaccgtgatggtggagaagcacaagacagagctggagagcctgaagcaccagcaggatgccctgtggacagagaagctgcaggtgctgaagcagcagtaccagacagagatggagaagctgcgggagaagtgtgagcaggagaaggagaccctgctgaaggacaaggagatcatcttccaggcccacatcgaggagatgaatgagaagaccctggagaagctggatgtgaagcagacagagctggagagcctgagcagcgagctgtctgaggtgctgaaggcccggcacaagctggaggaggagctgtctgtgctgaaggaccagacagacaagatgaagcaggagctggaggccaagatggatgagcagaagaaccaccaccagcagcaggtggacagcatcatcaaggagcacgaggtgtccatccagaggacagagaaggccctgaaggaccagatcaaccagctggagctgctgctgaaggagcgggacaagcacctgaaggagcaccaggcccacgtggagaacctggaggccgacatcaagaggtctgagggggagctgcagcaggccagcgccaagctggatgtgttccagagctaccagagcgccacccatgagcagaccaaggcctatgaggagcagctggcccagctgcagcagaagctgctggacctggagacagagcgcatcctgctgaccaagcaggtggccgaggtggaggcccagaagaaggatgtgtgcacagagctggatgcccacaagatccaggtgcaggacctgatgcagcagctggagaagcagaacagcgagatggagcagaaggtgaagagcctgacccaggtgtatgagagcaagctggaggatggcaacaaggagcaggagcagaccaagcagatcctggtggagaaggagaacatgatcctgcagatgagggagggccagaagaaggagattgagatcctgacccagaagctgagcgccaaggaggacagcatccacatcctgaatgaggagtatgagaccaagttcaagaaccaggagaagaagatggagaaggtgaagcagaaggccaaggagatgcaggagaccctgaagaagaagctgctggaccaggaggccaagctgaagaaggagctggagaacacagccctggagctgagccagaaggagaagcagttcaatgccaagatgctggagatggcccaggccaacagcgctggcatcagtgatgctgtgtcccggctggagaccaaccagaaggagcagatcgagagcctgacagaggtgcacagaagagagctgaatgatgtgatcagcatctgggagaagaagctgaaccagcaggccgaggagctgcaggagatccacgagatccagctgcaggagaaggagcaggaggtggccgagctgaagcagaagatcctgctgtttggctgtgagaaggaggagatgaacaaggagatcacctggctgaaggaggagggcgtgaagcaggacaccaccctgaatgagctgcaggagcagctgaagcagaagagcgcccacgtgaacagcctggcccaggatgagaccaagctgaaggcccacctggagaagctggaggtggacctgaacaagagcctgaaggagaacaccttcctgcaggagcagctggtggagctgaagatgctggccgaggaggacaagaggaaggtgtctgagctgaccagcaagctgaagaccacagatgaggagttccagagcctgaagagcagccatgagaagagcaacaagagcctggaggacaagagcctggagttcaagaagctgtctgaggagctggccatccagctggacatctgctgcaagaagacagaggccctgctggaggccaagaccaatgaactcatcaacatcagcagcagcaagaccaatgccatcctgagccgcatcagccactgccagcacaggaccaccaaggtgaaggaggccctgctgatcaagacctgcaccgtgtctgagctggaggcccagctgcggcagctgacagaggagcagaacaccctgaacatctccttccagcaggccacccaccagctggaggagaaggagaaccagatcaagtccatgaaggctgacatcgagagcctggtgacagagaaggaggccctgcagaaggagggcggcaaccagcagcaggccgccagcgagaaggagagctgcatcacccagctgaagaaggagctgtctgagaacatcaatgctgtgaccctgatgaaggaggagctgaaggagaagaaggtggagatcagcagcctgagcaagcagctgacagacctgaatgtgcagctgcagaacagcatcagcctgtctgagaaggaggccgccatcagcagcctgaggaagcagtatgatgaggagaagtgtgagctgctggaccaggtgcaggacctgtccttcaaggtggacaccctgagcaaggagaagatcagcgccctggagcaggtggatgactggagcaacaagttcagcgagtggaagaagaaggcccagagccgcttcacccagcaccagaacacagtgaaggagctgcagatccagctggagctgaagagcaaggaggcctatgagaaggatgagcagatcaacctgctgaaggaggagctggaccagcagaacaagagatttgactgcctgaagggggagatggaggatgacaagagcaagatggagaagaaggagagcaacctggagacagagctgaagagccagacagcccgcatcatggagctggaggaccacatcacccagaagaccattgaaattgagagcctgaatgaggtgctgaagaactacaaccagcagaaggacatcgagcacaaggagctggtgcagaagctgcagcacttccaggagctgggggaggagaaggacaacagagtgaaggaggccgaggagaagatcctgaccctggagaaccaggtgtacagcatgaaggccgagctggagaccaagaagaaggagctggagcacgtgaacctgtctgtgaagagcaaggaggaggagctgaaggccctggaggaccggctggagagcgagagcgctgccaagctggccgagctgaagaggaaggccgagcagaagattgctgccatcaagaagcagctgctgagccagatggaggagaaggaggagcagtacaagaagggcacagagagccacctgtctgagctgaacaccaagctgcaggagcgggagcgggaggtgcacatcctggaggagaagctgaagtctgtggagagcagccagagcgagaccctgattgtgcccaggtctgccaagaatgtggccgcctacacagagcaggaggaggccgacagccagggctgtgtgcagaagacctatgaggagaagatctctgtgctgcagaggaacctgacagagaaggagaagctgctgcagagggtgggccaggagaaggaggagaccgtgagcagccactttgagatgcgctgccagtaccaggagcggctcatcaagctggagcacgccgaggccaagcagcacgaggaccagagcatgattggccacctgcaggaggagctggaggagaagaacaagaagtacagcctgattgtggcccagcacgtggagaaggagggcggcaagaacaacatccaggccaagcagaacctggagaatgtgtttgatgatgtgcagaagaccctgcaggagaaggagctgacctgccagatcctggagcagaagatcaaggagctggacagctgcctggtgcggcagaaggaggtgcaccgggtggagatggaggagctgaccagcaaatatgagaagctgcaggccctgcagcagatggatggaagaaacaagcccacagagctgctggaggagaacacagaggagaagagcaagagccacctggtgcagcccaagctgctgagcaacatggaggcccagcacaatgacctggagttcaagctggccggggctgagcgggagaagcagaagctgggcaaggagatcgtgcggctgcagaaggacctgaggatgctgaggaaggagcaccagcaggagctggagatcctgaagaaggagtatgaccaggagcgggaggagaagatcaagcaggagcaggaggacctggagctgaagcacaacagcaccctgaagcagctgatgagggagttcaacacccagctggcccagaaggagcaggagctggagatgaccatcaaggagaccatcaacaaggcccaggaggtggaggccgagctgctggagagccaccaggaggagaccaaccagctgctgaagaagattgctgagaaggatgatgacctgaagaggacagccaagagatatgaggagatcctggatgcccgggaggaggagatgacagccaaggtgcgggacctgcagacccagctggaggagctgcagaagaagtaccagcagaagctggagcaggaggagaaccctggaaatgacaacacccagctggcccagaagaccaccctcatcagtgacagcaagctgaaggagcaggagttccgggagcagatccacaacctggaggaccggctgaagaagtatgagaagaatgtgtatgccaccaccgtgggcaccccctacaagggcggcaacctgtaccacacagatgtgtccctgtttggagagcccacagaatttgagtacctgaggaaggtgctgtttgagtacatgatgggccgggagaccaagaccatggccaaggtgatcaccaccgtgctgaagttcccagatgaccagacccagaagatcctggagagagaagatgcccggctgatgtcctggctgcggagcagcagctag

SEQ ID NO: 154355 - DNA, 2196 bp, synthetic construct
  misc_feature 1..2196: note = Description of Artificial Sequence: Synthetic coding sequence
  source 1..2196: mol_type = other DNA
atgtcctggtttgtggacctggccggcaaggccgaggacctgctgaacagagtggaccagggcgccgccacagccctgagcaggaaggacaatgccagcaacatctacagcaagaacacagactacacagagctgcaccagcagaacacagacctgatctaccagacaggccccaagagcacctacatcagcagcgctgctgacaacatccggaaccagaaggccaccatcctggccggcacagccaacgtgaaggtgggcagcaggacccctgtggaggccagccaccctgtggagaatgcctctgtgccccggcccagcagccactttgtgcggaggaagaagtctgagccagatgatgagctgctgtttgacttcctgaacagcagccagaaggagcccaccggccgggtggagatcaggaaggagaagggcaagacccctgtgttccagagcagccagaccagctctgtgtcctctgtgaaccccagcgtgaccaccatcaagaccattgaagaaaattcctttggcagccagacccatgaagctgccagcaacagcgacagcagccatgagggccaggaggagagcagcaaagaaaatgtgagcagcaatgctgcctgcccagaccacacccccaccccaaatgatgatggcaagagccatgagctgagcaacctgcggctggagaaccagctgctgagaaatgaggtgcagagcctgaaccaggagatggccagcctgctgcagaggagcaaggagacccaggaggagctgaacaaggcccgggcccgggtggagaagtggaatgctgaccacagcaagagtgacaggatgacccggggcctgcgggcccaggtggatgacctgacagaagctgtggccgccaaggacagccagctggccgtgctgaaggtgcggctgcaggaggccgaccagctgctgagcaccaggacagaggccctggaggccctgcagagcgagaagagccgcatcatgcaggaccagagcgagggcaacagcctgcagaaccaggccctgcagaccttccaggagcggctgcatgaagcagatgccaccctgaagcgggagcaggagagctacaagcagatgcagagcgagtttgctgcccggctgaacaaggtggagatggagcggcagaacctggccgaggccatcaccctggccgagaggaagtacagtgatgagaagaagagggtggatgagctgcagcagcaggtgaagctgtacaagctgaacctggagagcagcaagcaggagctgattgactacaagcagaaggccacccgcatcctgcagagcaaggagaagctgatcaacagcctgaaggagggcagcggctttgagggcctggacagcagcacagccagctccatggagctggaggagctgcggcatgagaaggagatgcagcgggaggagatccagaagctgatgggccagatccaccagctgcggtctgagctgcaggacatggaggcccagcaggtgaatgaagctgagagcgcccgggagcagctgcaggacctgcatgaccagattgctggccagaaggccagcaagcaggagctggagacagagctggagcggctgaagcaggagttccactacattgaagaagatctctaccgcaccaagaacaccctgcagagccgcatcaaggacagagatgaggagatccagaagctgaggaaccagctgaccaacaagaccctgagcaacagcagccagagcgagctggagaaccggctgcaccagctgacagagaccctcatccagaagcagaccatgctggagagcctgagcacagagaagaacagcctggtgttccagctggagcggctggagcagcagatgaacagcgccagcggcagcagcagcaatggcagcagcatcaacatgagcggcatcgacaacggggagggcacccggctgagaaatgtgcctgtgctcttcaatgacacagagaccaacctggccggcatgtatggcaaggtgaggaaggccgccagcagcattgaccagttcagcatccggctgggcatcttcctgcggcgctaccccatcgcccgggtgtttgtgatcatctacatggccctgctgcacctgtgggtgatgattgtgctgctgacctacaccccagagatgcaccacgaccagccctacggcaagtag

SEQ ID NO: 154356 - DNA, 2076 bp, synthetic construct
  misc_feature 1..2076: note = Description of Artificial Sequence: Synthetic coding sequence
  source 1..2076: mol_type = other DNA
atgtcctggtttgtggacctggccggcaaggccgaggacctgctgaacagagtggaccagggcgccgccacagccctgagcaggaaggacaatgccagcaacatctacagcaagaacacagactacacagagctgcaccagcagaacacagacctgatctaccagacaggccccaagagcacctacatcagcagcgctgctgacaacatccggaaccagaaggccaccatcctggccggcacagccaacgtgaaggtgggcagcaggacccctgtggaggccagccaccctgtggagaatgcctctgtgccccggcccagcagccactttgtgcggaggaagaagtctgagccagatgatgagctgctgtttgacttcctgaacagcagccagaaggagcccaccggccgggtggagatcaggaaggagaagggcaagacccctgtgttccagagcagccagaccagctctgtgtcctctgtgaaccccagcgtgaccaccatcaagaccattgaagaaaattcctttggcagccagacccatgaagctgccagcaacagcgacagcagccatgagggccaggaggagagcagcaaagaaaatgtgagcagcaatgctgcctgcccagaccacacccccaccccaaatgatgatggcaagagccatgagctgagcaacctgcggctggagaaccagctgctgagaaatgaggtgcagagcctgaaccaggagatggccagcctgctgcagaggagcaaggagacccaggaggagctgaacaaggcccgggcccgggtggagaagtggaatgctgaccacagcaagagtgacaggatgacccggggcctgcgggcccaggtggatgacctgacagaagctgtggccgccaaggacagccagctggccgtgctgaaggtgcggctgcaggaggccgaccagctgctgagcaccaggacagaggccctggaggccctgcagagcgagaagagccgcatcatgcaggaccagagcgagggcaacagcctgcagaaccaggccctgcagaccttccaggagcggctgcatgaagcagatgccaccctgaagcgggagcaggagagctacaagcagatgcagagcgagtttgctgcccggctgaacaaggtggagatggagcggcagaacctggccgaggccatcaccctggccgagaggaagtacagtgatgagaagaagagggtggatgagctgcagcagcaggtgaagctgtacaagctgaacctggagagcagcaagcaggagctgattgactacaagcagaaggccacccgcatcctgcagagcaaggagaagctgatcaacagcctgaaggagggcagcggctttgagggcctggacagcagcacagccagctccatggagctggaggagctgcggcatgagaaggagatgcagcgggaggagatccagaagctgatgggccagatccaccagctgcggtctgagctgcaggacatggaggcccagcaggtgaatgaagctgagagcgcccgggagcagctgcaggacctgcatgaccagattgctggccagaaggccagcaagcaggagctggagacagagctggagcggctgaagcaggagttccactacattgaagaagatctctaccgcaccaagaacaccctgcagagccgcatcaaggacagagatgaggagatccagaagctgaggaaccagctgaccaacaagaccctgagcaacagcagccagagcgagctggagaaccggctgcaccagctgacagagaccctcatccagaagcagaccatgctggagagcctgagcacagagaagaacagcctggtgttccagctggagcggctggagcagcagatgaacagcgccagcggcagcagcagcaatggcagcagcatcaacatgagcggcatcgacaacggggagggcacccggctgagaaatgtgcctgtgctcttcaatgacacagagaccaacctggccggcatgtatggcaaggtgaggaaggccgccagcagcattgaccagttccggctgtgcttcaccagcggcagctag

SEQ ID NO: 154357 - DNA, 1923 bp, synthetic construct
  misc_feature 1..1923: note = Description of Artificial Sequence: Synthetic coding sequence
  source 1..1923: mol_type = other DNA
atgtcctggtttgtggacctggccggcaaggccgaggacctgctgaacagagtggaccagggcgccgccacagccctgagcaggaaggacaatgccagcaacatctacagcaagaacacagactacacagagctgcaccagcagaacacagacctgatctaccagacaggccccaagagcacctacatcagcagcgctgctgacaacatccggaaccagaaggccaccatcaagaccatcgaggagaacagctttggcagccagacccatgaggccgccagcaacagcgacagcagccatgagggccaggaggagagcagcaaagaaaatgtgagcagcaatgctgcctgcccagaccacacccccaccccaaatgatgatggcaagagccatgagctgagcaacctgcggctggagaaccagctgctgagaaatgaggtgcagagcctgaaccaggagatggccagcctgctgcagaggagcaaggagacccaggaggagctgaacaaggcccgggcccgggtggagaagtggaatgctgaccacagcaagagtgacaggatgacccggggcctgcgggcccaggtggatgacctgacagaggccgtggccgccaaggacagccagctggccgtgctgaaggtgcggctgcaggaggccgaccagctgctgagcaccaggacagaggccctggaggccctgcagagcgagaagagccgcatcatgcaggaccagagcgagggcaacagcctgcagaaccaggccctgcagaccttccaggagcggctgcacgaggctgatgccaccctgaagcgggagcaggagagctacaagcagatgcagagcgagtttgctgcccggctgaacaaggtggagatggagcggcagaacctggccgaggccatcaccctggccgagaggaagtacagtgatgagaagaagagggtggatgagctgcagcagcaggtgaagctgtacaagctgaacctggagagcagcaagcaggagctgattgactacaagcagaaggccacccgcatcctgcagagcaaggagaagctgatcaacagcctgaaggagggcagcggctttgagggcctggacagcagcacagccagctccatggagctggaggagctgcggcatgagaaggagatgcagcgggaggagatccagaagctgatgggccagatccaccagctgcggtctgagctgcaggacatggaggcccagcaggtgaatgaggccgagagcgcccgggagcagctgcaggacctgcatgaccagattgctggccagaaggccagcaagcaggagctggagacagagctggagcggctgaagcaggagttccactacatcgaggaggacctgtaccgcaccaagaacaccctgcagagccgcatcaaggacagagatgaggagatccagaagctgaggaaccagctgaccaacaagaccctgagcaacagcagccagagcgagctggagaaccggctgcaccagctgacagagaccctcatccagaagcagaccatgctggagagcctgagcacagagaagaacagcctggtgttccagctggagcggctggagcagcagatgaacagcgccagcggcagcagcagcaatggcagcagcatcaacatgtctggaattgacaatggagagggcacccggctgagaaatgtgcctgtgctcttcaatgacacagagaccaacctggccggcatgtatggcaaggtgaggaaggccgccagcagcattgaccagttcagcatccggctgggcatcttcctgcggcgctaccccatcgcccgggtgtttgtgatcatctacatggccctgctgcacctgtgggtgatgattgtgctgctgacctacaccccagagatgcaccacgaccagccctacggcaagtag

SEQ ID NO: 154358 - DNA, 504 bp, synthetic construct
  misc_feature 1..504: note = Description of Artificial Sequence: Synthetic coding sequence
  source 1..504: mol_type = other DNA
atggccacagaggtgcacaacctgcaggagctgcggcgcagcgccagcctggccaccaaggtgttcatccagagggactacagtgatggcaccatctgccagttccagaccaagttccccccagagctggacagcagaattgagcggcagctgtttgaggagaccgtgaagaccctgaatggcttctacgccgaggccgagaagattggaggcagcagctacctggagggctgcctggcctgtgccacagcctacttcatcttcctgtgcatggagacccactatgagaaggtgctgaagaagatcagccgctacatccaggagcagaatgagaagatctttgccccccggggcctgctgctgacagatcctgtggagcggggcatgagggtcatcgagatcagcatctatgaggaccgctgcagcagcggcagcagcagcagcggcagcagcagcggcagcggcagcagcagcggcggcggcggcggggccggggccaggtag

SEQ ID NO: 154359 - DNA, 1812 bp, synthetic construct
  misc_feature 1..1812: note = Description of Artificial Sequence: Synthetic coding sequence
  source 1..1812: mol_type = other DNA
atggccgaggagaccggccagagcaagctggccgccgccaagaagaagttcaaggagtactggcagaggaacagacctggggtgcctgctgctgccaagaggaacaccaaggccaacggcagcagccctgagacagctgccagcggcggctgccacagcagcgaggccagcagcagcgccagcagcagcctgcacgcccggcagagcccctgccaggagcaggccgctgtgctgaacagccgcagcatcaagatcagccggctgaatgacaccatcaagagcctgaagcagcagaagaagcaggtggagcaccagctggaggaggagaagaaggccaacaatgagaagcagaaggccgagcgggagctggagggccagatccagaggctgaacacagagaagaagaagctgaacacagacctgtaccacatgaagcacagcctgcgctactttgaggaggagagcaaggacctggccggccgcctgcagaggagcagccagagaattggagagctggagtggagcctgtgtgctgtggccgccacccagaagaagaagccagatggcttcagcagccgcagcaaggccctgctgaagaggcagctggagcagagcatccgggagcagatcctgctgaagggccacgtgacccagctgaaggagagcctgaaggaggtgcagctggagcgggaccagtatgcagagcagatcaagggggagcgggcccagtggcagcagaggatgaggaagatgagccaggaggtgtgcaccctgaaggaggagaagaagcatgacacccaccgggtggaggagctggagaggagcctgagccggctgaagaaccagatggccgagcccctgcccccagatgccccagctgtgagcagcgaggtggagctgcaggacctgaggaaggagctggagcgggtggccggggagctgcaggcccaggtggagaacaaccagtgcatcagcctgctgaacagaggccagaaggagcggctgcgggagcaggaggagcggctgcaggagcagcaggagcggctgcgggagcgggagaagaggctgcagcagctggccgagccccagagcgacctggaggagctgaagcatgagaacaagagcgccctgcagctggagcagcaggtgaaggagctgcaggagaagctgggccaggtgatggagaccctgaccagcgctgagaaggagcctgaggccgctgtgcctgccagcggcactggaggagagagcagcggcctgatggacctgctggaggagaaggctgacctgcgggagcacgtggagaagctggagctgggcttcatccagtacagaagagagcgctgccaccagaaggtgcaccggctgctgacagagcccggggacagcgccaaggatgccagccctgggggcggccaccaccaggccggccctggccagggcggggaggagggggaggccgccggggctgctggagatggagtggccgcctgtggcagctacagcgagggccacggcaagttcctggccgccgccagaaatcctgctgctgagcccagccctggggccccagccccccaggagctgggcgctgctgacaagcatggagacctgtgtgaggccagcctgaccaacagcgtggagcccgcccagggcgaggcccgggagggcagcagccaggacaaccccacagcccagcctgtgctgcagctgctgggggagatgcaggaccaccaggagcaccctggcctgggcagcaactgctgcgtgccctgcttctgctgggcctggctgcccaggagaagaagatag

SEQ ID NO: 154360 - DNA, 1485 bp, synthetic construct
  misc_feature 1..1485: note = Description of Artificial Sequence: Synthetic coding sequence
  source 1..1485: mol_type = other DNA
gagaagaaggccaacaatgagaagcagaaggccgagcgggagctggagggccagatccagaggctgaacacagagaagaagaagctgaacacagacctgtaccacatgaagcacagcctgcgctactttgaggaggagagcaaggacctggccggccgcctgcagaggagcagccagagaattggagagctggagtggagcctgtgtgctgtggccgccacccagaagaagaagccagatggcttcagcagccgcagcaaggccctgctgaagaggcagctggagcagagcatccgggagcagatcctgctgaagggccacgtgacccagctgaaggagagcctgaaggaggtgcagctggagcgggaccagtatgcagagcagatcaagggggagcgggcccagtggcagcagaggatgaggaagatgagccaggaggtgtgcaccctgaaggaggagaagaagcatgacacccaccgggtggaggagctggagaggagcctgagccggctgaagaaccagatggccgagcccctgcccccagatgccccagctgtgagcagcgaggtggagctgcaggacctgaggaaggagctggagcgggtggccggggagctgcaggcccaggtggagaacaaccagtgcatcagcctgctgaacagaggccagaaggagcggctgcgggagcaggaggagcggctgcaggagcagcaggagcggctgcgggagcgggagaagaggctgcagcagctggccgagccccagagcgacctggaggagctgcacgagaacaagagcgccctgcagctggagcagcaggtgaaggagctgcaggagaagctgggccaggtgatggagaccctgaccagcgctgagaaggagcctgaggccgctgtgcctgccagcggcaccggcggggagagcagcggcctgatggacctgctggaggagaaggctgacctgcgggagcacgtggagaagctggagctgggcttcatccagtaccgccgggagcgctgccaccagaaggtgcaccggctgctgacagagcccggggacagcgccaaggatgccagccctgggggcggccaccaccaggccggccctggccagggcggggaggagggggaggccgccggggctgctggagatggagtggccgcctgtggcagctacagcgagggccacggcaagttcctggccgccgccaggaacccagctgctgagcccagccctggggccccagccccccaggagctgggcgctgctgacaagcacggggacctgtgtgaggccagcctgaccaacagcgtggagcccgcccagggcgaggcccgggagggcagcagccaggacaaccccacagcccagcctgtgctgcagctgctgggggagatgcaggaccaccaggagcaccctggcctgggcagcaactgctgcgtgccctgcttctgctgggcctggctgcccaggagaagaagatag

SEQ ID NO: 154361 - DNA, 1812 bp, synthetic construct; identical to SEQ ID NO: 154359
  misc_feature 1..1812: note = Description of Artificial Sequence: Synthetic coding sequence
  source 1..1812: mol_type = other DNA

SEQ ID NO: 154362 - DNA, 1902 bp, synthetic construct
  misc_feature 1..1902: note = Description of Artificial Sequence: Synthetic coding sequence
  source 1..1902: mol_type = other DNA
atgctgcctgtggatggagaggagaggaagtctgagggcagtgacacagaaggagacaggaccagcccctgtgccggccccaccagcagcgccaccctgaaggacctggaggtgggcggcagcggctggcgctgcagcgaccctgctggccagcccagcaacctgctgccccagaggggcctgggcgcccccctgcctgctgagacagcccacacccagcccagccccaatgacaggagcctgtacctgagccccaagagcagcagcgccagcagcagcctgcacgcccggcagagcccctgccaggagcaggccgctgtgctgaacagccgcagcatcaagatcagccggctgaatgacaccatcaagagcctgaagcagcagaagaagcaggtggagcaccagctggaggaggagaagaaggccaacaatgagaagcagaaggccgagcgggagctggagggccagatccagaggctgaacacagagaagaagaagctgaacacagacctgtaccacatgaagcacagcctgcgctactttgaggaggagagcaaggacctggccggccgcctgcagaggagcagccagagaattggagagctggagtggagcctgtgtgctgtggccgccacccagaagaagaagccagatggcttcagcagccgcagcaaggccctgctgaagaggcagctggagcagagcatccgggagcagatcctgctgaagggccacgtgacccagctgaaggagagcctgaaggaggtgcagctggagcgggaccagtatgcagagcagatcaagggggagcgggcccagtggcagcagaggatgaggaagatgagccaggaggtgtgcaccctgaaggaggagaagaagcatgacacccaccgggtggaggagctggagaggagcctgagccggctgaagaaccagatggccgagcccctgcccccagatgccccagctgtgagcagcgaggtggagctgcaggacctgaggaaggagctggagcgggtggccggggagctgcaggcccaggtggagaacaaccagtgcatcagcctgctgaacagaggccagaaggagcggctgcgggagcaggaggagcggctgcaggagcagcaggagcggctgcgggagcgggagaagaggctgcagcagctggccgagccccagagcgacctggaggagctgaagcatgagaacaagagcgccctgcagctggagcagcaggtgaaggagctgcaggagaagctgggccaggtgatggagaccctgaccagcgctgagaaggagcctgaggccgctgtgcctgccagcggcactggaggagagagcagcggcctgatggacctgctggaggagaaggctgacctgcgggagcacgtggagaagctggagctgggcttcatccagtacagaagagagcgctgccaccagaaggtgcaccggctgctgacagagcccggggacagcgccaaggatgccagccctgggggcggccaccaccaggccggccctggccagggcggggaggagggggaggccgccggggctgctggagatggagtggccgcctgtggcagctacagcgagggccacggcaagttcctggccgccgccagaaatcctgctgctgagcccagccctggggccccagccccccaggagctgggcgctgctgacaagcatggagacctgtgtgaggccagcctgaccaacagcgtggagcccgcccagggcgaggcccgggagggcagcagccaggacaaccccacagcccagcctgtgctgcagctgctgggggagatgcaggaccaccaggagcaccctggcctgggcagcaactgctgcgtgccctgcttctgctgggcctggctgcccaggagaagaagatag

SEQ ID NO: 154363 - DNA, 9780 bp, synthetic construct
  misc_feature 1..9780: note = Description of Artificial Sequence: Synthetic coding sequence
  source 1..9780: mol_type = other DNA
atgctgagccggctgagcggcctggccaacgtggtgctgcacgagctgtctggagatgatgacacagaccagaacatgagggcccccctggaccctgagctgcaccaggagagtgacatggagttcaacaacaccacccaggaggatgtgcaggagcggctggcctatgcagagcagctggtggtggagctgaaggacatcatccggcagaaggatgtgcagctgcagcagaaggatgaggccctgcaggaggagaggaaggctgctgacaacaagatcaagaagctgaagctgcacgccaaggccaagctgaccagcctgaacaagtacatcgaggagatgaaggcccagggcggcaccgtgctgcccacagagccccagagcgaggagcagctgagcaagcatgacaagagcagcacagaggaggagatggagattgagaagatcaagcacaagctgcaggagaaggaggagctgatcagcaccctgcaggcccagctgacccaggcccaggccgagcagcctgcccagagcagcacagagatggaggagtttgtgatgatgaagcagcagctgcaggagaaggaggagttcatcagcaccctgcaggcccagctgagccagacccaggccgagcaggccgcccagcaggtggtgcgggagaaggatgccaggtttgagacccaggtgcggctgcatgaagatgagctgctgcagctggtgacccaggctgatgtggagacagagatgcagcagaagctgcgggtgctgcagaggaagctggaggagcacgaggagagcctggtgggccgggcccaggtggtggacctgctgcagcaggagctgacagctgctgagcagaggaaccagatcctgagccagcagctgcagcagatggaggccgagcacaacaccctgaggaacacagtggagacagagcgggaggagagcaagatcctgctggagaagatggagctggaggtggccgagaggaagctgtccttccacaacctgcaggaggagatgcaccacctgctggagcagtttgagcaggccggccaggcccaggccgagctggagagccgctacagcgccctggagcagaagcacaaggccgagatggaggagaagaccagccacatcctgagcctgcagaagacaggccaggagctgcagagcgcctgtgatgccctgaaggaccagaacagcaagctgctgcaggacaagaatgagcaggccgtgcagagcgcccagaccatccagcagctggaggaccagctgcagcagaagagcaaggagatcagccagttcctgaaccggctgcccctgcagcagcacgagacagccagccagaccagcttcccagatgtgtacaatgaaggcacccaggccgtgacagaggagaacatcgccagcctgcagaagagggtggtggagctggagaatgagaagggggccctgctgctgagcagcattgagctggaggagctgaaggccgagaatgagaagctgagcagccagatcaccctgctggaggcccagaacagaactggagaggccgaccgggaggtgtctgagatcagcatcgtggacatcgccaacaagaggagcagcagcgctgaggagagcggccaggatgtgctggagaacaccttcagccagaagcacaaggagctgtctgtgctgctgctggagatgaaggaggcccaggaggagatcgccttcctgaagctgcagctgcagggcaagagagctgaggaggccgaccacgaggtgctggaccagaaggagatgaagcagatggagggggagggcatcgcccccatcaagatgaaggtgttcctggaggacaccggccaggacttccccctgatgcccaatgaggagagcagcctgcctgctgtggagaaggagcaggccagcacagagcaccagagcaggaccagcgaggagatcagcctgaatgatgctggggtggagctgaagagcaccaagcaggatggagacaagagcctgtctgctgtgcctgacatcggccagtgccaccaggatgagctggagcggctgaagagccagatcctggagctggagctgaacttccacaaggcccaggagatctatgagaagaacctggatgagaaggccaaggagatcagcaacctgaaccagctgattgaggagttcaagaagaatgctgacaacaacagcagcgccttcaccgccctgtctgaggagcgggaccagctgctgagccaggtgaaggagctgtccatggtgacagagctgcgggcccaggtgaagcagctggagatgaacctggccgaggccgagcggcagaggcggctggactatgagagccagacagcccatgacaacctgctgacagagcagatccacagcctgagcattgaggccaagagcaaggatgtgaagattgaggtgctgcagaatgagctggatgatgtgcagctgcagttcagcgagcagagcaccctcatccgcagcctgcagagccagctgcagaacaaggagagcgaggtgctggagggcgctgagcgggtgcgccacatcagcagcaaggtggaggagctgagccaggccctgagccagaaggagctggagatcaccaagatggaccagctgctgctggagaagaagagagatgtggagaccctgcagcagaccatcgaggagaaggaccagcaggtgacagagatctccttctccatgacagagaagatggtgcagctgaatgaggagaagttcagcctgggcgtggagatcaagaccctgaaggagcagctgaacctgctgagcagagctgaggaggccaagaaggagcaggtggaggaggacaatgaggtgagcagcggcctgaagcagaactatgatgagatgagccctgctggccagatcagcaaggaggagctgcagcatgaatttgacctgctgaagaaggaaaatgagcagaggaagaggaagctgcaggccgccctgatcaacaggaaggagctgctgcagagggtgtcccggctggaggaggagctggccaacctgaaggatgagagcaagaaggagatccccctgtctgaaacagagcggggggaggtggaggaggacaaggagaacaaggagtacagcgagaagtgtgtgaccagcaagtgccaggagattgagatctacctgaagcagaccatcagcgagaaggaggtggagctgcagcacatcaggaaggacctggaggagaagctggccgctgaggagcagttccaggccctggtgaagcagatgaaccagaccctgcaggacaagaccaaccagattgacctgctgcaggccgagatcagcgagaaccaggccatcatccagaagctgatcaccagcaacacagatgccagtgatggagacagcgtggccctggtgaaggagaccgtggtgatcagccccccctgcaccggcagcagcgagcactggaagccagagctggaggagaagatcctggccctggagaaggagaaggagcagctgcagaagaagctgcaggaggccctgaccagcaggaaggccatcctgaagaaggcccaggagaaggagcggcacctgcgggaggagctgaagcagcagaaggatgactacaaccggctgcaggagcagtttgatgagcagagcaaagaaaatgaaaatattggagaccagctgcggcagctgcagatccaggtgcgggagagcattgatggcaagctgcccagcacagaccagcaggagagctgcagcagcaccccaggcctggaggagcccctcttcaaggccacagagcagcaccacacccagcctgtgctggagagcaacctgtgcccagactggcccagccacagtgaagatgccagcgccctgcagggcggcacctctgtggcccagatcaaggcccagctgaaggagattgaggccgagaaggtggagctggagctgaaggtgagcagcaccaccagcgagctgaccaagaagtctgaggaggtgttccagctgcaggagcagatcaacaagcagggcctggagattgagagcctgaagacagtgtcccatgaagctgaggtgcatgctgagagcctgcagcagaagctggagagcagccagctgcagattgctggcctggagcacctgcgggagctgcagcccaagctggatgagctgcagaagctgatcagcaagaaggaggaggatgtgtcctacctgagcggccagctgtctgagaaggaggccgccctgaccaagatccagacagagatcatcgagcaggaggacctgatcaaggccctgcacacccagctggagatgcaggccaaggagcatgatgagcgcatcaagcagctgcaggtggagctgtgtgagatgaagcagaagccagaggagattggagaggagagccgggccaagcagcagatccagaggaagctgcaggccgccctgatcagcaggaaggaggccctgaaggagaacaagagcctgcaggaggagctgagcctggcccggggcaccatcgagcggctgaccaagagcctggctgatgtggagagccaggtgtctgcccagaacaaggagaaggacacagtgctgggccgcctggccctgctgcaggaggagcgggacaagctgatcacagagatggacaggagcctgctggagaaccagagcctgagcagcagctgtgagagcctgaagctggccctggagggcctgacagaggacaaggagaagctggtgaaggagattgagagcctgaagagcagcaagattgctgagagcacagagtggcaggagaagcacaaggagctgcagaaggagtatgagatcctgctgcagagctatgaaaatgtgtccaatgaagctgagcgcatccagcacgtggtggaggccgtgcggcaggagaagcaggagctgtatggcaagctgcggagcacagaggccaacaagaaggagacagagaagcagctgcaggaggccgagcaggagatggaggagatgaaggagaagatgaggaagtttgccaagagcaagcagcagaagatcctggagctggaggaggagaatgaccggctgcgggcagaggtgcaccctgctggggacacagccaaggagtgcatggagaccctgctgagcagcaatgcctccatgaaggaggagctggagcgggtgaagatggagtatgagaccctgagcaagaagttccagagcctgatgtctgagaaggacagcctgtctgaggaggtgcaggacctgaagcaccagatcgagggcaatgtgtccaagcaggccaacctggaggccacagagaagcatgacaaccagaccaacgtgacagaggagggcacccagagcatccctggagaaacagaggagcaggacagcctgtccatgagcacccggcccacctgcagcgagagcgtgcccagcgccaagagcgccaacccagctgtgtccaaggacttcagcagccatgatgagatcaacaactacctgcagcagattgaccagctgaaggagagaattgctggcctggaggaggagaagcagaagaacaaggagttcagccagaccctggagaatgagaagaacaccctgctgagccagatcagcaccaaggatggagagctgaagatgctgcaggaggaggtgaccaagatgaacctgctgaaccagcagatccaggaggagctgagccgggtgaccaagctgaaggagacagctgaggaggagaaggatgacctggaggagcggctgatgaaccagctggccgagctgaatggcagcatcggcaactactgccaggatgtgacagatgcccagatcaagaatgagctgctggagagcgagatgaagaacctgaagaagtgtgtgtctgagctggaggaggagaagcagcagctggtgaaggagaagaccaaggtggagagcgagatcaggaaggagtacctggagaagatccagggcgcccagaaggagcccggcaacaagagccacgccaaggagctgcaggagctgctgaaggagaagcagcaggaggtgaagcagctgcagaaggactgcatccgctaccaggagaagatcagcgccctggagaggacagtgaaggccctggagtttgtgcagacagagagccagaaggacctggagatcaccaaggagaacctggcccaggccgtggagcacaggaagaaggcccaggccgagctggccagcttcaaggtgctgctggatgacacccagagcgaggccgcccgggtgctggccgacaacctgaagctgaagaaggagctgcagagcaacaaggagagcgtgaagagccagatgaagcagaaggatgaggacctggagcggcggctggagcaggccgaggagaagcacctgaaggagaagaagaacatgcaggagaagctggatgccctgcggcgggagaaggtgcacctggaggagaccatcggggagatccaggtgaccctgaacaagaaggacaaggaggtgcagcagctgcaggagaacctggacagcacagtgacccagctggccgccttcaccaagtccatgagcagcctgcaggatgaccgggacagagtgattgatgaggccaagaagtgggagaggaagttcagtgatgccatccagagcaaggaggaggagatccggctgaaggaggacaactgcagcgtgctgaaggaccagctgcggcagatgagcatccacatggaggagctgaagatcaacatcagccggctggagcatgacaagcagatctgggagagcaaggcccagacagaggtgcagctgcagcagaaggtgtgtgacaccctgcagggcgagaacaaggagctgctgagccagctggaggagaccaggcacctgtaccacagcagccagaatgagctggccaagctggagagcgagctgaagagcctgaaggaccagctgacagacctgagcaacagcctggagaagtgcaaggagcagaagggcaacctggagggcatcatccggcagcaggaggccgacatccagaacagcaagttctcctatgagcagctggagacagacctgcaggccagccgggagctgaccagccggctgcacgaggagatcaacatgaaggagcagaagatcatcagcctgctgagcggcaaggaggaggccatccaggtggccatcgccgagctgcggcagcagcacgacaaggagatcaaggagctggagaacctgctgagccaggaggaggaggagaacatcgtgctggaggaggagaacaagaaggctgtggacaagaccaaccagctgatggagaccctgaagaccatcaagaaggagaacatccagcagaaggcccagctggacagctttgtgaagtccatgagcagcctgcagaatgaccgggaccgcatcgtgggggactaccagcagctggaggagcggcacctgagcatcatcctggagaaggaccagctgatccaggaggccgctgctgagaacaacaagctgaaggaggagatccggggcctgcggagccacatggatgacctgaacagtgaaaatgccaagctggatgctgagctgatccagtaccgggaggacctgaaccaggtgatcaccatcaaggacagccagcagaagcagctgctggaggtgcagctgcagcagaacaaggagctggagaacaagtatgccaagctggaggagaagctgaaggagagcgaggaggccaatgaagacctgcggcgctccttcaatgccctgcaggaggagaagcaggacctgagcaaggagattgagagcctgaaggtgtccatcagccagctgacccggcaggtgacagccctgcaggaggagggcaccctgggcctgtaccacgcccagctgaaggtgaaggaggaggaggtgcaccggctgagcgccctcttcagcagcagccagaagagaattgctgagctggaggaggagctggtgtgtgtgcagaaggaggccgccaagaaggtgggggagattgaggacaagctgaagaaggagctgaagcacctgcaccatgatgctggcatcatgagaaatgaaacagaaacagctgaggagcgggtggccgagctggcccgggacctggtggagatggagcagaagctgctgatggtgaccaaggaaaataaaggcctgacagcccagatccagagctttggccgctccatgagcagcctgcagaacagccgggaccacgccaatgaggagctggatgagctgaagaggaaatatgatgccagcctgaaggagctggcccagctgaaggagcagggcctgctgaaccgggagagagatgccctgctgtctgaaacagccttctccatgaacagcacagaggagaacagcctgagccacctggagaagctgaaccagcagctgctgagcaaggatgagcagctgctgcacctgagcagccagctggaggacagctacaaccaggtgcagagcttcagcaaggccatggccagcctgcagaatgaaagagaccacctgtggaatgagctggagaagttcaggaagtctgaggagggcaagcagaggtctgctgcccagcccagcaccagccctgctgaggtgcagagcctgaagaaggccatgagcagcctgcagaatgaccgggaccggctgctgaaggagctgaagaacctgcagcagcagtacctgcagatcaaccaggagatcacagagctgcaccccctgaaggcccagctgcaggagtaccaggacaagaccaaggccttccagatcatgcaggaggagctgcggcaggagaacctgtcctggcagcacgagctgcaccagctgaggatggagaagagctcctgggagatccacgagaggaggatgaaggagcagtacctgatggccatcagtgacaaggaccagcagctgagccacctgcagaacctgatccgggagctgcggagcagcagcagccagacccagcccctgaaggtgcagtaccagaggcaggccagccctgagaccagcgccagcccagatggcagccagaacctggtgtatgaaacagagctgctgcggacccagctgaatgacagcctgaaggagatccaccagaaggagctgcgcatccagcagctgaacagcaacttcagccagctgctggaggagaagaacaccctgagcatccagctgtgtgacaccagccagagcctgcgggagaaccagcagcactatggagacctgctgaaccactgtgctgtgctggagaagcaggtgcaggagctgcaggccggccccctgaacattgatgtggcccctggggccccccaggagaagaatggagtgcacaggaagagtgaccctgaggagctgcgggagccccagcagagcttcagcgaggcccagcagcagctgtgcaacacccggcaggaggtgaatgagctgaggaagctgctggaggaggagcgggaccagagggtggccgcagaaaatgccctgtctgtggccgaggagcagatccggcggctggagcacagcgagtgggacagcagcaggacccccatcatcggcagctgtggcacccaggagcaggccctgctgattgacctgaccagcaacagctgcaggaggaccaggtctggagtgggctggaagagggtgctgcggagcctgtgccacagcaggaccagggtgcccctgctggccgccatctacttcctgatgatccacgtgctgctgatcctgtgcttcaccggccacctgtag

SEQ ID NO: 154364 - DNA, 2919 bp, synthetic construct
  misc_feature 1..2919: note = Description of Artificial Sequence: Synthetic coding sequence
  source 1..2919: mol_type = other DNA
atgaaggcccagggcggcaccgtgctgcccacagagccccagagcgaggagcagctgagcaagcatgacaagagcagcacagaggaggagatggagattgagaagatcaagcacaagctgcaggagaaggaggagctgatcagcaccctgcaggcccagctgacccaggcccaggccgagcagcctgcccagaagctgcgggtgctgcagaggaagctggaggagcacgaggagagcctggtgggccgggcccaggtggtggacctgctgcagcaggagctgacagctgctgagcagaggaaccagatcctgagccagcagctgcagcagatggaggccgagcacaacaccctgaggaacacagtggagacagagcgggaggagagcaagatcctgctggagaagatggagctggaggtggccgagaggaagctgtccttccacaacctgcaggaggagatgcaccacctgctggagcagtttgagcaggccggccaggcccaggccgagctggagagccgctacagcgccctggagcagaagcacaaggccgagatggaggagaagaccagccacatcctgagcctgcagaagacaggccaggagctgcagagcgcctgtgatgccctgaaggaccagaacagcaagctgctgcaggacaagaatgagcaggccgtgcagagcgcccagaccatccagcagctggaggaccagctgcagcagaagagcaaggagatcagccagttcctgaaccggctgcccctgcagcagcacgagacagccagccagaccagcttcccagatgtgtacaatgaaggcacccaggccgtgacagaggagaacatcgccagcctgcagaagagggtggtggagctggagaatgagaagggggccctgctgctgagcagcattgagctggaggagctgaaggccgagaatgagaagctgagcagccagatcaccctgctggaggcccagaacagaactggagaggccgaccgggaggtgtctgagatcagcatcgtggacatcgccaacaagaggagcagcagcgctgaggagagcggccaggatgtgctggagaacaccttcagccagaagcacaaggagctgtctgtgctgctgctggagatgaaggaggcccaggaggagatcgccttcctgaagctgcagctgcagggcaagagagctgaggaggccgaccacgaggtgctggaccagaaggagatgaagcagatggagggggagggcatcgcccccatcaagatgaaggtgttcctggaggacaccggccaggacttccccctgatgcccaatgaggagagcagcctgcctgctgtggagaaggagcaggccagcacagagcaccagagcaggaccagcgaggagatcagcctgaatgatgctggggtggagctgaagagcaccaagcaggatggagacaagagcctgtctgctgtgcctgacatcggccagtgccaccaggatgagctggagcggctgaagagccagatcctggagctggagctgaacttccacaaggcccaggagatctatgagaagaacctggatgagaaggccaaggagatcagcaacctgaaccagctgattgaggagttcaagaagaatgctgacaacaacagcagcgccttcaccgccctgtctgaggagcgggaccagctgctgagccaggtgaaggagctgtccatggtgacagagctgcgggcccaggtgaagcagctggagatgaacctggccgaggccgagcggcagaggcggctggactatgagagccagacagcccatgacaacctgctgacagagcagatccacagcctgagcattgaggccaagagcaaggatgtgaagattgaggtgctgcagaatgagctggatgatgtgcagctgcagttcagcgagcagagcaccctcatccgcagcctgcagagccagctgcagaacaaggagagcgaggtgctggagggcgctgagcgggtgcgccacatcagcagcaaggtggaggagctgagccaggccctgagccagaaggagctggagatcaccaagatggaccagctgctgctggagaagaagagagatgtggagaccctgcagcagaccatcgaggagaaggaccagcaggtgacagagatctccttctccatgacagagaagatggtgcagctgaatgaggagaagttcagcctgggcgtggagatcaagaccctgaaggagcagctgaacctgctgagcagagctgaggaggccaagaaggagcaggtggaggaggacaatgaggtgagcagcggcctgaagcagaactatgatgagatgagccctgctggccagatcagcaaggaggagctgcagcatgaatttgacctgctgaagaaggaaaatgagcagaggaagaggaagctgcaggccgccctgatcaacaggaaggagctgctgcagagggtgtcccggctggaggaggagctggccaacctgaaggatgagagcaagaaggagatccccctgtctgaaacagagcggggggaggtggaggaggacaaggagaacaaggagtacagcgagaagtgtgtgaccagcaagtgccaggagattgagatctacctgaagcagaccatcagcgagaaggaggtggagctgcagcacatcaggaaggacctggaggagaagctggccgctgaggagcagttccaggccctggtgaagcagatgaaccagaccctgcaggacaagaccaaccagattgacctgctgcaggccgagatcagcgagaaccaggccatcatccagaagctgatcaccagcaacacagatgccagtgatggagacagcgtggccctggtgaaggagaccgtggtgatcagccccccctgcaccggcagcagcgagcactggaagccctag

SEQ ID NO: 154365 - DNA, 126 bp, synthetic construct
  misc_feature 1..126: note = Description of Artificial Sequence: Synthetic coding sequence
  source 1..126: mol_type = other DNA
atgctgagccggctgagcggcctggccaacgtggtgctgcacgagctgtctggagatgatgacacagaccagaacatgagggcccccctggaccctgagctgcaccaggagagtgacatggagtag

SEQ ID NO: 154366 - DNA, 4923 bp, synthetic construct
  misc_feature 1..4923: note = Description of Artificial Sequence: Synthetic coding sequence
  source 1..4923: mol_type = other DNA
atgctgagccggctgagcggcctggccaacgtggtgctgcacgagctgtctggagatgatgacacagaccagaacatgagggcccccctggaccctgagctgcaccaggagagtgacatggagttcaacaacaccacccaggaggatgtgcaggagcggctggcctatgcagagcagctggtggtggagctgaaggacatcatccggcagaaggatgtgcagctgcagcagaaggatgaggccctgcaggaggagaggaaggctgctgacaacaagatcaagaagctgaagctgcacgccaaggccaagctgaccagcctgaacaagtacatcgaggagatgaaggcccagggcggcaccgtgctgcccacagagccccagagcgaggagcagctgagcaagcatgacaagagcagcacagaggaggagatggagattgagaagatcaagcacaagctgcaggagaaggaggagctgatcagcaccctgcaggcccagctgacccaggcccaggccgagcagcctgcccagagcagcacagagatggaggagtttgtgatgatgaagcagcagctgcaggagaaggaggagttcatcagcaccctgcaggcccagctgagccagacccaggccgagcaggccgcccagaagctgcgggtgctgcagaggaagctggaggagcacgaggagagcctggtgggccgggcccaggtggtggacctgctgcagcaggagctgacagctgctgagcagaggaaccagatcctgagccagcagctgcagcagatggaggccgagcacaacaccctgaggaacacagtggagacagagcgggaggagagcaagatcctgctggagaagatggagctggaggtggccgagaggaagctgtccttccacaacctgcaggaggagatgcaccacctgctggagcagtttgagcaggccggccaggcccaggccgagctggagagccgctacagcgccctggagcagaagcacaaggccgagatggaggagaagaccagccacatcctgagcctgcagaagacaggccaggagctgcagagcgcctgtgatgccctgaaggaccagaacagcaagctgctgcaggacaagaatgagcaggccgtgcagagcgcccagaccatccagcagctggaggaccagctgcagcagaagagcaaggagatcagccagttcctgaaccggctgcccctgcagcagcacgagacagccagccagaccagcttcccagatgtgtacaatgaaggcacccaggccgtgacagaggagaacatcgccagcctgcagaagagggtggtggagctggagaatgagaagggggccctgctgctgagcagcattgagctggaggagctgaaggccgagaatgagaagctgagcagccagatcaccctgctggaggcccagaacagaactggagaggccgaccgggaggtgtctgagatcagcatcgtggacatcgccaacaagaggagcagcagcgctgaggagagcggccaggatgtgctggagaacaccttcagccagaagcacaaggagctgtctgtgctgctgctggagatgaaggaggcccaggaggagatcgccttcctgaagctgcagctgcagggcaagagagctgaggaggccgaccacgaggtgctggaccagaaggagatgaagcagatggagggggagggcatcgcccccatcaagatgaaggtgttcctggaggacaccggccaggacttccccctgatgcccaatgaggagagcagcctgcctgctgtggagaaggagcaggccagcacagagcaccagagcaggaccagcgaggagatcagcctgaatgatgctggggtggagctgaagagcaccaagcaggatggagacaagagcctgtctgctgtgcctgacatcggccagtgccaccaggatgagctggagcggctgaagagccagatcctggagctggagctgaacttccacaaggcccaggagatctatgagaagaacctggatgagaaggccaaggagatcagcaacctgaaccagctgattgaggagttcaagaagaatgctgacaacaacagcagcgccttcaccgccctgtctgaggagcgggaccagctgctgagccaggtgaaggagctgtccatggtgacagagctgcgggcccaggtgaagcagctggagatgaacctggccgaggccgagcggcagaggcggctggactatgagagccagacagcccatgacaacctgctgacagagcagatccacagcctgagcattgaggccaagagcaaggatgtgaagattgaggtgctgcagaatgagctggatgatgtgcagctgcagttcagcgagcagagcaccctcatccgcagcctgcagagccagctgcagaacaaggagagcgaggtgctggagggcgctgagcgggtgcgccacatcagcagcaaggtggaggagctgagccaggccctgagccagaaggagctggagatcaccaagatggaccagctgctgctggagaagaagagagatgtggagaccctgcagcagaccatcgaggagaaggaccagcaggtgacagagatctccttctccatgacagagaagatggtgcagctgaatgaggagaagttcagcctgggcgtggagatcaagaccctgaaggagcagctgaacctgctgagcagagctgaggaggccaagaaggagcaggtggaggaggacaatgaggtgagcagcggcctgaagcagaactatgatgagatgagccctgctggccagatcagcaaggaggagctgcagcatgaatttgacctgctgaagaaggaaaatgagcagaggaagaggaagctgcaggccgccctgatcaacaggaaggagctgctgcagagggtgtcccggctggaggaggagctggccaacctgaaggatgagagcaagaaggagatccccctgtctgaaacagagcggggggaggtggaggaggacaaggagaacaaggagtacagcgagaagtgtgtgaccagcaagtgccaggagattgagatctacctgaagcagaccatcagcgagaaggaggtggagctgcagcacatcaggaaggacctggaggagaagctggccgctgaggagcagttccaggccctggtgaagcagatgaaccagaccctgcaggacaagaccaaccagattgacctgctgcaggccgagatcagcgagaaccaggccatcatccagaagctgatcaccagcaacacagatgccagtgatggagacagcgtggccctggtgaaggagaccgtggtgatcagccccccctgcaccggcagcagcgagcactggaagccagagctggaggagaagatcctggccctggagaaggagaaggagcagctgcagaagaagctgcaggaggccctgaccagcaggaaggccatcctgaagaaggcccaggagaaggagcggcacctgcgggaggagctgaagcagcagaaggatgactacaaccggctgcaggagcagtttgatgagcagagcaaagaaaatgaaaatattggagaccagctgcggcagctgcagatccaggtgcgggagagcattgatggcaagctgcccagcacagaccagcaggagagctgcagcagcaccccaggcctggaggagcccctcttcaaggccacagagcagcaccacacccagcctgtgctggagagcaacctgtgcccagactggcccagccacagtgaagatgccagcgccctgcagggcggcacctctgtggcccagatcaaggcccagctgaaggagattgaggccgagaaggtggagctggagctgaaggtgagcagcaccaccagcgagctgaccaagaagtctgaggaggtgttccagctgcaggagcagatcaacaagcagggcctggagattgagagcctgaagacagtgtcccatgaagctgaggtgcatgctgagagcctgcagcagaagctggagagcagccagctgcagattgctggcctggagcacctgcgggagctgcagcccaagctggatgagctgcagaagctgatcagcaagaaggaggaggatgtgtcctacctgagcggccagctgtctgagaaggaggccgccctgaccaagatccagacagagatcatcgagcaggaggacctgatcaaggccctgcacacccagctggagatgcaggccaaggagcatgatgagcgcatcaagcagctgcaggtggagctgtgtgagatgaagcagaagccagaggagattggagaggagagccgggccaagcagcagatccagaggaagctgcaggccgccctgatcagcaggaaggaggccctgaaggagaacaagagcctgcaggaggagctgagcctggcccggggcaccatcgagcggctgaccaagagcctggctgatgtggagagccaggtgtctgcccagaacaaggagaaggacacagtgctgggccgcctggccctgctgcaggaggagcgggacaagctgatcacagagatggacaggagcctgctggagaaccagagcctgagcagcagctgtgagagcctgaagctggccctggagggcctgacagaggacaaggagaagctggtgaaggagattgagagcctgaagagcagcaagattgctgagagcacagagtggcaggagaagcacaaggagctgcagaaggagtatgagatcctgctgcagagctatgaaaatgtgtccaatgaagctgagcgcatccagcacgtggtggaggccgtgcggcaggagaagcaggagctgtatggcaagctgcggagcacagaggccaacaagaaggagacagagaagcagctgcaggaggccgagcaggagatggaggagatgaaggagtag

SEQ ID NO: 154367 - DNA, 9810 bp, synthetic construct
  misc_feature 1..9810: note = Description of Artificial Sequence: Synthetic coding sequence
  source 1..9810: mol_type = other DNA
atgctgagccggctgagcggcctggccaacgtggtgctgcacgagctgtctggagatgatgacacagaccagaacatgagggcccccctggaccctgagctgcaccaggagagtgacatggagttcaacaacaccacccaggaggatgtgcaggagcggctggcctatgcagagcagctggtggtggagctgaaggacatcatccggcagaaggatgtgcagctgcagcagaaggatgaggccctgcaggaggagaggaaggctgctgacaacaagatcaagaagctgaagctgcacgccaaggccaagctgaccagcctgaacaagtacatcgaggagatgaaggcccagggcggcaccgtgctgcccacagagccccagagcgaggagcagctgagcaagcatgacaagagcagcacagaggaggagatggagattgagaagatcaagcacaagctgcaggagaaggaggagctgatcagcaccctgcaggcccagctgacccaggcccaggccgagcagcctgcccagagcagcacagagatggaggagtttgtgatgatgaagcagcagctgcaggagaaggaggagttcatcagcaccctgcaggcccagctgagccagacccaggccgagcaggccgcccagctgagctccatgcagcaggtggtgcgggagaaggatgccaggtttgagacccaggtgcggctgcatgaagatgagctgctgcagctggtgacccaggctgatgtggagacagagatgcagcagaagctgcgggtgctgcagaggaagctggaggagcacgaggagagcctggtgggccgggcccaggtggtggacctgctgcagcaggagctgacagctgctgagcagaggaaccagatcctgagccagcagctgcagcagatggaggccgagcacaacaccctgaggaacacagtggagacagagcgggaggagagcaagatcctgctggagaagatggagctggaggtggccgagaggaagctgtccttccacaacctgcaggaggagatgcaccacctgctggagcagtttgagcaggccggccaggcccaggccgagctggagagccgctacagcgccctggagcagaagcacaaggccgagatggaggagaagaccagccacatcctgagcctgcagaagacaggccaggagctgcagagcgcctgtgatgccctgaaggaccagaacagcaagctgctgcaggacaagaatgagcaggccgtgcagagcgcccagaccatccagcagctggaggaccagctgcagcagaagagcaaggagatcagccagttcctgaaccggctgcccctgcagcagcatgaaacagccagccagaccagcttcccagatgtgtacaatgaaggcacccaggccgtgacagaagaaaatattgccagcctgcagaagagggtggtggagctggagaatgaaaaaggagccctgctgctgagcagcattgagctggaggagctgaaggcagaaaatgagaagctgagcagccagatcaccctgctggaggcccagaacagaactggagaggccgaccgggaggtgtctgagatcagcatcgtggacatcgccaacaagaggagcagcagcgctgaggagagcggccaggatgtgctggagaacaccttcagccagaagcacaaggagctgtctgtgctgctgctggagatgaaggaggcccaggaggagatcgccttcctgaagctgcagctgcagggcaagagagctgaggaggccgaccacgaggtgctggaccagaaggagatgaagcagatggagggggagggcatcgcccccatcaagatgaaggtgttcctggaggacaccggccaggacttccccctgatgcccaatgaggagagcagcctgcctgctgtggagaaggagcaggccagcacagagcaccagagcaggaccagcgaggagatcagcctgaatgatgctggggtggagctgaagagcaccaagcaggatggagacaagagcctgtctgctgtgcctgacatcggccagtgccaccaggatgagctggagcggctgaagagccagatcctggagctggagctgaacttccacaaggcccaggagatctatgagaagaacctggatgagaaggccaaggagatcagcaacctgaaccagctgattgaggagttcaagaagaatgctgacaacaacagcagcgccttcaccgccctgtctgaggagcgggaccagctgctgagccaggtgaaggagctgtccatggtgacagagctgcgggcccaggtgaagcagctggagatgaacctggccgaggccgagcggcagaggcggctggactatgagagccagacagcccatgacaacctgctgacagagcagatccacagcctgagcattgaggccaagagcaaggatgtgaagattgaggtgctgcagaatgagctggatgatgtgcagctgcagttcagcgagcagagcaccctcatccgcagcctgcagagccagctgcagaacaaggagagcgaggtgctggagggcgctgagcgggtgcgccacatcagcagcaaggtggaggagctgagccaggccctgagccagaaggagctggagatcaccaagatggaccagctgctgctggagaagaagagagatgtggagaccctgcagcagaccatcgaggagaaggaccagcaggtgacagagatctccttctccatgacagagaagatggtgcagctgaatgaggagaagttcagcctgggcgtggagatcaagaccctgaaggagcagctgaacctgctgagcagagctgaggaggccaagaaggagcaggtggaggaggacaatgaggtgagcagcggcctgaagcagaactatgatgagatgagccctgctggccagatcagcaaggaggagctgcagcacgagtttgacctgctgaagaaggaaaatgagcagaggaagaggaagctgcaggccgccctgatcaacaggaaggagctgctgcagagggtgtcccggctggaggaggagctggccaacctgaaggatgagagcaagaaggagatccccctgtctgaaacagagcggggggaggtggaggaggacaaggagaacaaggagtacagcgagaagtgtgtgaccagcaagtgccaggagattgagatctacctgaagcagaccatcagcgagaaggaggtggagctgcagcacatcaggaaggacctggaggagaagctggccgctgaggagcagttccaggccctggtgaagcagatgaaccagaccctgcaggacaagaccaaccagattgacctgctgcaggccgagatcagcgagaaccaggccatcatccagaagctgatcaccagcaacacagatgccagtgatggagacagcgtggccctggtgaaggagaccgtggtgatcagccccccctgcaccggcagcagcgagcactggaagccagagctggaggagaagatcctggccctggagaaggagaaggagcagctgcagaagaagctgcaggaggccctgaccagcaggaaggccatcctgaagaaggcccaggagaaggagcggcacctgcgggaggagctgaagcagcagaaggatgactacaaccggctgcaggagcagtttgatgagcagagcaaagaaaatgaaaacatcggggaccagctgcggcagctgcagatccaggtgcgggagagcattgatggcaagctgcccagcacagaccagcaggagagctgcagcagcaccccaggcctggaggagcccctcttcaaggccacagagcagcaccacacccagcctgtgctggagagcaacctgtgcccagactggcccagccacagtgaagatgccagcgccctgcagggcggcacctctgtggcccagatcaaggcccagctgaaggagattgaagctgagaaggtggagctggagctgaaggtgagcagcaccaccagcgagctgaccaagaagtctgaggaggtgttccagctgcaggagcagatcaacaagcagggcctggagattgagagcctgaagacagtgtcccatgaggccgaggtgcacgccgagagcctgcagcagaagctggagagcagccagctgcagattgctggcctggagcacctgcgggagctgcagcccaagctggatgagctgcagaagctgatcagcaagaaggaggaggatgtgtcctacctgagcggccagctgtctgagaaggaggccgccctgaccaagatccagacagagatcatcgagcaggaggacctgatcaaggccctgcacacccagctggagatgcaggccaaggagcatgatgagcgcatcaagcagctgcaggtggagctgtgtgagatgaagcagaagccagaggagatcggggaggagagccgggccaagcagcagatccagaggaagctgcaggccgccctgatcagcaggaaggaggccctgaaggagaacaagagcctgcaggaggagctgagcctggcccggggcaccatcgagcggctgaccaagagcctggctgatgtggagagccaggtgtctgcccagaacaaggagaaggacacagtgctgggccgcctggccctgctgcaggaggagcgggacaagctgatcacagagatggacaggagcctgctggagaaccagagcctgagcagcagctgtgagagcctgaagctggccctggagggcctgacagaggacaaggagaagctggtgaaggagattgagagcctgaagagcagcaagattgctgagagcacagagtggcaggagaagcacaaggagctgcagaaggagtatgagatcctgctgcagagctatgaaaatgtgtccaatgaggccgagcgcatccagcacgtggtggaggccgtgcggcaggagaagcaggagctgtatggcaagctgcggagcacagaggccaacaagaaggagacagagaagcagctgcaggaggccgagcaggagatggaggagatgaaggagaagatgaggaagtttgccaagagcaagcagcagaagatcctggagctggaggaggagaatgaccggctgcgggcagaggtgcaccctgctggggacacagccaaggagtgcatggagaccctgctgagcagcaatgcctccatgaaggaggagctggagcgggtgaagatggagtatgagaccctgagcaagaagttccagagcctgatgtctgagaaggacagcctgtctgaggaggtgcaggacctgaagcaccagatcgagggcaatgtgtccaagcaggccaacctggaggccacagagaagcatgacaaccagaccaacgtgacagaggagggcacccagagcatccctggagaaacagaggagcaggacagcctgtccatgagcacccggcccacctgcagcgagagcgtgcccagcgccaagagcgccaacccagctgtgtccaaggacttcagcagccatgatgagatcaacaactacctgcagcagattgaccagctgaaggagagaattgctggcctggaggaggagaagcagaagaacaaggagttcagccagaccctggagaatgagaagaacaccctgctgagccagatcagcaccaaggatggagagctgaagatgctgcaggaggaggtgaccaagatgaacctgctgaaccagcagatccaggaggagctgagccgggtgaccaagctgaaggagacagctgaggaggagaaggatgacctggaggagcggctgatgaaccagctggccgagctgaatggcagcatcggcaactactgccaggatgtgacagatgcccagatcaagaatgagctgctggagagcgagatgaagaacctgaagaagtgtgtgtctgagctggaggaggagaagcagcagctggtgaaggagaagaccaaggtggagagcgagatcaggaaggagtacctggagaagatccagggcgcccagaaggagcccggcaacaagagccacgccaaggagctgcaggagctgctgaaggagaagcagcaggaggtgaagcagctgcagaaggactgcatccgctaccaggagaagatcagcgccctggagaggacagtgaaggccctggagtttgtgcagacagagagccagaaggacctggagatcaccaaggagaacctggcccaggccgtggagcacaggaagaaggcccaggccgagctggccagcttcaaggtgctgctggatgacacccagagcgaggccgcccgggtgctggccgacaacctgaagctgaagaaggagctgcagagcaacaaggagagcgtgaagagccagatgaagcagaaggatgaggacctggagcggcggctggagcaggccgaggagaagcacctgaaggagaagaagaacatgcaggagaagctggatgccctgcggcgggagaaggtgcacctggaggagaccatcggggagatccaggtgaccctgaacaagaaggacaaggaggtgcagcagctgcaggagaacctggacagcacagtgacccagctggccgccttcaccaagtccatgagcagcctgcaggatgaccgggacagagtgattgatgaggccaagaagtgggagaggaagttcagtgatgccatccagagcaaggaggaggagatccggctgaaggaggacaactgcagcgtgctgaaggaccagctgcggcagatgagcatccacatggaggagctgaagatcaacatcagccggctggagcatgacaagcagatctgggagagcaaggcccagacagaggtgcagctgcagcagaaggtgtgtgacaccctgcagggcgagaacaaggagctgctgagccagctggaggagaccaggcacctgtaccacagcagccagaatgagctggccaagctggagagcgagctgaagagcctgaaggaccagctgacagacctgagcaacagcctggagaagtgcaaggagcagaagggcaacctggagggcatcatccggcagcaggaggccgacatccagaacagcaagttctcctatgagcagctggagacagacctgcaggccagccgggagctgaccagccggctgcacgaggagatcaacatgaaggagcagaagatcatcagcctgctgagcggcaaggaggaggccatccaggtggccatcgccgagctgcggcagcagcacgacaaggagatcaaggagctggagaacctgctgagccaggaggaggaggagaacatcgtgctggaggaggagaacaagaaggctgtggacaagaccaaccagctgatggagaccctgaagaccatcaagaaggagaacatccagcagaaggcccagctggacagctttgtgaagtccatgagcagcctgcagaatgaccgggacagaattgtgggggactaccagcagctggaggagcggcacctgagcatcatcctggagaaggaccagctgatccaggaggccgctgctgagaacaacaagctgaaggaggagatccggggcctgcggagccacatggatgacctgaacagtgaaaatgccaagctggatgctgagctgatccagtaccgggaggacctgaaccaggtgatcaccatcaaggacagccagcagaagcagctgctggaggtgcagctgcagcagaacaaggagctggagaacaagtatgccaagctggaggagaagctgaaggagagcgaggaggccaatgaagacctgcggcgctccttcaatgccctgcaggaggagaagcaggacctgagcaaggagattgagagcctgaaggtgtccatcagccagctgacccggcaggtgacagccctgcaggaggagggcaccctgggcctgtaccacgcccagctgaaggtgaaggaggaggaggtgcaccggctgagcgccctcttcagcagcagccagaagagaattgctgagctggaggaggagctggtgtgtgtgcagaaggaggccgccaagaaggtgggggagattgaggacaagctgaagaaggagctgaagcacctgcaccatgatgctggcatcatgagaaatgaaacagaaacagctgaggagcgggtggccgagctggcccgggacctggtggagatggagcagaagctgctgatggtgaccaaggagaacaagggcctgacagcccagatccagagctttggccgctccatgagcagcctgcagaacagccgggaccacgccaatgaggagctggatgagctgaagaggaaatatgatgccagcctgaaggagctggcccagctgaaggagcagggcctgctgaaccgggagagagatgccctgctgtctgaaacagccttctccatgaacagcacagaggagaacagcctgagccacctggagaagctgaaccagcagctgctgagcaaggatgagcagctgctgcacctgagcagccagctggaggacagctacaaccaggtgcagagcttcagcaaggccatggccagcctgcagaatgaaagagaccacctgtggaatgagctggagaagttcaggaagtctgaggagggcaagcagaggtctgctgcccagcccagcaccagccctgctgaggtgcagagcctgaagaaggccatgagcagcctgcagaatgaccgggaccggctgctgaaggagctgaagaacctgcagcagcagtacctgcagatcaaccaggagatcacagagctgcaccccctgaaggcccagctgcaggagtaccaggacaagaccaaggccttccagatcatgcaggaggagctgcggcaggagaacctgtcctggcagcacgagctgcaccagctgaggatggagaagagctcctgggagatccatgaaagaaggatgaaggagcagtacctgatggccatcagtgacaaggaccagcagctgagccacctgcagaacctgatccgggagctgcggagcagcagcagccagacccagcccctgaaggtgcagtaccagaggcaggccagccctgagaccagcgccagcccagatggcagccagaacctggtgtatgaaacagagctgctgcggacccagctgaatgacagcctgaaggagatccaccagaaggagctgcgcatccagcagctgaacagcaacttcagccagctgctggaggagaagaacaccctgagcatccagctgtgtgacaccagccagagcctgcgggagaaccagcagcactacggggacctgctgaaccactgtgctgtgctggagaagcaggtgcaggagctgcaggccgtgtccaaggagaagggccccctgaacattgatgtggcccctggggccccccaggagaagaatggagtgcacaggaagagtgaccctgaggagctgcgggagccccagcagagcttcagcgaggcccagcagcagctgtgcaacacccggcaggaggtgaatgagctgaggaagctgctggaggaggagcgggaccagagggtggccgcagaaaatgccctgtctgtggccgaggagcagatccggcggctggagcacagcgagtgggacagcagcaggacccccatcatcggcagctgtggcacccaggagcaggccctgctgattgacctgaccagcaacagctgcaggaggaccaggtctggagtgggctggaagagggtgctgcggagcctgtgccacagcaggaccagggtgcccctgctggccgccatctacttcctgatgatccacgtgctgctgatcctgtgcttcaccggccacctgtag

SEQ ID NO: 154368 - DNA, 741 bp, synthetic construct
  misc_feature 1..741: note = Description of Artificial Sequence: Synthetic coding sequence
  source 1..741: mol_type = other DNA
atgtcctgggccgctgtgctggccgtggccgccgcccgcttcggccacttctggggctgccgctggccaggccccatggcccagggctgggccggcttcagcgaggaggagctgcggcggctgaagcagaccaaggacccctttgagccccagaggcggctgcctgccaagaagagccggcagcagctgcagcgggagaaggccctggtggagcagagccagaagctgggcctgcaggacggcagcaccagcctgctgcctgagcagctgctgagcgcccccaagcagagggtgaatgtgcagaagccacccttcagcagccccaccctgcccagccacttcaccctgaccagccctgtgggagatggccagccccagggcatcgagagccagcccaaggagctgggcctggagaacagccatgatggccacaacaacgtggagatcctgccccccaagccagactgcaagctggagaagaagaaggtggagctgcaggagaagagccgctgggaggtgctgcagcaggagcagaggctgatggaggagaagaacaagaggaagaaggccctgctggccaaggccatcgccgagaggagcaagaggacccaggccgagaccatgaagctgaagaggatccagaaggagctgcaggccctggatgacatggtgtctgctgacatcggcatcctgaggaacagaattgaccaggccagcctggactacagctatgccaggtag

SEQ ID NO: 154369 - DNA, 1185 bp, synthetic construct
  misc_feature 1..1185: note = Description of Artificial Sequence: Synthetic coding sequence
  source 1..1185: mol_type = other DNA
atgtcctgggccgctgtgctggccgtggccgccgcccgcttcggccacttctggggctgccgctggccaggccccatggcccagggctgggccggcttcagcgaggaggagctgcggcggctgaagcagaccaaggacccctttgagccccagaggcggctgcctgccaagaagagccggcagcagctgcagcgggagaaggccctggtggagcagagccagaagctgggcctgcaggacggcagcaccagcctgctgcctgagcagctgctgagcgcccccaagcagagggtgaatgtgcagaagccacccttcagcagccccaccctgcccagccacttcaccctgaccagccctgtgggagatggccagccccagggcatcgagagccagcccaaggagctgggcctggagaacagccatgatggccacaacaacgtggagatcctgccccccaagccagactgcaagctggagaagaagaaggtggagctgcaggagaagagccgctgggaggtgctgcagcaggagcagaggctgatggaggagaagaacaagaggaagaaggccctgctggccaaggccatcgccgagaggagcaagaggacccaggccgagaccatgaagctgaagaggatccagaaggagctgcaggccctggatgacatggtgtctgctgacatcggcatcctgaggaacagaattgaccaggccagcctggactacagctatgccaggaagagatttgacagagctgaggccgagtacatcgccgccaagctggacatccagaggaagacagagatcaaggagcagctgacagagcacctgtgcaccatcatccagcagaatgagctgaggaaggccaagaagctggaggagctgatgcagcagctggatgtggaggctgatgaggagaccctggagctggaggtggaggtggagcggctgctgcacgagcaggaggtggagagccggcggcctgtggtgcggctggagcggcccttccagcctgctgaggagagcgtgaccctggagtttgccaaggagaacaggaagtgccaggagcaggccgtgagccccaaggtggatgaccagtgtggcaacagcagcagcatccccttcctgagccccaactgccccaaccaggagggcaatgacatctctgctgccctggccacctag

SEQ ID NO: 154370 - DNA, 855 bp, synthetic construct
  misc_feature 1..855: note = Description of Artificial Sequence: Synthetic coding sequence
  source 1..855: mol_type = other DNA
atgcccctggatgccacctggaacatcaccgtgcagtggctggccgtggacatcgcctgcaggaccctgatgttcctgaagctgatggccacctacagcgctgccttcctgcctgtggtgattggcctggaccggcaggccgctgtgctgaaccccctgggcagccgctctggagtgaggaagctgctgggcgccgcctggggcctgtccttcctgctggccttcccccagctgttcctgttccacacagtggccggccctgtgcccttcacccagtgtgtgaccaagggcagcttcaaggcccagtggcaggagaccacctacaacctcttcaccttctgctgcctcttcctgctgcccctgacagccatggccatctgctacagcagaattgtgctgtctgtgtcccggccccagaccaggaagggcagccacgccccagctggggagtttgccctgcccaggagctttgacaactgcccccgggtgcggctgcgggccctgcggctggccctgctgatcctgctgaccttcatcctgtgctggaccccctactacctgctgggcatgtggtactggttcagccccaccatgctgacagaggtgccccccagcctgagccacatcctcttcctgctgggcctgctgaatgcccccctggaccccctgctgtatggagccttcaccctgggctgcagaagaggccaccaggagctgagcattgacagcagcaaggagggcagcggccgcatgctgcaggaggagatccacgccttccggcagctggaggtgcagaagacagtgaccagcagaagagctggggagaccaagggcatcagcatcaccagcatctag

SEQ ID NO: 154371 - DNA, 873 bp, synthetic construct
  misc_feature 1..873: note = Description of Artificial Sequence: Synthetic coding sequence
  source 1..873: mol_type = other DNA
atgtctgctggaaatggcaccccctgggatgccacctggaacatcaccgtgcagtggctggccgtggacatcgcctgcaggaccctgatgttcctgaagctgatggccacctacagcgctgccttcctgcctgtggtgattggcctggaccggcaggccgctgtgctgaaccccctgggcagccgctctggagtgaggaagctgctgggcgccgcctggggcctgtccttcctgctggccttcccccagctgttcctgttccacacagtggccggccctgtgcccttcacccagtgtgtgaccaagggcagcttcaaggcccagtggcaggagaccacctacaacctcttcaccttctgctgcctcttcctgctgcccctgacagccatggccatctgctacagcagaattgtgctgtctgtgtcccggccccagaccaggaagggcagccacgccccagctggggagtttgccctgcccaggagctttgacaactgcccccgggtgcggctgcgggccctgcggctggccctgctgatcctgctgaccttcatcctgtgctggaccccctactacctgctgggcatgtggtactggttcagccccaccatgctgacagaggtgccccccagcctgagccacatcctcttcctgctgggcctgctgaatgcccccctggaccccctgctgtatggagccttcaccctgggctgcagaagaggccaccaggagctgagcattgacagcagcaaggagggcagcggccgcatgctgcaggaggagatccacgccttccggcagctggaggtgcagaagacagtgaccagcagaagagctggggagaccaagggcatcagcatcaccagcatctag

SEQ ID NO: 154372 - DNA, 363 bp, synthetic construct
  misc_feature 1..363: note = Description of Artificial Sequence: Synthetic coding sequence
  source 1..363: mol_type = other DNA
atggccagcagcagaagaggcctgctgctgctgctgctgctgacagcccacctgggccccagcgaggcccagcactggagccacggctggtacccaggcggcaagagggccctgagcagcgcccaggacccccagaatgccctgcggcccccaggccgggccctggacacagctgctggcagccctgtgcagacagcccacggcctgcccagtgatgccctggcccccctggatgacagcatgccctgggagggccgcaccacagcccagtggagcctgcacaggaagaggcacctggcccggaccctgctgacagctgcccgggagcccaggcctgccccacccagcagcaacaaggtgtag

SEQ ID NO: 154373 - DNA, 342 bp, synthetic construct
  misc_feature 1..342: note = Description of Artificial Sequence: Synthetic coding sequence
  source 1..342: mol_type = other DNA
atggccagcagcagaagaggcctgctgctgctgctgctgctgacagcccacctgggccccagcgaggcccagcactggagccacggctggtacccaggcggcaagagggccctgagcagcgcccaggacccccagaatgccctgcggcccccagctggcagccctgtgcagacagcccacggcctgcccagtgatgccctggcccccctggatgacagcatgccctgggagggccgcaccacagcccagtggagcctgcacaggaagaggcacctggcccggaccctgctgacagctgcccgggagcccaggcctgccccacccagcagcaacaaggtgtag

SEQ ID NO: 154374 - DNA, 339 bp, synthetic construct
  misc_feature 1..339: note = Description of Artificial Sequence: Synthetic coding sequence
  source 1..339: mol_type = other DNA
atggccagcagcagaagaggcctgctgctgctgctgctgctgacagcccacctgggccccagcgaggcccagcactggagccacggctggtacccaggcggcaagagggccctgagcagcgcccaggacccccagaatgccctgcggcccccaggcagccctgtgcagacagcccacggcctgcccagtgatgccctggcccccctggatgacagcatgccctgggagggccgcaccacagcccagtggagcctgcacaggaagaggcacctggcccggaccctgctgacagctgcccgggagcccaggcctgccccacccagcagcaacaaggtgtag

SEQ ID NO: 154375 - DNA, 339 bp, synthetic construct; identical to SEQ ID NO: 154374
  misc_feature 1..339: note = Description of Artificial Sequence: Synthetic coding sequence
  source 1..339: mol_type = other DNA

SEQ ID NO: 154376 - DNA, 342 bp, synthetic construct; identical to SEQ ID NO: 154373
  misc_feature 1..342: note = Description of Artificial Sequence: Synthetic coding sequence
  source 1..342: mol_type = other DNA

SEQ ID NO: 154377 - DNA, 945 bp, synthetic construct
  misc_feature 1..945: note = Description of Artificial Sequence: Synthetic coding sequence
  source 1..945: mol_type = other DNA
atgtacaagatggagtacagctacctgaacagcagcgcctatgagagctgcatggccggcatggacaccagcagcctggccagcgcctatgctgacttcagcagctgcagccaggccagcggcttccagtacaaccccatccgcaccacctttggagccaccagcggctgccccagcctgaccccaggcagctgcagcctgggcaccctgcgggaccaccagagcagcccctatgctgctgtgccctacaagctgttcacagaccatggaggcctgaatgagaagaggaagcagaggcgcatccgcaccaccttcaccagcgcccagctgaaggagctggagcgggtgtttgctgagacccactacccagacatctacacccgggaggagctggccctgaagattgacctgacagaggcccgggtgcaggtgtggttccagaacagaagagccaagttcaggaagcaggagagagctgctgctgctgctgctgctgctgccaagaatggcagcagcggcaagaagagtgacagcagcagagatgatgagagcaaggaggccaagagcacagatcctgacagcactggaggccctggccccaaccccaaccccacccccagctgtggggccaatggaggcggcggcggcggccccagccctgctggggcccctggagctgctggccctgggggccctggaggagagcccgggaagggcggcgctgctgctgctgctgctgctgctgctgctgctgctgctgctgctgctgctgctgctgctgggggcctggccgccgccggcggccctggccagggctgggcccctggccctggccccatcaccagcatcccagacagcctgggcggcccctttgcctctgtgctgagcagcctgcagaggcccaacggggccaaggccgccctggtgaagagctccatgttttag

SEQ ID NO: 154378 - DNA, 750 bp, synthetic construct
  misc_feature 1..750: note = Description of Artificial Sequence: Synthetic coding sequence
  source 1..750: mol_type = other DNA
atggccaacagcgccagccctgagcagaaccagaaccactgcagcgccatcaacaacagcatccccctgatgcagggcaacctgcccaccctgaccctgagcggcaagatccgggtgacagtgaccttcttcctgttcctgctgagcgccaccttcaatgccagcttcctgctgaagctgcagaagtggacccagaagaaggagaagggcaagaagctgagcaggatgaagctgctgctgaagcacctgaccctggccaacctgctggagaccctgattgtgatgcccctggatggcatgtggaacatcaccgtgcagtggtacgccggggagctgctgtgcaaggtgctgagctacctgaagctgttctccatgtatgccccagccttcatgatggtggtgatcagcctggacaggagcctggccatcacccggcccctggccctgaagagcaacagcaaggtgggccagagcatggtgggcctggcctggatcctgagctctgtgtttgctggcccccagctgcccctgcaccaccccagcttccaccacgccgacctgcagtgcaagaaccacctgcacccagacaccggccccagcagcggcccccccaggaccaccacagagagcgtgcaggagcagtacaccaagagcacagctgaggacagcaagaatgatggctgcatctgccacttcatctactgcctgctggacagcctgctgtgccccaggaacctggtgctggtgtag

SEQ ID NO: 154379 - DNA, 2055 bp, synthetic construct
  misc_feature 1..2055: note = Description of Artificial Sequence: Synthetic coding sequence
  source 1..2055: mol_type = other DNA
atggaggagaacctgatctccatgagggaggaccacagcttccacgtgcgctacaggatggaggccagctgcctggagctggccctggagggggagcggctgtgcaagagcggggactgccgggccggcgtgtccttctttgaagctgctgtgcaggtgggcacagaggacctgaagaccctgagcgccatctacagccagctgggcaatgcctacttctacctgcatgactatgccaaggccctggagtaccaccaccacgacctgaccctggcccggaccatcggggaccagctgggggaggccaaggccagcggcaacctgggcaacaccctgaaggtgctgggcaactttgatgaggccatcgtgtgctgccagaggcacctggacatcagccgggagctgaatgacaaggtgggggaggcccgggccctgtacaacctgggcaatgtgtaccacgccaagggcaagagctttggctgccccggcccccaggatgtgggggagttccctgaggaggtgagagatgccctgcaggccgctgtggacttctatgaggagaacctgagcctggtgacagccctgggggacagagctgcccagggccgggcctttggaaacctgggcaacacccactacctgctgggcaacttcagagatgctgtgattgcccacgagcagaggctgctgattgccaaggagtttggagacaaggctgctgagcggcgggcctacagcaacctgggcaatgcctacatcttcctgggggagtttgaaacagccagcgagtactacaagaagaccctgctgctggcccggcagctgaaggacagagctgtggaggcccagagctgctacagcctgggcaacacctacaccctgctgcaggactatgagaaggccatcgactaccacctgaagcacctggccatcgcccaggagctgaatgacagaattggagagggccgggcctgctggagcctgggcaatgcctacacagccctgggcaaccacgaccaggccatgcactttgctgagaagcacctggagatcagccgggaggtgggggacaagtctggagagctgacagcccggctgaacctgagtgacctgcagatggtgctgggcctgagctacagcaccaacaacagcatcatgtctgagaacacagaaattgacagcagcctgaatggagtgcggcccaagctgggcagaagacacagcatggagaacatggagctgatgaagctgaccccagagaaggtgcagaactggaacagcgagatcctggccaagcagaagcccctgattgccaagcccagcgccaagctgctgtttgtgaaccggctgaagggcaagaagtacaagaccaacagcagcaccaaggtgctgcaggatgccagcaacagcattgaccaccgcatccccaacagccagaggaagatctctgctgacaccatcggagatgagggcttctttgacctgctgagccgcttccagagcaacaggatggatgaccagcgctgctgcctgcaggagaagaactgccacacagccagcaccaccaccagcagcaccccacccaagatgatgctgaagaccagctctgtgcctgtggtgagccccaacacagatgagttcctggacctgctggccagcagccagagccggcggctggatgaccagagggccagcttcagcaacctgcccggcctgcggctgacccagaacagccagagcgtgctgagccacctgatgaccaatgacaacaaggaggctgatgaggacttctttgacatcctggtgaagtgccagggcagccggctggatgaccagagatgtgcccctcctccagccaccaccaagggccccaccgtgcctgatgaggacttcttcagcctcatcctgcggagccagggcaagaggatggatgagcagagggtgctgctgcagagggaccagaacagagacacagactttggcctgaaggacttcctgcagaacaatgccctgctggagttcaagaacagcggcaagaagtctgctgaccactag

SEQ ID NO: 154380 - DNA, 2055 bp, synthetic construct; identical to SEQ ID NO: 154379
  misc_feature 1..2055: note = Description of Artificial Sequence: Synthetic coding sequence
  source 1..2055: mol_type = other DNA

SEQ ID NO: 154381 - DNA, 228 bp, synthetic construct
  misc_feature 1..228: note = Description of Artificial Sequence: Synthetic coding sequence
  source 1..228: mol_type = other DNA
atggaggagaacctgatctccatgagggaggaccacagcttccacgtgcgctacaggatggaggccagctgcctggagctggccctggagggggagcggctgtgcaagagcggggactgccgggccggcgtgtccttctttgaagctgctgtgcaggtgggcacagaggacctgaagaccctgagcgccatctacagccagctgggcaatgcctacttctacctgtag

SEQ ID NO: 154382 - DNA, 642 bp, synthetic construct
  misc_feature 1..642: note = Description of Artificial Sequence: Synthetic coding sequence
  source 1..642: mol_type = other DNA
atggaggagaacctgatctccatgagggaggaccacagcttccacgtgcgctacaggatggaggccagctgcctggagctggccctggagggggagcggctgtgcaagagcggggactgccgggccggcgtgtccttctttgaagctgctgtgcaggtgggcacagaggacctgaagaccctgagcgccatctacagccagctgggcaatgcctacttctacctgcatgactatgccaaggccctggagtaccaccaccacgacctgaccctggcccggaccatcggggaccagctgggggaggccaaggccagcggcaacctgggcaacaccctgaaggtgctgggcaactttgatgaggccatcgtgtgctgccagaggcacctggacatcagccgggagctgaatgacaaggtgggggaggcccgggccctgtacaacctgggcaatgtgtaccacgccaagggcaagagctttggctgccccggcccccaggatgtgggggagttccctgaggaggtgagagatgccctgcaggccgctgtggacttctatgaggagaacctgagcctggtgacagccctgggggacagagctgcccagggccgggcctttggaaacctgggcaacacccactactag

SEQ ID NO: 154383 - DNA, 159 bp, synthetic construct
  misc_feature 1..159: note = Description of Artificial Sequence: Synthetic coding sequence
  source 1..159: mol_type = other DNA
atggaggagaacctgatctccatgagggaggaccacagcttccacgtgcgctacaggatggaggccagctgcctggagctggccctggagggggagcggctgtgcaagagcggggactgccgggccggcgtgtccttctttgaagctgctgtgcagtag

SEQ ID NO: 154384 - DNA, 1290 bp, synthetic construct
  misc_feature 1..1290: note = Description of Artificial Sequence: Synthetic coding sequence
  source 1..1290: mol_type = other DNA
atggccagcctgtgggagagcccccagcagtgcatcatcctgagccccctgagcggctggtggttcagcatcggcatcagcatcctgaccagcagcgccctggtgctgaagccccagatgctgaagggggagctgcagacccggcccagccagaggcccagcaggaaggccttcagaagaaacaactttgagtacaccctggaggccagcaagagcctgcggcagaagccaggggacagcaccatgacctacctgaacaagggccagttctaccccatcaccctgaaggaggtgagcagcagcgagggcatccaccaccccatcagcaaggtgcgcagcgtcatcatggtggtgtttgctgaggacaagagccgggaggaccagctgcggcactggaagtactggcacagccggcagcacacagccaagcagcgctgcattgatattgctgactacaaggagagcttcaacaccatcagcaacatcgaggagatcgcctacaatgccatctccttcacctgggacatcaatgatgaggccaaggtgttcatctctgtgaactgcctgagcacagacttcagcagccagaagggcgtgaagggcctgcccctgaacatccaggtggacacctacagctacaacaacagaagcaacaagcctgtgcaccgggcctactgccagatcaaggtgttctgtgacaagggagctgagaggaagatcagagatgaggagaggaagcagagcaagaggaaggtgtctgatgtgaaggtgcccctgctgcccagccacaagaggatggacatcaccgtcttcaagcccttcatcgacctggacacccagcctgtgctcttcatcccagatgtgcactttgccaacctgcagaggggcacccacgtgctgcccatcgccagcgaggagctggagggggagggctctgtgctgaagaggggcccctatggaacagaagatgactttgctgtgccccccagcaccaagctggcccgcatcgaggagcccaagagggtgctgctgtatgtgaggaaggagagcgaggaggtgtttgatgccctgatgctgaagacccccagcctgaagggcctgatggaggccatcagtgacaagtatgatgtgccccatgacaagattggcaagatcttcaagaagtgcaagaagggcatcctggtgaacatggatgacaacatcgtgaagcactacagcaatgaagacaccttccagctgcagatcgaggaggccggcggcagctacaagctgaccctgacagagatctag

SEQ ID NO: 154385 - DNA, 1857 bp, synthetic construct
  misc_feature 1..1857: note = Description of Artificial Sequence: Synthetic coding sequence
  source 1..1857: mol_type = other DNA
atgacccaggagtatgacaacaagaggcctgtgctggtgctgcagaatgaggccctgtacccccagaggaggagctacaccagtgaagatgaggcctggaagagcttcctggagaaccccctgacagctgccaccaaggccatgatgagcatcaatggagatgaagattctgctgctgccctgggcctgctgtatgactactacaaggtgccccgggagcggcgcagcagcacagccaagccagaggtggagcaccctgagccagaccacagcaagagaaattccatccccatcgtgacagagcagcccctcatctctgctggagaaaatagagtgcaggtgctgaagaatgtgcccttcaacatcgtgctgccccacggcaaccagctgggcatcgacaagaggggccacctgacagccccagacaccaccgtgacagtgtccatcgccaccatgcccacccacagcatcaagacagagacccagccccacggctttgctgtgggcatccccccagctgtgtaccaccctgagcccacagagcgggtggtggtgtttgacaggaacctgaacacagaccagttcagcagcggggcccaggccccaaatgcccagaggaggaccccagacagcaccttcagcgagaccttcaaggagggcgtgcaggaggtgttcttccccagcgacctgagcctgaggatgcctggcatgaacagcgaggactatgtgtttgacagcgtgtctggcaacaactttgagtacaccctggaggccagcaagagcctgcggcagaagccaggggacagcaccatgacctacctgaacaagggccagttctaccccatcaccctgaaggaggtgagcagcagcgagggcatccaccaccccatcagcaaggtgcgcagcgtcatcatggtggtgtttgctgaggacaagagccgggaggaccagctgcggcactggaagtactggcacagccggcagcacacagccaagcagcgctgcatcgacattgctgactacaaggagagcttcaacaccatcagcaacatcgaggagatcgcctacaatgccatctccttcacctgggacatcaatgatgaggccaaggtgttcatctctgtgaactgcctgagcacagacttcagcagccagaagggcgtgaagggcctgcccctgaacatccaggtggacacctacagctacaacaacagaagcaacaagcctgtgcaccgggcctactgccagatcaaggtgttctgtgacaagggagctgagaggaagatcagagatgaggagaggaagcagagcaagaggaaggtgtctgatgtgaaggtgcccctgctgcccagccacaagaggatggacatcaccgtcttcaagcccttcatcgacctggacacccagcctgtgctcttcatcccagatgtgcactttgccaacctgcagaggggcacccacgtgctgcccatcgccagcgaggagctggagggggagggctctgtgctgaagaggggcccctacggcacagaagatgactttgctgtgccccccagcaccaagctggccagaattgaggagcccaagagggtgctgctgtatgtgaggaaggagagcgaggaggtgtttgatgccctgatgctgaagacccccagcctgaagggcctgatggaggccatcagtgacaagtatgatgtgccccatgacaagattggcaagatcttcaagaagtgcaagaagggcatcctggtgaacatggatgacaacatcgtgaagcactacagcaatgaagacaccttccagctgcagatcgaggaggccggcggcagctacaagctgaccctgacagagatctag

SEQ ID NO: 154386 - DNA, 1857 bp, synthetic construct
  misc_feature 1..1857: note = Description of Artificial Sequence: Synthetic coding sequence
  source 1..1857: mol_type = other DNA
ctgcccaaggaggtggagaacaagaggcctgtgctggtgctgcagaatgaggccctgtacccccagaggaggagctacaccagtgaagatgaggcctggaagagcttcctggagaaccccctgacagctgccaccaaggccatgatgagcatcaatggagatgaagattctgctgctgccctgggcctgctgtatgactactacaaggtgccccgggagcggcgcagcagcacagccaagccagaggtggagcaccctgagccagaccacagcaagagaaattccatccccatcgtgacagagcagcccctcatctctgctggagaaaatagagtgcaggtgctgaagaatgtgcccttcaacatcgtgctgccccacggcaaccagctgggcatcgacaagaggggccacctgacagccccagacaccaccgtgacagtgtccatcgccaccatgcccacccacagcatcaagacagagacccagccccacggctttgctgtgggcatccccccagctgtgtaccaccctgagcccacagagcgggtggtggtgtttgacaggaacctgaacacagaccagttcagcagcggggcccaggccccaaatgcccagaggaggaccccagacagcaccttcagcgagaccttcaaggagggcgtgcaggaggtgttcttccccagcgacctgagcctgaggatgcctggcatgaacagcgaggactatgtgtttgacagcgtgtctggcaacaactttgagtacaccctggaggccagcaagagcctgcggcagaagccaggggacagcaccatgacctacctgaacaagggccagttctaccccatcaccctgaaggaggtgagcagcagcgagggcatccaccaccccatcagcaaggtgcgcagcgtcatcatggtggtgtttgctgaggacaagagccgggaggaccagctgcggcactggaagtactggcacagccggcagcacacagccaagcagcgctgcatcgacattgctgactacaaggagagcttcaacaccatcagcaacatcgaggagatcgcctacaatgccatctccttcacctgggacatcaatgatgaggccaaggtgttcatctctgtgaactgcctgagcacagacttcagcagccagaagggcgtgaagggcctgcccctgaacatccaggtggacacctacagctacaacaacagaagcaacaagcctgtgcaccgggcctactgccagatcaaggtgttctgtgacaagggagctgagaggaagatcagagatgaggagaggaagcagagcaagaggaaggtgtctgatgtgaaggtgcccctgctgcccagccacaagaggatggacatcaccgtcttcaagcccttcatcgacctggacacccagcctgtgctcttcatcccagatgtgcactttgccaacctgcagaggggcacccacgtgctgcccatcgccagcgaggagctggagggggagggctctgtgctgaagaggggcccctacggcacagaagatgactttgctgtgccccccagcaccaagctggccagaattgaggagcccaagagggtgctgctgtatgtgaggaaggagagcgaggaggtgtttgatgccctgatgctgaagacccccagcctgaagggcctgatggaggccatcagtgacaagtatgatgtgccccatgacaagattggcaagatcttcaagaagtgcaagaagggcatcctggtgaacatggatgacaacatcgtgaagcactacagcaatgaagacaccttccagctgcagatcgaggaggccggcggcagctacaagctgaccctgacagagatctag

SEQ ID NO: 154387 - DNA, 1878 bp, synthetic construct
  misc_feature 1..1878: note = Description of Artificial Sequence: Synthetic coding sequence
  source 1..1878: mol_type = other DNA
atgagccaggagagtgacaacaacaagaggctggtggccctggtgcccatgcccagcgacccccccttcaacacccggcgggcctacaccagtgaagatgaggcctggaagagctacctggagaaccccctgacagctgccaccaaggccatgatgagcatcaatggagatgaggacagcgctgctgccctgggcctgctgtatgactactacaaggtgccccgggacaagaggctgctgtctgtgtccaaggccagtgacagccaggaggaccaggagaagaggaactgcctgggcaccagcgaggcccagagcaacctgtctggaggagaaaatagagtgcaggtgctgaagacagtgcctgtgaacctgagcctgaaccaggaccacctggagaacagcaagcgggagcagtacagcatctccttccctgagagcagcgccatcatccctgtgtctggcatcaccgtggtgaaggccgaggacttcacccctgtgttcatggcccctcctgtgcactaccccagaggagatggagaggagcagagggtggtgatctttgagcagacccagtatgatgtgcccagcctggccacccacagcgcctacctgaaggatgaccagaggagcaccccagacagcacctacagcgagagcttcaaggatgctgccacagagaagttccgcagcgcctctgtgggcgctgaggagtacatgtatgaccagaccagcagcggcaccttccagtacaccctggaggccaccaagagcctgcggcagaagcagggcgagggccccatgacctacctgaacaagggccagttctacgccatcaccctgtctgaaacaggagacaacaagtgcttccgccaccccatcagcaaggtgcgctctgtggtgatggtggtgttttctgaggacaagaacagagatgagcagctgaagtactggaagtactggcacagccggcagcacacagccaagcagagggtgctggacattgctgactacaaggagagcttcaacaccatcggcaacatcgaggagatcgcctacaatgctgtgtccttcacctgggatgtgaatgaggaggccaagatcttcatcaccgtgaactgcctgagcacagacttcagcagccagaagggcgtgaagggcctgcccctgatgatccagattgacacctacagctacaacaacagaagcaacaagcccatccaccgggcctactgccagatcaaggtgttctgtgacaagggagctgagaggaagatcagagatgaggagaggaagcagaacaggaagaagggcaagggccaggccagccagacccagtgcaacagcagcagtgatggcaagctggccgccatccccctgcagaagaagagtgacatcacctacttcaagaccatgccagacctgcacagccagcctgtgctcttcatcccagatgtgcactttgccaacctgcagaggacaggccaggtgtactacaacacagatgatgagcgggagggcggctctgtgctggtgaagaggatgttccggcccatggaggaggagtttggacctgtgcccagcaagcagatgaaggaggagggcaccaagagggtgctgctgtatgtgaggaaggagacagatgatgtgtttgatgccctgatgctgaagagccccaccgtgaagggcctgatggaggccatcagcgagaagtatggcctgcctgtggagaagatcgccaagctgtacaagaagagcaagaagggcatcctggtgaacatggatgacaacatcatcgagcactacagcaatgaagacaccttcatcctgaacatggagagcatggtggagggcttcaaggtgaccctgatggagatctag

SEQ ID NO: 154388 - DNA, 1830 bp, synthetic construct
  misc_feature 1..1830: note = Description of Artificial Sequence: Synthetic coding sequence
  source 1..1830: mol_type = other DNA
atgcccagcgacccccccttcaacacccggcgggcctacaccagtgaagatgaggcctggaagagctacctggagaaccccctgacagctgccaccaaggccatgatgagcatcaatggagatgaggacagcgctgctgccctgggcctgctgtatgactactacaaggtgccccgggacaagaggctgctgtctgtgtccaaggccagtgacagccaggaggaccaggagaagaggaactgcctgggcaccagcgaggcccagagcaacctgtctggaggagaaaatagagtgcaggtgctgaagacagtgcctgtgaacctgagcctgaaccaggaccacctggagaacagcaagcgggagcagtacagcatctccttccctgagagcagcgccatcatccctgtgtctggcatcaccgtggtgaaggccgaggacttcacccctgtgttcatggcccctcctgtgcactaccccagaggagatggagaggagcagagggtggtgatctttgagcagacccagtatgatgtgcccagcctggccacccacagcgcctacctgaaggatgaccagaggagcaccccagacagcacctacagcgagagcttcaaggatgctgccacagagaagttccgcagcgcctctgtgggcgctgaggagtacatgtatgaccagaccagcagcggcaccttccagtacaccctggaggccaccaagagcctgcggcagaagcagggcgagggccccatgacctacctgaacaagggccagttctacgccatcaccctgtctgaaacaggagacaacaagtgcttccgccaccccatcagcaaggtgcgctctgtggtgatggtggtgttttctgaggacaagaacagagatgagcagctgaagtactggaagtactggcacagccggcagcacacagccaagcagagggtgctggacattgctgactacaaggagagcttcaacaccatcggcaacatcgaggagatcgcctacaatgctgtgtccttcacctgggatgtgaatgaggaggccaagatcttcatcaccgtgaactgcctgagcacagacttcagcagccagaagggcgtgaagggcctgcccctgatgatccagattgacacctacagctacaacaacagaagcaacaagcccatccaccgggcctactgccagatcaaggtgttctgtgacaagggagctgagaggaagatcagagatgaggagaggaagcagaacaggaagaagggcaagggccaggccagccagacccagtgcaacagcagcagtgatggcaagctggccgccatccccctgcagaagaagagtgacatcacctacttcaagaccatgccagacctgcacagccagcctgtgctcttcatcccagatgtgcactttgccaacctgcagaggacaggccaggtgtactacaacacagatgatgagcgggagggcggctctgtgctggtgaagaggatgttccggcccatggaggaggagtttggacctgtgcccagcaagcagatgaaggaggagggcaccaagagggtgctgctgtatgtgaggaaggagacagatgatgtgtttgatgccctgatgctgaagagccccaccgtgaagggcctgatggaggccatcagcgagaagtatggcctgcctgtggagaagatcgccaagctgtacaagaagagcaagaagggcatcctggtgaacatggatgacaacatcatcgagcactacagcaatgaagacaccttcatcctgaacatggagagcatggtggagggcttcaaggtgaccctgatggagatctag

SEQ ID NO: 154389 - DNA, 1878 bp, synthetic construct
  misc_feature 1..1878: note = Description of Artificial Sequence: Synthetic coding sequence
  source 1..1878: mol_type = other DNA
atgggcaaggatggccgcagcaacaagaggctggtggccctggtgcccatgcccagcgacccccccttcaacacccggcgggcctacaccagtgaagatgaggcctggaagagctacctggagaaccccctgacagctgccaccaaggccatgatgagcatcaatggagatgaggacagcgctgctgccctgggcctgctgtatgactactacaaggtgccccgggacaagaggctgctgtctgtgtccaaggccagtgacagccaggaggaccaggagaagaggaactgcctgggcaccagcgaggcccagagcaacctgtctggaggagaaaatagagtgcaggtgctgaagacagtgcctgtgaacctgagcctgaaccaggaccacctggagaacagcaagcgggagcagtacagcatctccttccctgagagcagcgccatcatccctgtgtctggcatcaccgtggtgaaggccgaggacttcacccctgtgttcatggcccctcctgtgcactaccccagaggagatggagaggagcagagggtggtgatctttgagcagacccagtatgatgtgcccagcctggccacccacagcgcctacctgaaggatgaccagaggagcaccccagacagcacctacagcgagagcttcaaggatgctgccacagagaagttccgcagcgcctctgtgggcgctgaggagtacatgtatgaccagaccagcagcggcaccttccagtacaccctggaggccaccaagagcctgcggcagaagcagggcgagggccccatgacctacctgaacaagggccagttctacgccatcaccctgtctgaaacaggagacaacaagtgcttccgccaccccatcagcaaggtgcgctctgtggtgatggtggtgttttctgaggacaagaacagagatgagcagctgaagtactggaagtactggcacagccggcagcacacagccaagcagagggtgctggacattgctgactacaaggagagcttcaacaccatcggcaacatcgaggagatcgcctacaatgctgtgtccttcacctgggatgtgaatgaggaggccaagatcttcatcaccgtgaactgcctgagcacagacttcagcagccagaagggcgtgaagggcctgcccctgatgatccagattgacacctacagctacaacaacagaagcaacaagcccatccaccgggcctactgccagatcaaggtgttctgtgacaagggagctgagaggaagatcagagatgaggagaggaagcagaacaggaagaagggcaagggccaggccagccagacccagtgcaacagcagcagtgatggcaagctggccgccatccccctgcagaagaagagtgacatcacctacttcaagaccatgccagacctgcacagccagcctgtgctcttcatcccagatgtgcactttgccaacctgcagaggacaggccaggtgtactacaacacagatgatgagcgggagggcggctctgtgctggtgaagaggatgttccggcccatggaggaggagtttggacctgtgcccagcaagcagatgaaggaggagggcaccaagagggtgctgctgtatgtgaggaaggagacagatgatgtgtttgatgccctgatgctgaagagccccaccgtgaagggcctgatggaggccatcagcgagaagtatggcctgcctgtggagaagatcgccaagctgtacaagaagagcaagaagggcatcctggtgaacatggatgacaacatcatcgagcactacagcaatgaagacaccttcatcctgaacatggagagcatggtggagggcttcaaggtgaccctgatggagatctag

SEQ ID NO: 154390 - DNA, 21 bp, synthetic construct
  misc_feature 1..21: note = Description of Artificial Sequence: Synthetic coding sequence
  source 1..21: mol_type = other DNA
atgagccaggagagtgactag

SEQ ID NO: 154391 - DNA, 1737 bp, synthetic construct
  misc_feature 1..1737: note = Description of Artificial Sequence: Synthetic coding sequence
  source 1..1737: mol_type = other DNA
atgctgcggcggctggacaagatccgcttccggggccacaagagagatgacttcctggacctggccgagagccccaatgccagtgacacagaatgttctgatgagatccccctgaaggtgcccaggaccagcccccgggacagcgaggagctgcgggaccctgctggccctggcaccctcatcatggccaccggggtgcaggacttcaacagaacagaatttgaccggctgaatgagatcaagggccacctggagatcgccctgctggagaagcacttcctgcaggaggagctgaggaagctgcgggaggagaccaatgctgagatgctgcggcaggagctggaccgggagcggcagaggaggatggagctggagcagaaggtgcaggaggtgctgaaggccaggacagaggagcagatggcccagcagccccccaagggccaggcccaggccagcaatggagctgagaggaggagccagggcctgagcagccggctgcagaagtggttctatgaaagatttggagaatatgtggaggacttccgcttccagccagaagaaaatacagtggagacagaggagcccctgagcgcccggcggctgacagagaacatgaggcggctgaagagaggagccaagcctgtgaccaactttgtgaagaacctgagcgccctgagtgactggtacagcgtgtacaccagcgccatcgccttcaccgtgtacatgaatgctgtgtggcacggctgggccatccccctcttcctgttcctggccatcctgcggctgagcctgaactacctgattgcccggggctggaggatccagtggagcatcgtgcctgaggtgtctgagcctgtggagccccccaaggaggacctgactgtgtctgagaagttccagctggtgctggatgtggcccagaaggcccagaacctgtttgggaagatggctgacatcctggagaagatcaagaacctcttcatgtgggtgcagcctgagatcacccagaagctgtatgtggccctgtgggccgccttcctggccagctgcttcttcccctaccgcctggtgggcctggccgtgggcctgtatgccggcatcaagttcttcctgattgacttcatcttcaagcgctgcccccggctgcgggccaagtatgacaccccctacatcatctggaggagcctgcccacagacccccagctgaaggagaggagcagcgctgctgtgtcccggcggctgcagaccaccagcagccgctcctatgtgcccagcgccccagctggcctgggcaaggaggaggatgctggccgcttccacagcaccaagaagggcaacttccacgagatcttcaacctgacagaaaatgaaagacccctggccgtgtgtgaaaatggctggcgctgctgcctgatcaacagagacaggaagatgcccacagactacatcagaaatggagtgctgtatgtgacagagaactacctgtgctttgagagcagcaagagcggcagcagcaagaggaacaaggtgatcaagctggtggacatcacagacatccagaagtacaaggtgctgtctgtgctgcccggcagcggcatgggcattgctgtgtccacccccagcacccagaagcccctggtgtttggagccatggtgcacagagatgaggcctttgagaccatcctgagccagtacatcaagatcaccagcgctgctgccagcggcggggacagctag

SEQ ID NO: 154392 - DNA, 1737 bp, synthetic construct; identical to SEQ ID NO: 154391
  misc_feature 1..1737: note = Description of Artificial Sequence: Synthetic coding sequence
  source 1..1737: mol_type = other DNA

SEQ ID NO: 154393 - DNA, 102 bp, synthetic construct
  misc_feature 1..102: note = Description of Artificial Sequence: Synthetic coding sequence
  source 1..102: mol_type = other DNA
atgctgcggcggctggacaagatccgcttccggggccacaagagagatgacttcctggacctggccgagagccccaatgccagtgacacagaatgttcctag

SEQ ID NO: 154394 - DNA, 1782 bp, synthetic construct
  misc_feature 1..1782: note = Description of Artificial Sequence: Synthetic coding sequence
  source 1..1782: mol_type = other DNA
atgtggaccctggtgtcctgggtggccctgacagctggcctggtggccggcacccgctgcccagatggccagttctgccctgtggcctgctgcctggaccccggcggggccagctacagctgctgccggcccctgctggacaagtggcccaccaccctgagccgccacctgggcggcccctgccaggtggatgcccactgcagcgctggccacagctgcatcttcaccgtgtctggcaccagcagctgctgccccttccctgaggccgtggcctgtggagatggccaccactgctgcccccggggcttccactgcagcgcagatggccgcagctgcttccagaggagcggcaacaacagcgtgggcgccatccagtgcccagacagccagtttgagtgcccagacttcagcacctgctgcgtgatggtggatggctcctggggctgctgccccatgccccaggccagctgctgtgaagatagagtgcactgctgcccccatggagccttctgtgacctggtgcacacccgctgcatcacccccaccggcacccaccccctggccaagaagctgcctgcccagaggaccaacagagctgtggccctgagcagctctgtgatgtgcccagatgcccggagccgctgcccagatggcagcacctgctgtgagctgcccagcggcaagtatggctgctgccccatgcccaatgccacctgctgcagcgaccacctgcactgctgcccccaggacacagtgtgtgacctgatccagagcaagtgcctgagcaaagaaaatgccaccacagacctgctgaccaagctgcctgcccacacagtgggagatgtgaagtgtgacatggaggtgtcctgcccagatggctacacctgctgccgcctgcagagcggggcctggggctgctgccccttcacccaggccgtgtgctgtgaggaccacatccactgctgcccagctggcttcacctgtgacacccagaagggcacctgtgagcagggcccccaccaggtgccctggatggagaaggccccagcccacctgagcctgcctgacccccaggccctgaagagagatgtgccctgtgacaacgtgagcagctgccccagcagtgacacctgctgccagctgaccagcggggagtggggctgctgccccatccctgaggccgtgtgctgcagcgaccaccagcactgctgcccccagggctacacctgtgtggccgagggccagtgccagaggggcagcgagatcgtggccggcctggagaagatgcctgcccggcgggccagcctgagccacccccgggacatcggctgtgaccagcacaccagctgccctgtgggccagacctgctgccccagcctgggcggctcctgggcctgctgccagctgccccatgctgtgtgctgtgaggaccggcagcactgctgcccagctggctacacctgcaatgtgaaggcccggagctgtgagaaggaggtggtgtctgcccagcctgccaccttcctggcccggagcccccacgtgggcgtgaaggatgtggagtgtggggagggccacttctgccacgacaaccagacctgctgccgggacaaccggcagggctgggcctgctgcccctaccggcagggcgtgtgctgtgccgacagaagacactgctgcccagctggcttccgctgtgccgcccggggcaccaagtgcctgcggcgggaggccccccgctgggatgcccccctgcgggaccctgccctgcggcagctgctgtag

SEQ ID NO: 154395 - DNA, 1317 bp, synthetic construct
  misc_feature 1..1317: note = Description of Artificial Sequence: Synthetic coding sequence
  source 1..1317: mol_type = other DNA
atgtggaccctggtgtcctgggtggccctgacagctggcctggtggccggcacccgctgcccagatggccagttctgccctgtggcctgctgcctggaccccggcggggccagctacagctgctgccggcccctgctggacaagtggcccaccaccctgagccgccacctgggcggcccctgccaggtggatgcccactgcagcgctggccacagctgcatcttcaccgtgtctggcaccagcagctgctgccccttccctgaggccgtggcctgtggagatggccaccactgctgcccccggggcttccactgcagcgcagatggccgcagctgcttccagaggagcggcaacaacagcgtgggcgccatccagtgcccagacagccagtttgagtgcccagacttcagcacctgctgcgtgatggtggatggctcctggggctgctgccccatgccccaggccagctgctgtgaagatagagtgcactgctgcccccatggagccttctgtgacctggtgcacacccgctgcatcacccccaccggcacccaccccctggccaagaagctgcctgcccagaggaccaacagagctgtggccctgagcagctctgtgatgtgcccagatgcccggagccgctgcccagatggcagcacctgctgtgagctgcccagcggcaagtatggctgctgccccatgcccaatgccacctgctgcagcgaccacctgcactgctgcccccaggacacagtgtgtgacctgatccagagcaagtgcctgagcaaagaaaatgccaccacagacctgctgaccaagctgcctgcccacacagtgggagatgtgaagtgtgacatggaggtgtcctgcccagatggctacacctgctgccgcctgcagagcggggcctggggctgctgccccttcacccaggccgtgtgctgtgaggaccacatccactgctgcccagctggcttcacctgtgacacccagaagggcacctgtgagcagggcccccaccaggtgccctggatggagaaggccccagcccacctgagcctgcctgacccccaggccctgaagagagatgtgccctgtgacaacgtgagcagctgccccagcagtgacacctgctgccgggacaaccggcagggctgggcctgctgcccctaccggcagggcgtgtgctgtgccgaccggcggcactgctgcccagctggcttccgctgtgccgcccggggcaccaagtgcctgcggcgggaggccccccgctgggatgcccccctgcgggaccctgccctgcggcagctgctgtag

SEQ ID NO: 154396 - DNA, 1242 bp, synthetic construct
  misc_feature 1..1242: note = Description of Artificial Sequence: Synthetic coding sequence
  source 1..1242: mol_type = other DNA
atggccatcacagctgcccatggagccagcacagctgtgcagacaggagaccctgccagcaaggaccaggtgaccaccccctgggtgcccagcagcgccctgattgtgagcagcaatgcccggaccagccccagggctgtgctgtggagcatggcccctggaggagctgccccctgcccccggctgcctgctgtgaagacaggctgcacagctgtgtgtgacctgatccagagcaagtgcctgagcaaagaaaatgccaccacagacctgctgaccaagctgcctgcccacacagtgggagatgtgaagtgtgacatggaggtgtcctgcccagatggctacacctgctgccgcctgcagagcggggcctggggctgctgccccttcacccaggccgtgtgctgtgaggaccacatccactgctgcccagctggcttcacctgtgacacccagaagggcacctgtgagcagggcccccaccaggtgccctggatggagaaggccccagcccacctgagcctgcctgacccccaggccctgaagagagatgtgccctgtgacaacgtgagcagctgccccagcagtgacacctgctgccagctgaccagcggggagtggggctgctgccccatccctgaggccgtgtgctgcagcgaccaccagcactgctgcccccagggctacacctgtgtggccgagggccagtgccagaggggcagcgagatcgtggccggcctggagaagatgcctgcccggcgggccagcctgagccacccccgggacatcggctgtgaccagcacaccagctgccctgtgggccagacctgctgccccagcctgggcggctcctgggcctgctgccagctgccccatgctgtgtgctgtgaggaccggcagcactgctgcccagctggctacacctgcaatgtgaaggcccggagctgtgagaaggaggtggtgtctgcccagcctgccaccttcctggcccggagcccccacgtgggcgtgaaggatgtggagtgtggggagggccacttctgccacgacaaccagacctgctgccgggacaaccggcagggctgggcctgctgcccctaccggcagggcgtgtgctgtgccgacagaagacactgctgcccagctggcttccgctgtgccgcccggggcaccaagtgcctgcggcgggaggccccccgctgggatgcccccctgcgggaccctgccctgcggcagctgctgtag

SEQ ID NO: 154397 - DNA, 789 bp, synthetic construct
  misc_feature 1..789: note = Description of Artificial Sequence: Synthetic coding sequence
  source 1..789: mol_type = other DNA
atgaggaacagctaccgcttcctggccagcagcctgtctgtggtggtgtccctgctgctgatcccagaagatgtgtgtgagaagatcatcggcggcaatgaggtgaccccccacagccggccctacatggtgctgctgagcctggacaggaagaccatctgtgccggggccctgattgccaaggactgggtgctgacagctgcccactgcaacctgaacaagaggagccaggtgatcctgggcgcccacagcatcacccgggaggagcccaccaagcagatcatgctggtgaagaaggagttcccctacccctgctatgaccctgccacccgggagggggacctgaagctgctgcagctgatggagaaggccaagatcaacaagtatgtgaccatcctgcacctgcccaagaagggagatgatgtgaagccaggcaccatgtgccaggtggccggctggggccgcacccacaacagcgcctcctggagcgacaccctgcgggaggtgaacatcaccatcatcgacaggaaggtgtgcaatgacaggaaccactacaacttcaaccctgtgattggcatgaacatggtgtgtgccggcagcctgcggggcggccgggacagctgcaatggagacagcggcagccccctgctgtgtgagggcgtcttccggggcgtgaccagctttggcctggagaacaagtgtggggacccccggggccctggggtgtacatcctgctgagcaagaagcacctgaactggatcatcatgaccatcaagggagctgtgtag

SEQ ID NO: 154398 - DNA, 741 bp, synthetic construct
  misc_feature 1..741: note = Description of Artificial Sequence: Synthetic coding sequence
  source 1..741: mol_type = other DNA
atgcagcccttcctgctgctgctggccttcctgctgacccctggggccggcacagaggagatcatcggcggccacgaggccaagccccacagccggccctacatggcctttgtgcagttcctgcaggagaagagcaggaagagatgtggcggcatcctggtgaggaaggactttgtgctgacagctgcccactgccagggcagcagcatcaacgtgaccctgggcgcccacaacatcaaggagcaggagaggacccagcagttcatccctgtgaagaggcccatcccccacccagcctacaaccccaagaacttcagcaatgacatcatgctgctgcagctggagaggaaggccaagtggaccacagctgtgcggcccctgcggctgcccagcagcaaggcccaggtgaagccaggccagctgtgcagcgtggccggctggggctacgtgtccatgagcaccctggccaccaccctgcaggaggtgctgctgactgtgcagaaggactgccagtgtgagcggctcttccacggcaactacagccgggccacagagatctgtgtgggggaccccaagaagacccagacaggcttcaagggggacagcggcggccccctggtgtgcaaggatgtggcccagggcatcctgtcctatggcaacaagaagggcaccccacctggggtgtacatcaaggtgagccacttcctgccctggatcaagaggaccatgaagaggctgtag

SEQ ID NO: 154399 - DNA, 459 bp, synthetic construct
  misc_feature 1..459: note = Description of Artificial Sequence: Synthetic coding sequence
  source 1..459: mol_type = other DNA
atgcagcccatcctgctgctgctggccttcctgctgctgcccagggctgaccagctggagaggaaggccaagaggaccagggctgtgcagcccctgcggctgcccagcaacaaggcccaggtgaagccaggccagacctgcagcgtggccggctggggccagacagcccccctgggcaagcacagccacaccctgcaggaggtgaagatgacagtgcaggaggacagaaaatgtgagagtgacctgcggcactactatgacagcaccatcgagctgtgtgtgggggaccctgagatcaagaagaccagcttcaagggggacagcggcggccccctggtgtgcaacaaggtggcccagggcatcgtgtcctatggcaggaacaacggcatgccaccccgggcctgcaccaaggtgagcagctttgtgcactggatcaagaagaccatgaagcgctactag

SEQ ID NO: 154400 - DNA, 609 bp, synthetic construct
  misc_feature 1..609: note = Description of Artificial Sequence: Synthetic coding sequence
  source 1..609: mol_type = other DNA
atgcagcccatcctgctgctgctggccttcctgctgctgcccagggcagatgctggggagatcatcggcggccacgaggccaagccccacagccggccctacatggcctacctgatgatctgggaccagaagagcctgaagagatgtggcggcttcctgatcagagatgactttgtgctgacagctgcccactgctggggccgcctggagaggaaggccaagaggaccagggctgtgcagcccctgcggctgcccagcaacaaggcccaggtgaagccaggccagacctgcagcgtggccggctggggccagacagcccccctgggcaagcacagccacaccctgcaggaggtgaagatgacagtgcaggaggacagaaaatgtgagagtgacctgcggcactactatgacagcaccatcgagctgtgtgtgggggaccctgagatcaagaagaccagcttcaagggggacagcggcggccccctggtgtgcaacaaggtggcccagggcatcgtgtcctatggcaggaacaacggcatgccaccccgggcctgcaccaaggtgagcagctttgtgcactggatcaagaagaccatgaagcgctactag

SEQ ID NO: 154401 - DNA, 846 bp, synthetic construct
  misc_feature 1..846: note = Description of Artificial Sequence: Synthetic coding sequence
  source 1..846: mol_type = other DNA
atgaagagcctgagcctgctgcacctgttccccctgccccgggccaagcgggagcagggcggcaacaacagcagcagcaaccagggcagcctgcctgagaagatgcagcccatcctgctgctgctggccttcctgctgctgcccagggcagatgctggggagatcatcggcggccacgaggccaagccccacagccggccctacatggcctacctgatgatctgggaccagaagagcctgaagagatgtggcggcttcctgatcagagatgactttgtgctgacagctgcccactgctggggcagcagcatcaacgtgaccctgggcgcccacaacatcaaggagcaggagcccacccagcagttcatccctgtgaagaggcccatcccccacccagcctacaaccccaagaacttcagcaatgacatcatgctgctgcagctggagaggaaggccaagaggaccagggctgtgcagcccctgcggctgcccagcaacaaggcccaggtgaagccaggccagacctgcagcgtggccggctggggccagacagcccccctgggcaagcacagccacaccctgcaggaggtgaagatgacagtgcaggaggacagaaaatgtgagagtgacctgcggcactactatgacagcaccatcgagctgtgtgtgggggaccctgagatcaagaagaccagcttcaagggggacagcggcggccccctggtgtgcaacaaggtggcccagggcatcgtgtcctatggaagaaataatggcatgccaccccgggcctgcaccaaggtgtcctcctttgtgcactggatcaagaagaccatgaagcgctactag

SEQ ID NO: 154402 - DNA, 708 bp, synthetic construct
  misc_feature 1..708: note = Description of Artificial Sequence: Synthetic coding sequence
  source 1..708: mol_type = other DNA
atgcagaccttccccagcggggagatcatcggcggccacgaggccaagccccacagccggccctacatggcctacctgatgatctgggaccagaagagcctgaagagatgtggcggcttcctgatcagagatgactttgtgctgacagctgcccactgctggggcagcagcatcaacgtgaccctgggcgcccacaacatcaaggagcaggagcccacccagcagttcatccctgtgaagaggcccatcccccacccagcctacaaccccaagaacttcagcaatgacatcatgctgctgcagctggagaggaaggccaagaggaccagggctgtgcagcccctgcggctgcccagcaacaaggcccaggtgaagccaggccagacctgcagcgtggccggctggggccagacagcccccctgggcaagcacagccacaccctgcaggaggtgaagatgacagtgcaggaggacagaaaatgtgagagtgacctgcggcactactatgacagcaccatcgagctgtgtgtgggggaccctgagatcaagaagaccagcttcaagggggacagcggcggccccctggtgtgcaacaaggtggcccagggcatcgtgtcctatggaagaaataatggcatgccaccccgggcctgcaccaaggtgtcctcctttgtgcactggatcaagaagaccatgaagcgctactag

SEQ ID NO: 154403 - DNA, 483 bp, synthetic construct
  misc_feature 1..483: note = Description of Artificial Sequence: Synthetic coding sequence
  source 1..483: mol_type = other DNA
atgcagcccttcctgctgctgctggccttcctgctgacccctggggccggcacagaggagatcatcggcggccacgaggccaagccccacagccggccctacatggcctttgtgcagttcctgcaggagaagagcaggaagagatgtggcggcatcctggtgaggaaggactttgtgctgacagctgcccactgccagggcagcagcatcaacgtgaccctgggcgcccacaacatcaaggagcaggagaggacccagcagttcatccctgtgaagaggcccatcccccacccagcctacaaccccaagaacttcagcaatgacatcatgctgctgcagggcgacagcggcggccccctggtgtgcaaggatgtggcccagggcatcctgtcctatggcaacaagaagggcaccccacctggggtgtacatcaaggtgagccacttcctgccctggatcaagaggaccatgaagaggctgtag

SEQ ID NO: 154404 - DNA, 768 bp, synthetic construct
  misc_feature 1..768: note = Description of Artificial Sequence: Synthetic coding sequence
  source 1..768: mol_type = other DNA
atgcagcccctgctgctgctgctggccttcctgctgcccaccggggctgaggccggggagatcatcggcggccgggagagccggccccacagccggccctacatggcctacctgcagatccagagccctgctggccagagccgctgtggcggcttcctggtgcgggaggactttgtgctgacagctgcccactgctggggcagcaacatcaacgtgaccctgggcgcccacaacatccagaggcgggagaacacccagcagcacatcacagcccggcgggccatccgccacccccagtacaaccagaggaccatccagaatgacatcatgctgctgcagctgagccggcgggtgagaagaaacagaaatgtgaaccctgtggccctgccccgggcccaggagggcctgcggcccggcaccctgtgcaccgtggccggctggggccgggtgtccatgagaagaggaacagacaccctgcgggaggtgcagctgcgggtgcagagggaccggcagtgcctgcgcatcttcggcagctatgacccccggcggcagatctgtgtgggggaccggcgggagaggaaggccgccttcaagggggacagcggcggccccctgctgtgcaacaacgtggcccacggcatcgtgtcctatggcaagagcagtggagtgcccccagaggtgttcaccagggtgtcctccttcctgccctggatccgcaccaccatgaggagcttcaagctgctggaccagatggagacccccctgtag

SEQ ID NO: 154405 - DNA, 348 bp, synthetic construct
  misc_feature 1..348: note = Description of Artificial Sequence: Synthetic coding sequence
  source 1..348: mol_type = other DNA
atgcagcccttcctgctgctgctggccttcctgctgacccctggggccggcacagaggagatcatcggcggccacgaggccaagccccacagccggccctacatggcctttgtgcagttcctgcaggagaagagcaggaagagatgtggcggcatcctggtgaggaaggactttgtgctgacagctgcccactgccagggccgcggggacagcggcggccccctggtgtgcaaggatgtggcccagggcatcctgtcctatggcaacaagaagggcaccccacctggggtgtacatcaaggtgagccacttcctgccctggatcaagaggaccatgaagaggctgtag

SEQ ID NO: 154406 - DNA, 774 bp, synthetic construct
  misc_feature 1..774: note = Description of Artificial Sequence: Synthetic coding sequence
  source 1..774: mol_type = other DNA
atggaggcctgtgtgagcagcctgctggtgctggccctgggcgccctgtctgtgggcagcagctttggcacccagatcattggaggccgggaggtgatcccccacagccggccctacatggccagcctgcagagaaatggcagccacctgtgtggcggcgtgctggtgcaccccaagtgggtgctgacagctgcccactgcctggcccagaggatggcccagctgcggctggtgctgggcctgcacaccctggacagccctggcctgaccttccacatcaaggccgccatccagcacccccgctacaagcctgtgcctgccctggagaatgacctggccctgctgcagctggatggcaaggtgaagcccagcaggaccatccggcccctggccctgcccagcaagaggcaggtggtggccgccggcacccgctgcagcatggccggctggggcctgacccaccagggcggccgcctgagccgggtgctgcgggagctggacctgcaggtgctggacaccaggatgtgcaacaacagccgcttctggaatggcagcctgagccccagcatggtgtgcctggccgctgacagcaaggaccaggccccctgcaagggggacagcggcggccccctggtgtgtgggaagggccgggtgctggcccgggtgctgtccttcagcagccgggtgtgcacagacatcttcaagccccctgtggccacagctgtggccccctacgtgtcctggatcaggaaggtgacaggccgcagcgcctag

SEQ ID NO: 154407 - DNA, 3108 bp, synthetic construct
  misc_feature 1..3108: note = Description of Artificial Sequence: Synthetic coding sequence
  source 1..3108: mol_type = other DNA
atggctgctgagaccctgaactttggacctgagtggctgcgggccctgagcggcggcggctctgtggccagccccccacccagccctgccatgcccaagtacaagctggccgactaccgctatggccgggaggagatgctggccctgtatgtgaaggagaacaaggtgcctgaggagctgcaggacaaggagtttgctgctgtgctgcaggatgagcccctgcagcccctggccctggagcccctgacagaggaggagcagaggaacttcagcctgtctgtgaacagcgtggccgtgctgcggctgatgggcaaaggagctggcccccccctggccggcaccagccggggccggggcagcaccaggagccggggccggggccgcggggacagctgcttctaccagaggagcattgaggagggagatggagccttcggccgcagcccccgggagatccagaggagccagagctgggatgacagaggagagaggagatttgagaagagcgccaggagagatggagcccgctgtggctttgaggagggcggggccggccccaggaaggagcacgcccggagtgacagcgagaactggaggagcctgcgggaggagcaggaggaggaggaggagggctcctggaggctgggcgccggccccaggagagatggagaccgctggaggtctgccagcccagatggcggccccaggtctgctggctggagggagcacggggagaggaggaggaagtttgaatttgacctgcggggggacagaggaggctgtggggaggaggagggccggggcggcggcggcagcagccacctgcggcgctgccgggcccctgagggctttgaggaggacaaggatggcctgcctgagtggtgcctggatgatgaagatgaggagatgggcacctttgatgccagcggggccttcctgcccctgaagaagggccccaaggagcccatccctgaggagcaggagctggacttccagggcctggaggaggaggaggagcccagcgagggcctggaggaggagggccctgaggccggcggcaaggagctgacccccctgcccccccaggaggagaagagcagcagccccagccccctgcccaccctgggccccctgtggggcaccaatggagatggagatgaaacagctgagaaggagcccccagctgctgaagatgacatccggggcatccagctgagccctggggtgggcagcagcgctggccccccaggggacctggaggatgatgagggcctgaagcacctgcagcaggaggccgagaagctggtggccagcctgcaggacagcagcctggaggaggagcagttcaccgctgccatgcagacccagggcctgcggcacagcgctgctgccacagccctgcccctgagccatggagctgccaggaagtggttctacaaggacccccagggcgagatccagggccccttcaccacccaggagatggccgagtggttccaggccggctacttctccatgagcctgctggtgaagaggggctgtgatgagggcttccagcccctgggggaggtgatcaagatgtggggccgggtgccctttgcccctggccccagccccccacccctgctgggcaacatggaccaggagcggctgaagaagcagcaggagctggccgccgccgccctgtaccagcagctgcagcaccagcagttcctgcagctggtgagcagccggcagctgccccagtgtgccctgcgggagaaggccgccctgggggacctgaccccacctcctcctcctccaccccagcagcagcagcagcagctgacagccttcctgcagcagctgcaggccctgaagccaccccggggcggggaccagaacctgctgcccaccatgagccgcagcctgtctgtgcctgacagcggccgcctgtgggatgtgcacaccagcgccagcagccagagcggcggggaggccagcctgtgggacatccccatcaacagcagcacccagggccccatcctggagcagctgcagctgcagcacaagttccaggagcggcgggaggtggagctgcgggccaagcgggaggaggaggagaggaagaggcgggaggagaagaggcggcagcagcagcaggaggagcagaagaggcggcaggaggaggaggagctgttccggaggaagcacgtgcggcagcaggagctgctgctgaagctgctgcagcagcagcaggccgtgcctgtgcccccagcccccagcagccccccacccctgtgggccggcctggccaagcagggcctgtccatgaagaccctgctggagctgcagctggagggggagcggcagctgcacaagcagcccccaccccgggagcccgcccgggcccaggcccccaaccaccgggtgcagctgggcggcctgggcacagcccccctgaaccagtgggtgtctgaggccggccccctgtggggcggccctgacaagagcggcggcggcagcagcggcctgggcctgtgggaggacacccccaagagcggcggcagcctggtgcggggcctgggcctgaagaacagccgcagcagccccagcctgagtgacagctacagccacctgagcggccggcccatcaggaagaagacagaggaggaggagaagctgctgaagctgctgcagggcatcccccggccccaggacggcttcacccagtggtgtgagcagatgctgcacaccctgagcgccaccggcagcctggatgtgcccatggctgtggccatcctgaaggaggtggagagcccctatgatgtgcatgactacatccgcagctgcctgggggacaccctggaggccaaggagtttgccaagcagttcctggagcggcgggccaagcagaaggccagccagcagaggcagcagcagcaggaggcctggctgagcagcgccagcctgcagacagccttccaggccaaccacagcaccaagctgggccctggagagggcagcaaggccaagaggcgggccctgatgctgcacagcgaccccagcatcctgggctacagcctgcacggcagcagcggggagattgaatctgtggatgactactag

SEQ ID NO: 154408 - DNA, 2265 bp, synthetic construct
  misc_feature 1..2265: note = Description of Artificial Sequence: Synthetic coding sequence
  source 1..2265: mol_type = other DNA
agcagcttccccagcccccggctgccccaggtgttccaccggctggatgatgaagatgaggagatgggcacctttgatgccagcggggccttcctgcccctgaagaagggccccaaggagcccatccctgaggagcaggagctggacttccagggcctggaggaggaggaggagcccagcgagggcctggaggaggagggccctgaggccggcggcaaggagctgacccccctgcccccccaggaggagaagagcagcagccccagccccctgcccaccctgggccccctgtggggcaccaatggagatggagatgaaacagctgagaaggagcccccagctgctgaagatgacatccggggcatccagctgagccctggggtgggcagcagcgctggccccccaggggacctggaggatgatgagggcctgaagcacctgcagcaggaggccgagaagctggtggccagcctgcaggacagcagcctggaggaggagcagttcaccgctgccatgcagacccagggcctgcggcacagcgctgctgccacagccctgcccctgagccacggggccgccaggaagtggttctacaaggacccccagggcgagatccagggccccttcaccacccaggagatggccgagtggttccaggccggctacttctccatgagcctgctggtgaagaggggctgtgatgagggcttccagcccctgggggaggtgatcaagatgtggggccgggtgccctttgcccctggccccagccccccacccctgctgggcaacatggaccaggagcggctgaagaagcagcaggagctggccgctgctgccctgtaccagcagctgcagcaccagcagttcctgcagctggtgagcagccggcagctgccccagtgtgccctgcgggagaaggccgccctgggggacctgaccccacctcctcctcctccaccccagcagcagcagcagcagctgacagccttcctgcagcagctgcaggccctgaagccaccccggggcggggaccagaacctgctgcccaccatgagccgcagcctgtctgtgcctgattctggccgcctgtgggatgtgcacaccagcgccagcagccagagcggcggggaggccagcctgtgggacatccccatcaacagcagcacccagggccccatcctggagcagctgcagctgcagcacaagttccaggagcggcgggaggtggagctgcgggccaagcgggaggaggaggagaggaagagaagagaggagaagaggcggcagcagcagcaggaggagcagaagaggcggcaggaggaggaggagctgttccggaggaagcacgtgcggcagcaggagctgctgctgaagctgctgcagcagcagcaggccgtgcctgtgcccccagcccccagcagccccccacccctgtgggccggcctggccaagcagggcctgtccatgaagaccctgctggagctgcagctggagggggagcggcagctgcacaagcagcccccaccccgggagcccgcccgggcccaggcccccaaccaccgggtgcagctgggcggcctgggcacagcccccctgaaccagtgggtgtctgaggccggccccctgtggggcggccctgacaagagcggcggcggcagcagcggcctgggcctgtgggaggacacccccaagagcggcggcagcctggtgcggggcctgggcctgaagaacagccgcagcagccccagcctgagtgacagctacagccacctgagcggccggcccatcaggaagaagacagaggaggaggagaagctgctgaagctgctgcagggcatcccccggccccaggacggcttcacccagtggtgtgagcagatgctgcacaccctgagcgccaccggcagcctggatgtgcccatggctgtggccatcctgaaggaggtggagagcccctatgatgtgcatgactacatccgcagctgcctgggggacaccctggaggccaaggagtttgccaagcagttcctggagcggcgggccaagcagaaggccagccagcagaggcagcagcagcaggaggcctggctgagcagcgccagcctgcagacagccttccaggccaaccacagcaccaagctgggccctggagagggcagcaaggccaagagaagagccctgatgctgcacagcgaccccagcatcctgggctacagcctgcacggcagcagtggagaaattgagagcgtggatgactactag

SEQ ID NO: 154409 - DNA, 3900 bp, synthetic construct
  misc_feature 1..3900: note = Description of Artificial Sequence: Synthetic coding sequence
  source 1..3900: mol_type = other DNA
atggctgctgagacccagaccctgaactttggacctgagtggctgcgggccctgagcagcggcggcagcatcaccagcccccccctgagccctgccctgcccaagtacaagctggccgactaccgctatggccgggaggagatgctggccctcttcctgaaggacaacaagatccccagcgacctgctggacaaggagttcctgcccatcctgcaggaggagcccctgccccccctggccctggtgcccttcacagaggaggagcagaggaacttctccatgtctgtgaacagcgctgctgtgctgcggctgaccggccggggcggcggcggcaccgtggtgggcgccccccggggccgcagcagcagccggggccggggccggggccgcggggagtgtggcttctaccagaggagctttgatgaggtggagggcgtgtttggccggggcggcggccgggagatgcacaggagccagagctgggaggagcggggggacagaagatttgagaagccaggcaggaaggatgtgggccggcccaactttgaggagggcggccccacctctgtgggcaggaagcatgagttcatccgctctgagagcgagaactggaggatcttccgggaggagcagaatggagaagatgaagatggcggctggaggctggccggcagcagaagagatggagagcgctggaggccccacagcccagatggccccaggtctgctggctggagggagcacatggagaggagaagaagatttgaatttgacttccgggacagagatgatgagcggggctacagaagagtgcgcagcggcagcggcagcattgatgatgaccgggacagcctgcctgagtggtgcctggaggatgctgaggaggagatgggcacctttgacagcagcggggccttcctgagcctgaagaaggtgcagaaggagcccatccctgaggagcaggagatggacttccggcctgtggatgaaggagaagaatgtagtgacagcgagggcagccacaatgaggaggccaaggagccagacaagaccaacaagaaggagggggagaagacagacagagtgggcgtggaggccagcgaggagaccccccagaccagcagcagcagcgcccggcccggcacccccagcgaccaccagagccaggaggccagccagtttgagaggaaggatgagcccaagacagagcagacagagaaggccgaggaggagaccaggatggagaacagcctgcctgccaaggtgcccagcagaggagatgagatggtggctgatgtgcagcagcccctgagccagatccccagcgacacagccagccccctgctgatcctgcccccacctgtgcccaaccccagccccaccctgcggcctgtggagacccctgtggtgggcgcccctggcatgggctctgtgtccacagagccagatgatgaggagggcctgaagcacctggagcagcaggccgagaagatggtggcctacctgcaggacagcgccctggatgatgagcggctggccagcaagctgcaggagcaccgggccaagggcgtgtccatccccctgatgcatgaggccatgcagaagtggtactacaaggacccccagggcgagatccagggccccttcaacaaccaggagatggccgagtggttccaggccggctacttcaccatgagcctgctggtgaagagggcctgtgatgagagcttccagcccctgggggacatcatgaagatgtggggccgggtgcccttcagccctggccctgcccccccaccccacatgggagagctggaccaggagcggctgacccggcagcaggagctgacagccctgtaccagatgcagcacctgcagtaccagcagttcctgatccagcagcagtatgcccaggtgctggcccagcagcagaaggccgccctgagcagccagcagcagcagcagctggccctgctgctgcagcagttccagaccctgaagatgaggatcagtgaccagaacatcatccccagcgtgaccaggtctgtgtctgtgcctgacaccggcagcatctgggagctgcagcccacagccagccagcccaccgtgtgggagggcggctctgtgtgggacctgcccctggacaccaccaccccaggccctgccctggagcagctgcagcagctggagaaggccaaggccgccaagctggagcaggagcggcgggaggccgagatgagggccaagcgggaggaggaggagaggaagaggcaggaggagctgcggcggcagcaggaggagatcctgcggcggcagcaggaggaggagaggaagagaagagaggaggaggagctggcccggaggaagcaggaggaggccctgcggcggcagcgggagcaggagatcgccctgcggcggcagcgggaggaggaggagcggcagcagcaggaggaggccctgcggcggctggaggagaggagaagagaggaggaggagaggaggaagcaggaggagctgctgaggaagcaggaggaggaggccgccaagtgggcccgggaggaggaggaggcccagaggcggctggaggagaaccggctgaggatggaggaggaggccgcccggctgcggcatgaggaggaggagaggaagaggaaggagctggaggtgcagaggcagaaggagctgatgaggcagaggcagcagcagcaggaggccctgcggcggctgcagcagcagcagcagcagcagcagctggcccagatgaagctgcccagcagcagcacctggggccagcagagcaacaccacagcctgccagagccaggccaccctgagcctggccgagatccagaagctggaggaggagcgggagcggcagctgcgggaggagcagaggcggcagcagcgggagctgatgaaggccctgcagcagcagcagcagcagcagcagcagaagctgagcggctggggcaatgtgtccaagcccagcggcaccaccaagagcctgctggagatccagcaggaggaggcccggcagatgcagaagcagcagcagcagcagcagcagcaccagcagcccaacagagccaggaacaacacccacagcaacctgcacaccagcatcggcaacagcgtgtggggcagcatcaacacaggcccccccaaccagtgggccagtgacctggtgagcagcatctggagcaatgctgacaccaagaacagcaacatgggcttctgggatgatgctgtgaaggaggtgggccccaggaacagcaccaacaagaacaagaacaatgccagcctgagcaagtctgtgggcgtgagcaaccggcagaacaagaaggtggaggaggaggagaagctgctgaagctgttccagggcgtgaacaaggcccaggacggcttcacccagtggtgtgagcagatgctgcacgccctgaacacagccaacaacctggatgtgcccacctttgtgtccttcctgaaggaggtggagagcccctatgaggtgcatgactacatccgggcctacctgggggacaccagcgaggccaaggagtttgccaagcagttcctggagcggcgggccaagcagaaggccaaccagcagaggcagcagcagcagctgccccagcagcagcagcagcagcccccccagcagcccccccagcagccccagcagcaggacagcgtgtggggcatgaaccacagcaccctgcacagcgtcttccagaccaaccagagcaacaaccagcagagcaactttgaagctgtgcagagcggcaagaagaagaagaagcagaagatggtgcgggctgaccccagcctgctgggcttctctgtgaatgccagcagcgagcggctgaacatgggagaaattgagaccctggatgactactag

SEQ ID NO: 154410 - DNA, 3966 bp, synthetic construct
  misc_feature 1..3966: note = Description of Artificial Sequence: Synthetic coding sequence
  source 1..3966: mol_type = other DNA
atggctgctgagacccagaccctgaactttggacctgagtggctgcgggccctgagcagcggcggcagcatcaccagcccccccctgagccctgccctgcccaagtacaagctggccgactaccgctatggccgggaggagatgctggccctcttcctgaaggacaacaagatccccagcgacctgctggacaaggagttcctgcccatcctgcaggaggagcccctgccccccctggccctggtgcccttcacagaggaggagcagaggaacttctccatgtctgtgaacagcgctgctgtgctgcggctgaccggccggggcggcggcggcaccgtggtgggcgccccccggggccgcagcagcagccggggccggggccggggccgcggggagtgtggcttctaccagaggagctttgatgaggtggagggcgtgtttggccggggcggcggccgggagatgcacaggagccagagctgggaggagcggggggacagaagatttgagaagccaggcaggaaggatgtgggcaagaagaatggctactactgcatgtacagccctgtgctgctgctgggccagcccctgtgccagggccggcccaactttgaggagggcggccccacctctgtgggcaggaagcatgagttcatccgctctgagagcgagaactggaggatcttccgggaggagcagaatggagaagatgaagatggcggctggaggctggccggcagcagaagagatggagagcgctggaggccccacagcccagatggccccaggtctgctggctggagggagcacatggagaggagaagaagatttgaatttgacttccgggacagagatgatgagcggggctacagaagagtgcgcagcggcagcggcagcattgatgatgaccgggacagcctgcctgagtggtgcctggaggatgctgaggaggagatgggcacctttgacagcagcggggccttcctgagcctgaagaaggtgcagaaggagcccatccctgaggagcaggagatggacttccggcctgtggatgaaggagaagaatgtagtgacagcgagggcagccacaatgaggaggccaaggagccagacaagaccaacaagaaggagggggagaagacagacagagtgggcgtggaggccagcgaggagaccccccagaccagcagcagcagcgcccggcccggcacccccagcgaccaccagagccaggaggccagccagtttgagaggaaggatgagcccaagacagagcagacagagaaggccgaggaggagaccaggatggagaacagcctgcctgccaaggtgcccagcagaggagatgagatggtggctgatgtgcagcagcccctgagccagatccccagcgacacagccagccccctgctgatcctgcccccacctgtgcccaaccccagccccaccctgcggcctgtggagacccctgtggtgggcgcccctggcatgggctctgtgtccacagagccagatgatgaggagggcctgaagcacctggagcagcaggccgagaagatggtggcctacctgcaggacagcgccctggatgatgagcggctggccagcaagctgcaggagcaccgggccaagggcgtgtccatccccctgatgcatgaggccatgcagaagtggtactacaaggacccccagggcgagatccagggccccttcaacaaccaggagatggccgagtggttccaggccggctacttcaccatgagcctgctggtgaagagggcctgtgatgagagcttccagcccctgggggacatcatgaagatgtggggccgggtgcccttcagccctggccctgcccccccaccccacatgggagagctggaccaggagcggctgacccggcagcaggagctgacagccctgtaccagatgcagcacctgcagtaccagcagttcctgatccagcagcagtatgcccaggtgctggcccagcagcagaaggccgccctgagcagccagcagcagcagcagctggccctgctgctgcagcagttccagaccctgaagatgaggatcagtgaccagaacatcatccccagcgtgaccaggtctgtgtctgtgcctgacaccggcagcatctgggagctgcagcccacagccagccagcccaccgtgtgggagggcggctctgtgtgggacctgcccctggacaccaccaccccaggccctgccctggagcagctgcagcagctggagaaggccaaggccgccaagctggagcaggagcggcgggaggccgagatgagggccaagcgggaggaggaggagaggaagaggcaggaggagctgcggcggcagcaggaggagatcctgcggcggcagcaggaggaggagaggaagagaagagaggaggaggagctggcccggaggaagcaggaggaggccctgcggcggcagcgggagcaggagatcgccctgcggcggcagcgggaggaggaggagcggcagcagcaggaggaggccctgcggcggctggaggagaggagaagagaggaggaggagaggaggaagcaggaggagctgctgaggaagcaggaggaggaggccgccaagtgggcccgggaggaggaggaggcccagaggcggctggaggagaaccggctgaggatggaggaggaggccgcccggctgcggcatgaggaggaggagaggaagaggaaggagctggaggtgcagaggcagaaggagctgatgaggcagaggcagcagcagcaggaggccctgcggcggctgcagcagcagcagcagcagcagcagctggcccagatgaagctgcccagcagcagcacctggggccagcagagcaacaccacagcctgccagagccaggccaccctgagcctggccgagatccagaagctggaggaggagcgggagcggcagctgcgggaggagcagaggcggcagcagcgggagctgatgaaggccctgcagcagcagcagcagcagcagcagcagaagctgagcggctggggcaatgtgtccaagcccagcggcaccaccaagagcctgctggagatccagcaggaggaggcccggcagatgcagaagcagcagcagcagcagcagcagcaccagcagcccaacagagccaggaacaacacccacagcaacctgcacaccagcatcggcaacagcgtgtggggcagcatcaacacaggcccccccaaccagtgggccagtgacctggtgagcagcatctggagcaatgctgacaccaagaacagcaacatgggcttctgggatgatgctgtgaaggaggtgggccccaggaacagcaccaacaagaacaagaacaatgccagcctgagcaagtctgtgggcgtgagcaaccggcagaacaagaaggtggaggaggaggagaagctgctgaagctgttccagggcgtgaacaaggcccaggacggcttcacccagtggtgtgagcagatgctgcacgccctgaacacagccaacaacctggatgtgcccacctttgtgtccttcctgaaggaggtggagagcccctatgaggtgcatgactacatccgggcctacctgggggacaccagcgaggccaaggagtttgccaagcagttcctggagcggcgggccaagcagaaggccaaccagcagaggcagcagcagcagctgccccagcagcagcagcagcagcccccccagcagcccccccagcagccccagcagcaggacagcgtgtggggcatgaaccacagcaccctgcacagcgtcttccagaccaaccagagcaacaaccagcagagcaactttgaagctgtgcagagcggcaagaagaagaagaagcagaagatggtgcgggctgaccccagcctgctgggcttctctgtgaatgccagcagcgagcggctgaacatgggagaaattgagaccctggatgactactag

SEQ ID NO: 154411 - DNA, 3966 bp, synthetic construct; identical to SEQ ID NO: 154410
  misc_feature 1..3966: note = Description of Artificial Sequence: Synthetic coding sequence
  source 1..3966: mol_type = other DNA

SEQ ID NO: 154412 - DNA, 3900 bp, synthetic construct; identical to SEQ ID NO: 154409
  misc_feature 1..3900: note = Description of Artificial Sequence: Synthetic coding sequence
  source 1..3900: mol_type = other DNA

SEQ ID NO: 154413 - DNA, 2163 bp, synthetic construct
  misc_feature 1..2163: note = Description of Artificial Sequence: Synthetic coding sequence
  source 1..2163: mol_type = other DNA
atggctgctgagacccagaccctgaactttggacctgagtggctgcgggccctgagcagcggcggcagcatcaccagcccccccctgagccctgccctgcccaagtacaagctggccgactaccgctatggccgggaggagatgctggccctcttcctgaaggacaacaagatccccagcgacctgctggacaaggagttcctgcccatcctgcaggaggagcccctgccccccctggccctggtgcccttcacagaggaggagcagaggaacttctccatgtctgtgaacagcgctgctgtgctgcggctgaccggccggggcggcggcggcaccgtggtgggcgccccccggggccgcagcagcagccggggccggggccggcccaactttgaggagggcggccccacctctgtgggcaggaagcatgagttcatccgctctgagagcgagaactggaggatcttccgggaggagcagaatggagaagatgaagatggcggctggaggctggccggcagcagaagagatggagagcgctggaggccccacagccctggctggagggagcacatggagaggagaagaagatttgaatttgacttccgggacagagatgatgagcggggctaccgccgggtgcgcagcggcagcggcagcattgatgatgaccgggacagcctgcctgagtggtgcctggaggatgctgaggaggagatgggcacctttgacagcagcggggccttcctgagcctgaagaaggtgcagaaggagcccatccctgaggagcaggagatggacttccggcctgtggatgaaggagaggagtgcagcgacagcgagggcagccacaatgaggaggccaaggagccagacaagaccaacaagaaggagggggagaagacagacagagtgggcgtggaggccagcgaggagaccccccagaccagcagcagcagcgcccggcccggcacccccagcgaccaccagagccaggaggccagccagtttgagaggaaggatgagcccaagacagagcagacagagaaggccgaggaggagaccaggatggagaacagcctgcctgccaaggtgcccagcagaggagatgagatggtggctgatgtgcagcagcccctgagccagatccccagcgacacagccagccccctgctgatcctgcccccacctgtgcccaaccccagccccaccctgcggcctgtggagacccctgtggtgggcgcccctggcatgggctctgtgtccacagagccagatgatgaggagggcctgaagcacctggagcagcaggccgagaagatggtggcctacctgcaggacagcgccctggatgatgagcggctggccagcaagctgcaggagcaccgggccaagggcgtgtccatccccctgatgcatgaggccatgcagaagtggtactacaaggacccccagggcgagatccagggccccttcaacaaccaggagatggccgagtggttccaggccggctacttcaccatgagcctgctggtgaagagggcctgtgatgagagcttccagcccctgggggacatcatgaagatgtggggccgggtgcccttcagccctggccctgcccccccaccccacatgggagagctggaccaggagcggctgacccggcagcaggagctgacagccctgtaccagatgcagcacctgcagtaccagcagttcctgatccagcagcagtatgcccaggtgctggcccagcagcagaaggccgccctgagcagccagcagcagcagcagctggccctgctgctgcagcagttccagaccctgaagatgaggatcagtgaccagaacatcatccccagcgtgaccaggtctgtgtctgtgcctgacaccggcagcatctgggagctgcagcccacagccagccagcccaccgtgtgggagggcggctctgtgtgggacctgcccctggacaccaccaccccaggccctgccctggagcagctgcagcagctggagaaggccaaggccgccaagctggagcaggagcggcgggaggccgagatgagggccaagcgggaggaggaggagaggaagaggcaggaggagctgcggcggcagcaggaggagatcctgcggcggcagcaggaggaggagaggtag

SEQ ID NO: 154414 - DNA, 282 bp, synthetic construct
  misc_feature 1..282: note = Description of Artificial Sequence: Synthetic coding sequence
  source 1..282: mol_type = other DNA
atggctgctgagacccagaccctgaactttggacctgagtggctgcgggccctgagcagcggcggcagcatcaccagcccccccctgagccctgccctgcccaagtacaagctggccgactaccgctatggccgggaggagatgctggccctcttcctgaaggacaacaagatccccagcgacctgctggacaaggagttcctgcccatcctgcaggaggagcccctgccccccctggccctggtgcccttcacagaggaggagcagaggaacttctcctag

SEQ ID NO: 154415 - DNA, 303 bp, synthetic construct
  misc_feature 1..303: note = Description of Artificial Sequence: Synthetic coding sequence
  source 1..303: mol_type = other DNA
atggctgctgagacccagaccctgaactttggacctgagtggctgcgggccctgagcagcggcggcagcatcaccagcccccccctgagccctgccctgcccaagtacaagctggccgactaccgctatggccgggaggagatgctggccctcttcctgaaggacaacaagatccccagcgacctgctggacaaggagttcctgcccatcctgcaggaggagcccctgccccccctggccctggtgcccttcacagaggaggagcagaggaacttctccatgtctgtgaacagcgctgcctag

SEQ ID NO: 154416 - DNA, 42 bp, synthetic construct
  misc_feature 1..42: note = Description of Artificial Sequence: Synthetic coding sequence
  source 1..42: mol_type = other DNA
atggctgctgagacccagaccctgaactttggacctgagtag

SEQ ID NO: 154417 - DNA, 348 bp, synthetic construct
  misc_feature 1..348: note = Description of Artificial Sequence: Synthetic coding sequence
  source 1..348: mol_type = other DNA
atggctgctgagacccagaccctgaactttggacctgagtggctgcgggccctgagcagcggcggcagcatcaccagcccccccctgagccctgccctgcccaagtacaagctggccgactaccgctatggccgggaggagatgctggccctcttcctgaaggacaacaagatccccagcgacctgctggacaaggagttcctgcccatcctgcaggaggagcccctgccccccctggccctggtgcccttcacagaggaggagcagaggaacttctccatgtctgtgaacagcgctgctgtgctgcggctgaccggccggggcggcggcggcaccgtggtgggctag

SEQ ID NO: 154418 - DNA, 321 bp, synthetic construct
  misc_feature 1..321: note = Description of Artificial Sequence: Synthetic coding sequence
  source 1..321: mol_type = other DNA
atggctgctgagacccagaccctgaactttggacctgagtggctgcgggccctgagcagcggcggcagcatcaccagcccccccctgagccctgccctgcccaagtacaagctggccgactaccgctatggccgggaggagatgctggccctcttcctgaaggacaacaagatccccagcgacctgctggacaaggagttcctgcccatcctgcaggaggagcccctgccccccctggccctggtgcccttcacagaggaggagcagaggaacttctccatgtctgtgaacagcgctgctgtgctgcggctgactggatag

SEQ ID NO: 154419 - DNA, 342 bp, synthetic construct
  misc_feature 1..342: note = Description of Artificial Sequence: Synthetic coding sequence
  source 1..342: mol_type = other DNA
atggctgctgagacccagaccctgaactttggacctgagtggctgcgggccctgagcagcggcggcagcatcaccagcccccccctgagccctgccctgcccaagtacaagctggccgactaccgctatggccgggaggagatgctggccctcttcctgaaggacaacaagatccccagcgacctgctggacaaggagttcctgcccatcctgcaggaggagcccctgccccccctggccctggtgcccttcacagaggaggagcagaggaacttctccatgtctgtgaacagcgctgctgtgctgcggctgaccggccggggcggcggcggcaccgtgtag

SEQ ID NO: 154420 - DNA, 2619 bp, synthetic construct
  misc_feature 1..2619: note = Description of Artificial Sequence: Synthetic coding sequence
  source 1..2619: mol_type = other DNA
atgaccaagctgcctgatgaccccggccggcccaactttgaggagggcggccccacctctgtgggcaggaagcatgagttcatccgctctgagagcgagaactggaggatcttccgggaggagcagaatggagaagatgaagatggcggctggaggctggccggcagcagaagagatggagagcgctggaggccccacagcccagatggccccaggtctgctggctggagggagcacatggagaggagaagaagatttgaatttgacttccgggacagagatgatgagcggggctaccgccgggtgcgcagcggcagcggcagcattgatgatgaccgggacagcctgcctgagtggtgcctggaggatgctgaggaggagatgggcacctttgacagcagcggggccttcctgagcctgaagaaggtgcagaaggagcccatccctgaggagcaggagatggacttccggcctgtggatgaaggagaggagtgcagcgacagcgagggcagccacaatgaggaggccaaggagccagacaagaccaacaagaaggagggggagaagacagacagagtgggcgtggaggccagcgaggagaccccccagaccagcagcagcagcgcccggcccggcacccccagcgaccaccagagccaggaggccagccagtttgagaggaaggatgagcccaagacagagcagacagagaaggccgaggaggagaccaggatggagaacagcctgcctgccaaggtgcccagcagaggagatgagatggtggctgatgtgcagcagcccctgagccagatccccagcgacacagccagccccctgctgatcctgcccccacctgtgcccaaccccagccccaccctgcggcctgtggagacccctgtggtgggcgcccctggcatgggctctgtgtccacagagccagatgatgaggagggcctgaagcacctggagcagcaggccgagaagatggtggcctacctgcaggacagcgccctggatgatgagcggctggccagcaagctgcaggagcaccgggccaagggcgtgtccatccccctgatgcatgaggccatgcagaagtggtactacaaggacccccagggcgagatccagggccccttcaacaaccaggagatggccgagtggttccaggccggctacttcaccatgagcctgctggtgaagagggcctgtgatgagagcttccagcccctgggggacatcatgaagatgtggggccgggtgcccttcagccctggccctgcccccccaccccacatgggagagctggaccaggagcggctgacccggcagcaggagctgacagccctgtaccagatgcagcacctgcagtaccagcagttcctgatccagcagcagtatgcccaggtgctggcccagcagcagaaggccgccctgagcagccagcagcagcagcagctggccctgctgctgcagcagttccagaccctgaagatgaggatcagtgaccagaacatcatccccagcgtgaccaggtctgtgtctgtgcctgacaccggcagcatctgggagctgcagcccacagccagccagcccaccgtgtgggagggcggctctgtgtgggacctgcccctggacaccaccaccccaggccctgccctggagcagctgcagcagctggagaaggccaaggccgccaagctggagcaggagcggcgggaggccgagatgagggccaagcgggaggaggaggagaggaagaggcaggaggagctgcggcggcagcaggaggagatcctgcggcggcagcaggaggaggagaggaagaggcgggaggaggaggagctggcccggaggaagcaggaggaggccctgcggcggcagcgggagcaggagatcgccctgcggcggcagcgggaggaggaggagcggcagcagcaggaggaggccctgcggcggctggaggagcggcggcgggaggaggaggagaggaggaagcaggaggagctgctgaggaagcaggaggaggaggccgccaagtgggcccgggaggaggaggaggcccagaggcggctggaggagaaccggctgaggatggaggaggaggccgcccggctgcggcatgaggaggaggagaggaagaggaaggagctggaggtgcagaggcagaaggagctgatgaggcagaggcagcagcagcaggaggccctgcggcggctgcagcagcagcagcagcagcagcagctggcccagatgaagctgcccagcagcagcacctggggccagcagagcaacaccacagcctgccagagccaggccaccctgagcctggccgagatccagaagctggaggaggagcgggagcggcagctgcgggaggaggagagcagcgccagcttctgcttctacgccacagccaaggccccagctgagggcgtggatgagagcagcagcgctgctgctgccacagccacagctgagaccctgcggctgggggagtgccagcagaccttccgctaccacgagatcagcagcggggaccctgctggccggggccaggccaatgccaaggctgctgctgctgctgctgccaccccagccaccaagcagagcagctag

SEQ ID NO: 154421 - DNA, 2364 bp, synthetic construct
  misc_feature 1..2364: note = Description of Artificial Sequence: Synthetic coding sequence
  source 1..2364: mol_type = other DNA
atggctgctgagacccagaccctgaactttggacctgagtggctgcgggccctgagcagcggcggcagcatcaccagcccccccctgagccctgccctgcccaagtacaagctggccgactaccgctatggccgggaggagatgctggccctcttcctgaaggacaacaagatccccagcgacctgctggacaaggagttcctgcccatcctgcaggaggagcccctgccccccctggccctggtgcccttcacagaggaggagcagaggaacttctccatgtctgtgaacagcgctgctgtgctgcggctgaccggccggggcggcggcggcaccgtggtgggcgccccccggggccgcagcagcagccggggccggggccggggccgcggggagtgtggcttctaccagaggagctttgatgaggtggagggcgtgtttggccggggcggcggccgggagatgcacaggagccagagctgggaggagcggggggacagaagatttgagaagccaggcaggaaggatgtgggccggcccaactttgaggagggcggccccacctctgtgggcaggaagcatgagttcatccgctctgagagcgagaactggaggatcttccgggaggagcagaatggagaagatgaagatggcggctggaggctggccggcagcagaagagatggagagcgctggaggccccacagcccagatggccccaggtctgctggctggagggagcacatggagaggagaagaagatttgaatttgacttccgggacagagatgatgagcggggctacagaagagtgcgcagcggcagcggcagcattgatgatgaccgggacagcctgcctgagtggtgcctggaggatgctgaggaggagatgggcacctttgacagcagcggggccttcctgagcctgaagaaggtgcagaaggagcccatccctgaggagcaggagatggacttccggcctgtggatgaaggagaagaatgtagtgacagcgagggcagccacaatgaggaggccaaggagccagacaagaccaacaagaaggagggggagaagacagacagagtgggcgtggaggccagcgaggagaccccccagaccagcagcagcagcgcccggcccggcacccccagcgaccaccagagccaggaggccagccagtttgagaggaaggatgagcccaagacagagcagacagagaaggccgaggaggagaccaggatggagaacagcctgcctgccaaggtgcccagcagaggagatgagatggtggctgatgtgcagcagcccctgagccagatccccagcgacacagccagccccctgctgatcctgcccccacctgtgcccaaccccagccccaccctgcggcctgtggagacccctgtggtgggcgcccctggcatgggctctgtgtccacagagccagatgatgaggagggcctgaagcacctggagcagcaggccgagaagatggtggcctacctgcaggacagcgccctggatgatgagcggctggccagcaagctgcaggagcaccgggccaagggcgtgtccatccccctgatgcatgaggccatgcagaagtggtactacaaggacccccagggcgagatccagggccccttcaacaaccaggagatggccgagtggttccaggccggctacttcaccatgagcctgctggtgaagagggcctgtgatgagagcttccagcccctgggggacatcatgaagatgtggggccgggtgcccttcagccctggccctgcccccccaccccacatgggagagctggaccaggagcggctgacccggcagcaggagctgacagccctgtaccagatgcagcacctgcagtaccagcagttcctgatccagcagcagtatgcccaggtgctggcccagcagcagaaggccgccctgagcagccagcagcagcagcagctggccctgctgctgcagcagttccagaccctgaagatgaggatcagtgaccagaacatcatccccagcgtgaccaggtctgtgtctgtgcctgacaccggcagcatctgggagctgcagcccacagccagccagcccaccgtgtgggagggcggctctgtgtgggacctgcccctggacaccaccaccccaggccctgccctggagcagctgcagcagctggagaaggccaaggccgccaagctggagcaggagcggcgggaggccgagatgagggccaagcgggaggaggaggagaggaagaggcaggaggagctgcggcggcagcaggaggagatcctgcggcggcagcaggaggaggagaggaagagaagagaggtgggcaagagggacagctag

SEQ ID NO: 154422 - DNA, 3882 bp, synthetic construct
  misc_feature 1..3882: note = Description of Artificial Sequence: Synthetic coding sequence
  source 1..3882: mol_type = other DNA
atggctgctgagacccagaccctgaactttggacctgagtggctgcgggccctgagcagcggcggcagcatcaccagcccccccctgagccctgccctgcccaagtacaagctggccgactaccgctatggccgggaggagatgctggccctcttcctgaaggacaacaagatccccagcgacctgctggacaaggagttcctgcccatcctgcaggaggagcccctgccccccctggccctggtgcccttcacagaggaggagcagaggaacttctccatgtctgtgaacagcgctgctgtgctgcggctgaccggccggggcggcggcggcaccgtggtgggcgccccccggggccgcagcagcagccggggccggggccggggccgcggggagtgtggcttctaccagaggagctttgatgaggtggagggcgtgtttggccggggcggcggccgggagatgcacaggagccagagctgggaggagcggggggacagaagatttgagaagccaggcaggaaggatgtgggccggcccaactttgaggagggcggccccacctctgtgggcaggaagcatgagttcatccgctctgagagcgagaactggaggatcttccgggaggagcagaatggagaagatgaagatggcggctggaggctggccggcagcagaagagatggagagcgctggaggccccacagccctggctggagggagcacatggagaggagaagaagatttgaatttgacttccgggacagagatgatgagcggggctacagaagagtgcgcagcggcagcggcagcattgatgatgaccgggacagcctgcctgagtggtgcctggaggatgctgaggaggagatgggcacctttgacagcagcggggccttcctgagcctgaagaaggtgcagaaggagcccatccctgaggagcaggagatggacttccggcctgtggatgaaggagaagaatgtagtgacagcgagggcagccacaatgaggaggccaaggagccagacaagaccaacaagaaggagggggagaagacagacagagtgggcgtggaggccagcgaggagaccccccagaccagcagcagcagcgcccggcccggcacccccagcgaccaccagagccaggaggccagccagtttgagaggaaggatgagcccaagacagagcagacagagaaggccgaggaggagaccaggatggagaacagcctgcctgccaaggtgcccagcagaggagatgagatggtggctgatgtgcagcagcccctgagccagatccccagcgacacagccagccccctgctgatcctgcccccacctgtgcccaaccccagccccaccctgcggcctgtggagacccctgtggtgggcgcccctggcatgggctctgtgtccacagagccagatgatgaggagggcctgaagcacctggagcagcaggccgagaagatggtggcctacctgcaggacagcgccctggatgatgagcggctggccagcaagctgcaggagcaccgggccaagggcgtgtccatccccctgatgcatgaggccatgcagaagtggtactacaaggacccccagggcgagatccagggccccttcaacaaccaggagatggccgagtggttccaggccggctacttcaccatgagcctgctggtgaagagggcctgtgatgagagcttccagcccctgggggacatcatgaagatgtggggccgggtgcccttcagccctggccctgcccccccaccccacatgggagagctggaccaggagcggctgacccggcagcaggagctgacagccctgtaccagatgcagcacctgcagtaccagcagttcctgatccagcagcagtatgcccaggtgctggcccagcagcagaaggccgccctgagcagccagcagcagcagcagctggccctgctgctgcagcagttccagaccctgaagatgaggatcagtgaccagaacatcatccccagcgtgaccaggtctgtgtctgtgcctgacaccggcagcatctgggagctgcagcccacagccagccagcccaccgtgtgggagggcggctctgtgtgggacctgcccctggacaccaccaccccaggccctgccctggagcagctgcagcagctggagaaggccaaggccgccaagctggagcaggagcggcgggaggccgagatgagggccaagcgggaggaggaggagaggaagaggcaggaggagctgcggcggcagcaggaggagatcctgcggcggcagcaggaggaggagaggaagagaagagaggaggaggagctggcccggaggaagcaggaggaggccctgcggcggcagcgggagcaggagatcgccctgcggcggcagcgggaggaggaggagcggcagcagcaggaggaggccctgcggcggctggaggagaggagaagagaggaggaggagaggaggaagcaggaggagctgctgaggaagcaggaggaggaggccgccaagtgggcccgggaggaggaggaggcccagaggcggctggaggagaaccggctgaggatggaggaggaggccgcccggctgcggcatgaggaggaggagaggaagaggaaggagctggaggtgcagaggcagaaggagctgatgaggcagaggcagcagcagcaggaggccctgcggcggctgcagcagcagcagcagcagcagcagctggcccagatgaagctgcccagcagcagcacctggggccagcagagcaacaccacagcctgccagagccaggccaccctgagcctggccgagatccagaagctggaggaggagcgggagcggcagctgcgggaggagcagaggcggcagcagcgggagctgatgaaggccctgcagcagcagcagcagcagcagcagcagaagctgagcggctggggcaatgtgtccaagcccagcggcaccaccaagagcctgctggagatccagcaggaggaggcccggcagatgcagaagcagcagcagcagcagcagcagcaccagcagcccaacagagccaggaacaacacccacagcaacctgcacaccagcatcggcaacagcgtgtggggcagcatcaacacaggcccccccaaccagtgggccagtgacctggtgagcagcatctggagcaatgctgacaccaagaacagcaacatgggcttctgggatgatgctgtgaaggaggtgggccccaggaacagcaccaacaagaacaagaacaatgccagcctgagcaagtctgtgggcgtgagcaaccggcagaacaagaaggtggaggaggaggagaagctgctgaagctgttccagggcgtgaacaaggcccaggacggcttcacccagtggtgtgagcagatgctgcacgccctgaacacagccaacaacctggatgtgcccacctttgtgtccttcctgaaggaggtggagagcccctatgaggtgcatgactacatccgggcctacctgggggacaccagcgaggccaaggagtttgccaagcagttcctggagcggcgggccaagcagaaggccaaccagcagaggcagcagcagcagctgccccagcagcagcagcagcagcccccccagcagcccccccagcagccccagcagcaggacagcgtgtggggcatgaaccacagcaccctgcacagcgtcttccagaccaaccagagcaacaaccagcagagcaactttgaagctgtgcagagcggcaagaagaagaagaagcagaagatggtgcgggctgaccccagcctgctgggcttctctgtgaatgccagcagcgagcggctgaacatgggagaaattgagaccctggatgactactag

SEQ ID NO: 154423 - DNA, 3963 bp, synthetic construct
  misc_feature 1..3963: note = Description of Artificial Sequence: Synthetic coding sequence
  source 1..3963: mol_type = other DNA
atggctgctgagacccagaccctgaactttggacctgagtggctgcgggccctgagcagcggcggcagcatcaccagcccccccctgagccctgccctgcccaagtacaagctggccgactaccgctatggccgggaggagatgctggccctcttcctgaaggacaacaagatccccagcgacctgctggacaaggagttcctgcccatcctgcaggaggagcccctgccccccctggccctggtgcccttcacagaggaggagcagaggaacttctccatgtctgtgaacagcgctgctgtgctgcggctgaccggccggggcggcggcggcaccgtggtgggcgccccccggggccgcagcagcagccggggccggggccggggccgcggggagtgtggcttctaccagaggagctttgatgaggtggagggcgtgtttggccggggcggcggccgggagatgcacaggagccagagctgggaggagcggggggacagaagatttgagaagccaggcaggaaggatgtgggcaagaagaatggctactactgcatgtacagccctgtgctgctgctgggccagcccctgtgccagggccggcccaactttgaggagggcggccccacctctgtgggcaggaagcatgagttcatccgctctgagagcgagaactggaggatcttccgggaggagcagaatggagaagatgaagatggcggctggaggctggccggcagcagaagagatggagagcgctggaggccccacagcccagatggccccaggtctgctggctggagggagcacatggagaggagaagaagatttgaatttgacttccgggacagagatgatgagcggggctacagaagagtgcgcagcggcagcggcagcattgatgatgaccgggacagcctgcctgagtggtgcctggaggatgctgaggaggagatgggcacctttgacagcagcggggccttcctgagcctgaagaaggtgcagaaggagcccatccctgaggagcaggagatggacttccggcctgtggatgaaggagaagaatgtagtgacagcgagggcagccacaatgaggaggccaaggagccagacaagaccaacaagaaggagggggagaagacagacagagtgggcgtggccagcgaggagaccccccagaccagcagcagcagcgcccggcccggcacccccagcgaccaccagagccaggaggccagccagtttgagaggaaggatgagcccaagacagagcagacagagaaggccgaggaggagaccaggatggagaacagcctgcctgccaaggtgcccagcagaggagatgagatggtggctgatgtgcagcagcccctgagccagatccccagcgacacagccagccccctgctgatcctgcccccacctgtgcccaaccccagccccaccctgcggcctgtggagacccctgtggtgggcgcccctggcatgggctctgtgtccacagagccagatgatgaggagggcctgaagcacctggagcagcaggccgagaagatggtggcctacctgcaggacagcgccctggatgatgagcggctggccagcaagctgcaggagcaccgggccaagggcgtgtccatccccctgatgcatgaggccatgcagaagtggtactacaaggacccccagggcgagatccagggccccttcaacaaccaggagatggccgagtggttccaggccggctacttcaccatgagcctgctggtgaagagggcctgtgatgagagcttccagcccctgggggacatcatgaagatgtggggccgggtgcccttcagccctggccctgcccccccaccccacatgggagagctggaccaggagcggctgacccggcagcaggagctgacagccctgtaccagatgcagcacctgcagtaccagcagttcctgatccagcagcagtatgcccaggtgctggcccagcagcagaaggccgccctgagcagccagcagcagcagcagctggccctgctgctgcagcagttccagaccctgaagatgaggatcagtgaccagaacatcatccccagcgtgaccaggtctgtgtctgtgcctgacaccggcagcatctgggagctgcagcccacagccagccagcccaccgtgtgggagggcggctctgtgtgggacctgcccctggacaccaccaccccaggccctgccctggagcagctgcagcagctggagaaggccaaggccgccaagctggagcaggagcggcgggaggccgagatgagggccaagcgggaggaggaggagaggaagaggcaggaggagctgcggcggcagcaggaggagatcctgcggcggcagcaggaggaggagaggaagaggcgggaggaggaggagctggcccggaggaagcaggaggaggccctgcggcggcagcgggagcaggagatcgccctgcggcggcagcgggaggaggaggagcggcagcagcaggaggaggccctgcggcggctggaggagcggcggcgggaggaggaggagaggaggaagcaggaggagctgctgaggaagcaggaggaggaggccgccaagtgggcccgggaggaggaggaggcccagaggcggctggaggagaaccggctgaggatggaggaggaggccgcccggctgcggcatgaggaggaggagaggaagaggaaggagctggaggtgcagaggcagaaggagctgatgaggcagaggcagcagcagcaggaggccctgcggcggctgcagcagcagcagcagcagcagcagctggcccagatgaagctgcccagcagcagcacctggggccagcagagcaacaccacagcctgccagagccaggccaccctgagcctggccgagatccagaagctggaggaggagcgggagcggcagctgcgggaggagcagaggcggcagcagcgggagctgatgaaggccctgcagcagcagcagcagcagcagcagcagaagctgagcggctggggcaatgtgtccaagcccagcggcaccaccaagagcctgctggagatccagcaggaggaggcccggcagatgcagaagcagcagcagcagcagcagcagcaccagcagcccaacagagccaggaacaacacccacagcaacctgcacaccagcatcggcaacagcgtgtggggcagcatcaacacaggcccccccaaccagtgggccagtgacctggtgagcagcatctggagcaatgctgacaccaagaacagcaacatgggcttctgggatgatgctgtgaaggaggtgggccccaggaacagcaccaacaagaacaagaacaatgccagcctgagcaagtctgtgggcgtgagcaaccggcagaacaagaaggtggaggaggaggagaagctgctgaagctgttccagggcgtgaacaaggcccaggacggcttcacccagtggtgtgagcagatgctgcacgccctgaacacagccaacaacctggatgtgcccacctttgtgtccttcctgaaggaggtggagagcccctatgaggtgcatgactacatccgggcctacctgggggacaccagcgaggccaaggagtttgccaagcagttcctggagcggcgggccaagcagaaggccaaccagcagaggcagcagcagcagctgccccagcagcagcagcagcagcccccccagcagcccccccagcagccccagcagcaggacagcgtgtggggcatgaaccacagcaccctgcacagcgtcttccagaccaaccagagcaacaaccagcagagcaactttgaggccgtgcagagcggcaagaagaagaagaagcagaagatggtgcgggctgaccccagcctgctgggcttctctgtgaatgccagcagcgagcggctgaacatgggagaaattgagaccctggatgactactag

SEQ ID NO: 154424 - DNA, 2085 bp, synthetic construct
  misc_feature 1..2085: note = Description of Artificial Sequence: Synthetic coding sequence
  source 1..2085: mol_type = other DNA
atgtctggaggagaggtggtgtgcagcggctggctgaggaagagccccccagagaagaagctgaagagatatgcctggaagaggcgctggtttgtgctgcggagcggccgcctgactggagaccctgatgtgctggagtactacaagaatgaccacgccaagaagcccatccgcatcatcgacctgaacctgtgccagcaggtggatgctggcctgaccttcaacaagaaggagtttgagaacagctacatctttgacatcaacaccatcgaccgcatcttctacctggtggccgacagcgaggaggagatgaacaagtgggtgcgctgcatctgtgacatctgtggcttcaaccccacagaggaggaccctgtgaagcccccaggcagcagcctgcaggccccagctgacctgcccctggccatcaacacagccccacccagcacccaggccgacagcagcagcgccaccctgcccccaccctaccagctgatcaacgtgcccccccacctggagaccctgggcatccaggaggacccccaggactacctgctgctgatcaactgccagagcaagaagccagagcccaccaggacccatgctgacagcgccaagagcaccagcagcgagacagactgcaatgacaacgtgcccagccacaagaacccagccagcagccagagcaagcacggcatgaatggcttcttccagcagcagatgatctatgacagcccccccagccgggcccccagcgcctctgtggacagcagcctgtacaacctgcccaggagctacagccatgatgtgctgcccaaggtgagccccagcagcacagaagcagatggagagctgtatgtgttcaacaccccatctggcaccagctctgtggagacccagatgagacatgtgtccatctcctatgacatcccccccaccccaggcaacacctaccagatccccaggaccttccctgagggcaccctgggccagaccagcaagctggacaccatcccagacatccccccacccaggcctcccaagccccacccagcccatgacaggagccctgtggagacctgcagcatccccaggacagccagtgacacagacagcagctactgcatccccacagctggcatgagccccagccgcagcaacaccatcagcacagtggacctgaacaagctgaggaaggatgccagcagccaggactgctatgacatcccccgggccttccccagcgacaggagcagcagcctggagggcttccacaaccacttcaaggtgaagaatgtgctgactgtgggctctgtgagcagcgaggagctggatgaaaattatgtgcccatgaaccccaacagccccccccggcagcacagcagcagcttcacagagcccatccaggaggccaactacgtgcccatgaccccaggcacctttgacttcagcagctttggcatgcaggtgcccccaccagcccacatgggcttccgcagcagccccaagaccccaccccggcggcctgtgcctgtggccgactgtgagcccccacctgtggacaggaacctgaagccagacaggaaggtgaagccagcccccctggagatcaagcccctgcctgagtgggaggagctgcaggcccctgtgcgcagccccatcaccaggagctttgcccgggacagcagccgcttccccatgagccccaggccagacagcgtgcacagcaccaccagcagcagtgacagccatgattctgaagaaaattatgtgcccatgaaccccaacctgagcagcgaggaccccaacctgtttggcagcaacagcctggatggcggcagcagccccatgatcaagcccaagggggacaagcaggtggagtacctggacctggacctggacagcggcaagagcaccccacccaggaagcagaagagcagcggcagcggcagctctgtggctgatgagcgggtggactatgtggtggtggaccagcagaagaccctggccctgaagagcacccgggaggcctggacagatggccggcagagcacagagagcgagaccccagccaagtctgtgaagtag

SEQ ID NO: 154425 - DNA, 2175 bp, synthetic construct
  misc_feature 1..2175: note = Description of Artificial Sequence: Synthetic coding sequence
  source 1..2175: mol_type = other DNA
atgtctggaggagaggtggtgtgcagcggctggctgaggaagagccccccagagaagaagctgaagagatatgcctggaagaggcgctggtttgtgctgcggagcggccgcctgactggagaccctgatgtgctggagtactacaagaatgaccacgccaagaagcccatccgcatcatcgacctgaacctgtgccagcaggtggatgctggcctgaccttcaacaagaaggagtttgagaacagctacatctttgacatcaacaccatcgaccgcatcttctacctggtggccgacagcgaggaggagatgaacaagtgggtgcgctgcatctgtgacatctgtggcttcaaccccacagaggaggaccctgtgaagcccccaggcagcagcctgcaggccccagctgacctgcccctggccatcaacacagccccacccagcacccaggccgacagcagcagcgccaccctgcccccaccctaccagctgatcaacgtgcccccccacctggagaccctgggcatccaggaggacccccaggactacctgctgctgatcaactgccagagcaagaagccagagcccaccaggacccatgctgacagcgccaagagcaccagcagcgagacagactgcaatgacaacgtgcccagccacaagaacccagccagcagccagagcaagcacggcatgaatggcttcttccagcagcagatgatctatgacagcccccccagccgggcccccagcgcctctgtggacagcagcctgtacaacctgcccaggagctacagccatgatgtgctgcccaaggtgagccccagcagcacagaagcagatggagagctgtatgtgttcaacaccccatctggcaccagctctgtggagacccagatgagacatgtgtccatctcctatgacatcccccccaccccaggcaacacctaccagatccccaggaccttccctgagggcaccctgggccagaccagcaagctggacaccatcccagacatccccccacccaggcctcccaagccccacccagcccatgacaggagccctgtggagacctgcagcatccccaggacagccagtgacacagacagcagctactgcatccccacagctggcatgagccccagccgcagcaacaccatcagcacagtggacctgaacaagctgaggaaggatgccagcagccaggactgctatgacatcccccgggccttccccagcgacaggagcagcagcctggagggcttccacaaccacttcaaggtgaagaatgtgctgactgtgggctctgtgagcagcgaggagctggatgaaaattatgtgcccatgaaccccaacagccccccccggcagcacagcagcagcttcacagagcccatccaggaggccaactacgtgcccatgaccccaggcacctttgacttcagcagctttggcatgcaggtgcccccaccagcccacatgggcttccgcagcagccccaagaccccaccccggcggcctgtgcctgtggccgactgtgagcccccacctgtggacaggaacctgaagccagacaggaagggccagagccccaagatcctgcggctgaagccccacggcctggagaggacagacagccagaccatcggggactttgccaccaggaggaaggtgaagccagcccccctggagatcaagcccctgcctgagtgggaggagctgcaggcccctgtgcgcagccccatcaccaggagctttgcccgggacagcagccgcttccccatgagccccaggccagacagcgtgcacagcaccaccagcagcagtgacagccatgattctgaagaaaattatgtgcccatgaaccccaacctgagcagcgaggaccccaacctgtttggcagcaacagcctggatggcggcagcagccccatgatcaagcccaagggggacaagcaggtggagtacctggacctggacctggacagcggcaagagcaccccacccaggaagcagaagagcagcggcagcggcagctctgtggctgatgagcgggtggactatgtggtggtggaccagcagaagaccctggccctgaagagcacccgggaggcctggacagatggccggcagagcacagagagcgagaccccagccaagtctgtgaagtag

SEQ ID NO: 154426 - DNA, 1776 bp, synthetic construct
  misc_feature 1..1776: note = Description of Artificial Sequence: Synthetic coding sequence
  source 1..1776: mol_type = other DNA
atgaacaagtgggtgcgctgcatctgtgacatctgtggcttcaaccccacagaagaagatcctgtgaagcccccaggcagcagcctgcaggccccagctgacctgcccctggccatcaacacagccccacccagcacccaggccgacagcagcagcgccaccctgcccccaccctaccagctgatcaacgtgcccccccacctggagaccctgggcatccaggaggacccccaggactacctgctgctgatcaactgccagagcaagaagccagagcccaccaggacccacgccgacagcgccaagagcaccagcagcgagacagactgcaatgacaacgtgcccagccacaagaacccagccagcagccagagcaagcacggcatgaatggcttcttccagcagcagatgatctatgacagcccccccagccgggcccccagcgcctctgtggacagcagcctgtacaacctgcccaggagctacagccatgatgtgctgcccaaggtgagccccagcagcacagaagcagatggagagctgtatgtgttcaacacccccagcggcaccagctctgtggagacccagatgagacatgtgtccatctcctatgacatcccccccaccccaggcaacacctaccagatccccaggaccttccctgagggcaccctgggccagaccagcaagctggacaccatcccagacatccccccaccccggccccccaagccccacccagcccatgacaggagccctgtggagacctgcagcatccccaggacagccagtgacacagacagcagctactgcatccccacagctggcatgagccccagccgcagcaacaccatcagcacagtggacctgaacaagctgaggaaggatgccagcagccaggactgctatgacatcccccgggccttccccagcgacaggagcagcagcctggagggcttccacaaccacttcaaggtgaagaatgtgctgactgtgggctctgtgtcctctgaggagctggatgagaactacgtgcccatgaaccccaacagccccccccggcagcacagcagcagcttcacagagcccatccaggaggccaactacgtgcccatgaccccaggcacctttgacttcagcagctttggcatgcaggtgcccccaccagcccacatgggcttccgcagcagccccaagaccccaccaagaagacctgtgcctgtggccgactgtgagcccccacctgtggacaggaacctgaagccagacaggaaggtgaagccagcccccctggagatcaagcccctgcctgagtgggaggagctgcaggcccctgtgcgcagccccatcaccaggagctttgcccgggacagcagccgcttccccatgagccccaggccagattctgtgcacagcaccaccagcagcagtgacagccatgacagcgaggagaactacgtgcccatgaaccccaacctgagcagcgaggaccccaacctgtttggcagcaacagcctggatggcggcagcagccccatgatcaagcccaagggggacaagcaggtggagtacctggacctggacctggacagcggcaagagcaccccacccaggaagcagaagagcagcggcagcggcagctctgtggctgatgagcgggtggactatgtggtggtggaccagcagaagaccctggccctgaagagcacccgggaggcctggacagatggccggcagagcacagaaagtgagaccccagccaagtctgtgaagtag

SEQ ID NO: 154427 - DNA, 1917 bp, synthetic construct
  misc_feature 1..1917: note = Description of Artificial Sequence: Synthetic coding sequence
  source 1..1917: mol_type = other DNA
atgtctggggaccctgatgtgctggagtactacaagaatgaccacagcaagaagcccctgcgcatcatcaacctgaacttctgtgagcaggtggatgctggcctgaccttcaacaagaaggagctgcaggacagctttgtgtttgacatcaagaccagcgagaggaccttctacctggtggccgagacagaggaggacatgaacaagtgggtgcagagcatctgccagatctgtggcttcaaccaggccgaggagagcacagacagcctgagaaatgtgtcctctgctggccacggccccaggagcagccctgctgagctgagcagcagcagccagcacctgctgcgggagaggaagagcagcgcccccagccacagcagccagcccaccctcttcacctttgagccccctgtgagcaaccacatgcagcccaccctgagcaccagcgccccccaggagtacctgtacctgcaccagtgcatcagcagaagagcagaaaatgcccggagcgccagcttcagccagggcacccgggccagcttcctgatgagaagtgacacagctgtgcagaagctggcccagggcaatggccactgtgtgaatggcatcagcggccaggtgcacggcttctacagcctgcccaagcccagccgccacaacacagagttccgggacagcacctatgacctgcccaggagcctggccagccacggccacaccaagggcagcctgactggaagtgaaacagacaatgaagatgtgtacaccttcaagacccccagcaacaccctgtgccgggagtttggagacctgctggtggacaacatggatgtgcctgccacccccctgagcgcctaccagatccccaggaccttcaccctggacaagaaccacaatgccatgacagtggccacccctggggacagcgccatcgcccccccacccaggcctcccaagcccagccaggccgagaccccccgctggggcagcccccagcagaggcctcccatcagcgagaacagccgctctgtggccgccaccatccccaggaggaacaccctgcctgccatggacaacagccggctgcaccgggccagcagctgtgagacctatgagtacccccagagaggaggagagagcgctggccgctctgctgagagcatgtctgatggagtgggcagcttcctgcccgggaagatgattgtgggccgcagtgacagcaccaacagcgaggacaactacgtgcccatgaaccctggcagcagcaccctgctggccatggagcgggccggggacaacagccagagcgtgtacatccccatgagccctggggcccaccactttgacagcctgggctaccccagcaccaccctgcctgtgcaccggggccccagccggggcagcgagatccagcccccacctgtgaacagaaacctgaagccagacaggaaggccaagcccacccccctggacctgaggaacaacacagtgattgatgagctgcccttcaagagccccatcaccaagtcctggagccgggccaaccacaccttcaacagcagcagcagccagtactgccggcccatcagcacccagagcatcaccagcacagattctggggacagcgaggagaactacgtgcccatgcagaaccctgtgtctgccagccctgtgcccagcggcaccaacagccctgcccccaagaagagcactggatctgtggactacctggccctggacttccagcccagcagccccagcccccacaggaagcccagcaccagctctgtgaccagtgatgagaaggtggactatgtgcaggtggacaaggagaagacccaggccctgcagaacaccatgcaggagtggacagatgtgcggcagagcagcgagcccagcaagggggccaagctgtag

SEQ ID NO: 154428 - DNA, 2031 bp, synthetic construct
  misc_feature 1..2031: note = Description of Artificial Sequence: Synthetic coding sequence
  source 1..2031: mol_type = other DNA
atgtctggaggaggagatgtggtgtgcaccggctggctgaggaagagccccccagagaagaagctgcggcgctatgcctggaagaagcgctggttcatcctgcggagcggccgcatgtctggggaccctgatgtgctggagtactacaagaatgaccacagcaagaagcccctgcgcatcatcaacctgaacttctgtgagcaggtggatgctggcctgaccttcaacaagaaggagctgcaggacagctttgtgtttgacatcaagaccagcgagaggaccttctacctggtggccgagacagaggaggacatgaacaagtgggtgcagagcatctgccagatctgtggcttcaaccaggccgaggagagcacagacagcctgagaaatgtgtcctctgctggccacggccccaggagcagccctgctgagctgagcagcagcagccagcacctgctgcgggagaggaagagcagcgcccccagccacagcagccagcccaccctcttcacctttgagccccctgtgagcaaccacatgcagcccaccctgagcaccagcgccccccaggagtacctgtacctgcaccagtgcatcagcagaagagcagaaaatgcccggagcgccagcttcagccagggcacccgggccagcttcctgatgagaagtgacacagctgtgcagaagctggcccagggcaatggccactgtgtgaatggcatcagcggccaggtgcacggcttctacagcctgcccaagcccagccgccacaacacagagttccgggacagcacctatgacctgcccaggagcctggccagccacggccacaccaagggcagcctgactggaagtgaaacagacaatgaagatgtgtacaccttcaagacccccagcaacaccctgtgccgggagtttggagacctgctggtggacaacatggatgtgcctgccacccccctgagcgcctaccagatccccaggaccttcaccctggacaagaaccacaatgccatgacagtggccacccctggggacagcgccatcgcccccccacccaggcctcccaagcccagccaggccgagaccccccgctggggcagcccccagcagaggcctcccatcagcgagaacagccgctctgtggccgccaccatccccaggaggaacaccctgcctgccatggacaacagccggctgcaccgggccagcagctgtgagacctatgagtacccccagagaggaggagagagcgctggccgctctgctgagagcatgtctgatggagtgggcagcttcctgcccgggaagatgattgtgggccgcagtgacagcaccaacagcgaggacaactacgtgcccatgaaccctggcagcagcaccctgctggccatggagcgggccggggacaacagccagagcgtgtacatccccatgagccctggggcccaccactttgacagcctgggctaccccagcaccaccctgcctgtgcaccggggccccagccggggcagcgagatccagcccccacctgtgaacagaaacctgaagccagacaggaaggccaagcccacccccctggacctgaggaacaacacagtgattgatgagctgcccttcaagagccccatcaccaagtcctggagccgggccaaccacaccttcaacagcagcagcagccagtactgccggcccatcagcacccagagcatcaccagcacagattctggggacagcgaggagaactacgtgcccatgcagaaccctgtgtctgccagccctgtgcccagcggcaccaacagccctgcccccaagaagagcactggatctgtggactacctggccctggacttccagcccagcagccccagcccccacaggaagcccagcaccagctctgtgaccagtgatgagaaggtggactatgtgcaggtggacaaggagaagacccaggccctgcagaacaccatgcaggagtggacagatgtgcggcagagcagcgagcccagcaagggggccaagctgtag

SEQ ID NO: 154429 - DNA, 396 bp, synthetic construct
  misc_feature 1..396: note = Description of Artificial Sequence: Synthetic coding sequence
  source 1..396: mol_type = other DNA
atgtctggggaccctgatgtgctggagtactacaagaatgaccacagcaagaagcccctgcgcatcatcaacctgaacttctgtgagcaggtggatgctggcctgaccttcaacaagaaggagctgcaggacagctttgtgtttgacatcaagaccagcgagaggaccttctacctggtggccgagacagaggaggacatgaacaagtgggtgcagagcatctgccagatctgtggcttcaaccaggccgaggagagcacagacagcctgagaaatgtgtcctctgctggccacggccccaggagcagccctgctgagctgagcagcagcagccagcacctgctgcgggagaggaagagcagcgcccccagccacagcagccagcccaccctgtag

SEQ ID NO: 154430 - DNA, 309 bp, synthetic construct
  misc_feature 1..309: note = Description of Artificial Sequence: Synthetic coding sequence
  source 1..309: mol_type = other DNA
atgtctggggaccctgatgtgctggagtactacaagaatgaccacagcaagaagcccctgcgcatcatcaacctgaacttctgtgagcaggtggatgctggcctgaccttcaacaagaaggagctgcaggacagctttgtgtttgacatcaagaccagcgagaggaccttctacctggtggccgagacagaggaggacatgaacaagtgggtgcagagcatctgccagatctgtggcttcaaccaggccgaggagagcacagacagcctgagaaatgtgtcctctgctggccacggccccaggagctag

SEQ ID NO: 154431 - DNA, 993 bp, synthetic construct
  misc_feature 1..993: note = Description of Artificial Sequence: Synthetic coding sequence
  source 1..993: mol_type = other DNA
atggaggccgtggccaagtttgacttcaccgccagcggggaggatgagctgtccttccacactggagatgtgctgaagatcctgagcaaccaggaggagtggttcaaggccgagctgggcagccaggagggctacgtgcccaagaacttcatcgacatccagttccccaagtggttccacgagggcctgagccgccaccaggccgagaacctgctgatgggcaaggaggtgggcttcttcatcatccgggccagccagagcagccctggggacttcagcatctctgtgagacatgaagatgatgtgcagcacttcaaggtgatgagggacaacaagggcaactacttcctgtggacagagaagttccccagcctgaacaagctggtggactactaccgcaccaacagcatcagccggcagaagcagatcttcctgcgggacaggacccgggaggaccagggccaccggggcaacagcctggaccggcgcagccagggcggcccccacctgtctggagctgtgggggaggagatccggcccagcatgaacaggaagctgagtgaccacccccccaccctgcccctgcagcagcaccagcaccagccccagcccccccagtatgccccagccccccagcagctgcagcagcccccccagcagcgctacctgcagcaccaccacttccaccaggagcggcggggcggcagcctggacatcaatgatggccactgcggcaccggcctgggcagcgagatgaatgctgccctgatgcacagaagacacacagatcctgtgcagctgcaggccgccggccgggtgcgctgggcccgggccctgtatgactttgaggccctggaggatgatgagctgggcttccacagcggggaggtggtggaggtgctggacagcagcaaccccagctggtggacaggccgcctgcacaacaagctgggcctcttccctgccaactacgtggcccccatgaccaggtag

SEQ ID NO: 154432 - DNA, 654 bp, synthetic construct
  misc_feature 1..654: note = Description of Artificial Sequence: Synthetic coding sequence
  source 1..654: mol_type = other DNA
atggtgtcccggcggcccctgagcaccccaggccgggagctgacccacggccagggcggctggctgctgcaccaccctggccagcctgagctgccccggggcctgctgcacctgtgccagggccaccggggcaacagcctggacagaagaagccagggcggcccccacctgagcggggctgtgggggaggagatccggcccagcatgaacaggaagctgagtgaccacccccccaccctgcccctgcagcagcaccagcaccagccccagcccccccagtatgccccagccccccagcagctgcagcagcccccccagcagcgctacctgcagcaccaccacttccaccaggagaggagaggaggcagcctggacatcaatgatggccactgcggcaccggcctgggcagcgagatgaatgctgccctgatgcaccggcggcacacagatcctgtgcagctgcaggccgccggccgggtgcgctgggcccgggccctgtatgactttgaggccctggaggatgatgagctgggcttccacagcggggaggtggtggaggtgctggacagcagcaaccccagctggtggacaggccgcctgcacaacaagctgggcctcttccctgccaactacgtggcccccatgaccaggtag

SEQ ID NO: 154433 - DNA, 993 bp, synthetic construct; identical to SEQ ID NO: 154431
  misc_feature 1..993: note = Description of Artificial Sequence: Synthetic coding sequence
  source 1..993: mol_type = other DNA

SEQ ID NO: 154434 - DNA, 294 bp, synthetic construct
  misc_feature 1..294: note = Description of Artificial Sequence: Synthetic coding sequence
  source 1..294: mol_type = other DNA
atggaggccgtggccaagtttgacttcaccgccagcggggaggatgagctgtccttccacactggagatgtgctgaagatcctgagcaaccaggaggagtggttcaaggccgagctgggcagccaggagggctacgtgcccaagaacttcatcgacatccagttccccaagtggttccacgagggcctgagccgccaccaggccgagaacctgctgatgggcaaggaggtgggcttcttcatcatccgggccagccagagcagccctggggacttcagcatctctgtgaggtag

SEQ ID NO: 154435 - DNA, 795 bp, synthetic construct
  misc_feature 1..795: note = Description of Artificial Sequence: Synthetic coding sequence
  source 1..795: mol_type = other DNA
atgctggagtttgtgtccctgctggccaggaaggacagcaacaacagcgtgtccaagcccaggcacaagctgaaccccttcagcagcaagagacatgaagatgatgtgcagcacttcaaggtgatgagggacaacaagggcaactacttcctgtggacagagaagttccccagcctgaacaagctggtggactactaccgcaccaacagcatcagccggcagaagcagatcttcctgcgggacaggacccgggaggaccagggccaccggggcaacagcctggaccggcgcagccagggcggcccccacctgtctggagctgtgggggaggagatccggcccagcatgaacaggaagctgagtgaccacccccccaccctgcccctgcagcagcaccagcaccagccccagcccccccagtatgccccagccccccagcagctgcagcagcccccccagcagcgctacctgcagcaccaccacttccaccaggagcggcggggcggcagcctggacatcaatgatggccactgcggcaccggcctgggcagcgagatgaatgctgccctgatgcacagaagacacacagatcctgtgcagctgcaggccgccggccgggtgcgctgggcccgggccctgtatgactttgaggccctggaggatgatgagctgggcttccacagcggggaggtggtggaggtgctggacagcagcaaccccagctggtggacaggccgcctgcacaacaagctgggcctcttccctgccaactacgtggcccccatgaccaggtag

SEQ ID NO: 154436 - DNA, 837 bp, synthetic construct
  misc_feature 1..837: note = Description of Artificial Sequence: Synthetic coding sequence
  source 1..837: mol_type = other DNA
atggaggccgtggccaagtttgacttcaccgccagcggggaggatgagctgtccttccacactggagatgtgctgaagatcctgagcaaccaggaggagtggttcaaggccgagctgggcagccaggagggctacgtgcccaagaacttcatcgacatccagttccccaagcatgaagatgatgtgcagcacttcaaggtgatgagggacaacaagggcaactacttcctgtggacagagaagttccccagcctgaacaagctggtggactactaccgcaccaacagcatcagccggcagaagcagatcttcctgcgggacaggacccgggaggaccagggccaccggggcaacagcctggaccggcgcagccagggcggcccccacctgtctggagctgtgggggaggagatccggcccagcatgaacaggaagctgagtgaccacccccccaccctgcccctgcagcagcaccagcaccagccccagcccccccagtatgccccagccccccagcagctgcagcagcccccccagcagcgctacctgcagcaccaccacttccaccaggagcggcggggcggcagcctggacatcaatgatggccactgcggcaccggcctgggcagcgagatgaatgctgccctgatgcacagaagacacacagatcctgtgcagctgcaggccgccggccgggtgcgctgggcccgggccctgtatgactttgaggccctggaggaggtgctggacagcagcaaccccagctggtggacaggccgcctgcacaacaagctgggcctcttccctgccaactacgtggcccccatgaccaggtag

SEQ ID NO: 154437 - DNA, 915 bp, synthetic construct
  misc_feature 1..915: note = Description of Artificial Sequence: Synthetic coding sequence
  source 1..915: mol_type = other DNA
atgctggagtttgtgtccctgctggccaggaaggacagcaacaacagcgtgtccaagcccaggcacaagctgaaccccttcagcagcaagcgctggttccacgagggcctgagccgccaccaggccgagaacctgctgatgggcaaggaggtgggcttcttcatcatccgggccagccagagcagccctggggacttcagcatctctgtgagacatgaagatgatgtgcagcacttcaaggtgatgagggacaacaagggcaactacttcctgtggacagagaagttccccagcctgaacaagctggtggactactaccgcaccaacagcatcagccggcagaagcagatcttcctgcgggacaggacccgggaggaccagggccaccggggcaacagcctggaccggcgcagccagggcggcccccacctgtctggagctgtgggggaggagatccggcccagcatgaacaggaagctgagtgaccacccccccaccctgcccctgcagcagcaccagcaccagccccagcccccccagtatgccccagccccccagcagctgcagcagcccccccagcagcgctacctgcagcaccaccacttccaccaggagcggcggggcggcagcctggacatcaatgatggccactgcggcaccggcctgggcagcgagatgaatgctgccctgatgcacagaagacacacagatcctgtgcagctgcaggccgccggccgggtgcgctgggcccgggccctgtatgactttgaggccctggaggatgatgagctgggcttccacagcggggaggtggtggaggtgctggacagcagcaaccccagctggtggacaggccgcctgcacaacaagctgggcctcttccctgccaactacgtggcccccatgaccaggtag

SEQ ID NO: 154438 - DNA, 777 bp, synthetic construct
  misc_feature 1..777: note = Description of Artificial Sequence: Synthetic coding sequence
  source 1..777: mol_type = other DNA
atgggcaaggaggtgggcttcttcatcatccgggccagccagagcagccctggggacttcagcatctctgtgagacatgaagatgatgtgcagcacttcaaggtgatgagggacaacaagggcaactacttcctgtggacagagaagttccccagcctgaacaagctggtggactactaccgcaccaacagcatcagccggcagaagcagatcttcctgcgggacaggacccgggaggaccagggccaccggggcaacagcctggaccggcgcagccagggcggcccccacctgtctggagctgtgggggaggagatccggcccagcatgaacaggaagctgagtgaccacccccccaccctgcccctgcagcagcaccagcaccagccccagcccccccagtatgccccagccccccagcagctgcagcagcccccccagcagcgctacctgcagcaccaccacttccaccaggagcggcggggcggcagcctggacatcaatgatggccactgcggcaccggcctgggcagcgagatgaatgctgccctgatgcacagaagacacacagatcctgtgcagctgcaggccgccggccgggtgcgctgggcccgggccctgtatgactttgaggccctggaggatgatgagctgggcttccacagcggggaggtggtggaggtgctggacagcagcaaccccagctggtggacaggccgcctgcacaacaagctgggcctcttccctgccaactacgtggcccccatgaccaggtag

SEQ ID NO: 154439 - DNA, 507 bp, synthetic construct
  misc_feature 1..507: note = Description of Artificial Sequence: Synthetic coding sequence
  source 1..507: mol_type = other DNA
atgttctggaagctgagcctgagcctcttcctggtggccgtgctggtgaaggtggccgaggccaggaagaacagacctgctggggccatccccagcccctacaaggatggcagcagcaacaacagcgagcgctggcagcaccagatcaaggaggtgctggccagcagccaggaggccctggtggtgacagagaggaagtacctgaagagtgactggtgcaagacccagcccctgcggcagacagtgtctgaggagggctgccgcagcaggaccatcctgaaccgcttctgctacggccagtgcaacagcttctacatccccaggcatgtgaagaaggaggaggagagcttccagagctgtgccttctgcaagccccagagggtgacctctgtgctggtggagctggagtgccccggcctggacccccccttccggctgaagaagatccagaaggtgaagcagtgccgctgcatgtctgtgaacctgagtgacagcgacaagcagtag

SEQ ID NO: 154440 - DNA, 1443 bp, synthetic construct
  misc_feature 1..1443: note = Description of Artificial Sequence: Synthetic coding sequence
  source 1..1443: mol_type = other DNA
atggccggcacccgctgggtgctgggcgccctgctgcggggctgcggctgcaactgcagcagctgcagaagaactggagctgcctgcctgcccttctacagcgctgctggcagcatccccagcggcgtgtctggaagaagaaggctgctgctgctgctgggcgctgctgctgctgctgccagccagacccggggcctgcagacaggccctgtgcccccaggccgcctggccggccccccagctgtggccaccagcgctgctgctgctgctgctgccagctacagcgccctgcgggccagcctgctgccccagagcctggccgctgctgctgctgtgcccaccaggagctacagccaggagagcaagaccacctacctggaggacctgcccccacctccagaatatgagctggcccccagcaagctggaggaggaggtggatgatgtgttcctgatccgggcccagggcctgccctggagctgcaccatggaggatgtgctgaacttcttcagtgactgccgcatcagaaatggagaaaatggcatccacttcctgctgaacagagatggcaagagaagaggagatgccctgattgagatggagagcgagcaggatgtgcagaaggccctggagaagcacaggatgtacatgggccagagatatgtggaggtgtatgagatcaacaatgaagatgtggatgccctgatgaagagcctgcaggtgaagagcagccctgtggtgaatgatggagtggtgcggctgcggggcctgccctacagctgcaatgagaaggacatcgtggacttctttgctggcctgaacatcgtggacatcacctttgtgatggactaccggggccgcaggaagacaggagaggcctacgtgcagtttgaggagcctgagatggccaaccaggccctgctgaagcaccgggaggagatcggcaaccgctacatcgagatcttccccagcagaagaaatgaggtgaggacccacgtgggcagctacaagggcaagaagatcgccagcttccccacagccaagtacatcacagagcctgagatggtgtttgaggagcacgaggtgaatgaagacatccagcccatgacagcctttgagagcgagaaggagattgagctgcccaaggaggtgcctgagaagctgcctgaggccgctgactttggcaccaccagcagcctgcactttgtgcacatgaggggcctgcccttccaggccaatgcccaggacatcatcaacttctttgcccccctgaagcctgtgcgcatcaccatggagtacagcagcagcggcaaggccaccggggaggctgatgtgcactttgagacccatgaagatgctgtggccgccatgctgaaggacaggagccacgtgcaccaccgctacatcgagctgttcctgaacagctgccccaagggcaagtag

SEQ ID NO: 154441 - DNA, 957 bp, synthetic construct
  misc_feature 1..957: note = Description of Artificial Sequence: Synthetic coding sequence
  source 1..957: mol_type = other DNA
atggaggatgtgctgaacttcttcagtgactgccgcatcagaaatggagaaaatggcatccacttcctgctgaacagagatggcaagagaagaggagatgccctgattgagatggagagcgagcaggatgtgcagaaggccctggagaagcacaggatgtacatgggccagagatatgtggaggtgtatgagatcaacaatgaagatgtggatgccctgatgaagagcctgcaggtgaagagcagccctgtggtgaatgatggagtggtgcggctgcggggcctgccctacagctgcaatgagaaggacatcgtggacttctttgctggcctgaacatcgtggacatcacctttgtgatggactaccggggccgcaggaagacaggagaggcctacgtgcagtttgaggagcctgagatggccaaccaggccctgctgaagcaccgggaggagatcggcaaccgctacatcgagatcttccccagcagaagaaatgaggtgaggacccacgtgggcagctacaagggcaagaagatcgccagcttccccacagccaagtacatcacagagcctgagatggtgtttgaggagcacgaggtgaatgaagacatccagcccatgacagcctttgagagcgagaaggagattgagctgcccaaggaggtgcctgagaagctgcctgaggccgctgactttggcaccaccagcagcctgcactttgtgcacatgaggggcctgcccttccaggccaatgcccaggacatcatcaacttctttgcccccctgaagcctgtgcgcatcaccatggagtacagcagcagcggcaaggccaccggggaggctgatgtgcactttgagacccatgaagatgctgtggccgccatgctgaaggacaggagccacgtgcaccaccgctacatcgagctgttcctgaacagctgccccaagggcaagtag

SEQ ID NO: 154442 - DNA, 1362 bp, synthetic construct
  misc_feature 1..1362: note = Description of Artificial Sequence: Synthetic coding sequence
  source 1..1362: mol_type = other DNA
gctgctgctgtgcccaccaggagctacagccaggtgcggggcagaagagagggccctggggcccggagcctgcccggccgggtgcacgccccaccccggcccagcgtgcccccctgtgccccccggggccacgcccggggcagcgccaccctggccgcccaccccccacccagcaccctgtgcagctactgggccctggagcagggcaagctgagccaggccagcggcctgctgctggtgctcttcagcccccgggtgtctggccgcctgggcagcgagagcaagaccacctacctggaggacctgcccccacctccagaatatgagctggcccccagcaagctggaggaggaggtggatgatgtgttcctgatccgggcccagggcctgccctggagctgcaccatggaggatgtgctgaacttcttcagtgactgccgcatcagaaatggagaaaatggcatccacttcctgctgaacagagatggcaagagaagaggagatgccctgattgagatggagagcgagcaggatgtgcagaaggccctggagaagcacaggatgtacatgggccagcgctacgtggaggtgtatgagatcaacaatgaagatgtggatgccctgatgaagagcctgcaggtgaagagcagccctgtggtgaatgatggagtggtgcggctgcggggcctgccctacagctgcaatgagaaggacatcgtggacttctttgctggcctgaacatcgtggacatcacctttgtgatggactaccggggccgcaggaagacaggagaggcctacgtgcagtttgaggagcctgagatggccaaccaggccctgctgaagcaccgggaggagatcggcaaccgctacatcgagatcttccccagcagaagaaatgaggtgaggacccacgtgggcagctacaagggcaagaagatcgccagcttccccacagccaagtacatcacagagcctgagatggtgtttgaggagcacgaggtgaatgaagacatccagcccatgacagcctttgaaagtgagaaggagattgagctgcccaaggaggtgcctgagaagctgcctgaggccgctgactttggcaccaccagcagcctgcactttgtgcacatgaggggcctgcccttccaggccaatgcccaggacatcatcaacttctttgcccccctgaagcctgtgcgcatcaccatggagtacagcagcagcggcaaggccactggagaggctgatgtgcactttgagacccatgaagatgctgtggccgccatgctgaaggacaggagccacgtgcaccaccgctacatcgagctgttcctgaacagctgccccaagggcaagtag

SEQ ID NO: 154443 - DNA, 957 bp, synthetic construct; identical to SEQ ID NO: 154441
  misc_feature 1..957: note = Description of Artificial Sequence: Synthetic coding sequence
  source 1..957: mol_type = other DNA

SEQ ID NO: 154444 - DNA, 1254 bp, synthetic construct
  misc_feature 1..1254: note = Description of Artificial Sequence: Synthetic coding sequence
  source 1..1254: mol_type = other DNA
tgaccaccacccagcaccctgtgcagctactgggccctggagcagggcaagctgagccaggccagcggcctgctgctggtgctcttcagcccccgggtgtctggccgcctgggctctgtgtctgtggccggcgtgaatgtggaggccctcttccctgcctggcccatggagagcaagaccacctacctggaggacctgcccccacctccagaatatgagctggcccccagcaagctggaggaggaggtggatgatgtgttcctgatccgggcccagggcctgccctggagctgcaccatggaggatgtgctgaacttcttcagtgactgccgcatcagaaatggagaaaatggcatccacttcctgctgaacagagatggcaagagaagaggagatgccctgattgagatggagagcgagcaggatgtgcagaaggccctggagaagcacaggatgtacatgggccagcgctacgtggaggtgtatgagatcaacaatgaagatgtggatgccctgatgaagagcctgcaggtgaagagcagccctgtggtgaatgatggagtggtgcggctgcggggcctgccctacagctgcaatgagaaggacatcgtggacttctttgctggcctgaacatcgtggacatcacctttgtgatggactaccggggccgcaggaagacaggagaggcctacgtgcagtttgaggagcctgagatggccaaccaggccctgctgaagcaccgggaggagatcggcaaccgctacatcgagatcttccccagcagaagaaatgaggtgaggacccacgtgggcagctacaagggcaagaagatcgccagcttccccacagccaagtacatcacagagcctgagatggtgtttgaggagcacgaggtgaatgaagacatccagcccatgacagcctttgaaagtgagaaggagattgagctgcccaaggaggtgcctgagaagctgcctgaggccgctgactttggcaccaccagcagcctgcactttgtgcacatgaggggcctgcccttccaggccaatgcccaggacatcatcaacttctttgcccccctgaagcctgtgcgcatcaccatggagtacagcagcagcggcaaggccactggagaggctgatgtgcactttgagacccatgaagatgctgtggccgccatgctgaaggacaggagccacgtgcaccaccgctacatcgagctgttcctgaacagctgccccaagggcaagtag

SEQ ID NO: 154445 - DNA, 1239 bp, synthetic construct
  misc_feature 1..1239: note = Description of Artificial Sequence: Synthetic coding sequence
  source 1..1239: mol_type = other DNA
atggccggcacccgctgggtgctgggcgccctgctgcggggctgcggctgcaactgcagcagctgcagaagaactggagctgcctgcctgcccttctacagcgctgctggcagcatcccagctgctgctgtgcccaccaggagctacagccaggagagcaagaccacctacctggaggacctgcccccacctccagaatatgagctggcccccagcaagctggaggaggaggtggatgatgtgttcctgatccgggcccagggcctgccctggagctgcaccatggaggatgtgctgaacttcttcagtgactgccgcatcagaaatggagaaaatggcatccacttcctgctgaacagagatggcaagagaagaggagatgccctgattgagatggagagcgagcaggatgtgcagaaggccctggagaagcacaggatgtacatgggccagagatatgtggaggtgtatgagatcaacaatgaagatgtggatgccctgatgaagagcctgcaggtgaagagcagccctgtggtgaatgatggagtggtgcggctgcggggcctgccctacagctgcaatgagaaggacatcgtggacttctttgctggcctgaacatcgtggacatcacctttgtgatggactaccggggccgcaggaagacaggagaggcctacgtgcagtttgaggagcctgagatggccaaccaggccctgctgaagcaccgggaggagatcggcaaccgctacatcgagatcttccccagcagaagaaatgaggtgaggacccacgtgggcagctacaagggcaagaagatcgccagcttccccacagccaagtacatcacagagcctgagatggtgtttgaggagcacgaggtgaatgaagacatccagcccatgacagcctttgagagcgagaaggagattgagctgcccaaggaggtgcctgagaagctgcctgaggccgctgactttggcaccaccagcagcctgcactttgtgcacatgaggggcctgcccttccaggccaatgcccaggacatcatcaacttctttgcccccctgaagcctgtgcgcatcaccatggagtacagcagcagcggcaaggccaccggggaggctgatgtgcactttgagacccatgaagatgctgtggccgccatgctgaaggacaggagccacgtgcaccaccgctacatcgagctgttcctgaacagctgccccaagggcaagtag

SEQ ID NO: 154446 - DNA, 1089 bp, synthetic construct
  misc_feature 1..1089: note = Description of Artificial Sequence: Synthetic coding sequence
  source 1..1089: mol_type = other DNA
atggagagcaagaccacctacctggaggacctgcccccacctccagaatatgagctggcccccagcaagctggaggaggaggtggatgatgtgttcctgatccgggcccagggcctgccctggagctgcaccatggaggatgtgctgaacttcttcagtgactgccgcatcagaaatggagaaaatggcatccacttcctgctgaacagagatggcaagagaagaggagatgccctgattgagatggagagcgagcaggatgtgcagaaggccctggagaagcacaggatgtacatgggccagagatatgtggaggtgtatgagatcaacaatgaagatgtggatgccctgatgaagagcctgcaggtgaagagcagccctgtggtgaatgatggagtggtgcggctgcggggcctgccctacagctgcaatgagaaggacatcgtggacttctttgctggcctgaacatcgtggacatcacctttgtgatggactaccggggccgcaggaagacaggagaggcctacgtgcagtttgaggagcctgagatggccaaccaggccctgctgaagcaccgggaggagatcggcaaccgctacatcgagatcttccccagcagaagaaatgaggtgaggacccacgtgggcagctacaagggcaagaagatcgccagcttccccacagccaagtacatcacagagcctgagatggtgtttgaggagcacgaggtgaatgaagacatccagcccatgacagcctttgagagcgagaaggagattgagctgcccaaggaggtgcctgagaagctgcctgaggccgctgactttggcaccaccagcagcctgcactttgtgcacatgaggggcctgcccttccaggccaatgcccaggacatcatcaacttctttgcccccctgaagcctgtgcgcatcaccatggagtacagcagcagcggcaaggccaccggggaggctgatgtgcactttgagacccatgaagatgctgtggccgccatgctgaaggacaggagccacgtgcaccaccgctacatcgagctgttcctgaacagctgccccaagggcaagtag

SEQ ID NO: 154447 - DNA, 1401 bp, synthetic construct
  misc_feature 1..1401: note = Description of Artificial Sequence: Synthetic coding sequence
  source 1..1401: mol_type = other DNA
atgctgcggagcaccagcacagtgaccctgctgagcggcggggccgcccggacccctggggcccccagccggcgggccaacgtgtgccgcctgcggctgactgtgcccccagagagccctgtgcctgagcagtgtgagaagaagattgaaaggaaggagcagctgctggacctgagcaatggagagcccaccaggaagctgccccagggcgtggtgtatggagtggtgagaagaagtgaccagaaccagcagaaggagatggtggtgtatggctggagcaccagccagctgaaggaggagatgaactacatcaaggatgtgcgggccaccctggagaaggtgaggaagaggatgtatggagactatgatgagatgaggcagaagatccggcagctgacccaggagctgtctgtgagccacgcccagcaggagtacctggagaaccacatccagacccagagcagcgccctggaccgcttcaatgccatgaacagcgccctggccagtgacagcatcggcctgcagaagaccctggtggatgtgaccctggagaacagcaacatcaaggaccagatccggaacctgcagcagacctatgaggcctccatggacaagctgcgggagaagcagaggcagctggaggtggcccaggtggagaaccagctgctgaagatgaaggtggagagcagccaggaggccaatgctgaggtgatgagggagatgaccaagaagctgtacagccagtatgaggagaagctgcaggaggagcagaggaagcacagcgctgagaaggaggccctgctggaggagaccaacagcttcctgaaggccatcgaggaggccaacaagaagatgcaggccgctgagatcagcctggaggagaaggaccagagaattggagagctggacaggctcatcgagaggatggagaaggagcggcaccagctgcagctgcagctgctggagcatgaaacagagatgtctggagagctgacagacagcgacaaggagcgctaccagcagctggaggaggccagcgccagcctgcgggagcgcatccgccacctggatgacatggtgcactgccagcagaagaaggtgaagcagatggtggaggagattgagagcctgaagaagaagctgcagcagaagcagctgctgatcctgcagctgctggagaagatctccttcctggagggagaaaataatgagctgcagagccggctggactacctgacagagacccaggccaagacagaggtggagacccgggagattggagtgggctgtgacctgctgcccagccagacaggccgcacccgggagatcgtgatgcccagcaggaactacaccccctacaccagggtgctggagctgaccatgaagaagaccctgacctag

SEQ ID NO: 154448 - DNA, 1194 bp, synthetic construct
  misc_feature 1..1194: note = Description of Artificial Sequence: Synthetic coding sequence
  source 1..1194: mol_type = other DNA
atgctgcggagcaccagcacagtgaccctgctgagcggcggggccgcccggacccctggggcccccagccggcgggccaacgtgtgccgcctgcggctgactgtgcccccagagagccctgtgcctgagcagtgtgagaagaagattgaaaggaaggagcagctgctggacctgagcaatggagagcccaccaggaagctgccccagggcgtggtgtatggagtggtgagaagaagtgaccagaaccagcagaaggagatggtggtgtatggctggagcaccagccagctgaaggaggagatgaactacatcaaggacaagaccctggtggatgtgaccctggagaacagcaacatcaaggaccagatccggaacctgcagcagacctatgaggcctccatggacaagctgcgggagaagcagaggcagctggaggtggcccaggtggagaaccagctgctgaagatgaaggtggagagcagccaggaggccaatgctgaggtgatgagggagatgaccaagaagctgtacagccagtatgaggagaagctgcaggaggagcagaggaagcacagcgctgagaaggaggccctgctggaggagaccaacagcttcctgaaggccatcgaggaggccaacaagaagatgcaggccgctgagatcagcctggaggagaaggaccagagaattggagagctggaccggctgattgaaagaatggagaaggagcggcaccagctgcagctgcagctgctggagcacgagacagagatgtctggagagctgacagacagcgacaaggagcgctaccagcagctggaggaggccagcgccagcctgcgggagcgcatccgccacctggatgacatggtgcactgccagcagaagaaggtgaagcagatggtggaggagattgagagcctgaagaagaagctgcagcagaagcagctgctgatcctgcagctgctggagaagatctccttcctggagggggagaacaatgagctgcagagccggctggactacctgacagagacccaggccaagacagaggtggagacccgggagattggagtgggctgtgacctgctgcccagccagacaggccgcacccgggagatcgtgatgcccagcaggaactacaccccctacaccagggtgctggagctgaccatgaagaagaccctgacctag

SEQ ID NO: 154449 - DNA, 1248 bp, synthetic construct
  misc_feature 1..1248: note = Description of Artificial Sequence: Synthetic coding sequence
  source 1..1248: mol_type = other DNA
atgctgcggagcaccagcacagtgaccctgctgagcggcggggccgcccggacccctggggcccccagccggcgggccaacgtgtgccgcctgcggctgactgtgcccccagagagccctgtgcctgagcagtgtgagaagaagattgaaaggaaggagcagctgctggacctgagcaatggagagcccaccaggaagctgccccagggcgtggtgtatggagtggtgagaagaagtgaccagaaccagcagaaggagatggtggtgtatggctggagcaccagccagctgaaggaggagatgaactacatcaaggatgtgtcccatgcccagcaggagtacctggagaaccacatccagacccagagcagcgccctggaccgcttcaatgccatgaacagcgccctggccagtgacagcatcggcctgcagaagaccctggtggatgtgaccctggagaacagcaacatcaaggaccagatccggaacctgcagcagacctatgaggcctccatggacaagctgcgggagaagcagaggcagctggaggtggcccaggtggagaaccagctgctgaagatgaaggtggagagcagccaggaggccaatgctgaggtgatgagggagatgaccaagaagctgtacagccagtatgaggagaagctgcaggaggagcagaggaagcacagcgctgagaaggaggccctgctggaggagaccaacagcttcctgaaggccatcgaggaggccaacaagaagatgcaggccgctgagatcagcctggaggagaaggaccagagaattggagagctggaccggctgattgaaagaatggagaaggagcggcaccagctgcagctgcagctgctggagcacgagacagagatgtctggagagctgacagacagcgacaaggagcgctaccagcagctggaggaggccagcgccagcctgcgggagcgcatccgccacctggatgacatggtgcactgccagcagaagaaggtgaagcagatggtggaggagaacaatgagctgcagagccggctggactacctgacagagacccaggccaagacagaggtggagacccgggagattggagtgggctgtgacctgctgccccggcagagcaggaagtttgagaaggtgctgaatgaatttgtgcagctgctgcccctgccccaccacctgctgtgggcctttggaaatgtgtgctggaggaggcacttcggcctgctgcagtag

SEQ ID NO: 154450 - DNA, 1317 bp, synthetic construct
  misc_feature 1..1317: note = Description of Artificial Sequence: Synthetic coding sequence
  source 1..1317: mol_type = other DNA
atgctgcggagcaccagcacagtgaccctgctgagcggcggggccgcccggacccctggggcccccagccggcgggccaacgtgtgccgcctgcggctgactgtgcccccagagagccctgtgcctgagcagtgtgagaagaagattgaaaggaaggagcagctgctggacctgagcaatggagagcccaccaggaagctgccccagggcgtggtgtatggagtggtgagaagaagtgaccagaaccagcagaaggagatggtggtgtatggctggagcaccagccagctgaaggaggagatgaactacatcaaggatgtgcgggccaccctggagaaggtgaggaagaggatgtatggagactatgatgagatgaggcagaagatccggcagctgacccaggagctgtctgtgagccacgcccagcaggagtacctggagaaccacatccagacccagagcagcgccctggaccgcttcaatgccatgaacagcgccctggccagtgacagcatcggcctgcagaagaccctggtggatgtgaccctggagaacagcaacatcaaggaccagatccggaacctgcagcagacctatgaggcctccatggacaagctgcgggagaagcagaggcagctggaggtggcccaggtggagaaccagctgctgaagatgaaggtggagagcagccaggaggccaatgctgaggtgatgagggagatgaccaagaagctgtacagccagtatgaggagaagctgcaggaggagcagaggaagcacagcgctgagaaggaggccctgctggaggagaccaacagcttcctgaaggccatcgaggaggccaacaagaagatgcaggccgctgagatcagcctggaggagaaggaccagagaattggagagctggacaggctcatcgagaggatggagaaggagcggcaccagctgcagctgcagctgctggagcatgaaacagagatgtctggagagctgacagacagcgacaaggagcgctaccagcagctggaggaggccagcgccagcctgcgggagcgcatccgccacctggatgacatggtgcactgccagcagaagaaggtgaagcagatggtggaggagaacaatgagctgcagagccggctggactacctgacagagacccaggccaagacagaggtggagacccgggagattggagtgggctgtgacctgctgcccagccagacaggccgcacccgggagatcgtgatgcccagcaggaactacaccccctacaccagggtgctggagctgaccatgaagaagaccctgacctag

SEQ ID NO: 154451 - DNA, 1338 bp, synthetic construct
  misc_feature 1..1338: note = Description of Artificial Sequence: Synthetic coding sequence
  source 1..1338: mol_type = other DNA
atgctgcggagcaccagcacagtgaccctgctgagcggcggggccgcccggacccctggggcccccagccggcgggccaacgtgtgccgcctgcggctgactgtgcccccagagagccctgtgcctgagcagtgtgagaagaagattgaaaggaaggagcagctgctggacctgagcaatggagagcccaccaggaagctgccccagggcgtggtgtatggagtggtgagaagaagtgaccagaaccagcagaaggagatggtggtgtatggctggagcaccagccagctgaaggaggagatgaactacatcaaggatgtgcgggccaccctggagaaggtgaggaagaggatgtatggagactatgatgagatgaggcagaagatccggcagctgacccaggagctgtctgtgagccacgcccagcaggagtacctggagaaccacatccagacccagagcagcgccctggaccgcttcaatgccatgaacagcgccctggccagtgacagcatcggcctgcagaagaccctggtggatgtgaccctggagaacagcaacatcaaggaccagatccggaacctgcagcagacctatgaggcctccatggacaagctgcgggagaagcagaggcagctggaggtggcccaggtggagaaccagctgctgaagatgaaggtggagagcagccaggaggccaatgctgaggtgatgagggagatgaccaagaagctgtacagccagtatgaggagaagctgcaggaggagcagaggaagcacagcgctgagaaggaggccctgctggaggagaccaacagcttcctgaaggccatcgaggaggccaacaagaagatgcaggccgctgagatcagcctggaggagaaggaccagagaattggagagctggacaggctcatcgagaggatggagaaggagcggcaccagctgcagctgcagctgctggagcatgaaacagagatgtctggagagctgacagacagcgacaaggagcgctaccagcagctggaggaggccagcgccagcctgcgggagcgcatccgccacctggatgacatggtgcactgccagcagaagaaggtgaagcagatggtggaggagattgagagcctgaagaagaagctgcagcagaagcagctgctgatcctgcagctgctggagaagatctccttcctggagggagaaaataatgagctgcagagccggctggactacctgacagagacccaggccaagacagaggtggagacccgggagattggagtgggctgtgacctgctgccccggcgctgcaagcagagcagccagaggaagaactag

SEQ ID NO: 154452 - DNA, 1653 bp, synthetic construct
  misc_feature 1..1653: note = Description of Artificial Sequence: Synthetic coding sequence
  source 1..1653: mol_type = other DNA
atgctgcggagcaccagcacagtgaccctgctgagcggcggggccgcccggacccctggggcccccagccggcgggccaacgtgtgccgcctgcggctgactgtgcccccagagagccctgtgcctgagcagtgtgagaagaagattgaaaggaaggagcagctgctggacctgagcaatggagagcccaccaggaagctgccccagggcgtggtgtatggagtggtgagaagaagtgaccagaaccagcagaaggagatggtggtgtatggctggagcaccagccagctgaaggaggagatgaactacatcaaggatgtgcgggccaccctggagaaggtgaggaagaggatgtatggagactatgatgagatgaggcagaagatccggcagctgacccaggagctgtctgtgagccacgcccagcaggagtacctggagaaccacatccagacccagagcagcgccctggaccgcttcaatgccatgaacagcgccctggccagtgacagcatcggcctgcagaagaccctggtggatgtgaccctggagaacagcaacatcaaggaccagatccggaacctgcagcagacctatgaggcctccatggacaagctgcgggagaagcagaggcagctggaggtggcccaggtggagaaccagctgctgaagatgaaggtggagagcagccaggaggccaatgctgaggtgatgagggagatgaccaagaagctgtacagccagtatgaggagaagctgcaggaggagcagaggaagcacagcgctgagaaggaggccctgctggaggagaccaacagcttcctgaaggccatcgaggaggccaacaagaagatgcaggccgctgagatcagcctggaggagaaggaccagagaattggagagctggacaggctcatcgagaggatggagaaggagcggcaccagctgcagctgcagctgctggagcatgaaacagagatgtctggagagctgacagacagcgacaaggagcgctaccagcagctggaggaggccagcgccagcctgcgggagcgcatccgccacctggatgacatggtgcactgccagcagaagaaggtgaagcagatggtggaggagattgagagcctgaagaagaagctgcagcagaagcagctgctgatcctgcagctgctggagaagatctccttcctggagggagaaaataatgagctgcagagccggctggactacctgacagagacccaggccaagacagaggtggagacccgggagattggagtgggctgtgacctgctgccccggctgcccttccggcagaatgacagcagcagccactgccagaagagcggcagccccatcagcagcgaggagaggagaagaagagacaagcagcacctggatgacatcacagctgcccggctgctgcccctgcaccacatgcccacccagctgctgagcattgaggagagcctggccctgcagaagcagcagaagcagaactatgaggagatgcaggccaagctggccgcccagaagctggccgagcggctgaacatcaagatgaggagctacaaccctgagggggagagcagcggccgctaccgggaggtgagagatgaagatgatgactggagcagtgatgagttctag

SEQ ID NO: 154453 - DNA, 1308 bp, synthetic construct
  misc_feature 1..1308: note = Description of Artificial Sequence: Synthetic coding sequence
  source 1..1308: mol_type = other DNA
atgctgcggagcaccagcacagtgaccctgctgagcggcggggccgcccggacccctggggcccccagccggcgggccaacgtgtgccgcctgcggctgactgtgcccccagagagccctgtgcctgagcagtgtgagaagaagattgaaaggaaggagcagctgctggacctgagcaatggagagcccaccaggaagctgccccagggcgtggtgtatggagtggtgagaagaagtgaccagaaccagcagaaggagatggtggtgtatggctggagcaccagccagctgaaggaggagatgaactacatcaaggatgtgtcccatgcccagcaggagtacctggagaaccacatccagacccagagcagcgccctggaccgcttcaatgccatgaacagcgccctggccagtgacagcatcggcctgcagaagaccctggtggatgtgaccctggagaacagcaacatcaaggaccagatccggaacctgcagcagacctatgaggcctccatggacaagctgcgggagaagcagaggcagctggaggtggcccaggtggagaaccagctgctgaagatgaaggtggagagcagccaggaggccaatgctgaggtgatgagggagatgaccaagaagctgtacagccagtatgaggagaagctgcaggaggagcagaggaagcacagcgctgagaaggaggccctgctggaggagaccaacagcttcctgaaggccatcgaggaggccaacaagaagatgcaggccgctgagatcagcctggaggagaaggaccagagaattggagagctggaccggctgattgaaagaatggagaaggagcggcaccagctgcagctgcagctgctggagcacgagacagagatgtctggagagctgacagacagcgacaaggagcgctaccagcagctggaggaggccagcgccagcctgcgggagcgcatccgccacctggatgacatggtgcactgccagcagaagaaggtgaagcagatggtggaggagattgagagcctgaagaagaagctgcagcagaagcagctgctgatcctgcagctgctggagaagatctccttcctggagggggagaacaatgagctgcagagccggctggactacctgacagagacccaggccaagacagaggtggagacccgggagattggagtgggctgtgacctgctgcccagccagacaggccgcacccgggagatcgtgatgcccagcaggaactacaccccctacaccagggtgctggagctgaccatgaagaagaccctgacctag

SEQ ID NO: 154454 - DNA, 1401 bp, synthetic construct; identical to SEQ ID NO: 154447
  misc_feature 1..1401: note = Description of Artificial Sequence: Synthetic coding sequence
  source 1..1401: mol_type = other DNA

SEQ ID NO: 154455 - DNA, 1317 bp, synthetic construct; identical to SEQ ID NO: 154450
  misc_feature 1..1317: note = Description of Artificial Sequence: Synthetic coding sequence
  source 1..1317: mol_type = other DNA

SEQ ID NO: 154456 - DNA, 1401 bp, synthetic construct; identical to SEQ ID NO: 154447
  misc_feature 1..1401: note = Description of Artificial Sequence: Synthetic coding sequence
  source 1..1401: mol_type = other DNA

SEQ ID NO: 154457 - DNA, 2328 bp, synthetic construct
  misc_feature 1..2328: note = Description of Artificial Sequence: Synthetic coding sequence
  source 1..2328: mol_type = other DNA
atggagaagtttggcatgaactttggaggcggccccagcaagaaggacctgctggagaccatcgagacccagaagaagcagctgctgcagtaccaggcccggctgaaggatgtggtgcgggcctacaagagcctgctgaaggagaaggaggccctggaggccagcatcaaggtgctgtctgtgtcccatgaagcagatgtgggcctggccggcgtgcagctgcccggcctgaccttcccagacagcgtggatgaccgctgcagcacccacagcgaggacagcactggaacagccaccagcctggacacagctgccagcctgaccagcaccaagggggagtttggagtggaggatgacaggcctgcccggggccccccaccacccaagtctgaggaggcctcctggagcgagagcggcgtgagcagcagcagtggagatggcccctttgctggaggagaggtggacaagaggctgcaccagctgaagacccagctggccaccctgaccagcagcctggccaccgtgacccaggagaagagcaggatggaggccagctacctggccgacaagaagaagatgaagcaggacctggaggatgccagcaacaaggccgaggaggagcgggcccggctggagggggagctgaagggcctgcaggagcagattgctgagaccaaggcccggctcatcacccagcagcacgaccgggcccaggagcagagcgaccacgccctgatgctgcgggagctgcagaagctgctgcaggaggagaggacccagaggcaggacctggagctgcggctggaggagacccgggaggccctggccggccgggcctatgctgctgagcagatggagggctttgagctgcagaccaagcagctgacccgggaggtggaggagctgaagtctgagctgcaggccatcagagatgagaagaaccagcctgacccccggctgcaggagctgcaggaggaggccgcccggctgaagagccacttccaggcccagctgcagcaggagatgaggaagacagccctggccgaggaccagctgcggcagcagagccaggtggaggagcagagggtggccgccctggagaaccagatcagcgaggtgtctgagctgctgggcacctatgagaaggccaagcagaaggaccagctggccatccagaagctgaaggagcgcatcctgcagctggacctggagaacaagaccctggccctggccgccagcagccgcagccccctggacagccatggagaggagagcagcctggatgtgaatgtgctgaaggacaagatggagaagctgaagaggctgctgcaggtggccgccaggaagagccaggtgaccctggatgtggagaagctgtgtgacctggagatcatgcccagcagcgaggccgcagatggagagaaggccacagccctgtactaccagcaggagctgaagcagctgaaggaggagtttgagcgctacaagatgagggcccaggtggtgctgaagagcaagaacaccaaggatggcaacctgggcaaggagctggaggccgcccaggagcagctggccgagctgaaggagaagtacatcagcctgcggctgagctgtgaggagctggagcaccagcaccagcaggaggctgatgactggaagcaggagctggcccggctgcagcagctgcaccggcaggagctggagcgctgccagctggacttccgggacaggaccctgaagctggaggaggagctgcacaagcagagggaccgggccctggccgtgctgacagagaaggacctggagctggagcagctgcggtctgtggccctggccagcggcctgcccggccgccgcagccctgtgggcggcggcggccctggggaccctgctgacaccagcagcagtgacagcctgacccaggccctgcagctggccgccgccaatgagcccaccttcttcctgtatgcagagcagctggccaggaaggaggtggagatcaccagcctgaggaagcagaagcaccggctggaggtggaggtgcaccagctgcaggaccggctgctggaggagggggagcggcaccgggaggaggtggccgccctgcagagccacatcgagaagaacatccgggaccagagccgggagggcgccaacctggagtacctgaagaacatcatctaccgcttcctgaccctgcctgacagcctgggccggcagcagaccctgacagccatcctgaccatcctgcacttcagccctgaggagaagcaggtgatcatgaggctgcccaccagcgcctcctggtggcccagcggcaagaggtag

SEQ ID NO: 154458 - DNA, 5055 bp, synthetic construct
  misc_feature 1..5055: note = Description of Artificial Sequence: Synthetic coding sequence
  source 1..5055: mol_type = other DNA
atggaggacctggtgcaggatggagtggccagccctgccaccccaggcaccgggaagagcaagctggagaccctgcccaaggaggacctgatcaagtttgccaagaagcagatgatgctgatccagaaggccaagagccgctgcacagagctggagaaggagattgaggagctgcggagcaagcctgtgacagagggcactggagacatcatcaaggccctgacagagcggctggatgccctgctgctggagaaggccgagacagagcagcagtgcctgagcctgaagaaggagaacatcaagatgaagcaggaggtggaggacagcgtgaccaagatgggagatgcccacaaggagctggagcagagccacatcaactacgtgaaggagattgagaacctgaagaatgagctgatggctgtgcgcagcaagtacagcgaggacaaggccaacctgcagaagcagctggaggaggccatgaacacccagctggagctgtctgagcagctgaagttccagaacaacagtgaagataatgtgaagaagctgcaggaggagattgagaagatccggcccggctttgaggagcagatcctgtacctgcagaagcagctggatgccaccacagatgagaagaaggagaccgtgacccagctgcagaacatcatcgaggccaacagccagcactaccagaagaacatcaacagcctgcaggaggagctgctgcagctgaaggccatccaccaggaggaggtgaaggagctgatgtgccagatcgaggccagcgccaaggagcacgaggccgagatcaacaagctgaatgagctgaaggagaacctggtgaagcagtgtgaggccagcgagaagaacatccagaagaagtatgaatgtgagctggagaacctgaggaaggccaccagcaatgccaaccaggacaaccagatctgcagcatcctgctgcaggagaacacctttgtggagcaggtggtgaatgagaaggtgaagcacctggaggacaccctgaaggagctggagagccagcacagcatcctgaaggatgaggtgacctacatgaacaacctgaagctgaagctggagatggatgcccagcacatcaaggatgagttcttccacgagcgggaggacctggagttcaagatcaatgagctgctgctggccaaggaggagcagggctgtgtgattgagaagctgaagtctgagctggccggcctgaacaagcagttctgctacacagtggagcagcacaaccgggaggtgcagagcctgaaggagcagcaccagaaggagatcagcgagctgaatgagaccttcctgagtgacagcgagaaggagaagctgaccctgatgtttgagatccagggcctgaaggagcagtgtgagaacctgcagcaggagaagcaggaggccatcctgaactatgagagcctgcgggagatcatggagatcctgcagacagagctgggggagagcgctgggaagatcagccaggagtttgagagcatgaagcagcagcaggccagtgatgtgcatgagctgcagcagaagctgaggacagccttcacagagaaggatgccctgctggagaccgtgaaccggctgcagggagaaaatgagaagctgctgagccagcaggagctggtgcctgagctggagaacaccatcaagaacctgcaggagaagaatggagtgtacctgctgagcctgagccagagggacaccatgctgaaggagctggagggcaagatcaacagcctgacagaggagaaggatgacttcatcaacaagctgaagaacagccatgaggagatggacaacttccacaagaagtgtgagcgggaggagcggctcatcctggagctgggcaagaaggtggagcagaccatccagtacaacagcgagctggagcagaaggtgaatgagctgactggaggcctggaggagaccctgaaggagaaggaccagaatgaccagaagctggagaagctgatggtgcagatgaaggtgctgtctgaggacaaggaggtgctgtctgctgaggtgaagagcctgtatgaggagaacaacaagctgagcagcgagaagaagcagctgagccgggacctggaggtgttcctgagccagaaggaggatgtgatcctgaaggagcacatcacccagctggagaagaagctgcagctgatggtggaggagcaggacaacctgaacaagctgctggagaatgagcaggtgcagaagctgtttgtgaagacccagctgtatggcttcctgaaggagatgggcagcgaggtgtctgaggacagcgaggagaaggatgtggtgaatgtgctgcaggccgtgggggagagcctggccaagatcaatgaggagaagtgcaacctggccttccagagagatgagaaggtgctggagctggagaaggagatcaagtgcctgcaggaggagagcgtggtgcagtgtgaggagctgaagagcctgctgcgggactatgagcaggagaaggtgctgctgaggaaggagctggaggagatccagagcgagaaggaggccctgcagagcgacctgctggagatgaagaatgccaatgagaagacccggctggagaaccagaacctgctgatccaggtggaggaggtgtcccagacctgcagcaagtctgagatccacaatgagaaggagaagtgcttcatcaaggagcacgagaacctgaagcccctgctggagcagaaggagctgcgggacagaagagctgagctgatcctgctgaaggacagcctggccaagagccccagcgtgaagaatgaccccctgagctctgtgaaggagctggaggagaagattgagaacctggagaaggagtgcaaggagaaggaggagaagatcaacaagatcaagctggtggccgtgaaggccaagaaggagctggacagcagcaggaaggagacccagacagtgaaggaggagctggagagcctgcggtctgagaaggaccagctgagcgcctccatgagggacctgatccagggcgctgagagctacaagaacctgctgctggagtatgagaagcagagcgagcagctggatgtggagaaggagcgggccaacaactttgagcacagaattgaggacctgacccggcagctgaggaacagcaccctgcagtgtgagaccatcaacagcgacaatgaagacctgctggccagaattgagaccctgcagagcaatgccaagctgctggaggtgcagatcctggaggtgcagagggccaaggccatggtggacaaggagctggaggccgagaagctgcagaaggagcagaagatcaaggagcacgccaccaccgtgaatgagctggaggagctgcaggtgcagctgcagaagcagaagaagcagctgcagaagaccatgcaggagctggagctggtgaagaaggatgcccagcagaccaccctgatgaacatggagattgctgactatgagcggctgatgaaggagctgaaccagaagctgaccaacaagaacaacaagattgaggacctggagcaggagatcaagatccagaagcagaagcaggagaccctgcaggaggagatcaccagcctgcagagctctgtgcagcagtatgaggagaagaacaccaagatcaagcagctgctggtgaagaccaagaaggagctggccgacagcaagcaggccgagacagaccacctgatcctgcaggccagcctgaagggggagctggaggccagccagcagcaggtggaggtgtacaagatccagctggccgagatcaccagcgagaagcacaagatccacgagcacctgaagaccagcgctgagcagcaccagaggaccctgagcgcctaccagcagagggtgacagccctgcaggaggagtgccgggccgccaaggccgagcaggccaccgtgaccagcgagtttgagagctacaaggtgcgggtgcacaacgtgctgaagcagcagaagaacaagtccatgagccaggccgagacagagggcgccaagcaggagcgggagcacctggagatgctgattgaccagctgaagatcaagctgcaggacagccagaacaacctgcagatcaacgtgtctgagctgcagaccctgcagagcgagcatgacaccctgctggagcggcacaacaagatgctgcaggagaccgtgtccaaggaggccgagctgcgggagaagctgtgcagcatccagagcgagaacatgatgatgaagtctgagcacacccagacagtgtcccagctgaccagccagaatgaggtgctgaggaacagcttccgggaccaggtgcgccacctgcaggaggagcacaggaagacagtggagaccctgcagcagcagctgagcaagatggaggcccagctgttccagctgaagaatgagcccaccaccaggagccctgtgagcagccagcagagcctgaagaacctgcgggagaggaggaacacagacctgcccctgctggacatgcacacagtgacccgggaggagggggagggcatggagaccacagacacagaatctgtgagcagcgccagcacctacacccagagcctggagcagctgctgaacagccctgagaccaagctggagccccccctgtggcacgccgagttcaccaaggaggagctggtgcagaagctgagcagcaccaccaagtctgctgaccacctgaatggcctgctgcgggagacagaggccaccaatgccatcctgatggagcagatcaagctgctgaagtctgagatccggcggctggagaggaaccaggagcgggagaagtctgctgccaacctggagtacctgaagaatgtgctgctgcagttcatcttcctgaagccaggcagcgagcgggagcggctgctgcccgtcatcaacaccatgctgcagctgagccctgaggagaagggcaagctggccgctgtggcccagggcgaggaggagaatgccagccgcagcagcggctgggccagctacctgcacagctggagcggcctgaggtag

SEQ ID NO: 154459 - DNA, 2052 bp, synthetic construct
  misc_feature 1..2052: note = Description of Artificial Sequence: Synthetic coding sequence
  source 1..2052: mol_type = other DNA
atgtgccagatcgaggccagcgccaaggagcatgaagctgagatcaacaagctgaatgagctgaaggagaacctggtgaagcagtgtgaggccagcgagaagaacatccagaagaagtatgaatgtgagctggagaacctgaggaaggccaccagcaatgccaaccaggacaaccagatctgcagcatcctgctgcaggagaacacctttgtggagcaggtggtgaatgagaaggtgaagcacctggaggacaccctgaaggagctggagagccagcacagcatcctgaaggatgaggtgacctacatgaacaacctgaagctgaagctggagatggatgcccagcacatcaaggatgagttcttccacgagcgggaggacctggagttcaagatcaatgagctgctgctggccaaggaggagcagggctgcgtcatcgagaagctgaagtctgagctggccggcctgaacaagcagttctgctacacagtggagcagcacaaccgggaggtgcagagcctgaaggagcagcaccagaaggagatcagcgagctgaatgagaccttcctgagtgacagcgagaaggagaagctgaccctgatgtttgagatccagggcctgaaggagcagtgtgagaacctgcagcaggagaagcaggaggccatcctgaactatgagagcctgcgggagatcatggagatcctgcagacagagctgggggagagcgctgggaagatcagccaggagtttgagagcatgaagcagcagcaggccagtgatgtgcatgagctgcagcagaagctgaggacagccttcacagagaaggatgccctgctggagaccgtgaaccggctgcagggagaaaatgagaagctgctgagccagcaggagctggtgcctgagctggagaacaccatcaagaacctgcaggagaagaatggagtgtacctgctgagcctgagccagagggacaccatgctgaaggagctggagggcaagatcaacagcctgacagaggagaaggatgacttcatcaacaagctgaagaacagccatgaggagatggacaacttccacaagaagtgtgagcgggaggagcggctcatcctggagctgggcaagaaggtggagcagaccatccagtacaacagcgagctggagcagaaggtgaatgagctgaccggcggcctggaggagaccctgaaggagaaggaccagaatgaccagaagctggagaagctgatggtgcagatgaaggtgctgtctgaggacaaggaggtgctgtctgctgaggtgaagagcctgtatgaggagaccatcaacagcgtgcagaagaagcagctgagccgggacctggaggtgttcctgagccagaaggaggatgtgatcctgaaggagcacatcacccagctggagaagaagctgcagctgatggtggaggagcaggacaacctgaacaagctgctggagaatgagcaggtgcagaagctgtttgtgaagacccagctgtatggcttcctgaaggagatgggcagcgaggtgtctgaggacagcgaggagaaggatgtggtgaatgtgctgcaggccgtgggggagagcctggccaagatcaatgaggagaagtgcaacctggccttccagagagatgagaaggtgctggagctggagaaggagatcaagtgcctgcaggaggagagcgtggtgcagtgtgaggagctgaagagcctgctgcgggactatgagcaggagaaggtgctgctgaggaaggagctggaggagatccagagcgagaaggaggccctgcagagcgacctgctggagatgaagaatgccaatgagaagacccggctggagaaccagaacctgctgatccaggtggaggaggtgtcccagacctgcagcaagtctgagatccacaatgagaaggagaagtgcttcatcaaggagcacgagaacctgaagcccctgctggagcagaaggagctgcgggacagaagagctgagctgatcctgctgaaggacagcctggccaagagccccagcaagaagtag

SEQ ID NO: 154460 - DNA, 1347 bp, synthetic construct
  misc_feature 1..1347: note = Description of Artificial Sequence: Synthetic coding sequence
  source 1..1347: mol_type = other DNA
atggaggacctggtgcaggatggagtggccagccctgccaccccaggcaccgggaagagcaagctggagaccctgcccaaggaggacctgatcaagtttgccaagaagcagatgatgctgatccagaaggccaagagccgctgcacagagctggagaaggagattgaggagctgcggagcaagcctgtgacagagggcactggagacatcatcaaggccctgacagagcggctggatgccctgctgctggagaaggccgagacagagcagcagtgcctgagcctgaagaaggagaacatcaagatgaagcaggaggtggaggacagcgtgaccaagatgggagatgcccacaaggagctggagcagagccacatcaactacgtgaaggagattgagaacctgaagaatgagctgatggctgtgcgcagcaagtacagcgaggacaaggccaacctgcagaagcagctggaggaggccatgaacacccagctggagctgtctgagcagctgaagttccagaacaacagtgaagataatgtgaagaagctgcaggaggagattgagaagatccggcccggctttgaggagcagatcctgtacctgcagaagcagctggatgccaccacagatgagaagaaggagaccgtgacccagctgcagaacatcatcgaggccaacagccagcactaccagaagaacatcaacagcctgcaggaggagctgctgcagctgaaggccatccaccaggaggaggtgaaggagctgatgtgccagatcgaggccagcgccaaggagcacgaggccgagatcaacaagctgaatgagctgaaggagaacctggtgaagcagtgtgaggccagcgagaagaacatccagaagaagtatgaatgtgagctggagaacctgaggaaggccaccagcaatgccaaccaggacaaccagatctgcagcatcctgctgcaggagaacacctttgtggagcaggtggtgaatgagaaggtgaagcacctggaggacaccctgaaggagctggagagccagcacagcatcctgaaggatgaggtgacctacatgaacaacctgaagctgaagctggagatggatgcccagcacatcaaggatgagttcttccacgagcgggaggacctggagttcaagatcaatgagctgctgctggccaaggaggagcagggctgtgtgattgagaagctgaagtctgagctggccggcctgaacaagcagttctgctacacagtggagcagcacaaccgggaggtgcagagcctgaaggagcagcaccagaaggagatcagcgagctgaatgagaccttcctgagtgacagctag

SEQ ID NO: 154461 - DNA, 1878 bp, synthetic construct
  misc_feature 1..1878: note = Description of Artificial Sequence: Synthetic coding sequence
  source 1..1878: mol_type = other DNA
atggcccaggccctgtctgaggaggagttccagaggatgcaggcccagctgctggagctgcggaccaacaactaccagctgagtgatgagctgaggaagaatggagtggagctgaccagcctgcggcagaaggtggcctacctggacaaggagttcagcaaggcccagaaggccctgagcaagagcaagaaggcccaggaggtggaggtgctgctgtctgaaaatgagatgctgcaggccaagctgcacagccaggaggaggacttccggctgcagaacagcaccctgatggccgagttcagcaaggagagatatggcaaggaggccggcaagttctctgctgtgtctgagggccagggcgaccccccaggcggccctgcccccaccgtgctggcccccatgcccctggccgaggtggagctgaagtgggagatggagaaggaggagaagaggctgctgtgggagcagctgcagggcctggagagcagcaagcaggccgagaccagccggctgcaggaggagctggccaagctgtctgagaagctgaagaagaagcaggagagcttctgccgcctgcagacagagaaggagaccctcttcaatgacagcaggaacaagattgaggagctgcagcagaggaaggaggccgaccacaaggcccagctggcccggacccagaagctgcagcaggagctggaggccgccaaccagagcctggccgagctgcgggaccagaggcagggcgagcggctggagcacgccgccgccctgcgggccctgcaggaccaggtgtccatccagagcgcagatgcccaggagcaggtggagggcctgctggctgaaaataatgccctgcggaccagcctggccgccctggagcagatccagacagccaagacccaggagctgaacatgctgcgggagcagaccaccggcctggccgctgagctgcagcagcagcaggccgagtatgaggacctgatgggccagaaggatgacctgaacagccagctgcaggagagcctgcgggccaacagccggctgctggagcagctgcaggagatcggccaggagaaggagcagctgacccaggagctgcaggaggccaggaagtctgctgagaagaggaaggccatgctggatgagctggccatggagaccctgcaggagaagagccagcacaaggaggagctgggcgctgtgcggctgcggcatgagaaggaggtgctgggcgtgcgggcccgctatgaaagagagctgcgggagctgcacgaggacaagaagaggcaggaggaggagctgcggggccagatccgggaggagaaggcccggacccgggagctggagaccctgcagcagacagtggaggagctgcaggcccaggtgcacagcatggatggagccaagggctggtttgagcggcggctgaaggaggccgagggcaaggaggaggagctgcaggatgtgcgggaccagctggagcaggcccaggaggagcgggactgccacctgaagaccatcagcagcctgaagcaggaggtgaaggacacagtggatggccagaggatcctggagaagaagggcagcgctgccctgaaggacctgaagaggcagctgcacctggagaggaagagagctgacaagctgcaggagcggctgcaggacatcctgaccaacagcaagagccgcagcggcctggaggagctggtgctgtctgagatgaacagccccagcaggacccagacaggagacagcagcagcatcagcagcttctcctaccgggagatcctgcgggagaaggagagcagcgctgtgcctgcccgggtgcggggcaaggaggagcccacagccccagccagcctgaaccccaagatctag

SEQ ID NO: 154462 - DNA, 2433 bp, synthetic construct
  misc_feature 1..2433: note = Description of Artificial Sequence: Synthetic coding sequence
  source 1..2433: mol_type = other DNA
atggcccaggccctgtctgaggaggagttccagaggatgcaggcccagctgctggagctgcggaccaacaactaccagctgagtgatgagctgaggaagaatggagtggagctgaccagcctgcggcagaaggtggcctacctggacaaggagttcagcaaggcccagaaggccctgagcaagagcaagaaggcccaggaggtggaggtgctgctgtctgaaaatgagatgctgcaggccaagctgcacagccaggaggaggacttccggctgcagaacagcaccctgatggccgagttcagcaagctgtgcagccagatggagcagctggagcaggagaaccagcagctgaaggagggcgccgccggggccggcgtggcccaggccggccccctggtggatggagagctgctgcggctgcaggctgaaaatacagccctgcagaagaatgtggccgccctgcaggagagatatggcaaggaggccggcaagttctctgctgtgtctgagggccagggcgaccccccaggcggccctgcccccaccgtgctggcccccatgcccctggccgaggtggagctgaagtgggagatggagaaggaggagaagaggctgctgtgggagcagctgcagggcctggagagcagcaagcaggccgagaccagccggctgcaggaggagctggccaagctgtctgagaagctgaagaagaagcaggagagcttctgccgcctgcagacagagaaggagaccctcttcaatgacagcaggaacaagattgaggagctgcagcagaggaaggaggccgaccacaaggcccagctggcccggacccagaagctgcagcaggagctggaggccgccaaccagagcctggccgagctgcgggaccagaggcagggcgagcggctggagcacgccgccgccctgcgggccctgcaggaccagatccagacagccaagacccaggagctgaacatgctgcgggagcagaccaccggcctggccgctgagctgcagcagcagcaggccgagtatgaggacctgatgggccagaaggatgacctgaacagccagctgcaggagagcctgcgggccaacagccggctgctggagcagctgcaggagatcggccaggagaaggagcagctgacccaggagctgcaggaggccaggaagtctgctgagaagaggaaggccatgctggatgagctggccatggagaccctgcaggagaagagccagcacaaggaggagctgggcgctgtgcggctgcggcatgagaaggaggtgctgggcgtgcgggcccgctatgaaagagagctgcgggagctgcacgaggacaagaagaggcaggaggaggagctgcggggccagatccgggaggagaaggcccggacccgggagctggagaccctgcagcagacagtggaggagctgcaggcccaggtgcacagcatggatggagccaagggctggtttgagcggcggctgaaggaggccgaggagagcctgcagcagcagcagcaggagcaggaggaggccctgaagcagtgccgggagcagcacgccgctgagctgaagggcaaggaggaggagctgcaggatgtgcgggaccagctggagcaggcccaggaggagcgggactgccacctgaagaccatcagcagcctgaagcaggaggtgaaggacacagtggatggccagaggatcctggagaagaagggcagcgctgccctgaaggacctgaagaggcagctgcacctggagaggaagagagctgacaagctgcaggagcggctgcaggacatcctgaccaacagcaagagccgcagcggcctggaggagctggtgctgtctgagatgaacagccccagcaggacccagacaggagacagcagcagcatcagcagcttctcctaccgggagatcctgcgggagaaggagagcagcgctgtgcctgcccggagcctgagcagcagcccccaggcccagccccccaggcctgctgagctgagtgatgaggaggtggccgagctgttccagaggctggccgagacccagcaggagaagtggatgctggaggagaaggtgaagcacctggaggtgtcctctgcctccatggccgaggacctgtgcaggaagagcgccatcatcgagacctacgtgatggacagcagaattgatgtgtctgtggccgccggccacacagacaggagcggcctgggctctgtgctgcgggacctggtgaagccaggagatgagaacctgcgggagatgaacaagaagctgcagaacatgctggaggagcagctgaccaagaacatgcacctgcacaaggacatggaggtgctgagccaggagatcgtgcggctgagcaaagaatgtgtgggccccccagaccctgacctggagcccggggagaccagctag

SEQ ID NO: 154463 - DNA, 2526 bp, synthetic construct
  misc_feature 1..2526: note = Description of Artificial Sequence: Synthetic coding sequence
  source 1..2526: mol_type = other DNA
atggcccaggccctgtctgaggaggagttccagaggatgcaggcccagctgctggagctgcggaccaacaactaccagctgagtgatgagctgaggaagaatggagtggagctgaccagcctgcggcagaaggtggcctacctggacaaggagttcagcaaggcccagaaggccctgagcaagagcaagaaggcccaggaggtggaggtgctgctgtctgaaaatgagatgctgcaggccaagctgcacagccaggaggaggacttccggctgcagaacagcaccctgatggccgagttcagcaagctgtgcagccagatggagcagctggagcaggagaaccagcagctgaaggagggcgccgccggggccggcgtggcccaggccggccccctggtggatggagagctgctgcggctgcaggctgaaaatacagccctgcagaagaatgtggccgccctgcaggagagatatggcaaggaggccggcaagttctctgctgtgtctgagggccagggcgaccccccaggcggccctgcccccaccgtgctggcccccatgcccctggccgaggtggagctgaagtgggagatggagaaggaggagaagaggctgctgtgggagcagctgcagggcctggagagcagcaagcaggccgagaccagccggctgcaggaggagctggccaagctgtctgagaagctgaagaagaagcaggagagcttctgccgcctgcagacagagaaggagaccctcttcaatgacagcaggaacaagattgaggagctgcagcagaggaaggaggccgaccacaaggcccagctggcccggacccagaagctgcagcaggagctggaggccgccaaccagagcctggccgagctgcgggaccagaggcagggcgagcggctggagcacgccgccgccctgcgggccctgcaggaccaggtgtccatccagagcgcagatgcccaggagcaggtggagggcctgctggccgagaacaatgccctgcggaccagcctggccgccctggagcagatccagacagccaagacccaggagctgaacatgctgcgggagcagaccaccggcctggccgctgagctgcagcagcagcaggccgagtatgaggacctgatgggccagaaggatgacctgaacagccagctgcaggagagcctgcgggccaacagccggctgctggagcagctgcaggagatcggccaggagaaggagcagctgacccaggagctgcaggaggccaggaagtctgctgagaagaggaaggccatgctggatgagctggccatggagaccctgcaggagaagagccagcacaaggaggagctgggcgctgtgcggctgcggcatgagaaggaggtgctgggcgtgcgggcccgctatgagcgggagctgcgggagctgcacgaggacaagaagaggcaggaggaggagctgcggggccagatccgggaggagaaggcccggacccgggagctggagaccctgcagcagacagtggaggagctgcaggcccaggtgcacagcatggatggagccaagggctggtttgaaagaaggctgaaggaggccgaggagagcctgcagcagcagcagcaggagcaggaggaggccctgaagcagtgccgggagcagcacgccgctgagctgaagggcaaggaggaggagctgcaggatgtgcgggaccagctggagcaggcccaggaggagcgggactgccacctgaagaccatcagcagcctgaagcaggaggtgaaggacacagtggatggccagaggatcctggagaagaagggcagcgctgccctgaaggacctgaagaggcagctgcacctggagaggaagagagctgacaagctgcaggagcggctgcaggacatcctgaccaacagcaagagccgcagcggcctggaggagctggtgctgtctgagatgaacagccccagcaggacccagacaggagacagcagcagcatcagcagcttctcctaccgggagatcctgcgggagaaggagagcagcgctgtgcctgcccggagcctgagcagcagcccccaggcccagccccccaggcctgctgagctgagtgatgaggaggtggccgagctgttccagaggctggccgagacccagcaggagaagtggatgctggaggagaaggtgaagcacctggaggtgagcagcgcctccatggccgaggacctgtgcaggaagagcgccatcatcgagacctacgtgatggacagcagaattgatgtgtctgtggccgccggccacacagacagaagtggcctgggctctgtgctgcgggacctggtgaagccaggagatgagaacctgcgggagatgaacaagaagctgcagaacatgctggaggagcagctgaccaagaacatgcacctgcacaaggacatggaggtgctgagccaggagatcgtgcggctgagcaaagaatgtgtgggccccccagaccctgacctggagcctggagagaccagctag

SEQ ID NO: 154464 - DNA, 2391 bp, synthetic construct
  misc_feature 1..2391: note = Description of Artificial Sequence: Synthetic coding sequence
  source 1..2391: mol_type = other DNA
atggcccaggccctgtctgaggaggagttccagaggatgcaggcccagctgctggagctgcggaccaacaactaccagctgagtgatgagctgaggaagaatggagtggagctgaccagcctgcggcagaaggtggcctacctggacaaggagttcagcaaggcccagaagctgtgcagccagatggagcagctggagcaggagaaccagcagctgaaggagggcgctgctggagctggggtggcccaggccggccccctggtggatggagagctgctgcggctgcaggccgagaacacagccctgcagaagaatgtggccgccctgcaggagagatatggcaaggaggccggcaagttctctgctgtgtctgagggccagggcgaccccccaggcggccctgcccccaccgtgctggcccccatgcccctggccgaggtggagctgaagtgggagatggagaaggaggagaagaggctgctgtgggagcagctgcagggcctggagagcagcaagcaggccgagaccagccggctgcaggaggagctggccaagctgtctgagaagctgaagaagaagcaggagagcttctgccgcctgcagacagagaaggagaccctcttcaatgacagcaggaacaagattgaggagctgcagcagaggaaggaggccgaccacaaggcccagctggcccggacccagaagctgcagcaggagctggaggccgccaaccagagcctggccgagctgcgggaccagaggcagggcgagcggctggagcacgccgccgccctgcgggccctgcaggaccaggtgtccatccagagcgcagatgcccaggagcaggtggagggcctgctggctgaaaataatgccctgcggaccagcctggccgccctggagcagatccagacagccaagacccaggagctgaacatgctgcgggagcagaccaccggcctggccgctgagctgcagcagcagcaggccgagtatgaggacctgatgggccagaaggatgacctgaacagccagctgcaggagagcctgcgggccaacagccggctgctggagcagctgcaggagatcggccaggagaaggagcagctgacccaggagctgcaggaggccaggaagtctgctgagaagaggaaggccatgctggatgagctggccatggagaccctgcaggagaagagccagcacaaggaggagctgggcgctgtgcggctgcggcatgagaaggaggtgctgggcgtgcgggcccgctatgaaagagagctgcgggagctgcacgaggacaagaagaggcaggaggaggagctgcggggccagatccgggaggagaaggcccggacccgggagctggagaccctgcagcagacagtggaggagctgcaggcccaggtgcacagcatggatggagccaagggctggtttgagcggcggctgaaggaggccgaggagagcctgcagcagcagcagcaggagcaggaggaggccctgaagcagtgccgggagcagcacgccgctgagctgaagggcaaggaggaggagctgcaggatgtgcgggaccagctggagcaggcccaggaggagcgggactgccacctgaagaccatcagcagcctgaagcaggaggtgaaggacacagtggatggccagaggatcctggagaagaagggcagcgctgccctgaaggacctgaagaggcagctgcacctggagaggaagagagctgacaagctgcaggagcggctgcaggacatcctgaccaacagcaagagccgcagcggcctggaggagctggtgctgtctgagatgaacagccccagcaggacccagacaggagacagcagcagcatcagcagcttctcctaccgggagatcctgcgggagaaggagagcagcgctgtgcctgcccggagcctgagcagcagcccccaggcccagccccccaggcctgctgagctgagtgatgaggaggtggccgagctgttccagaggctggccgagacccagcaggagaagtggatgctggaggagaaggtgaagcacctggaggtgtcctctgcctccatggccgaggacctgtgcaggaagagcgccatcatcgagacctacgtgatggacagcagaattgatgtgtctgtggccgccggccacacagacaggagcggcctgggctctgtgctgcgggacctggtgaagccaggagatgagaacctgcgggagatgaacaagaagctgcagaacatgctggaggagcagctgaccaagaacatgcacctgcacaaggacatggaggtgctgagccaggagatcgtgcggctgagcaaagaatgtgtgggccccccagaccctgacctggagcccggggagaccagctag

SEQ ID NO: 154465 - DNA, 2433 bp, synthetic construct
  misc_feature 1..2433: note = Description of Artificial Sequence: Synthetic coding sequence
  source 1..2433: mol_type = other DNA
atggcccaggccctgtctgaggaggagttccagaggatgcaggcccagctgctggagctgcggaccaacaactaccagctgagtgatgagctgaggaagaatggagtggagctgaccagcctgcggcagaaggtggcctacctggacaaggagttcagcaaggcccagaagagccctggcccctgcctgcccctgcaggaggtggaggtgctgctgtctgaaaatgagatgctgcaggccaagctgcacagccaggaggaggacttccggctgcagaacagcaccctgatggccgagttcagcaagctgtgcagccagatggagcagctggagcaggagaaccagcagctgaaggagggcgccgccggggccggcgtggcccaggccggccccctggtggatggagagctgctgcggctgcaggctgaaaatacagccctgcagaagaatgtggccgccctgcaggagagatatggcaaggaggccggcaagttctctgctgtgtctgagggccagggcgaccccccaggcggccctgcccccaccgtgctggcccccatgcccctggccgaggtggagctgaagtgggagatggagaaggaggagaagaggctgctgtgggagcagctgcagggcctggagagcagcaagcaggccgagaccagccggctgcaggaggagctggccaagctgtctgagaagctgaagaagaagcaggagagcttctgccgcctgcagacagagaaggagaccctcttcaatgacagcaggaacaagattgaggagctgcagcagaggaaggaggccgaccacaaggcccagctggcccggacccagaagctgcagcaggagctggaggccgccaaccagagcctggccgagctgcgggaccagaggcagggcgagcggctggagcacgccgccgccctgcgggccctgcaggaccagatccagacagccaagacccaggagctgaacatgctgcgggagcagaccaccggcctggccgctgagctgcagcagcagcaggccgagtatgaggacctgatgggccagaaggatgacctgaacagccagctgcaggagagcctgcgggccaacagccggctgctggagcagctgcaggagatcggccaggagaaggagcagctgacccaggagctgcaggaggccaggaagtctgctgagaagaggaaggccatgctggatgagctggccatggagaccctgcaggagaagagccagcacaaggaggagctgggcgctgtgcggctgcggcatgagaaggaggtgctgggcgtgcgggcccgctatgaaagagagctgcgggagctgcacgaggacaagaagaggcaggaggaggagctgcggggccagatccgggaggagaaggcccggacccgggagctggagaccctgcagcagacagtggaggagctgcaggcccaggtgcacagcatggatggagccaagggctggtttgagcggcggctgaaggaggccgaggagagcctgcagcagcagcagcaggagcaggaggaggccctgaagcagtgccgggagcagcacgccgctgagctgaagggcaaggaggaggagctgcaggatgtgcgggaccagctggagcaggcccaggaggagcgggactgccacctgaagaccatcagcagcctgaagcaggaggtgaaggacacagtggatggccagaggatcctggagaagaagggcagcgctgccctgaaggacctgaagaggcagctgcacctggagaggaagagagctgacaagctgcaggagcggctgcaggacatcctgaccaacagcaagagccgcagcggcctggaggagctggtgctgtctgagatgaacagccccagcaggacccagacaggagacagcagcagcatcagcagcttctcctaccgggagatcctgcgggagaaggagagcagcgctgtgcctgcccggagcctgagcagcagcccccaggcccagccccccaggcctgctgagctgagtgatgaggaggtggccgagctgttccagaggctggccgagacccagcaggagaagtggatgctggaggagaaggtgaagcacctggaggtgtcctctgcctccatggccgaggacctgtgcaggaagagcgccatcatcgagacctacgtgatggacagcagaattgatgtgtctgtggccgccggccacacagacaggagcggcctgggctctgtgctgcgggacctggtgaagccaggagatgagaacctgcgggagatgaacaagaagctgcagaacatgctggaggagcagctgaccaagaacatgcacctgcacaaggacatggaggtgctgagccaggagatcgtgcggctgagcaaagaatgtgtgggccccccagaccctgacctggagcccggggagaccagctag

SEQ ID NO: 154466 - DNA, 1425 bp, synthetic construct
  misc_feature 1..1425: note = Description of Artificial Sequence: Synthetic coding sequence
  source 1..1425: mol_type = other DNA
atgaagagggtgctggtgctgctgctggccgtggcctttggacatgccctggagcggggccgggactatgagaagaacaaggtgtgcaaggagttcagccacctgggcaaggaggacttcaccagcctgagcctggtgctgtacagcaggaagttccccagcggcacctttgagcaggtgtcccagctggtgaaggaggtggtgtccctgacagaggcctgctgtgccgagggcgctgaccctgactgctatgacaccaggaccagcgccctgagcgccaagagctgtgagagcaacagccccttccctgtgcaccctggaacagctgagtgctgcaccaaggagggcctggagaggaagctgtgcatggccgccctgaagcaccagccccaggagttccccacctacgtggagcccaccaatgatgagatctgtgaggccttcaggaaggaccccaaggagtatgccaaccagttcatgtgggagtacagcaccaactacggccaggcccccctgagcctgctggtgtcctacaccaagagctacctgtccatggtgggcagctgctgcaccagcgccagccccaccgtgtgcttcctgaaggagcggctgcagctgaagcacctgagcctgctgaccaccctgagcaacagagtgtgcagccagtatgctgcctacggggagaagaagagccggctgagcaacctgatcaagctggcccagaaggtgcccacagctgacctggaggatgtgctgcccctggccgaggacatcaccaacatcctgagcaagtgctgtgagagcgccagcgaggactgcatggccaaggagctgcctgagcacacagtgaagctgtgtgacaacctgagcaccaagaacagcaagtttgaggactgctgccaggagaagacagccatggatgtgtttgtgtgcacctacttcatgcctgctgcccagctgcctgagctgcctgatgtggagctgcccaccaacaaggatgtgtgtgaccccggcaacaccaaggtgatggacaagtacacctttgagctgagcaggaggacccacctgcctgaggtgttcctgagcaaggtgctggagcccaccctgaagagcctgggggagtgctgtgatgtggaggacagcaccacctgcttcaatgccaagggccccctgctgaagaaggagctgagcagcttcatcgacaagggccaggagctgtgtgccgactacagcgagaacaccttcacagagtacaagaagaagctggccgagcggctgaaggccaagctgcctgatgccacccccacagagctggccaagctggtgaacaagcacagcgactttgccagcaactgctgcagcatcaacagcccccccctgtactgtgacagcgagattgatgctgagctgaagaacatcctgtag

SEQ ID NO: 154467 - DNA, 438 bp, synthetic construct
  misc_feature 1..438: note = Description of Artificial Sequence: Synthetic coding sequence
  source 1..438: mol_type = other DNA
atgaagagggtgctggtgctgctgctggccgtggcctttggacatgccctggagcggggccgggactatgagaagaacaaggtgtgcaaggagttcagccacctgggcaaggaggacttcaccagcctgagcctggtgctgtacagcaggaagttccccagcggcacctttgagcaggtgtcccagctggtgaaggaggtggtgtccctgacagaggcctgctgtgccgagggcgctgaccctgactgctatgacaccaggaccagcgccctgagcgccaagagctgtgagagcaacagccccttccctgtgcaccctggaacagctgagtgctgcaccaaggagggcctggagaggaagctgtgcatggccgccctgaagcaccagccccaggagttccccacctacgtggagcccaccaatgatgagatctgctag

SEQ ID NO: 154468 - DNA, 1482 bp, synthetic construct
  misc_feature 1..1482: note = Description of Artificial Sequence: Synthetic coding sequence
  source 1..1482: mol_type = other DNA
atgctgtggagctggagcgaggagcggggcggggccgcccggctgagcggcaggaagatgaagagggtgctggtgctgctgctggccgtggccttcggccacgccctggagcggggccgggactatgagaagaacaaggtgtgcaaggagttcagccacctgggcaaggaggacttcaccagcctgagcctggtgctgtacagcaggaagttccccagcggcacctttgagcaggtgtcccagctggtgaaggaggtggtgtccctgacagaggcctgctgtgccgagggcgctgaccctgactgctatgacaccaggaccagcgccctgagcgccaagagctgtgagagcaacagccccttccctgtgcaccctggaacagctgagtgctgcaccaaggagggcctggagaggaagctgtgcatggccgccctgaagcaccagccccaggagttccccacctacgtggagcccaccaatgatgagatctgtgaggccttcaggaaggaccccaaggagtatgccaaccagttcatgtgggagtacagcaccaactacggccaggcccccctgagcctgctggtgtcctacaccaagagctacctgtccatggtgggcagctgctgcaccagcgccagccccaccgtgtgcttcctgaaggagcggctgcagctgaagcacctgagcctgctgaccaccctgagcaacagagtgtgcagccagtatgctgcctatggagagaagaagagccggctgagcaacctgatcaagctggcccagaaggtgcccacagctgacctggaggatgtgctgcccctggccgaggacatcaccaacatcctgagcaagtgctgtgagagcgccagcgaggactgcatggccaaggagctgcctgagcacacagtgaagctgtgtgacaacctgagcaccaagaacagcaagtttgaggactgctgccaggagaagacagccatggatgtgtttgtgtgcacctacttcatgcctgctgcccagctgcctgagctgcctgatgtggagctgcccaccaacaaggatgtgtgtgaccccggcaacaccaaggtgatggacaagtacacctttgagctgagcaggaggacccacctgcctgaggtgttcctgagcaaggtgctggagcccaccctgaagagcctgggggagtgctgtgatgtggaggacagcaccacctgcttcaatgccaagggccccctgctgaagaaggagctgagcagcttcatcgacaagggccaggagctgtgtgccgactacagcgagaacaccttcacagagtacaagaagaagctggccgagcggctgaaggccaagctgcctgatgccacccccacagagctggccaagctggtgaacaagcacagcgactttgccagcaactgctgcagcatcaacagcccccccctgtactgtgacagcgagattgatgctgagctgaagaacatcctgtag

SEQ ID NO: 154469 - DNA, 669 bp, synthetic construct
  misc_feature 1..669: note = Description of Artificial Sequence: Synthetic coding sequence
  source 1..669: mol_type = other DNA
atggccgcctctgtgcggcaggcccggagcctgctgggcgtggccgccaccctggcccctggcagccggggctaccgggcccggcccccacccaggagaagacctggcccccgctggccagaccctgaggacctgctgaccccccgctggcagctgggccccaggtatgctgccaagcagtttgcccgctacggggccgccagcggcgtggtgcccggcagcctgtggcccagccctgagcagctgcgggagctggaggccgaggagcgggagtggtaccccagcctggccaccatgcaggagagcctgcgggtgaagcagctggccgaggagcagaagaggcgggagcgggagcagcacatcgccgagtgcatggccaagatgccccagatgattgtgaactggcagcagcagcagcgggagaactgggagaaggcccaggccgacaaggagcggcgggcccggctgcaggccgaggcccaggagctgctgggctaccaggtggaccccaggtctgcccgcttccaggagctgctgcaggacctggagaagaaggagaggaagaggctgaaggaggagaagcagaagaggaagaaggaggcccgggccgccgccctggccgctgctgtggcccaggaccctgctgccagcggggcccccagcagctag

SEQ ID NO: 154470 - DNA, 1038 bp, synthetic construct
  misc_feature 1..1038: note = Description of Artificial Sequence: Synthetic coding sequence
  source 1..1038: mol_type = other DNA
atggtggccgccctgctgggcggcggcggggaggcccggggcggcaccgtgcctggggcctggctgtgcctgatggccctgctgcagctgctgggcagcgccccccggggcagcggcctggcccacggccggcggctcatctgctggcaggccctgctgcagtgccagggcgagcctgagtgcagctatgcctacaaccagtatgcagaggcctgtgcccctgtgctggcccagcacggcggcggagatgcccctggagctgctgctgctgccttccctgccagcgctgccagcttcagcagccgctggcgctgccccagccactgcatcagcgccctgatccagctgaaccacacccggcggggccctgccctggaggactgtgactgtgcccaggatgagaactgcaagagcaccaagagggccatcgagccctgcctgcccaggaccagcggcggcggggccggcggccctggggccggcggcgtgatgggctgcacagaggccaggagaagatgtgaccgggacagccgctgcaacctggccctgagccgctacctgacctactgtgggaaggtgttcaacggcctgcgctgcacagatgagtgcaggacagtgattgaggacatgctggccatgcccaaggccgccctgctgaatgactgtgtgtgtgatggcctggagcggcccatctgtgagagcgtgaaggagaacatggcccggctgtgcttcggggctgagctgggcaatggacctggcagcagcggcagtgatggcggcctggatgactactatgatgaagattatgatgatgagcagaggactggaggagctggaggagagcagcccctggatgatgatgatggagtgccccaccccccccggcccggcagcggggctgctgccagcggcggccgcggggacctgccctacggccctggaagaagaagcagcggcggcggcggccgcctggcccccaggggggcctggacccccctggccagcatcctgctgctgctgctgggccccctcttctag

SEQ ID NO: 154471 - DNA, 942 bp, synthetic construct
  misc_feature 1..942: note = Description of Artificial Sequence: Synthetic coding sequence
  source 1..942: mol_type = other DNA
atgtgcacagccctgagccccaaggtgcgcagcggccctggcctgagtgacatgcaccagtacagccagtggctggccagcagacatgaggccaacctgctgcccatgaaggaggacctggccctgtggctgaccaacctgctgggcaaggagatcacagctgagaccttcatggagaagctggacaatggagccctgctgtgccagctggccgagaccatgcaggagaagttcaaggagagcatggatgccaacaagcccaccaagaacctgcccctgaagaagatcccctgcaagaccagcgcccccagcggcagcttctttgcccgggacaacacagccaacttcctgtcctggtgccgggacctgggcgtggatgagacctgcctgtttgaaagtgagggcctggtgctgcacaagcagccccgggaggtgtgcctgtgcctgctggagctgggcagaattgctgcccgctatggagtggagcccccaggcctcatcaagctggagaaggagattgagcaggaggagaccctgagcgcccccagccccagccccagccccagcagcaagagcagcggcaagaagagcacaggcaacctgctggatgatgctgtgaagaggatcagtgaagatcctccctgcaagtgccccaacaagttctgtgtggagcggctgagccagggccgctacagagtgggggagaagatcctcttcatccgcatgctgcacaacaagcacgtgatggtgcgggtgggcggcggctgggagacctttgctggctacctgctgaagcatgacccctgcaggatgctgcagatcagccgggtggatggcaagaccagccccatccagagcaagagccccaccctgaaggacatgaacccagacaactacctggtggtgtctgccagctacaaggccaagaaggagatcaagtag

SEQ ID NO: 154472 - DNA, 942 bp, synthetic construct; identical to SEQ ID NO: 154471
  misc_feature 1..942: note = Description of Artificial Sequence: Synthetic coding sequence
  source 1..942: mol_type = other DNA

SEQ ID NO: 154473 - DNA, 942 bp, synthetic construct; identical to SEQ ID NO: 154471
  misc_feature 1..942: note = Description of Artificial Sequence: Synthetic coding sequence
  source 1..942: mol_type = other DNA

SEQ ID NO: 154474 - DNA, 546 bp, synthetic construct
  misc_feature 1..546: note = Description of Artificial Sequence: Synthetic coding sequence
  source 1..546: mol_type = other DNA
atgtgcacagccctgagccccaaggtgcgcagcggccctggcctgagtgacatgcaccagtacagccagtggctggccagcagacatgaggccaacctgctgcccatgaaggaggacctggccctgtggctgaccaacctgctgggcaaggagatcacagctgagaccttcatggagaagctggacaatggagccctgctgtgccagctggccgagaccatgcaggagaagttcaaggagagcatggatgccaacaagcccaccaagaacctgcccctgaagaagatcccctgcaagaccagcgcccccagcggcagcttctttgcccgggacaacacagccaacttcctgtcctggtgccgggacctgggcgtggatgagacctgcctgtttgaaagtgagggcctggtgctgcacaagcagccccgggaggtgtgcctgtgcctgctggagctgggcagaattgctgcccgctatggagtggagcccccaggcctcatcaagctggagaaggagattgagcaggaggagaccctgagcgcctag

SEQ ID NO: 154475 - DNA, 618 bp, synthetic construct
  misc_feature 1..618: note = Description of Artificial Sequence: Synthetic coding sequence
  source 1..618: mol_type = other DNA
atgtgcacagccctgagccccaaggtgcgcagcggccctggcctgagtgacatgcaccagtacagccagtggctggccagcagacatgaggccaacctgctgcccatgaaggaggacctggccctgtggctgaccaacctgctgggcaaggagatcacagctgagaccttcatggagaagctggacaatggagccctgctgtgccagctggccgagaccatgcaggagaagttcaaggagagcatggatgccaacaagcccaccaagaacctgcccctgaagaagatcccctgcaagaccagcgcccccagcggcagcttctttgcccgggacaacacagccaacttcctgtcctggtgccgggacctgggcgtggatgagacctgcctgtttgaaagtgagggcctggtgctgcacaagcagccccgggaggtgtgcctgtgcctgctggagctgggcagaattgctgcccgctatggagtggagcccccaggcctcatcaagctggagaaggagattgagcaggaggagaccctgagcgcccccagccccagccccagccccagcagcaagagcagcggcaagaagagcacaggcaacctgctggatgatgcctag

SEQ ID NO: 154476 - DNA, 411 bp, synthetic construct
  misc_feature 1..411: note = Description of Artificial Sequence: Synthetic coding sequence
  source 1..411: mol_type = other DNA
atgtgcacagccctgagccccaaggtgcgcagcggccctggcctgagtgacatgcaccagtacagccagtggctggccagcagacatgaggccaacctgctgcccatgaaggaggacctggccctgtggctgaccaacctgctgggcaaggagatcacagctgagaccttcatggagaagctggacaatggagccctgctgtgccagctggccgagaccatgcaggagaagttcaaggagagcatggatgccaacaagcccaccaagaacctgcccctgaagaagatcccctgcaagaccagcgcccccagcggcagcttctttgcccgggacaacacagccaacttcctgtcctggtgccgggacctgggcgtggatgagacctgcctgtttgaaagtgagggcctgtag

SEQ ID NO: 154477 - DNA, 468 bp, synthetic construct
  misc_feature 1..468: note = Description of Artificial Sequence: Synthetic coding sequence
  source 1..468: mol_type = other DNA
atgtgcacagccctgagccccaaggtgcgcagcggccctggcctgagtgacatgcaccagtacagccagtggctggccagcagacatgaggccaacctgctgcccatgaaggaggacctggccctgtggctgaccaacctgctgggcaaggagatcacagctgagaccttcatggagaagctggacaatggagccctgctgtgccagctggccgagaccatgcaggagaagttcaaggagagcatggatgccaacaagcccaccaagaacctgcccctgaagaagatcccctgcaagaccagcgcccccagcggcagcttctttgcccgggacaacacagccaacttcctgtcctggtgccgggacctgggcgtggatgagacctgcctgtttgaaagtgagggcctggtgctgcacaagcagccccgggaggtgtgcctgtgcctgctggagctgggccgcatctag

SEQ ID NO: 154478 - DNA, 2043 bp, synthetic construct
  misc_feature 1..2043: note = Description of Artificial Sequence: Synthetic coding sequence
  source 1..2043: mol_type = other DNA
atggctgaccctgtggccggcattgctggcagcgctgccaagtctgtgcggcccttccgcagcagcgaggcctacgtggaggccatgaaggaggacctggccgagtggctgaatgccctgtatggcctgggcctgcccggcggcggagatggcttcctgaccggcctggccaccggcaccaccctgtgccagcacgccaatgctgtgacagaggccgcccgggccctggccgccgcccggcctgcccggggcgtggccttccaggcccacagcgtggtgcccggcagcttcatggcccgggacaacgtggccaccttcatcggctggtgccgggtggagctgggcgtgcctgaggtgctgatgtttgaaacagaggacctggtgctgaggaagaatgagaagtctgtggtgctgtgcctgctggaggtggccaggagaggagcccggctgggcctgctggccccccggctggtgcagtttgagcaggagattgaaagagagctgcgggccgcccccccagccccaaatgccccagctgctggggaggacaccacagaaacagccccagcccctggcaccccagcccggggccccaggatgacccccagcgacctgaggaacctggatgagctggtgcgggagatcctgggccgctgcacctgcccagaccagttccccatgatcaaggtgtctgagggcaagtacagagtgggggacagcagcctgctgatctttgtgcgggtgctgcggagccacgtgatggtgcgggtgggcggcggctgggacaccctggagcactacctggacaagcatgacccctgccgctgcagcagcacagcccacaggcctccccagccccgggtgtgcaccttcagcccccagagggtgagccccaccaccagccccaggcctgccagccctgtgcccggcagcgagcggcggggcagcaggcctgagatgacccctgtgtccctgcggagcaccaaggagggccctgagaccccaccccggccccgggaccagctgcccccccaccccaggagccgccgctacagcggggacagcgacagcagcgccagcagcgcccagagcggccccctgggcaccaggagtgatgacaccggcaccggcccccggcgggagcggcccagccggcggctgaccaccggcaccccagccagcccccggcggccccccctgcggagccagagccgggaccggctggaccggggccggcccaggggggcccctgggggccgcggggcccagctgtctgtgcccagccctgcccggcgggcccggagccagagccgggaggagcaggccgtgctgctggtgagaagagacagagatggccagcacagctgggtgccccggggccggggcagcggcggcagcggccgcagcaccccccagaccccccgggcccggagccctgctgccccccggctgagccgggtgagcagccccagccctgagctgggcaccaccccagccagcatcttccgcacccccctgcagctggacccccagcaggagcagcagctgttccggcggctggaggaggagttcctggccaatgcccgggccctggaggccgtggcctctgtgacccccaccggccctgccccagaccctgcccgggccccagaccccccagccccagattctgcctactgcagcagcagcagcagcagcagcagcctgtctgtgctgggcggcaaatgtggccagcccggggacagcggccgcacagccaacggcctgcccggccccaggagccaggccctgagcagcagcagtgatgagggcagcccctgccccggcatgggcggccccctggatgcccctggcagccccctggcctgcacagagcccagcaggacctgggcccggggccgcatggacacccagcctgacaggaagcccagccgcatccccaccccccggggcccccggcggcccagcggccctgctgagctgggcacctggcacgccctgcacagcgtgacccccagggctgagccagacagctggatgtag

SEQ ID NO: 154479 - DNA, 1014 bp, synthetic construct
  misc_feature 1..1014: note = Description of Artificial Sequence: Synthetic coding sequence
  source 1..1014: mol_type = other DNA
atggctgaccctgtggccggcattgctggcagcgctgccaagtctgtgcggcccttccgcagcagcgaggcctacgtggaggccatgaaggaggacctggccgagtggctgaatgccctgtatggcctgggcctgcccggcggcggagatggcttcctgaccggcctggccaccggcaccaccctgtgccagcacgccaatgctgtgacagaggccgcccgggccctggccgccgcccggcctgcccggggcgtggccttccaggcccacagcgtggtgcccggcagcttcatggcccgggacaacgtggccaccttcatcggctggtgccgggtggagctgggcgtgcctgaggtgctgatgtttgaaacagaggacctggtgctgaggaagaatgagaagtctgtggtgctgtgcctgctggaggtggccaggagaggagcccggctgggcctgctggccccccggctggtgcagtttgagcaggagattgaaagagagctgcgggccgcccccccagccccaaatgccccagctgctggggaggacaccacagaaacagccccagcccctggcaccccagcccggggccccaggatgacccccagcgacctgaggaacctggatgagctggtgcgggagatcctgggccgctgcacctgcccagaccagttccccatgatcaaggtgtctgagggcaagtacagagtgggggacagcagcctgctgatctttgtgcgggtgctgcggagccacgtgatggtgcgggtgggcggcggctgggacaccctggagcactacctggacaagcatgacccctgccgctgcagcagcacagcccacaggcctccccagccccgggtgtgcaccttcagcccccagagggtgagccccaccaccagccccaggcctgccagccctgtgcccggcagcgagcggcggggcagcaggcctgagatgacccctgtgtccctgcggagcaccaaggagggccctgagaccccaccaagatag

SEQ ID NO: 154480 - DNA, 990 bp, synthetic construct
  misc_feature 1..990: note = Description of Artificial Sequence: Synthetic coding sequence
  source 1..990: mol_type = other DNA
atggctgaccctgtggccggcattgctggcagcgctgccaagtctgtgcggcccttccgcagcagcgaggcctacgtggaggccatgaaggaggacctggccgagtggctgaatgccctgtatggcctgggcctgcccggcggcggagatggcttcctgaccggcctggccaccggcaccaccctgtgccagcacgccaatgctgtgacagaggccgcccgggccctggccgccgcccggcctgcccggggcgtggccttccaggcccacagcgtggtgcccggcagcttcatggcccgggacaacgtggccaccttcatcggctggtgccgggtggagctgggcgtgcctgaggtgctgatgtttgaaacagaggacctggtgctgaggaagaatgagaagtctgtggtgctgtgcctgctggaggtggccaggagaggagcccggctgggcctgctggccccccggctggtgcagtttgagcaggagattgaaagagagctgcgggccgcccccccagccccaaatgccccagctgctggggaggacaccacagaaacagccccagcccctggcaccccagcccggggccccaggatgacccccagcgacctgaggaacctggatgagctggtgcgggagatcctgggccgctgcacctgcccagaccagttccccatgatcaaggtgtctgagggcaagtacagagtgggggacagcagcctgctgatctttgtgcgggtgctgcggagccacgtgatggtgcgggtgggcggcggctgggacaccctggagcactacctggacaagcatgacccctgccgctgcagcagcactggacctggcatcagctgcccccccatcccagccccagctgccaccccaggcaccgtgaccccccagcccccaccacccagggctgcccccctggtgcctgctgtgatgacccaggccctggcccctgggggcagtgaccctgctgggggctag

SEQ ID NO: 154481 - DNA, 1614 bp, synthetic construct
  misc_feature 1..1614: note = Description of Artificial Sequence: Synthetic coding sequence
  source 1..1614: mol_type = other DNA
atggctgaccctgtggccggcattgctggcagcgctgccaagtctgtgcggcccttccgcagcagcgaggcctacgtggaggccatgaaggaggacctggccgagtggctgaatgccctgtatggcctgggcctgcccggcggcggagatggcttcctgaccggcctggccaccggcaccaccctgtgccagcacgccaatgctgtgacagaggccgcccgggccctggccgccgcccggcctgcccggggcgtggccttccaggcccacagcgtggtgcccggcagcttcatggcccgggacaacgtggccaccttcatcggctggtgccgggtggagctgggcgtgcctgaggtgctgatgtttgaaacagaggacctggtgctgaggaagaatgagaagtctgtggtgctgtgcctgctggaggtggccaggagaggagcccggctgggcctgctggccccccggctggtgcagtttgagcaggagattgaaagagagctgcgggccgcccccccagccccaaatgccccagctgctggggaggacaccacagaaacagccccagcccctggcaccccagcccggggccccaggatgacccccagcgacctgaggaacctggatgagctggtgcgggagatcctgggccgctgcacctgcccagaccagttccccatgatcaaggtgtctgagggcaagtacagagtgggggacagcagcctgctgatctttgtgcgggtgctgcggagccacgtgatggtgcgggtgggcggcggctgggacaccctggagcactacctggacaagcatgacccctgccgctgcagcagcacagcccacaggcctccccagccccgggtgtgcaccttcagcccccagagggtgagccccaccaccagccccaggcctgccagccctgtgcccggcagcgagcggcggggcagcaggcctgagatgacccctgtgtccctgcggagcaccaaggagggccctgagaccccaccccggccccgggaccagctgcccccccaccccaggagccgccgctacagcggggacagcgacagcagcgccagcagcgcccagagcggccccctgggcaccaggagtgatgacaccggcaccggcccccggcgggagcggcccagccggcggctgaccaccggcaccccagccagcccccggcggcccccagcctgtgccgccagccctgagaccggctggattgctgctggccctgggggcccccaggaggccggggagcccagctgccgcagccctgccctgcccggcggccctggggcccgggccgcccggagccggctgtgctgcctgtgtgccggcatcgagaccggcagcacccacggctgccagggcgctggagctgtgggcgcccgggccggggccccaccccggctgcctgtgcctgctgccctgcagcaccctggcttccctggcagccctgcccctgtgcagagctgggccccccacaggcctgccagcagcgcccacccctgcagcagcaccaggagccgcagcagcagctgcagcggggcctggaagaggagctcctggcccatgcctggccccctgcggctgctgctggcctag

SEQ ID NO: 154482 - DNA, 1614 bp, synthetic construct; identical to SEQ ID NO: 154481
  misc_feature 1..1614: note = Description of Artificial Sequence: Synthetic coding sequence
  source 1..1614: mol_type = other DNA

SEQ ID NO: 154483 - DNA, 1614 bp, synthetic construct; identical to SEQ ID NO: 154481
  misc_feature 1..1614: note = Description of Artificial Sequence: Synthetic coding sequence
  source 1..1614: mol_type = other DNA

SEQ ID NO: 154484 - DNA, 417 bp, synthetic construct
  misc_feature 1..417: note = Description of Artificial Sequence: Synthetic coding sequence
  source 1..417: mol_type = other DNA
atggctgaccctgtggccggcattgctggcagcgctgccaagtctgtgcggcccttccgcagcagcgaggcctacgtggaggccatgaaggaggacctggccgagtggctgaatgccctgtatggcctgggcctgcccggcggcggagatggcttcctgaccggcctggccaccggcaccaccctgtgccagcacgccaatgctgtgacagaggccgcccgggccctggccgccgcccggcctgcccggggcgtggccttccaggcccacagcgtggtgcccggcagcttcatggcccgggacaacgtggccaccttcatcggctggtgccgggtggagctgggcgtgcctgaggtgctgatgtttgaaacagaggacctggtgctgaggaagaatgagaagtctgtggtgctgtag

SEQ ID NO: 154485 - DNA, 432 bp, synthetic construct
  misc_feature 1..432: note = Description of Artificial Sequence: Synthetic coding sequence
  source 1..432: mol_type = other DNA
atggctgaccctgtggccggcattgctggcagcgctgccaagtctgtgcggcccttccgcagcagcgaggcctacgtggaggccatgaaggaggacctggccgagtggctgaatgccctgtatggcctgggcctgcccggcggcggagatggcttcctgaccggcctggccaccggcaccaccctgtgccagcacgccaatgctgtgacagaggccgcccgggccctggccgccgcccggcctgcccggggcgtggccttccaggcccacagcgtggtgcccggcagcttcatggcccgggacaacgtggccaccttcatcggctggtgccgggtggagctgggcgtgcctgaggtgctgatgtttgaaacagaggacctggtgctgaggaagaatgagaagtctgtggtgctgtgcctgctggaggtgtag

SEQ ID NO: 154486 - DNA, 1614 bp, synthetic construct; identical to SEQ ID NO: 154481
  misc_feature 1..1614: note = Description of Artificial Sequence: Synthetic coding sequence
  source 1..1614: mol_type = other DNA

SEQ ID NO: 154487 - DNA, 2037 bp, synthetic construct
  misc_feature 1..2037: note = Description of Artificial Sequence: Synthetic coding sequence
  source 1..2037: mol_type = other DNA
atggcccccagcctgagccctggccctgctgccctgcggcgggccccccagctgctgctgctgctgctggccgcagaatgtgccctggccgccctgctgcctgcccgggaggccacccagttcctgcggccccggcagaggcgggccttccaggtgtttgaggaggccaagcagggccacctggagcgggagtgtgtggaggagctgtgcagccgggaggaggcccgggaggtgtttgaaaatgaccctgagacagactacttctacccccgctacctggactgcatcaacaagtatggcagcccctacaccaagaacagcggctttgccacctgtgtgcagaacctgcctgaccagtgcacccccaacccctgtgacaggaagggcacccaggcctgccaggacctgatgggcaacttcttctgcctgtgcaaggccggctggggcggccgcctgtgtgacaaggatgtgaatgaatgttcccaggagaatggaggctgcctgcagatctgccacaacaagccaggcagcttccactgcagctgccacagcggctttgagctgagcagtgatggccgcacctgccaggacattgatgaatgtgccgacagcgaggcctgtggggaggcccgctgcaagaacctgcccggcagctacagctgcctgtgtgatgagggctttgcctacagcagccaggagaaggcctgcagagatgtggatgaatgtctgcagggccgctgtgagcaggtgtgtgtgaacagccctggcagctacacctgccactgtgatggccggggcggcctgaagctgagccaggacatggacacctgtgaggacatcctgccctgtgtgcccttctctgtggccaagtctgtgaagagcctgtacctgggccgcatgttcagcggcacccctgtgatccggctgcgcttcaagaggctgcagcccacccggctggtggccgagtttgacttccgcacctttgatcctgagggcatcctgctgtttgctgggggccaccaggacagcacctggatcgtgctggccctgcgggccggccgcctggagctgcagctgcgctacaacggggtgggccgggtgaccagcagcggccctgtgatcaaccacggcatgtggcagaccatctctgtggaggagctggccaggaacctggtgatcaaggtgaacagagatgctgtgatgaagattgctgtggccggggacctcttccagcctgagcggggcctgtaccacctgaacctgactgtgggcggcatccccttccacgagaaggacctggtgcagcccatcaacccccggctggatggctgcatgaggtcctggaactggctgaatggagaggacaccaccatccaggagaccgtgaaggtgaacaccaggatgcagtgcttctctgtgacagagcggggcagcttctacccaggcagcggctttgccttctacagcctggactacatgaggacccccctggatgtgggcacagagagcacctgggaggtggaggtggtggcccacatccggcctgctgctgacacaggagtgctgtttgccctgtgggccccagacctgcgggctgtgcccctgtctgtggccctggtggactaccacagcaccaagaagctgaagaagcagctggtggtgctggccgtggagcacacagccctggccctgatggagatcaaggtgtgtgatggccaggagcacgtggtgacagtgtccctgagagatggagaggccaccctggaggtggatggcacccggggccagagcgaggtgtctgctgcccagctgcaggagcggctggccgtgctggagcggcacctgcggagccctgtgctgacctttgctgggggcctgcctgatgtgcctgtgaccagcgcccctgtgacagccttctaccggggctgcatgaccctggaggtgaacagaaggctgctggacctggatgaggccgcctacaagcacagcgacatcacagcccacagctgcccccctgtggagcctgctgctgcctag

SEQ ID NO: 154488 - DNA, 1875 bp, synthetic construct
  misc_feature 1..1875: note = Description of Artificial Sequence: Synthetic coding sequence
  source 1..1875: mol_type = other DNA
atgtgcatgtgccaggccagccccccacctgctgccctggccggctgcctgctgagcagctgtgtgcagcctgcccgggagcacggcggggccttcagcaaggccgagtggctgagcaactgcatcaacaagtatggcagcccctacaccaagaacagcggctttgccacctgtgtgcagaacctgcctgaccagtgcacccccaacccctgtgacaggaagggcacccaggcctgccaggacctgatgggcaacttcttctgcctgtgcaaggccggctggggcggccgcctgtgtgacaaggatgtgaatgaatgttcccaggagaatggaggctgcctgcagatctgccacaacaagccaggcagcttccactgcagctgccacagcggctttgagctgagcagtgatggccgcacctgccaggacattgatgaatgtgccgacagcgaggcctgtggggaggcccgctgcaagaacctgcccggcagctacagctgcctgtgtgatgagggctttgcctacagcagccaggagaaggcctgcagagatgtggatgaatgtctgcagggccgctgtgagcaggtgtgtgtgaacagccctggcagctacacctgccactgtgatggccggggcggcctgaagctgagccaggacatggacacctgtgaggacatcctgccctgtgtgcccttctctgtggccaagtctgtgaagagcctgtacctgggccgcatgttcagcggcacccctgtgatccggctgcgcttcaagaggctgcagcccacccggctggtggccgagtttgacttccgcacctttgatcctgagggcatcctgctgtttgctgggggccaccaggacagcacctggatcgtgctggccctgcgggccggccgcctggagctgcagctgcgctacaacggggtgggccgggtgaccagcagcggccctgtgatcaaccacggcatgtggcagaccatctctgtggaggagctggccaggaacctggtgatcaaggtgaacagagatgctgtgatgaagattgctgtggccggggacctcttccagcctgagcggggcctgtaccacctgaacctgactgtgggcggcatccccttccacgagaaggacctggtgcagcccatcaacccccggctggatggctgcatgaggtcctggaactggctgaatggagaggacaccaccatccaggagaccgtgaaggtgaacaccaggatgcagtgcttctctgtgacagagcggggcagcttctacccaggcagcggctttgccttctacagcctggactacatgaggacccccctggatgtgggcacagagagcacctgggaggtggaggtggtggcccacatccggcctgctgctgacacaggagtgctgtttgccctgtgggccccagacctgcgggctgtgcccctgtctgtggccctggtggactaccacagcaccaagaagctgaagaagcagctggtggtgctggccgtggagcacacagccctggccctgatggagatcaaggtgtgtgatggccaggagcacgtggtgacagtgtccctgagagatggagaggccaccctggaggtggatggcacccggggccagagcgaggtgtctgctgcccagctgcaggagcggctggccgtgctggagcggcacctgcggagccctgtgctgacctttgctgggggcctgcctgatgtgcctgtgaccagcgcccctgtgacagccttctaccggggctgcatgaccctggaggtgaacagaaggctgctggacctggatgaggccgcctacaagcacagcgacatcacagcccacagctgcccccctgtggagcctgctgctgcctag

SEQ ID NO: 154489 - DNA, 2166 bp, synthetic construct
  misc_feature 1..2166: note = Description of Artificial Sequence: Synthetic coding sequence
  source 1..2166: mol_type = other DNA
atggcccccagcctgagccctggccctgctgccctgcggcgggccccccagctgctgctgctgctgctggccgcagaatgtgccctggccgccctgctgcctgcccgggaggccacccagttcctgcggccccggcagaggcgggccttccaggtgtttgaggaggccaagcagggccacctggagcgggagtgtgtggaggagctgtgcagccgggaggaggcccgggaggtgtttgaaaatgaccctgagacagactacttctacccccgctacctggactgcatcaacaagtatggcagcccctacaccaagaacagcggctttgccacctgtgtgcagaacctgcctgaccagtgcacccccaacccctgtgacaggaagggcacccaggcctgccaggacctgatgggcaacttcttctgcctgtgcaaggccggctggggcggccgcctgtgtgacaaggatgtgaatgaatgttcccaggagaatggaggctgcctgcagatctgccacaacaagccaggcagcttccactgcagctgccacagcggctttgagctgagcagtgatggccgcacctgccaggacattgatgaatgtgccgacagcgaggcctgtggggaggcccgctgcaagaacctgcccggcagctacagctgcctgtgtgatgagggctttgcctacagcagccaggagaaggcctgcagagatgtggatgaatgtctgcagggccgctgtgagcaggtgtgtgtgaacagccctggcagctacacctgccactgtgatggccggggcggcctgaagctgagccaggacatggacacctgtgagctggaggccggctggcccctgcccaggcacagaagagacagcggccctgctgcccggcccggccgcggggcccagggcagccgctctgagggccacatcccagaccggcggggcccccggccctggcaggacatcctgccctgtgtgcccttctctgtggccaagtctgtgaagagcctgtacctgggccgcatgttttctggcacccctgtgatccggctgcgcttcaagaggctgcagcccacccggctggtggccgagtttgacttccgcacctttgatcctgagggcatcctgctgtttgctgggggccaccaggacagcacctggatcgtgctggccctgcgggccggccgcctggagctgcagctgcgctacaatggagtgggccgggtgaccagcagcggccctgtgatcaaccacggcatgtggcagaccatctctgtggaggagctggccaggaacctggtgatcaaggtgaacagagatgctgtgatgaagattgctgtggccggggacctcttccagcctgagcggggcctgtaccacctgaacctgactgtgggcggcatccccttccacgagaaggacctggtgcagcccatcaacccccggctggatggctgcatgaggtcctggaactggctgaatggagaggacaccaccatccaggagaccgtgaaggtgaacaccaggatgcagtgcttctctgtgacagagcggggcagcttctacccaggcagcggctttgccttctacagcctggactacatgaggacccccctggatgtgggcacagagagcacctgggaggtggaggtggtggcccacatccggcctgctgctgacaccggggtgctgtttgccctgtgggccccagacctgcgggctgtgcccctgtctgtggccctggtggactaccacagcaccaagaagctgaagaagcagctggtggtgctggccgtggagcacacagccctggccctgatggagatcaaggtgtgtgatggccaggagcacgtggtgacagtgtccctgagagatggagaggccaccctggaggtggatggcacccggggccagagcgaggtgtctgctgcccagctgcaggagcggctggccgtgctggagcggcacctgcggagccctgtgctgacctttgctgggggcctgcctgatgtgcctgtgaccagcgcccctgtgacagccttctaccggggctgcatgaccctggaggtgaacagaaggctgctggacctggatgaagctgcctacaagcacagcgacatcacagcccacagctgcccccctgtggagcctgctgctgcctag

SEQ ID NO: 154490 - DNA, 1140 bp, synthetic construct
  misc_feature 1..1140: note = Description of Artificial Sequence: Synthetic coding sequence
  source 1..1140: mol_type = other DNA
atgttttctggcacccctgtgatccggctgcgcttcaagaggctgcagcccacccggctggtggccgagtttgacttccgcacctttgatcctgagggcatcctgctgtttgctgggggccaccaggacagcacctggatcgtgctggccctgcgggccggccgcctggagctgcagctgcgctacaatggagtgggccgggtgaccagcagcggccctgtgatcaaccacggcatgtggcagaccatctctgtggaggagctggccaggaacctggtgatcaaggtgaacagagatgctgtgatgaagattgctgtggccggggacctcttccagcctgagcggggcctgtaccacctgaacctgactgtgggcggcatccccttccacgagaaggacctggtgcagcccatcaacccccggctggatggctgcatgaggtcctggaactggctgaatggagaggacaccaccatccaggagaccgtgaaggtgaacaccaggatgcagtgcttctctgtgacagagcggggcagcttctacccaggcagcggctttgccttctacagcctggactacatgaggacccccctggatgtgggcacagagagcacctgggaggtggaggtggtggcccacatccggcctgctgctgacaccggggtgctgtttgccctgtgggccccagacctgcgggctgtgcccctgtctgtggccctggtggactaccacagcaccaagaagctgaagaagcagctggtggtgctggccgtggagcacacagccctggccctgatggagatcaaggtgtgtgatggccaggagcacgtggtgacagtgtccctgagagatggagaggccaccctggaggtggatggcacccggggccagagcgaggtgtctgctgcccagctgcaggagcggctggccgtgctggagcggcacctgcggagccctgtgctgacctttgctgggggcctgcctgatgtgcctgtgaccagcgcccctgtgacagccttctaccggggctgcatgaccctggaggtgaacagaaggctgctggacctggatgaagctgcctacaagcacagcgacatcacagcccacagctgcccccctgtggagcctgctgctgcctag

SEQ ID NO: 154491 - DNA, 1218 bp, synthetic construct
  misc_feature 1..1218: note = Description of Artificial Sequence: Synthetic coding sequence
  source 1..1218: mol_type = other DNA
atggacacctgtgaggacatcctgccctgtgtgcccttctctgtggccaagtctgtgaagagcctgtacctgggccgcatgttttctggcacccctgtgatccggctgcgcttcaagaggctgcagcccacccggctggtggccgagtttgacttccgcacctttgatcctgagggcatcctgctgtttgctgggggccaccaggacagcacctggatcgtgctggccctgcgggccggccgcctggagctgcagctgcgctacaatggagtgggccgggtgaccagcagcggccctgtgatcaaccacggcatgtggcagaccatctctgtggaggagctggccaggaacctggtgatcaaggtgaacagagatgctgtgatgaagattgctgtggccggggacctcttccagcctgagcggggcctgtaccacctgaacctgactgtgggcggcatccccttccacgagaaggacctggtgcagcccatcaacccccggctggatggctgcatgaggtcctggaactggctgaatggagaggacaccaccatccaggagaccgtgaaggtgaacaccaggatgcagtgcttctctgtgacagagcggggcagcttctacccaggcagcggctttgccttctacagcctggactacatgaggacccccctggatgtgggcacagagagcacctgggaggtggaggtggtggcccacatccggcctgctgctgacaccggggtgctgtttgccctgtgggccccagacctgcgggctgtgcccctgtctgtggccctggtggactaccacagcaccaagaagctgaagaagcagctggtggtgctggccgtggagcacacagccctggccctgatggagatcaaggtgtgtgatggccaggagcacgtggtgacagtgtccctgagagatggagaggccaccctggaggtggatggcacccggggccagagcgaggtgtctgctgcccagctgcaggagcggctggccgtgctggagcggcacctgcggagccctgtgctgacctttgctgggggcctgcctgatgtgcctgtgaccagcgcccctgtgacagccttctaccggggctgcatgaccctggaggtgaacagaaggctgctggacctggatgaagctgcctacaagcacagcgacatcacagcccacagctgcccccctgtggagcctgctgctgcctag

SEQ ID NO: 154492 - DNA, 1431 bp, synthetic construct
  misc_feature 1..1431: note = Description of Artificial Sequence: Synthetic coding sequence
  source 1..1431: mol_type = other DNA
atgtctggggcccgctgcaggaccctgtaccccttctctggagagagacatggccagggcctgcgctttgctgctggggagctgatcaccctgctgcaggtgcctgatggcggctggtgggagggggagaaggaggatggcctgcggggctggttccctgccagctatgtgcagctgctggagaagccaggcatggtgcccccacctcctggagaggagagccagaccgtcatcctgcccccaggctggcagagctacctgagcccccagggccgccgctactacgtgaacaccaccaccaatgagaccacctgggagcggcccagcagcagccctggcatcccagccagccctggcagccacaggagcagcctgccccccaccgtgaatggctaccacgccagcggcaccccagcccaccccccagagacagcccacatgtctgtgaggaagagcactggagacagccagaacctgggcagcagcagccccagcaagaagcagagcaaagaaaacaccatcaccatcaactgtgtgaccttcccccacccagacaccatgcctgagcagcagctgctgaagcccacagagtggagctactgtgactacttctgggccgacaagaaggacccccagggcaatggcaccgtggccggctttgagctgctgctgcagaagcagctgaagggcaagcagatgcagaaggagatgtctgagttcatccgggagcgcatcaagattgaagaagattatgccaagaacctggccaagctgagccagaacagcctggccagccaggaggagggcagcctgggggaggcctgggcccaggtgaagaagagcctggctgatgaggccgaggtgcacctgaagttcagcgccaagctgcacagcgaggtggagaagcccctgatgaacttccgggagaacttcaagaaggacatgaagaagtgtgaccaccacatcgctgacctgaggaagcagctggccagccgctatgcctctgtggagaaggccaggaaggccctgacagagcggcagagggacctggagatgaagacccagcagctggagatcaagctgagcaacaagacagaggaggacatcaagaaggcccggaggaagagcacccaggccggagatgacctgatgagatgtgtggacctgtacaaccaggcccagagcaagtggtttgaggagatggtgaccaccaccctggagctggagcggctggaggtggagcgggtggagatgatccggcagcacctgtgccagtacacccagctgcggcatgaaacagacatgttcaaccagagcacagtggagcctgtggaccagctgctgaggaaggtggaccctgccaaggaccgggagctgtgggtgcgggagcacaagacaggcaacatccggcctgtggacatggagatctag

SEQ ID NO: 154493 - DNA, 1251 bp, synthetic construct
  misc_feature 1..1251: note = Description of Artificial Sequence: Synthetic coding sequence
  source 1..1251: mol_type = other DNA
atgaagccaggcatggtgcccccacctcctggagaggagagccagaccgtcatcctgcccccaggctggcagagctacctgagcccccagggccgccgctactacgtgaacaccaccaccaatgagaccacctgggagcggcccagcagcagccctggcatcccagccagccctggcagccacaggagcagcctgccccccaccgtgaatggctaccacgccagcggcaccccagcccaccccccagagacagcccacatgtctgtgaggaagagcactggagacagccagaacctgggcagcagcagccccagcaagaagcagagcaaagaaaacaccatcaccatcaactgtgtgaccttcccccacccagacaccatgcctgagcagcagctgctgaagcccacagagtggagctactgtgactacttctgggccgacaagaaggacccccagggcaatggcaccgtggccggctttgagctgctgctgcagaagcagctgaagggcaagcagatgcagaaggagatgtctgagttcatccgggagcgcatcaagattgaagaagattatgccaagaacctggccaagctgagccagaacagcctggccagccaggaggagggcagcctgggggaggcctgggcccaggtgaagaagagcctggctgatgaggccgaggtgcacctgaagttcagcgccaagctgcacagcgaggtggagaagcccctgatgaacttccgggagaacttcaagaaggacatgaagaagtgtgaccaccacatcgctgacctgaggaagcagctggccagccgctatgcctctgtggagaaggccaggaaggccctgacagagcggcagagggacctggagatgaagacccagcagctggagatcaagctgagcaacaagacagaggaggacatcaagaaggcccggaggaagagcacccaggccggagatgacctgatgagatgtgtggacctgtacaaccaggcccagagcaagtggtttgaggagatggtgaccaccaccctggagctggagcggctggaggtggagcgggtggagatgatccggcagcacctgtgccagtacacccagctgcggcatgaaacagacatgttcaaccagagcacagtggagcctgtggaccagctgctgaggaaggtggaccctgccaaggaccgggagctgtgggtgcgggagcacaagacaggcaacatccggcctgtggacatggagatctag

SEQ ID NO: 154494 - DNA, 1011 bp, synthetic construct
  misc_feature 1..1011: note = Description of Artificial Sequence: Synthetic coding sequence
  source 1..1011: mol_type = other DNA
atgagcaacatggagaacagctttgatgatgtgtcctgcctgagcccccagaacctgggcagcagcagccccagcaagaagcagagcaaagaaaacaccatcaccatcaactgtgtgaccttcccccacccagacaccatgcctgagcagcagctgctgaagcccacagagtggagctactgtgactacttctgggccgacaagaaggacccccagggcaatggcaccgtggccggctttgagctgctgctgcagaagcagctgaagggcaagcagatgcagaaggagatgtctgagttcatccgggagcgcatcaagattgaagaagattatgccaagaacctggccaagctgagccagaacagcctggccagccaggaggagggcagcctgggggaggcctgggcccaggtgaagaagagcctggctgatgaggccgaggtgcacctgaagttcagcgccaagctgcacagcgaggtggagaagcccctgatgaacttccgggagaacttcaagaaggacatgaagaagtgtgaccaccacatcgctgacctgaggaagcagctggccagccgctatgcctctgtggagaaggccaggaaggccctgacagagcggcagagggacctggagatgaagacccagcagctggagatcaagctgagcaacaagacagaggaggacatcaagaaggcccggaggaagagcacccaggccggagatgacctgatgagatgtgtggacctgtacaaccaggcccagagcaagtggtttgaggagatggtgaccaccaccctggagctggagcggctggaggtggagcgggtggagatgatccggcagcacctgtgccagtacacccagctgcggcatgaaacagacatgttcaaccagagcacagtggagcctgtggaccagctgctgaggaaggtggaccctgccaaggaccgggagctgtgggtgcgggagcacaagacaggcaacatccggcctgtggacatggagatctag

SEQ ID NO: 154495 - DNA, 1248 bp, synthetic construct
  misc_feature 1..1248: note = Description of Artificial Sequence: Synthetic coding sequence
  source 1..1248: mol_type = other DNA
aagccaggcatggtgcccccacctcctggagaggagagccagaccgtcatcctgcccccaggctggcagagctacctgagcccccagggccgccgctactacgtgaacaccaccaccaatgagaccacctgggagcggcccagcagcagccctggcatcccagccagccctggcagccacaggagcagcctgcccccaacagtgaatggctaccacgccagcggcaccccagcccaccccccagagacagcccacatgtctgtgaggaagagcactggagacagccagaacctgggcagcagcagccccagcaagaagcagagcaaggagaacaccatcaccatcaactgtgtgaccttcccccacccagacaccatgcctgagcagcagctgctgaagcccacagagtggagctactgtgactacttctgggccgacaagaaggacccccagggcaatggaacagtggccggctttgagctgctgctgcagaagcagctgaagggcaagcagatgcagaaggagatgtctgagttcatccgggagcgcatcaagattgaggaggactatgccaagaacctggccaagctgagccagaacagcctggccagccaggaggagggcagcctgggggaggcctgggcccaggtgaagaagagcctggctgatgaagctgaggtgcacctgaagttcagcgccaagctgcacagcgaggtggagaagcccctgatgaacttccgggagaacttcaagaaggacatgaagaagtgtgaccaccacatcgctgacctgaggaagcagctggccagccgctatgcctctgtggagaaggccaggaaggccctgacagagcggcagagggacctggagatgaagacccagcagctggagatcaagctgagcaacaagacagaggaggacatcaagaaggcccggaggaagagcacccaggccggagatgacctgatgagatgtgtggacctgtacaaccaggcccagagcaagtggtttgaggagatggtgaccaccaccctggagctggagcggctggaggtggagcgggtggagatgatccggcagcacctgtgccagtacacccagctgcggcatgaaacagacatgttcaaccagagcacagtggagcctgtggaccagctgctgaggaaggtggaccctgccaaggaccgggagctgtgggtgcgggagcacaagacaggcaacatccggcctgtggacatggagatctag

SEQ ID NO: 154496 - DNA, 1251 bp, synthetic construct; identical to SEQ ID NO: 154493
  misc_feature 1..1251: note = Description of Artificial Sequence: Synthetic coding sequence
  source 1..1251: mol_type = other DNA

SEQ ID NO: 154497 - DNA, 546 bp, synthetic construct
  misc_feature 1..546: note = Description of Artificial Sequence: Synthetic coding sequence
  source 1..546: mol_type = other DNA
atggtgcccccacctcctggagaggagagccagaccgtcatcctgcccccaggctggcagagctacctgagcccccagggccgccgctactacgtgaacaccaccaccaatgagaccacctgggagcggcccagcagcagccctggcatcccagccagccctggcagccacaggagcagcctgccccccaccgtgaatggctaccacgccagcggcaccccagcccaccccccagagacagcccacatgtctgtgaggaagagcactggagacagccagaacctgggcagcagcagccccagcaagaagcagagcaaagaaaacaccatcacagagctggagcggctggaggtggagcgggtggagatgatccggcagcacctgtgccagtacacccagctgcggcatgaaacagacatgttcaaccagagcacagtggagcctgtggaccagctgctgaggaaggtggaccctgccaaggaccgggagctgtgggtgcgggagcacaagacaggcaacatccggcctgtggacatggagatctag

SEQ ID NO: 154498 - DNA, 873 bp, synthetic construct
  misc_feature 1..873: note = Description of Artificial Sequence: Synthetic coding sequence
  source 1..873: mol_type = other DNA
atgcctgagcagcagctgctgaagcccacagagtggagctactgtgactacttctgggccgacaagaaggacccccagggcaatggcaccgtggccggctttgagctgctgctgcagaagcagctgaagggcaagcagatgcagaaggagatgtctgagttcatccgggagcgcatcaagattgaagaagattatgccaagaacctggccaagctgagccagaacagcctggccagccaggaggagggcagcctgggggaggcctgggcccaggtgaagaagagcctggctgatgaggccgaggtgcacctgaagttcagcgccaagctgcacagcgaggtggagaagcccctgatgaacttccgggagaacttcaagaaggacatgaagaagtgtgaccaccacatcgctgacctgaggaagcagctggccagccgctatgcctctgtggagaaggccaggaaggccctgacagagcggcagagggacctggagatgaagacccagcagctggagatcaagctgagcaacaagacagaggaggacatcaagaaggcccggaggaagagcacccaggccggagatgacctgatgagatgtgtggacctgtacaaccaggcccagagcaagtggtttgaggagatggtgaccaccaccctggagctggagcggctggaggtggagcgggtggagatgatccggcagcacctgtgccagtacacccagctgcggcatgaaacagacatgttcaaccagagcacagtggagcctgtggaccagctgctgaggaaggtggaccctgccaaggaccgggagctgtgggtgcgggagcacaagacaggcaacatccggcctgtggacatggagatctag

SEQ ID NO: 154499 - DNA, 378 bp, synthetic construct
  misc_feature 1..378: note = Description of Artificial Sequence: Synthetic coding sequence
  source 1..378: mol_type = other DNA
atgaagacccagcagctggagatcaagctgagcaacaagacagaggaggacatcaagaaggcccggaggaagagcacccaggccggagatgacctgatgagatgtgtggacctgtacaaccaggcccagagcaagtggtttgaggagatggtgaccaccaccctggagctggagcggctggaggtggagcgggtggagatgatccggcagcacctgtgccagtacacccagctgcggcatgaaacagacatgttcaaccagagcacagtggagcctgtggaccagctgctgaggaaggtggaccctgccaaggaccgggagctgtgggtgcgggagcacaagacaggcaacatccggcctgtggacatggagatctag

SEQ ID NO: 154500 - DNA, 1011 bp, synthetic construct; identical to SEQ ID NO: 154494
  misc_feature 1..1011: note = Description of Artificial Sequence: Synthetic coding sequence
  source 1..1011: mol_type = other DNA

SEQ ID NO: 154501 - DNA, 1437 bp, synthetic construct
  misc_feature 1..1437: note = Description of Artificial Sequence: Synthetic coding sequence
  source 1..1437: mol_type = other DNA
atggcccccaagaagaagggcaagaagggcaaggccaagggcacccccatcgtggatggcctggcccctgaggacatgagcaaggagcaggtggaggagcacgtgagccgcatccgggaggagctggaccgggagcgggaggagaggaactacttccagctggagcgggacaagatccacaccttctgggagatcacccggcggcagctggaggagaagaaggccgagctgaggaacaaggaccgggagatggaggaggccgaggagcggcaccaggtggagatcaaggtgtacaagcagaaggtgaagcacctgctgtatgagcaccagaacaacctgacagagatgaaggccgagggcaccgtggtgatgaagctggcccagaaggagcaccgcatccaggagagcgtgctgaggaaggacatgagggccctgaaggtggagctgaaggagcaggagctggccagcgaggtggtggtgaagaacctgcggctgaagcacacagaggagatcaccaggatgagaaatgactttgagcggcaggtgcgggagattgaggccaagtatgacaagaagatgaagatgctgagagatgagctggacctgcggaggaagacagagctgcacgaggtggaggagaggaagaatggccagatccacaccctgatgcagagacatgaggaggccttcacagacatcaagaactactacaatgacatcaccctgaacaacctggccctgatcaacagcctgaaggagcagatggaggacatgaggaagaaggaggaccacctggagcgggagatggccgaggtgtctggccagaacaagaggctggccgaccccctgcagaaggcccgggaggagatgtctgagatgcagaagcagctggccaactatgaaagagacaagcagatcctgctgtgcaccaaggcccggctgaaggtgcgggagaaggagctgaaggacctgcagtgggagcacgaggtgctggagcagcgcttcaccaaggtgcagcaggagagagatgagctgtacaggaagttcaccgctgccatccaggaggtgcagcagaagacaggcttcaagaacctggtgctggagaggaagctgcaggccctgtctgctgctgtggagaagaaggaggtgcagttcaatgaggtgctggccgccagcaacctggaccctgctgccctgaccctggtgtccaggaagctggaggatgtgctggagagcaagaacagcaccatcaaggacctgcagtatgagctggcccaggtgtgcaaggcccacaatgacctgctgcggacctatgaggccaagctgctggccttcggcatccccctggacaacgtgggcttcaagcccctggagacagctgtgattggccagaccctgggccagggccctgctggcctggtgggcacccccacctag

SEQ ID NO: 154502 - DNA, 1362 bp, synthetic construct
  misc_feature 1..1362: note = Description of Artificial Sequence: Synthetic coding sequence
  source 1..1362: mol_type = other DNA
atgagcaaggagcaggtggaggagcacgtgagccgcatccgggaggagctggaccgggagcgggaggagaggaactacttccagctggagcgggacaagatccacaccttctgggagatcacccggcggcagctggaggagaagaaggccgagctgaggaacaaggaccgggagatggaggaggccgaggagcggcaccaggtggagatcaaggtgtacaagcagaaggtgaagcacctgctgtatgagcaccagaacaacctgacagagatgaaggccgagggcaccgtggtgatgaagctggcccagaaggagcaccgcatccaggagagcgtgctgaggaaggacatgagggccctgaaggtggagctgaaggagcaggagctggccagcgaggtggtggtgaagaacctgcggctgaagcacacagaggagatcaccaggatgagaaatgactttgagcggcaggtgcgggagattgaggccaagtatgacaagaagatgaagatgctgagagatgagctggacctgcggaggaagacagagctgcacgaggtggaggagaggaagaatggccagatccacaccctgatgcagagacatgaggaggccttcacagacatcaagaactactacaatgacatcaccctgaacaacctggccctgatcaacagcctgaaggagcagatggaggacatgaggaagaaggaggaccacctggagcgggagatggccgaggtgtctggccagaacaagaggctggccgaccccctgcagaaggcccgggaggagatgtctgagatgcagaagcagctggccaactatgagcgggacaagcagatcctgctgtgcaccaaggcccggctgaaggtgcgggagaaggagctgaaggacctgcagtgggagcacgaggtgctggagcagcgcttcaccaaggtgcagcaggagagagatgagctgtacaggaagttcaccgctgccatccaggaggtgcagcagaagacaggcttcaagaacctggtgctggagaggaagctgcaggccctgtctgctgctgtggagaagaaggaggtgcagttcaatgaggtgctggccgccagcaacctggaccctgctgccctgaccctggtgtccaggaagctggaggatgtgctggagagcaagaacagcaccatcaaggacctgcagtatgagctggcccaggtgtgcaaggcccacaatgacctgctgcggacctatgaggccaagctgctggccttcggcatccccctggacaacgtgggcttcaagcccctggagacagctgtgattggccagaccctgggccagggccctgctggcctggtgggcacccccacctag

SEQ ID NO: 154503 - DNA, 525 bp, synthetic construct
  misc_feature 1..525: note = Description of Artificial Sequence: Synthetic coding sequence
  source 1..525: mol_type = other DNA
atggcccccaagaagaagggcaagaagggcaaggccaagggcacccccatcgtggatggcctggcccctgaggacatgagcaaggagcaggtggaggagcacgtgagccgcatccgggaggagctggaccgggagcgggaggagaggaactacttccagctggagcgggacaagatccacaccttctgggagatcacccggcggcagctggaggagaagaaggccgagctgaggaacaaggaccgggagatggaggaggccgaggagcggcaccaggtggagatcaaggtgtacaagcagaaggtgaagcacctgctgtatgagcaccagaacaacctgacagagatgaaggccgagggcaccgtggtgatgaagctggcccagaaggagcaccgcatccaggagagcgtgctgaggaaggacatgagggccctgaaggtggagctgaaggagcaggagctggccagcgaggtggtggtgaagaacctgcggctgaagctgcggcccagcatgatcagaagatag

SEQ ID NO: 154504 - DNA, 1149 bp, synthetic construct
  misc_feature 1..1149: note = Description of Artificial Sequence: Synthetic coding sequence
  source 1..1149: mol_type = other DNA
atggtggaggagcacgtgagccgcatccgggaggagctggaccgggagcgggaggagaggaactacttccagctggagcgggacaagatccacaccttctgggagatcacccggcggcagctggaggagaagaaggccgagctgaggaacaaggaccgggagatggaggaggccgaggagcggcaccaggtggagatcaaggtgtacaagcagaaggtgaagcacctgctgtatgagcaccagaacaacctgacagagatgaaggccgagggcaccgtggtgatgaagctggcccagaaggagcaccgcatccaggagagcgtgctgaggaaggacatgagggccctgaaggtggagctgaaggagcaggagctggccagcgaggtggtggtgaagaacctgcggctgaagcacacagaggagatcaccaggatgagaaatgactttgagcggcaggtgcgggagattgaggccaagtatgacaagaagatgaagatgctgagagatgagctggacctgcggaggaagacagagctgcacgaggtggaggagaggaagaatggccagatccacaccctgatgcagagacatgaggaggccttcacagacatcaagaactactacaatgacatcaccctgaacaacctggccctgatcaacagcctgaaggagcagatggaggacatgaggaagaaggaggaccacctggagcgggagatggccgaggtgtctggccagaacaagaggctggccgaccccctgcagaaggcccgggaggagatgtctgagatgcagaagcagctggccaactatgagcgggacaagcagatcctgctgtgcaccaaggcccggctgaaggtgcgggagaaggagctgaaggacctgcagtgggagcacgaggtgctggagcagcgcttcaccaaggtgcagcaggagagagatgagctgtacaggaagttcaccgctgccatccaggaggtgcagcagaagacaggcttcaagaacctggtgctggagaggaagctgcaggccctgtctgctgctgtggagaagaaggaggtgcagttcaatgaggtgctggccgccagcaacctggaccctgctgccctgaccctggtgtccaggaagctggagaccttcttctgctag

SEQ ID NO: 154505 - DNA, 717 bp, synthetic construct
  misc_feature 1..717: note = Description of Artificial Sequence: Synthetic coding sequence
  source 1..717: mol_type = other DNA
atgctgtgctgcatgaggaggaccaagcaggtggagaagaatgatgatgaccagaagattgagcaggacggcatcaagccagaggacaaggcccacaaggccgccaccaagatccaggccagcttccggggccacatcaccaggaagaagctgaagggggagaagaaggatgatgtgcaggccgctgaggccgaggccaacaagaaggatgaggcccctgtggctgatggagtggagaagaagggggagggcaccaccacagctgaggccgccccagccaccggcagcaagccagatgagcccgggaaggccggggagaccccatctgaggagaagaagggggagggagatgctgccacagagcaggccgccccccaggccccagccagcagcgaggagaaggccggcagcgctgagacagagagcgccaccaaggccagcacagacaacagccccagcagcaaggcagaagatgccccagccaaggaggagcccaagcaggctgatgtgcctgctgctgtgacagctgctgctgccaccaccccagctgctgaagatgctgctgccaaggccacagcccagcccccaacagaaacaggagagagcagccaggccgaggagaacattgaagctgtggatgagaccaagcccaaggagagcgcccggcaggatgagggcaaggaggaggagcctgaggccgaccaggagcacgcctag

SEQ ID NO: 154506 - DNA, 825 bp, synthetic construct
  misc_feature 1..825: note = Description of Artificial Sequence: Synthetic coding sequence
  source 1..825: mol_type = other DNA
atgaccaagagctgcagcgagctgtgccacccagccctgcacttcctgccctgcctgggcggcctgaggaagaacctgcagagagctgtgcggcccagcccctacagcctgggcttcctgaccttctggatcagccgggtggagaagaatgatgatgaccagaagattgagcaggacggcatcaagccagaggacaaggcccacaaggccgccaccaagatccaggccagcttccggggccacatcaccaggaagaagctgaagggggagaagaaggatgatgtgcaggccgctgaggccgaggccaacaagaaggatgaggcccctgtggctgatggagtggagaagaagggggagggcaccaccacagctgaggccgccccagccaccggcagcaagccagatgagcccgggaaggccggggagaccccatctgaggagaagaagggggagggagatgctgccacagagcaggccgccccccaggccccagccagcagcgaggagaaggccggcagcgctgagacagagagcgccaccaaggccagcacagacaacagccccagcagcaaggcagaagatgccccagccaaggaggagcccaagcaggctgatgtgcctgctgctgtgacagctgctgctgccaccaccccagctgctgaagatgctgctgccaaggccacagcccagcccccaacagaaacaggagagagcagccaggccgaggagaacattgaagctgtggatgagaccaagcccaaggagagcgcccggcaggatgagggcaaggaggaggagcctgaggccgaccaggagcacgcctag

SEQ ID NO: 154507 - DNA, 1119 bp, synthetic construct
  misc_feature 1..1119: note = Description of Artificial Sequence: Synthetic coding sequence
  source 1..1119: mol_type = other DNA
atgcccccaccccagcagggcccctgtggccaccacctgctgctgctgctggccctgctgctgcccagcctgcccctgacccgggcccctgtgcccccaggccctgctgctgccctgctgcaggccctgggcctgagagatgagccccagggcgccccccggctgcggcctgtgccccctgtgatgtggaggctcttcagaagaagagacccccaggagaccaggagcggcagcaggaggaccagccctggggtgaccctgcagccctgccacgtggaggagctgggcgtggccggcaacatcgtgcgccacatcccagacagaggagcccccacccgggccagcgagcccgccagcgctgctggccactgcccagagtggacagtggtgtttgacctgtctgctgtggagcctgctgagcggcccagccgggcccggctggagctgcgctttgctgctgctgctgctgctgcccctgagggcggctgggagctgtctgtggcccaggccggccagggcgctggagctgaccccggccctgtgctgctgcggcagctggtgcctgccctgggcccccctgtgcgggcagagctgctgggcgccgcctgggccagaaatgcctcctggcccaggagcctgcggctggccctggccctgcggccccgggccccagctgcctgtgcccggctggccgaggccagcctgctgctggtgaccctggacccccggctgtgccaccccctggcccggcccaggagagatgctgagcctgtgctgggcggcggccctggaggagcctgccgggcccggcggctgtatgtgtccttccgggaggtgggctggcaccgctgggtgattgccccccggggcttcctggccaactactgccagggccagtgtgccctgcctgtggccctgagcggcagcggcggccccccagccctgaaccacgctgtgctgcgggccctgatgcacgccgccgcccctggagctgctgacctgccctgctgcgtgcctgcccggctgagccccatctctgtgctcttctttgacaacagcgacaacgtggtgctgcggcagtatgaggacatggtggtggatgaatgtggctgcaggtag

SEQ ID NO: 154508 - DNA, 1224 bp, synthetic construct
  misc_feature 1..1224: note = Description of Artificial Sequence: Synthetic coding sequence
  source 1..1224: mol_type = other DNA
atggtgctggccgcccccctgctgctgggcttcctgctgctggccctggagctgcggcccagaggagaggccgctgagggccctgctgctgctgctgctgctgctgctgctgctgctgctgctggggtgggcggggagaggagcagcaggcctgcccccagcgtggcccctgagccagatggctgccctgtgtgtgtgtggaggcagcacagccgggagctgcggctggagagcatcaagagccagatcctgagcaagctgcggctgaaggaggcccccaacatcagccgggaggtggtgaagcagctgctgcccaaggccccacccctgcagcagatcctggacctgcatgacttccagggagatgccctgcagcctgaggacttcctggaggaggatgagtaccacgccaccacagaaacagtcatctccatggcccaggagacagatcctgctgtgcagacagatggcagccccctgtgctgccacttccacttcagccccaaggtgatgttcaccaaggtgctgaaggcccagctgtgggtgtacctgcggcctgtgcccaggcctgccaccgtgtacctgcagatcctgcggctgaagcccctgaccggggagggcacagctgggggcggcggcggcggccgccgccacatccgcatccgcagcctgaagattgagctgcacagccgcagcggccactggcagagcattgacttcaagcaggtgctgcacagctggttccggcagccccagagcaactggggcatcgagatcaatgcctttgaccccagcggcacagacctggccgtgaccagcctgggccctggagctgagggcctgcaccccttcatggagctgcgggtgctggagaacaccaagaggagcagaagaaacctgggcctggactgtgatgagcacagcagcgagagccgctgctgccgctaccccctgactgtggactttgaggccttcggctgggactggatcatcgcccccaagcgctacaaggccaactactgcagcggccagtgtgagtacatgttcatgcagaagtacccccacacccacctggtgcagcaggccaacccccggggcagcgctggcccctgctgcacccccaccaagatgagccccatcaacatgctgtacttcaatgacaagcagcagatcatctacggcaagatccctggcatggtggtggacagatgtggctgcagctag

SEQ ID NO: 154509 - DNA, 1143 bp, synthetic construct
  misc_feature 1..1143: note = Description of Artificial Sequence: Synthetic coding sequence
  source 1..1143: mol_type = other DNA
tgagctgctgctgctgctgctgctgctgctgctgctgctgctggggtgggcggggagaggagcagcaggcctgcccccagcgtggcccctgagccagatggctgccctgtgtgtgtgtggaggcagcacagccgggagctgcggctggagagcatcaagagccagatcctgagcaagctgcggctgaaggaggcccccaacatcagccgggaggtggtgaagcagctgctgcccaaggccccacccctgcagcagatcctggacctgcatgacttccagggagatgccctgcagcctgaggacttcctggaggaggatgagtaccacgccaccacagagaccgtcatctccatggcccaggagacagatcctgctgtgcagacagatggcagccccctgtgctgccacttccacttcagccccaaggtgatgttcaccaaggtgctgaaggcccagctgtgggtgtacctgcggcctgtgcccaggcctgccaccgtgtacctgcagatcctgcggctgaagcccctgactggagagggcacagctgggggcggcggcggcggcagaagacacatccgcatccgcagcctgaagattgagctgcacagccgcagcggccactggcagagcattgacttcaagcaggtgctgcacagctggttccggcagccccagagcaactggggcatcgagatcaatgcctttgaccccagcggcacagacctggccgtgaccagcctgggccctggagctgagggcctgcaccccttcatggagctgcgggtgctggagaacaccaagaggagcagaagaaacctgggcctggactgtgatgagcacagcagcgagagccgctgctgccgctaccccctgactgtggactttgaggccttcggctgggactggatcatcgcccccaagcgctacaaggccaactactgcagcggccagtgtgagtacatgttcatgcagaagtacccccacacccacctggtgcagcaggccaacccccggggcagcgctggcccctgctgcacccccaccaagatgagccccatcaacatgctgtacttcaatgacaagcagcagatcatctacggcaagatccctggcatggtggtggacagatgtggctgcagctag

SEQ ID NO: 154510 - DNA, 927 bp, synthetic construct
  misc_feature 1..927: note = Description of Artificial Sequence: Synthetic coding sequence
  source 1..927: mol_type = other DNA
atgcctggccaggagctgaggacagtgaatggcagccagatgctgctggtgctgctggtgctgtcctggctgccccacggcggggccctgagcctggccgaggccagccgggccagcttccctggccccagcgagctgcacagcgaggacagccgcttccgggagctgaggaagagatatgaggacctgctgacccggctgcgggccaaccagagctgggaggacagcaacacagacctggtgcctgccccagctgtgcgcatcctgaccccagaggtgcggctgggcagcggcggccacctgcacctgcgcatcagccgggccgccctgcctgagggcctgcctgaggccagccggctgcaccgggccctcttccggctgagccccacagccagccgctcctgggatgtgacccggcccctgcggcggcagctgagcctggcccggccccaggccccagccctgcacctgcggctgagccccccacccagccagagcgaccagctgctggccgagagcagcagcgcccggccccagctggagctgcacctgcggccccaggccgcccggggcagaagaagagcccgggccagaaatggagaccactgccccctgggccctggccgctgctgccgcctgcacacagtgcgggccagcctggaggacctgggctgggccgactgggtgctgagcccccgggaggtgcaggtgaccatgtgcattggagcctgccccagccagttccgggccgccaacatgcacgcccagatcaagaccagcctgcaccggctgaagccagacacagtgcctgccccctgctgcgtgcctgccagctacaaccccatggtgctgatccagaagacagacaccggggtgtccctgcagacctatgatgacctgctggccaaggactgccactgcatctag

SEQ ID NO: 154511 - DNA, 927 bp, synthetic construct; identical to SEQ ID NO: 154510
  misc_feature 1..927: note = Description of Artificial Sequence: Synthetic coding sequence
  source 1..927: mol_type = other DNA

SEQ ID NO: 154512 - DNA, 1290 bp, synthetic construct
  misc_feature 1..1290: note = Description of Artificial Sequence: Synthetic coding sequence
  source 1..1290: mol_type = other DNA
atgtgccctggggccctgtgggtggccctgcccctgctgagcctgctggccggcagcctgcagggcaagcccctgcagagctggggccggggcagcgctggaggaaatgcccacagccccctgggcgtgcctgggggcggcctgcctgagcacaccttcaacctgaagatgttcctggagaatgtgaaggtggacttcctgcggagcctgaacctgtctggagtgcccagccaggacaagaccagggtggagcccccccagtacatgattgacctgtacaaccgctacaccagtgacaagagcaccaccccagccagcaacatcgtgcgctccttctccatggaggatgccatcagcatcacagccacagaggacttccccttccagaagcacatcctgctcttcaacatcagcatccccaggcatgagcagatcaccagggctgagctgcggctgtatgtgtcctgccagaaccacgtggaccccagccatgacctgaagggctctgtggtgatctatgatgtgctggatggaacagatgcctgggacagcgccacagagaccaagaccttcctggtgtcccaggacatccaggatgagggctgggagaccctggaggtgtcctctgctgtgaagcgctgggtgcggagtgacagcaccaagagcaagaacaagctggaggtgacagtggagagccacaggaagggctgtgacaccctggacatctctgtgcccccaggcagcaggaacctgcccttctttgtggtgttcagcaatgaccacagcagcggcaccaaggagacccggctggagctgcgggagatgatcagccatgagcaggagagcgtgctgaagaagctgagcaaggatggcagcacagaagctggggagagcagccatgaggaggacacagatggccacgtggccgccggcagcaccctggcccggaggaagaggtctgctggagctggcagccactgccagaagaccagcctgcgggtgaactttgaagatattggctgggacagctggatcatcgcccccaaggagtatgaggcctatgaatgtaaaggaggctgcttcttccccctggctgatgatgtgacccccaccaagcacgccatcgtgcagaccctggtgcacctgaagttccccaccaaggtgggcaaggcctgctgcgtgcccaccaagctgagccccatctctgtgctgtacaaggatgacatgggcgtgcccaccctgaagtaccactatgagggcatgtctgtggctgaatgtggctgcaggtag

SEQ ID NO: 154513 - DNA, 1095 bp, synthetic construct
  misc_feature 1..1095: note = Description of Artificial Sequence: Synthetic coding sequence
  source 1..1095: mol_type = other DNA
atgctgcgcttcctgcctgacctggccttctccttcctgctgatcctggccctgggccaggccgtgcagttccaggagtatgtgttcctgcagttcctgggcctggacaaggcccccagcccccagaagttccagcctgtgccctacatcctgaagaagatcttccaggaccgggaggccgccgccaccaccggggtgtcccgggacctgtgctacgtgaaggagctgggcgtgagaggaaatgtgctgcgcttcctgcctgaccagggcttcttcctgtaccccaagaagatcagccaggccagcagctgcctgcagaagctgctgtacttcaacctgagcgccatcaaggagcgggagcagctgaccctggcccagctgggcctggacctgggccccaacagctactacaacctgggccctgagctggagctggccctcttcctggtgcaggagccccacgtgtggggccagaccacccccaagccaggcaagatgtttgtgctgcggtctgtgccctggccccagggcgctgtgcacttcaacctgctggatgtggccaaggactggaatgacaaccccaggaagaactttggcctcttcctggagatcctggtgaaggaggaccgggacagcggcgtgaacttccagcctgaggacacctgtgcccggctgcgctgcagcctgcacgccagcctgctggtggtgaccctgaacccagaccagtgccaccccagcaggaagagaagagctgccatccctgtgcccaagctgagctgcaagaacctgtgccaccgccaccagctgttcatcaacttccgggacctgggctggcacaagtggatcatcgcccccaagggcttcatggccaactactgccacggggagtgccccttcagcctgaccatcagcctgaacagcagcaactatgccttcatgcaggccctgatgcatgctgtggaccctgagatcccccaggccgtgtgcatccccaccaagctgagccccatctccatgctgtaccaggacaacaatgacaacgtcatcctgcggcactatgaggacatggtggtggatgaatgtggctgcggctag

SEQ ID NO: 154514 - DNA, 1506 bp, synthetic construct
  misc_feature 1..1506: note = Description of Artificial Sequence: Synthetic coding sequence
  source 1..1506: mol_type = other DNA
atgaggctgcccaagctgctgaccttcctgctgtggtacctggcctggctggacctggagttcatctgcaccgtgctgggcgccccagacctgggccagaggccccagggcacccggcccggcctggccaaggccgaggccaaggagaggcctcccctggccagaaatgtgttccggcctgggggccacagctatggaggaggagccaccaatgccaatgcccgggccaagggcggcaccggccagacaggaggcctgacccagcccaagaaggatgagcccaagaagctgccccccaggcctgggggccctgagcccaagccaggccaccccccccagacccggcaggccacagccaggacagtgacccccaagggccagctgcccggcggcaaggccccacccaaggccggctctgtgcccagcagcttcctgctgaagaaggcccgggagcccggccccccccgggagcccaaggagcccttccggcccccacccatcacccctcatgagtacatgctgagcctgtaccgcaccctgagtgatgctgacaggaagggcggcaacagctctgtgaagctggaggccggcctggccaacaccatcaccagcttcatcgacaagggccaggatgaccggggccctgtggtgaggaagcagcgctacgtgtttgacatcagcgccctggagaaggatggcctgctgggcgctgagctgcgcatcctgaggaagaagcccagcgacacagccaagccagctgcccctgggggcggccgggccgcccagctgaagctgagcagctgccccagcggccggcagcctgccagcctgctggatgtgcgctctgtgcccggcctggatggcagcggctgggaggtgtttgacatctggaagctgttcaggaacttcaagaacagcgcccagctgtgcctggagctggaggcctgggagcggggccgggctgtggacctgcggggcctgggctttgaccgggccgcccggcaggtgcatgagaaggccctcttcctggtgtttggaagaaccaagaagagggacctcttcttcaatgagatcaaggcccggagcggccaggatgacaagacagtgtatgagtacctgttcagccagaggaggaagaggcgggcccccctggccacccggcagggcaagaggcccagcaagaacctgaaggcccgctgcagcaggaaggccctgcacgtgaacttcaaggacatgggctgggatgactggatcatcgcccccctggagtatgaggccttccactgtgagggcctgtgtgagttccccctgcggagccacctggagcccaccaaccacgctgtgatccagaccctgatgaacagcatggaccctgagagcaccccacccacctgctgcgtgcccacccggctgagccccatcagcatcctcttcattgattctgccaacaacgtggtgtacaagcagtatgaggacatggtggtggagagctgtggctgcaggtag

SEQ ID NO: 154515 - DNA, 1506 bp, synthetic construct; identical to SEQ ID NO: 154514
  misc_feature 1..1506: note = Description of Artificial Sequence: Synthetic coding sequence
  source 1..1506: mol_type = other DNA

SEQ ID NO: 154516 - DNA, 1368 bp, synthetic construct
  misc_feature 1..1368: note = Description of Artificial Sequence: Synthetic coding sequence
  source 1..1368: mol_type = other DNA
atggacaccccccgggtgctgctgtctgctgtgttcctgatctccttcctgtgggacctgcccggcttccagcaggccagcatcagcagcagcagcagcagcgctgagctgggcagcaccaagggcatgaggagcaggaaggagggcaagatgcagagggccccccgggacagtgatgctggccgggagggccaggagccccagccccggccccaggatgagccccgggcccagcagccccgggcccaggagcccccaggccggggcccccgggtggtgccccatgagtacatgctgagcatctaccgcacctacagcattgctgagaagctgggcatcaatgccagcttcttccagagcagcaagagcgccaacaccatcaccagctttgtggaccggggcctggatgacctgagccacacccccctgcggcggcagaagtacctgtttgatgtgtccatgctgagtgacaaggaggagctggtgggcgctgagctgcggctcttccggcaggcccccagcgccccctggggccccccagctggccccctgcacgtgcagctgttcccctgcctgagccccctgctgctggatgcccggaccctggacccccagggcgcccccccagctggctgggaggtgtttgatgtgtggcagggcctgcggcaccagccctggaagcagctgtgcctggagctgcgggccgcctggggcgagctggatgctggggaggccgaggcccgggcccggggcccccagcagcccccacctccagacctgcggagcctgggctttggaagaagagtgcggcccccccaggagcgggccctgctggtggtgttcaccaggagccagaggaagaacctgtttgctgagatgagggagcagctgggcagcgctgaggccgccggccctggagctggagctgagggctcctggcccccaccttctggggccccagatgcccggccctggctgcccagccctggaagaagaagaagaagaacagcctttgccagccgccacggcaagagacatggcaagaagagccggctgcgctgcagcaagaagcccctgcacgtgaacttcaaggagctgggctgggatgactggatcatcgcccccctggagtatgaggcctaccactgtgaaggagtgtgtgacttccccctgcggagccacctggagcccaccaaccacgccatcatccagaccctgatgaacagcatggaccccggcagcaccccacccagctgctgcgtgcccaccaagctgacccccatcagcatcctgtacattgatgctggcaacaacgtggtgtacaagcagtatgaggacatggtggtggagagctgtggctgcaggtag

SEQ ID NO: 154517 - DNA, 1062 bp, synthetic construct
  misc_feature 1..1062: note = Description of Artificial Sequence: Synthetic coding sequence
  source 1..1062: mol_type = other DNA
atggacaccccccgggtgctgctgtctgctgtgttcctgatctccttcctgtgggacctgcccggcttccagcaggccagcatcagcagcagcagcagcagcgctgagctgggcagcaccaagggcatgaggagcaggaaggagggcaagatgcagagggccccccgggacagtgatgctggccgggagggccaggagccccagccccggccccaggatgagccccgggcccagcagccccgggcccaggagcccccaggccggggcccccgggtggtgccccatgagtacatgctgagcatctaccgcacctacagcattgctgagaagctgggcatcaatgccagcttcttccagagcagcaagagcgccaacaccatcaccagctttgtggaccggggcctggatgacctgagccacacccccctgcggcggcagaagtacctgtttgatgtgtccatgctgagtgacaaggaggagctggtgggcgctgagctgcggctcttccggcaggcccccagcgccccctggggccccccagctggccccctgcacgtgcagctgttcccctgcctgagccccctgctgctggatgcccggaccctggacccccagggcgcccccccagctggctgggaggtgtttgatgtgtggcagggcctgcggcaccagccctggaagcagctgtgcctggagctgcgggccgcctggggcgagctggatgctggggaggccgaggcccgggcccggggcccccagcagcccccacctccagacctgcggagcctgggctttggaagaagagtgcggcccccccaggagcgggccctgctggtggtgttcaccaggagccagaggaagaacctgtttgcccctggggtgcggggcctgagcctgcggggctgcatgaggctgcctgctgccctggcccctggggcccaccagcccaggcaccacccagatgctgatgagctgcacggcccccggctgcacccagcccagctgctgcgggcccaccagattgacagccaccagcacagcatccaccggcggggccagtag

SEQ ID NO: 154518 - DNA, 816 bp, synthetic construct
  misc_feature 1..816: note = Description of Artificial Sequence: Synthetic coding sequence
  source 1..816: mol_type = other DNA
atggacaccccccgggtgctgctgtctgctgtgttcctgatctccttcctgtgggacctgcccggcttccagcaggccagcatcagcagcagcagcagcagcgctgagctgggcagcaccaagggcatgaggagcaggaaggagggcaagatgcagagggccccccgggacagtgatgctggccgggagggccaggagccccagccccggccccaggatgagccccgggcccagcagccccgggcccaggagcccccaggccggggcccccgggtggtgccccatgagtacatgctgagcatctaccgcacctacagcattgctgagaagctgggcatcaatgccagcttcttccagagcagcaagagcgccaacaccatcaccagctttgtggaccggggcctggatgacctgagccacacccccctgcggcggcagaagtacctgtttgatgtgtccatgctgagtgacaaggaggagctggtgggcgctgagctgcggctcttccggcaggcccccagcgccccctggggccccccagctggccccctgcacgtgcagctgttcccctgcctgagccccctgctgctggatgcccggaccctggacccccagggcgcccccccagctggctgggaggtgtttgatgtgtggcagggcctgcggcaccagccctggaagcagctgtgcctggagctgcgggccgcccctggccctgctgagagcggcctgcggcctgagggcgccgccagccctggggccggccctgctgggggcatccaccagatcccagctgctgcctgcccccccaactag

SEQ ID NO: 154519 - DNA, 1353 bp, synthetic construct
  misc_feature 1..1353: note = Description of Artificial Sequence: Synthetic coding sequence
  source 1..1353: mol_type = other DNA
atggacctgtctgctgctgctgccctgtgcctgtggctgctgagcgcctgccggcccagagatggcctggaggccgctgctgtgctgcgggccgccggggccggccctgtgcgcagccctgggggcggcggcggcggcggcggcggcggccgcaccctggcccaggccgccggggctgctgctgtgcctgctgctgctgtgccccgggcccgggccgcccggcgggctgctggcagcggcttcagaaatggatctgtggtgccccaccacttcatgatgagcctgtaccgcagcctggccggccgggccccagctggagctgctgctgtgtctgccagcggccacggccgggctgacaccatcaccggcttcacagaccaggccacccaggatgaatctgctgctgagaccggccagagcttcctgtttgatgtgagcagcctgaatgatgctgatgaggtggtgggcgctgagctgcgggtgctgcggcggggcagccctgagagcggccctggctcctggaccagcccccccctgctgctgctgagcacctgccctggggccgcccgggccccccggctgctgtacagcagagctgctgagcccctggtgggccagcgctgggaggcctttgatgtggctgatgccatgaggaggcacagaagagagccccggcccccccgggccttctgcctgctgctgcgggctgtggccggccctgtgcccagccccctggccctgcggcggctgggcttcggctggccaggcggcggcggcagcgctgctgaggagagagctgtgctggtggtgagcagcaggacccagaggaaggagagcctcttccgggagatccgggcccaggcccgggccctgggcgccgccctggccagcgagcccctgcctgaccccggcactggaacagccagcccccgggccgtcatcggcggcagaagaagaagaagaacagccctggccggcaccaggacagcccagggcagcggcggcggggccggccggggccatggaagaagaggccgcagccgctgcagcaggaagcccctgcacgtggacttcaaggagctgggctgggatgactggatcatcgcccccctggactatgaggcctaccactgtgagggcctgtgtgacttccccctgcggagccacctggagcccaccaaccacgccatcatccagaccctgctgaacagcatggccccagatgctgccccagccagctgctgcgtgcctgcccggctgagccccatcagcatcctgtacattgatgctgccaacaacgtggtgtacaagcagtatgaggacatggtggtggaggcctgtggctgcaggtag

SEQ ID NO: 154520 - DNA, 1269 bp, synthetic construct
  misc_feature 1..1269: note = Description of Artificial Sequence: Synthetic coding sequence
  source 1..1269: mol_type = other DNA
atgcccaggagcttcctggtgaagagcaagaaggcccacagctaccaccagcccaggagccctggccctgactacagcctgcggctggagaatgtgcctgcccccagcagagctgacagcaccagcaatgctgggggcgccaaggccgagccccgggaccggctgagccctgagagccagctgacagaggccccagaccgggccagcgccagcccagacagctgtgagggctctgtgtgtgagaggagcagcgagtttgaggacttctggaggcctcccagccccagcgccagccctgccagcgagaagtccatgtgccccagcctggatgaggcccagcccttccccctgcccttcaagccctacagctggagcggcctggccggcagtgacctgcggcacctggtgcagagctaccggccctgtggggccctggagagaggagctggcctgggcctcttctgtgagcccgcccctgagcccggccaccctgctgccctgtatggccccaagagagctgctgggggcgctggggccggggcccctggcagctgcagcgctggagctggggccacagctggccctggcctgggcctgtatggagactttggatctgctgctgctggcctgtatgagcggcccacagctgctgctggcctgctgtacccagagcggggccacggcctgcatgctgacaagggagctggggtgaaggtggagagcgagctgctgtgcacccggctgctgctgggcggcggcagctacaagtgcatcaagtgcagcaaggtgttcagcaccccccacggcctggaggtgcacgtgagaagaagccacagcggcacccggccctttgcctgtgagatgtgtgggaagacctttggacatgctgtgtccctggagcagcacaaggctgtgcacagccaggagaggagctttgactgcaagatctgtgggaagagcttcaagaggagcagcaccctgagcacccacctgctgatccacagcgacacccggccctacccctgccagtactgcggcaagcgcttccaccagaagagtgacatgaagaagcacaccttcatccacactggagagaagccccacaagtgccaggtgtgtgggaaggccttcagccagagcagcaacctgatcacccacagcaggaagcacacaggcttcaagcccttcggctgtgacctgtgtgggaagggcttccagaggaaggtggacctgcggcggcaccgggagacccagcacggcctgaagtag

SEQ ID NO: 154521 - DNA, 1269 bp, synthetic construct; identical to SEQ ID NO: 154520
  misc_feature 1..1269: note = Description of Artificial Sequence: Synthetic coding sequence
  source 1..1269: mol_type = other DNA

SEQ ID NO: 154522 - DNA, 1269 bp, synthetic construct; identical to SEQ ID NO: 154520
  misc_feature 1..1269: note = Description of Artificial Sequence: Synthetic coding sequence
  source 1..1269: mol_type = other DNA

SEQ ID NO: 154523 - DNA, 993 bp, synthetic construct
  misc_feature 1..993: note = Description of Artificial Sequence: Synthetic coding sequence
  source 1..993: mol_type = other DNA
atgcccaggagcttcctggtgaagagcaagaaggcccacacctaccaccagccccgggtgcaggaggatgagcccctgtggcccccagccctgacccctgtgccccgggaccaggcccccagcaacagccctgtgctgagcaccctcttccccaaccagtgcctggactggaccaacctgaagcgggagcctgagctggagcaggaccagaacctggccaggatggccccagcccctgagggccccatcgtgctgagccggccccaggatggagacagccccctgagtgacagcccccccttctacaagcccagcttctcctgggacaccctggccaccacctacggccacagctaccggcaggcccccagcaccatgcagagcgccttcctggagcacagcgtgtccctgtatggcagccccctggtgcccagcacagagcccgccctggacttcagcctgcgctacagccctggcatggatgcctaccactgtgtgaagtgcaacaaggtgttcagcaccccccacggcctggaggtgcacgtgagaagaagccacagcggcacccggccctttgcctgtgacatctgtgggaagacctttggacatgctgtgtccctggagcagcacacccacgtgcacagccaggagaggagctttgaatgtaggatgtgtgggaaggccttcaagaggagcagcaccctgagcacccacctgctgatccacagcgacacccggccctacccctgccagttctgtgggaagcgcttccaccagaagagtgacatgaagaagcacacctacatccacactggagagaagccccacaagtgccaggtgtgtgggaaggccttcagccagagcagcaacctgatcacccacagcaggaagcacacaggcttcaagcccttcagctgtgagctgtgcaccaagggcttccagaggaaggtggacctgcggcggcaccgggagagccagcacaacctgaagtag

SEQ ID NO: 154524 - DNA, 993 bp, synthetic construct; identical to SEQ ID NO: 154523
  misc_feature 1..993: note = Description of Artificial Sequence: Synthetic coding sequence
  source 1..993: mol_type = other DNA

SEQ ID NO: 154525 - DNA, 855 bp, synthetic construct
  misc_feature 1..855: note = Description of Artificial Sequence: Synthetic coding sequence
  source 1..855: mol_type = other DNA
atgcccaggagcttcctggtgaagagcaagaaggcccacacctaccaccagccccgggtgcaggaggatgagcccctgtggcccccagccctgacccctgtgccccgggaccaggcccccagcaacagccctgtgctgagcaccctcttccccaaccagtgcctggactggaccaacctgaagcgggagcctgagctggagcaggaccagaacctggccaggatggccccagcccctgagggccccatcgtgctgagccggccccaggatggagacagccccctgagtgacagcccccccttctacaagcccagcttctcctgggacaccctggccaccacctacggccacagctaccggcaggcccccagcaccatgcagagcgccttcctggagcacagcgtgtccctgtatggcagccccctggtgcccagcacagagcccgccctggacttcagcctgcgctacagccctggcatggatgcctaccactgtgtgaagtgcaacaaggagaggagctttgaatgtaggatgtgtgggaaggccttcaagaggagcagcaccctgagcacccacctgctgatccacagcgacacccggccctacccctgccagttctgtgggaagcgcttccaccagaagagtgacatgaagaagcacacctacatccacactggagagaagccccacaagtgccaggtgtgtgggaaggccttcagccagagcagcaacctgatcacccacagcaggaagcacacaggcttcaagcccttcagctgtgagctgtgcaccaagggcttccagaggaaggtggacctgcggcggcaccgggagagccagcacaacctgaagtag

SEQ ID NO: 154526 - DNA, 855 bp, synthetic construct; identical to SEQ ID NO: 154525
  misc_feature 1..855: note = Description of Artificial Sequence: Synthetic coding sequence
  source 1..855: mol_type = other DNA

SEQ ID NO: 154527 - DNA, 993 bp, synthetic construct; identical to SEQ ID NO: 154523
  misc_feature 1..993: note = Description of Artificial Sequence: Synthetic coding sequence
  source 1..993: mol_type = other DNA

SEQ ID NO: 154528 - DNA, 855 bp, synthetic construct; identical to SEQ ID NO: 154525
  misc_feature 1..855: note = Description of Artificial Sequence: Synthetic coding sequence
  source 1..855: mol_type = other DNA

SEQ ID NO: 154529 - DNA, 1623 bp, synthetic construct
  misc_feature 1..1623: note = Description of Artificial Sequence: Synthetic coding sequence
  source 1..1623: mol_type = other DNA
atgaccaccagcctgcaggacggccagagcgctgccagcagagctgctgcccgggacagccccctggccgcccaggtgtgtggggccgcccagggcagaggagatgcccatgacctggccccagccccctggctgcacgcccgggccctgctgcccctgcctgatggcacccggggctgtgccgctgacaggaggaagaagaaggacctggatgtgcctgagatgcccagcatccccaaccccttccctgagctgtgctgcagccccttcacctctgtgctgtctgctgacctcttccccaaggccaacagcaggaagaagcaggtgatcaaggtgtacagtgaagatgagaccagccgggccctggatgtgcccagcgacatcacagccagagatgtgtgccagctgctgatcctgaagaaccactacattgatgaccacagctggaccctgtttgagcacctgccccacatcggcgtggagaggaccattgaagatcatgagctggtgattgaggtgctgagcaactggggcatcgaggaggagaacaagctgtacttcaggaagaactatgccaagtatgagttcttcaagaaccccatgtacttcttccctgagcacatggtgtcctttgccacagagaccaacggggagatcagccccacccagatcctgcagatgttcctgagcagcagcacctacccagagatccacggcttcctgcacgccaaggagcagggcaagaagtcctggaagaagatctacttcttcctgcggcgcagcggcctgtacttcagcaccaagggcaccagcaaggagcccaggcacctgcagttcttcagcgagtttggaaacagcgacatctacgtgtccctggccggcaagaagaagcacggggcccccaccaactacggcttctgcttcaagcccaacaaggccggcggcccccgggacctgaagatgctgtgtgccgaggaggagcagagcaggacctgctgggtgacagccatccggctgctgaagtatggcatgcagctgtaccagaactacatgcacccctaccagggccgcagcggctgcagcagccagagcatcagccccatgaggagcatcagcgagaacagcctggtggccatggacttcagcggccagaagagccgggtgattgagaaccccacagaggccctgtctgtggccgtggaggagggcctggcctggaggaagaagggctgcctgcggctgggcacccacggcagccccacagccagcagccagagcagcgccaccaacatggccatccacaggagccagccctggttccaccacaagatcagcagagatgaggcccagaggctcatcatccagcagggcctggtggatggagtcttcctggtgcgggacagccagagcaaccccaagacctttgtgctgtccatgagccacggccagaagatcaagcacttccagatcatccctgtggaggatgatggagagatgttccacaccctggatgatggccacacccgcttcacagacctgatccagctggtggagttctaccagctgaacaagggcgtgctgccctgcaagctgaagcactactgtgcccgcatcgccctgtag

SEQ ID NO: 154530 - DNA, 1362 bp, synthetic construct
  misc_feature 1..1362: note = Description of Artificial Sequence: Synthetic coding sequence
  source 1..1362: mol_type = other DNA
atgagcctgagcgcccggcgggtgaccctgcctgccatcacccccatcatcctgcagaagagggtcatcaaggtgtacagtgaagatgagaccagccgggccctggatgtgcccagcgacatcacagccagagatgtgtgccagctgctgatcctgaagaaccactacattgatgaccacagctggaccctgtttgagcacctgccccacatcggcgtggagaggaccatcgaggaccacgagctggtgattgaggtgctgagcaactggggcatcgaggaggagaacaagctgtacttcaggaagaactatgccaagtatgagttcttcaagaaccccatgtacttcttccctgagcacatggtgtcctttgccacagagaccaatggagagatcagccccacccagatcctgcagatgttcctgagcagcagcacctacccagagatccacggcttcctgcacgccaaggagcagggcaagaagtcctggaagaagatctacttcttcctgcggcgcagcggcctgtacttcagcaccaagggcaccagcaaggagcccaggcacctgcagttcttcagcgagtttggaaacagcgacatctacgtgtccctggccggcaagaagaagcatggagcccccaccaactacggcttctgcttcaagcccaacaaggccggcggcccccgggacctgaagatgctgtgtgccgaggaggagcagagcaggacctgctgggtgacagccatccggctgctgaagtatggcatgcagctgtaccagaactacatgcacccctaccagggccgcagcggctgcagcagccagagcatcagccccatgaggagcatcagcgagaacagcctggtggccatggacttcagcggccagaagagccgggtgattgagaaccccacagaggccctgtctgtggccgtggaggagggcctggcctggaggaagaagggctgcctgcggctgggcacccacggcagccccacagccagcagccagagcagcgccaccaacatggccatccacaggagccagccctggttccaccacaagatcagcagagatgaggcccagaggctcatcatccagcagggcctggtggatggagtcttcctggtgcgggacagccagagcaaccccaagacctttgtgctgtccatgagccacggccagaagatcaagcacttccagatcatccctgtggaggatgatggagagatgttccacaccctggatgatggccacacccgcttcacagacctgatccagctggtggagttctaccagctgaacaagggcgtgctgccctgcaagctgaagcactactgtgccagaattgccctgtag

SEQ ID NO: 154531 - DNA, 1599 bp, synthetic construct
  misc_feature 1..1599: note = Description of Artificial Sequence: Synthetic coding sequence
  source 1..1599: mol_type = other DNA
atggagctggacctgagccccccccacctgagcagcagccctgaggacctgtgcccagcccctggcaccccacctggcaccccccggcccccagacacccccctgcctgaggaggtgaagaggagccagcccctgctgatccccaccaccggcaggaagctgcgggaggaggagcggcgggccaccagcctgcccagcatccccaaccccttccctgagctgtgcagcccccccagccagagccccatcctgggcggccccagcagcgcccggggcctgctgcccagagatgccagccggccccacgtggtgaaggtgtacagtgaagatggagcctgccgctctgtggaggtggccgccggggccacagcccggcacgtgtgtgagatgctggtgcagagggcccacgccctgagtgatgagacctggggcctggtggagtgccacccccacctggccctggagcggggcctggaggaccatgaatctgtggtggaggtgcaggccgcctggcctgtgggcggggacagcagatttgtgttcaggaagaactttgccaagtatgagctgttcaagagcagcccccacagcctcttccctgagaagatggtgagcagctgcctggatgcccacacaggcatcagccatgaagatctcatccagaacttcctgaatgccggcagcttccctgagatccagggcttcctgcagctgcggggcagcggcaggaagctgtggaagcgcttcttctgcttcctgcggcgcagcggcctgtactacagcaccaagggcaccagcaaggaccccaggcacctgcagtatgtggctgatgtgaatgaaagcaatgtgtatgtggtgacccagggcaggaagctgtatggcatgcccacagactttggcttctgtgtgaagcccaacaagctgagaaatggccacaagggcctgcgcatcttctgcagtgaagatgagcagagcaggacctgctggctggccgccttccgcctcttcaagtatggagtgcagctgtacaagaactaccagcaggcccagagccgccacctgcaccccagctgcctgggcagcccccccctgcggagcgccagtgacaacaccctggtggccatggacttcagcggccatgctggccgggtgattgagaacccccgggaggccctgtctgtggccctggaggaggcccaggcctggaggaagaagaccaaccaccggctgagcctgcccatgcctgccagcggcaccagcctgtctgctgccatccacaggacccagctgtggttccacggccgcatcagccgggaggagagccagaggctgattggccagcagggcctggtggatggcctcttcctggtgcgggagagccagaggaacccccagggctttgtgctgagcctgtgccacctgcagaaggtgaagcactacctgatcctgcccagcgaggaggagggccgcctgtacttctccatggatgatggccagacccgcttcacagacctgctgcagctggtggagttccaccagctgaacagaggcatcctgccctgcctgctgcggcactgctgcaccagggtggccctgtag

SEQ ID NO: 154532 - DNA, 1344 bp, synthetic construct
  misc_feature 1..1344: note = Description of Artificial Sequence: Synthetic coding sequence
  source 1..1344: mol_type = other DNA
atggagctggacctgagccccccccacctgagcagcagccctgaggacctgtgcccagcccctggcaccccacctggcaccccccggcccccagacacccccctgcctgaggaggtgaagaggagccagcccctgctgatccccaccaccggcaggaagctgcgggaggaggagcggcgggccaccagcctgcccagcatccccaaccccttccctgagctgtgcagcccccccagccagagccccatcctgggcggccccagcagcgcccggggcctgctgcccagagatgccagccggccccacgtggtgaaggtgtacagtgaagatggagcctgccgctctgtggaggtggccgccggggccacagcccggcacgtgtgtgagatgctggtgcagagggcccacgccctgagtgatgagacctggggcctggtggagtgccacccccacctggccctggagcggggcctggaggaccatgaatctgtggtggaggtgcaggccgcctggcctgtgggcggggacagcagatttgtgttcaggaagaactttgccaagtatgagctgttcaagagcagcccccacagcctcttccctgagaagatggtgagcagctgcctggatgcccacacaggcatcagccatgaagatctcatccagaacttcctgaatgccggcagcttccctgagatccagggcttcctgcagctgcggggcagcggcaggaagctgtggaagcgcttcttctgcttcctgcggcgcagcggcctgtactacagcaccaagggcaccagcaaggaccccaggcacctgcagtatgtggctgatgtgaatgaaagcaatgtgtatgtggtgacccagggcaggaagctgtatggcatgcccacagactttggcttctgtgtgaagcccaacaagctgagaaatggccacaagggcctgcgcatcttctgcagtgaagatgagcagagcaggacctgctggctggccgccttccgcctcttcaagtatggagtgcagctgtacaagaactaccagcaggcccagagccgccacctgcaccccagctgcctgggcagcccccccctgcggagcgccagtgacaacaccctggtggccatggacttcagcggccatgctggccgggtgattgagaacccccgggaggccctgtctgtggccctggaggaggcccaggcctggaggaagaagaccaaccaccggctgagcctgcccatgcctgccagcggcaccagcctgtctgctgcctgctcctggagcggccgggtgtctggcaccccccgggccctgagcagcctgtgtgccacctgcaggaagtag

SEQ ID NO: 154533 - DNA, 1344 bp, synthetic construct; identical to SEQ ID NO: 154532
  misc_feature 1..1344: note = Description of Artificial Sequence: Synthetic coding sequence
  source 1..1344: mol_type = other DNA

SEQ ID NO: 154534 - DNA, 1599 bp, synthetic construct; identical to SEQ ID NO: 154531
  misc_feature 1..1599: note = Description of Artificial Sequence: Synthetic coding sequence
  source 1..1599: mol_type = other DNA

SEQ ID NO: 154535 - DNA, 1599 bp, synthetic construct; identical to SEQ ID NO: 154531
  misc_feature 1..1599: note = Description of Artificial Sequence: Synthetic coding sequence
  source 1..1599: mol_type = other DNA

SEQ ID NO: 154536 - DNA, 1668 bp, synthetic construct
  misc_feature 1..1668: note = Description of Artificial Sequence: Synthetic coding sequence
  source 1..1668: mol_type = other DNA
atgggcaagtggaggcctggccagggccacaccaccggctctgtgaagcccctgagctgcagtgatgccatggagctggacctgagccccccccacctgagcagcagccctgaggacctgtgcccagcccctggcaccccacctggcaccccccggcccccagacacccccctgcctgaggaggtgaagaggagccagcccctgctgatccccaccactggaaggaagctgcgggaggaggagcggcgggccaccagcctgcccagcatccccaaccccttccctgagctgtgcagcccccccagccagagccccatcctgggcggccccagcagcgcccggggcctgctgcccagagatgccagccggccccacgtggtgaaggtgtacagtgaagatggagcctgccgctctgtggaggtggccgccggggccacagcccggcacgtgtgtgagatgctggtgcagagggcccacgccctgagtgatgagacctggggcctggtggagtgccacccccacctggccctggagcggggcctggaggaccacgagagcgtggtggaggtgcaggccgcctggcctgtgggcggggacagcagatttgtgttcaggaagaactttgccaagtatgagctgttcaagagcagcccccacagcctcttccctgagaagatggtgagcagctgcctggatgcccacacaggcatcagccatgaggacctgatccagaacttcctgaatgccggcagcttccctgagatccagggcttcctgcagctgcggggcagcggcaggaagctgtggaagcgcttcttctgcttcctgcggcgcagcggcctgtactacagcaccaagggcaccagcaaggaccccaggcacctgcagtatgtggctgatgtgaatgaaagcaatgtgtatgtggtgacccagggcaggaagctgtatggcatgcccacagactttggcttctgtgtgaagcccaacaagctgagaaatggccacaagggcctgcgcatcttctgcagtgaagatgagcagagcaggacctgctggctggccgccttccgcctcttcaagtatggagtgcagctgtacaagaactaccagcaggcccagagccgccacctgcaccccagctgcctgggcagcccccccctgcggagcgccagtgacaacaccctggtggccatggacttcagcggccacgccggccgggtgattgagaacccccgggaggccctgtctgtggccctggaggaggcccaggcctggaggaagaagaccaaccaccggctgagcctgcccatgcctgccagcggcaccagcctgtctgctgccatccacaggacccagctgtggttccacggccgcatcagccgggaggagagccagaggctcatcggccagcagggcctggtggatggcctcttcctggtgcgggagagccagaggaacccccagggctttgtgctgagcctgtgccacctgcagaaggtgaagcactacctgatcctgcccagcgaggaggagggccgcctgtacttctccatggatgatggccagacccgcttcacagacctgctgcagctggtggagttccaccagctgaacagaggcatcctgccctgcctgctgcggcactgctgcaccagggtggccctgtag

SEQ ID NO: 154537 - DNA, 618 bp, synthetic construct
  misc_feature 1..618: note = Description of Artificial Sequence: Synthetic coding sequence
  source 1..618: mol_type = other DNA
atggccgcccctggagagcggggccgcttccatggaggcaacctcttcttcctgcctggaggagcccggtctgagatgatggatgacctggccacagatgcccggggcagaggagctggaagaagagatgctgctgccagcgccagcaccccagcccaggcccccaccagtgacagccctgtggctgaagatgccagcagaagaagaccctgccgggcctgtgtggacttcaagacctggatgaggacccagcagaagagggacaccaagttccgggaggactgccccccagaccgggaggagctgggccgccacagctgggccgtgctgcacaccctggccgcctactacccagacctgcccaccccagagcagcagcaggacatggcccagttcatccacctgttcagcaagttctacccctgtgaggagtgtgccgaggacctgaggaagaggctgtgcaggaaccacccagacaccaggacccgggcctgcttcacccagtggctgtgccacctgcacaatgaggtgaacaggaagctgggcaagccagactttgactgcagcaaggtggatgagcgctggagagatggctggaaggatggcagctgtgactag

SEQ ID NO: 154538 - DNA, 285 bp, synthetic construct
  misc_feature 1..285: note = Description of Artificial Sequence: Synthetic coding sequence
  source 1..285: mol_type = other DNA
atgaggacccagcagaagagggacaccaagttccgggaggactgccccccagaccgggaggagctgggccgccacagctgggccgtgctgcacaccctggccgcctactacccagacctgcccaccccagagcagcagcaggacatggcccagttcatccacctgttcagcaagttctacccctgtgaggagtgtgccgaggacctgaggaagaggctgtgcaggaaccacccagacaccaggacccgggcctgcttcaccgtggccgtgcccccagcccagtag

SEQ ID NO: 154539 - DNA, 1629 bp, synthetic construct
  misc_feature 1..1629: note = Description of Artificial Sequence: Synthetic coding sequence
  source 1..1629: mol_type = other DNA
atgagcccctgcccagaggaggccgccatgagaagagaggtggtgaagagaattgagaccgtggtgaaggacctgtggcccacagcagatgtgcagatcttcggcagcttcagcacaggcctgtacctgcccaccagtgacatcgacctggtggtgtttgggaagtgggagaggcctcccctgcagctgctggagcaggccctgaggaagcacaacgtggccgagccctgcagcatcaaggtgctggacaaggccaccgtgcccatcatcaagctgacagaccaggagacagaggtgaaggtggacatctccttcaacatggagactggagtgcgggctgctgagttcatcaagaactacatgaagaagtacagcctgctgccctacctgatcctggtgctgaagcagttcctgctgcagagggacctgaatgaggtgttcaccggcggcatcagcagctacagcctcatcctgatggccatctccttcctgcagctgcaccccagaattgatgccaggagagcagatgagaacctgggcatgctgctggtggagttctttgagctgtatggcaggaacttcaactacctgaagacaggcatccgcatcaaggagggcggggcctacatcgccaaggaggagatcatgaaggccatgaccagcggctaccggcccagcatgctgtgcatcgaggaccccctgctgcctggaaatgatgtgggccgcagcagctatggagccatgcaggtgaagcaggtgtttgattatgcctacatcgtgctgagccatgctgtgagccccctggcccggagctaccccaacagagatgctgagagcaccctgggccgcatcatcaaggtgacccaggaggtgattgactaccgccgctggatcaaggagaagtggggcagcaaggcccaccccagccctggcatggacagccgcatcaagatcaaggagcgcatcgccacctgcaatggagagcagacccagaaccgggagcctgagagcccctacggccagaggctgaccctgagcctgagcagcccccagctgctgagcagcggcagcagcgccagctctgtgagcagcctgagcggcagtgatgtggacagcgacaccccaccctgcaccaccccatctgtgtaccagttcagcctgcaggccccagcccccctgatggccggcctgcccacagccctgcccatgcccagcggcaagccccagcccaccaccagcaggaccctcatcatgaccaccaacaaccagacccgcttcaccatccccccacccaccctgggcgtggcccctgtgccctgccggcaggccggcgtggagggcacagccagcctgaaggctgtgcaccacatgagcagccctgccatccccagcgccagccccaaccccctgagcagcccccacctgtaccacaagcagcacaacggcatgaagctgtccatgaagggcagccacggccacacccagggcggcggctacagctctgtgggcagcggcggcgtgcggccccctgtgggcaacagaggccaccaccagtacaacagaacaggctggaggaggaagaagcacacccacacccgggacagcctgcctgtgtccctgagcaggtag

SEQ ID NO: 154540 - DNA, 885 bp, synthetic construct
  misc_feature 1..885: note = Description of Artificial Sequence: Synthetic coding sequence
  source 1..885: mol_type = other DNA
atggacctgtggcagctgctgctgaccctggccctggccggcagcagtgatgccttcagcggcagcgaggccacagctgccatcctgagccgggccccctggagcctgcagagcgtgaaccctggcctgaagaccaacagcagcaaggagcccaagttcaccaagtgccgcagccctgagcgggagaccttcagctgccactggacagatgaggtgcaccacggcaccaagaacctgggccccatccagctgttctacaccaggaggaacacccaggagtggacccaggagtggaaggagtgcccagactatgtgtctgctggggagaacagctgctacttcaacagcagcttcaccagcatctggatcccctactgcatcaagctgaccagcaatggaggcaccgtggatgagaagtgcttctctgtggatgagatcgtgcagcctgacccccccatcgccctgaactggaccctgctgaatgtgtccctgaccggcatccatgctgacatccaggtgcgctgggaggcccccagaaatgctgacatccagaagggctggatggtgctggagtatgagctgcagtacaaggaggtgaatgagaccaagtggaagatgatggaccccatcctgaccacctctgtgcctgtgtacagcctgaaggtggacaaggagtatgaggtgcgggtgcgcagcaagcagagaaattctggcaactacggggagttcagcgaggtgctgtatgtgaccctgccccagatgagccagttcacctgtgaggaggacttctacttcccctggctgctgatcatcatcttcggcatcttcggcctgactgtgatgctgtttgtgttcctgttcagcaagcagcagagccagaactag

SEQ ID NO: 154541 - DNA, 1851 bp, synthetic construct
  misc_feature 1..1851: note = Description of Artificial Sequence: Synthetic coding sequence
  source 1..1851: mol_type = other DNA
atggacctgtggcagctgctgctgaccctggccctggccggcagcagtgatgccttcagcggcagcgaggacagcagcaaggagcccaagttcaccaagtgccgcagccctgagcgggagaccttcagctgccactggacagatgaggtgcaccacggcaccaagaacctgggccccatccagctgttctacaccaggaggaacacccaggagtggacccaggagtggaaggagtgcccagactatgtgtctgctggggagaacagctgctacttcaacagcagcttcaccagcatctggatcccctactgcatcaagctgaccagcaatggaggcaccgtggatgagaagtgcttctctgtggatgagatcgtgcagcctgacccccccatcgccctgaactggaccctgctgaatgtgtccctgaccggcatccatgctgacatccaggtgcgctgggaggcccccagaaatgctgacatccagaagggctggatggtgctggagtatgagctgcagtacaaggaggtgaatgagaccaagtggaagatgatggaccccatcctgaccacctctgtgcctgtgtacagcctgaaggtggacaaggagtatgaggtgcgggtgcgcagcaagcagagaaattctggcaactacggggagttcagcgaggtgctgtatgtgaccctgccccagatgagccagttcacctgtgaggaggacttctacttcccctggctgctgatcatcatcttcggcatcttcggcctgactgtgatgctgtttgtgttcctgttcagcaagcagcagaggatcaagatgctgatcctgccccctgtgcctgtgcccaagatcaagggcattgatcctgacctgctgaaggagggcaagctggaggaggtgaacaccatcctggccatccatgacagctacaagccagagttccacagtgatgacagctgggtggagttcatcgagctggacattgatgagccagatgagaagacagaggagagtgacacagaccggctgctgagcagtgaccacgagaagagccacagcaacctgggcgtgaaggatggagacagcggccgcaccagctgctgtgagccagacatcctggagacagacttcaatgccaatgacatccacgagggcaccagcgaggtggcccagccccagaggctgaagggggaggccgacctgctgtgcctggaccagaagaaccagaacaacagcccctaccatgatgcctgcccagccacccagcagcccagcgtcatccaggccgagaagaacaagccccagcccctgcccacagaaggagctgagagcacccaccaggccgcccacatccagctgagcaaccccagcagcctgagcaacatcgacttctacgcccaggtgtctgacatcaccccagctggctctgtggtgctgagccctggccagaagaacaaggccggcatgagccagtgtgacatgcaccctgagatggtgtccctgtgccaggagaacttcctgatggacaatgcctacttctgtgaggctgatgccaagaagtgcatccctgtggccccccacatcaaggtggagagccacatccagcccagcctgaaccaggaggacatctacatcaccacagagagcctgaccacagctgctggccggcccggcactggagagcacgtgcccggcagcgagatgcctgtgcctgactacaccagcatccacatcgtgcagagcccccagggcctcatcctgaatgccacagccctgcccctgcctgacaaggagttcctgagcagctgtggctacgtgtccacagaccagctgaacaagatcatgccctag

SEQ ID NO: 154542 - DNA, 1356 bp, synthetic construct
  misc_feature 1..1356: note = Description of Artificial Sequence: Synthetic coding sequence
  source 1..1356: mol_type = other DNA
atggtgctggagtatgagctgcagtacaaggaggtgaatgagaccaagtggaagatgatggaccccatcctgaccacctctgtgcctgtgtacagcctgaaggtggacaaggagtatgaggtgcgggtgcgcagcaagcagaggaacagcggcaactatggagagttcagcgaggtgctgtatgtgaccctgccccagatgagccagttcacctgtgaggaggacttctacttcccctggctgctgatcatcatcttcggcatcttcggcctgactgtgatgctgtttgtgttcctgttcagcaagcagcagaggatcaagatgctgatcctgccccctgtgcctgtgcccaagatcaagggcatcgaccctgacctgctgaaggagggcaagctggaggaggtgaacaccatcctggccatccatgacagctacaagccagagttccacagtgatgacagctgggtggagttcatcgagctggacattgatgagccagatgagaagacagaggagagtgacacagaccggctgctgagcagtgaccacgagaagagccacagcaacctgggcgtgaaggatggagacagcggccgcaccagctgctgtgagccagacatcctggagacagacttcaatgccaatgacatccacgagggcaccagcgaggtggcccagccccagaggctgaagggggaggccgacctgctgtgcctggaccagaagaaccagaacaacagcccctaccatgatgcctgcccagccacccagcagcccagcgtcatccaggccgagaagaacaagccccagcccctgcccacagagggcgctgagagcacccaccaggccgcccacatccagctgagcaaccccagcagcctgagcaacatcgacttctacgcccaggtgtctgacatcaccccagctggctctgtggtgctgagccctggccagaagaacaaggccggcatgagccagtgtgacatgcaccctgagatggtgtccctgtgccaggagaacttcctgatggacaatgcctacttctgtgaggctgatgccaagaagtgcatccctgtggccccccacatcaaggtggagagccacatccagcccagcctgaaccaggaggacatctacatcaccacagagagcctgaccacagctgctggccggcccggcaccggggagcacgtgcccggcagcgagatgcctgtgcctgactacaccagcatccacatcgtgcagagcccccagggcctcatcctgaatgccacagccctgcccctgcctgacaaggagttcctgagcagctgtggctacgtgtccacagaccagctgaacaagatcatgccctag

SEQ ID NO: 154543 - DNA, 327 bp, synthetic construct
  misc_feature 1..327: note = Description of Artificial Sequence: Synthetic coding sequence
  source 1..327: mol_type = other DNA
atgcccctgtgggtgttcttcttcgtcatcctgaccctgagcaacagcagccactgcagccccccaccacccctgaccctgaggatgagaagatatgcagatgccatcttcaccaacagctacaggaaggtgctgggccagctgagcgccaggaagctgctgcaggacatcatgagccggcagcagggcgagagcaaccaggagcggggggcccgggcccggctgggccggcaggtggacagcatgtgggccgagcagaagcagatggagctggagagcatcctggtggccctgctgcagaagcacagcaggaacagccagggctag

SEQ ID NO: 154544 - DNA, 324 bp, synthetic construct
  misc_feature 1..324: note = Description of Artificial Sequence: Synthetic coding sequence
  source 1..324: mol_type = other DNA
atgcccctgtgggtgttcttcttcgtcatcctgaccctgagcaacagcagccactgcagccccccaccacccctgaccctgaggatgagaagatatgcagatgccatcttcaccaacagctacaggaaggtgctgggccagctgagcgccaggaagctgctgcaggacatcatgagccggcagcagggcgagagcaaccaggagcggggggcccgggcccggctgggccggcaggtggacagcatgtgggccgagcagaagcagatggagctggagagcatcctggtggccctgctgcagaagcacaggaacagccagggctag

SEQ ID NO: 154545 - DNA, 327 bp, synthetic construct; identical to SEQ ID NO: 154543
  misc_feature 1..327: note = Description of Artificial Sequence: Synthetic coding sequence
  source 1..327: mol_type = other DNA

SEQ ID NO: 154546 - DNA, 1272 bp, synthetic construct
  misc_feature 1..1272: note = Description of Artificial Sequence: Synthetic coding sequence
  source 1..1272: mol_type = other DNA
atggacaggaggatgtggggcgcccacgtgttctgtgtgctgagccccctgcccaccgtgctgggccacatgcacccagaatgtgacttcatcacccagctgcgggaggatgaaagtgcctgcctgcaggccgctgaggagatgcccaacaccaccctgggctgcccagccacctgggatggcctgctgtgctggcccacagctggcagcggggagtgggtgaccctgccctgcccagacttcttcagccacttcagcagcgagagcggggctgtgaagagggactgcaccatcaccggctggagcgagcccttccccccctaccctgtggcctgccctgtgcccctggagctgctggccgaggaggagagctacttcagcacagtgaagatcatctacacagtgggccacagcatcagcatcgtggccctgtttgtggccatcaccatcctggtggccctgcggcggctgcactgccccagaaattatgtgcacacccagctgttcaccaccttcatcctgaaggccggggctgtgttcctgaaggatgctgccctcttccacagtgatgacacagaccactgcagcttcagcacagtgctgtgcaaggtgtctgtggccgccagccactttgccaccatgaccaacttctcctggctgctggccgaggccgtgtacctgaactgcctgctggccagcaccagccccagcagcagaagagccttctggtggctggtgctggccggctggggcctgcctgtgctcttcaccggcacctgggtgtcctgcaagctggcctttgaggacatcgcctgctgggacctggatgacaccagcccctactggtggatcatcaagggccccatcgtgctgtctgtgggcgtgaactttggcctcttcctgaacatcatccgcatcctggtgaggaagctggagcccgcccagggcagcctgcacacccagagccagtactggaggctgagcaagagcaccctcttcctgatccccctgtttggcatccactacatcatcttcaacttcctgcctgacaatgccggcctgggcatccggctgcccctggagctgggcctgggcagcttccagggcttcatcgtggccatcctgtactgcttcctgaaccaggaggtgaggacagagatcagcaggaagtggcacggccatgaccctgagctgctgcctgcctggaggacccgggccaagtggaccacccccagccgctctgctgccaaggtgctgacctccatgtgctag

SEQ ID NO: 154547 - DNA, 207 bp, synthetic construct
  misc_feature 1..207: note = Description of Artificial Sequence: Synthetic coding sequence
  source 1..207: mol_type = other DNA
atggtgcccggcacccccagccccctgctgggccggggcaaggagctgtggctggagagcctggcctgcctgcctggagctgtgaagagggactgcaccatcaccggctggagcgagcccttccccccctaccctgtggcctgccctgtgcccctggagctgctggccgaggagggctgcccctgcagcagcctggcccggggctag

SEQ ID NO: 154548 - DNA, 438 bp, synthetic construct
  misc_feature 1..438: note = Description of Artificial Sequence: Synthetic coding sequence
  source 1..438: mol_type = other DNA
atggtgcccggcacccccagccccctgctgggccggggcaaggagctgtggctggagagcctggcctgcctgcctggagctgtgaagagggactgcaccatcaccggctggagcgagcccttccccccctaccctgtggcctgccctgtgcccctggagctgctggccgaggaggagagctacttcagcacagtgaagatcatctacacagtgggccacagcatcagcatcgtggccctgtttgtggccatcaccatcctggtggccctgcggcggctgcactgccccagaaattatgtgcacacccagctgttcaccaccttcatcctgaaggccggggctgtgttcctgaaggatgctgccctcttccacagtgatgacacagaccactgcagcttcagcacaggctgcccctgcagcagcctggcccggggctag

SEQ ID NO: 154549 - DNA, 456 bp, synthetic construct
  misc_feature 1..456: note = Description of Artificial Sequence: Synthetic coding sequence
  source 1..456: mol_type = other DNA
atgctgcccttcagcacagccaccaccctgaccacagctgccagccccctggccgcccgggccctgcactggcacgtgggggagctgcagacaggcctgcggggccaccgggtgctgggccctggccgccacctgcccctgctggtggaccaccagagggcccactgccccctgggccgcggggagctgtgggccttcagccagtactacccccaccctggagaggagactggagccagcagcggccagcccccctaccctgtgtctgtgctggccagcctgcaggtggacaccttcccagaccccaccctgtggaacagcctgcaccacctgcagctgcctgcccggcagtgctggccaggccaccccccacctcctggggccggcaccggcttcctgcccggcctgcactgctgccaccccctgctgctgccccagcccagaggagaggactag

SEQ ID NO: 154550 - DNA, 1080 bp, synthetic construct
  misc_feature 1..1080: note = Description of Artificial Sequence: Synthetic coding sequence
  source 1..1080: mol_type = other DNA
atggtgcccggcacccccagccccctgctgggccggggcaaggagctgtggctggagagcctggcctgcctgcctggagctgtgaagagggactgcaccatcaccggctggagcgagcccttccccccctaccctgtggcctgccctgtgcccctggagctgctggccgaggaggagagctacttcagcacagtgaagatcatctacacagtgggccacagcatcagcatcgtggccctgtttgtggccatcaccatcctggtggccctgcggcggctgcactgccccagaaattatgtgcacacccagctgttcaccaccttcatcctgaaggccggggctgtgttcctgaaggatgctgccctcttccacagtgatgacacagaccactgcagcttcagcacagtgctgtgcaaggtgtctgtggccgccagccactttgccaccatgaccaacttctcctggctgctggccgaggccgtgtacctgaactgcctgctggccagcaccagccccagcagcagaagagccttctggtggctggtgctggccggctggggcctgcctgtgctcttcaccggcacctgggtgtcctgcaagctggcctttgaggacatcgcctgctgggacctggatgacaccagcccctactggtggatcatcaagggccccatcgtgctgtctgtgggcgtgaactttggcctcttcctgaacatcatccgcatcctggtgaggaagctggagcccgcccagggcagcctgcacacccagagccagtactggaggctgagcaagagcaccctcttcctgatccccctgtttggcatccactacatcatcttcaacttcctgcctgacaatgccggcctgggcatccggctgcccctggagctgggcctgggcagcttccagggcttcatcgtggccatcctgtactgcttcctgaaccaggaggtgaggacagagatcagcaggaagtggcacggccatgaccctgagctgctgcctgcctggaggacccgggccaagtggaccacccccagccgctctgctgccaaggtgctgacctccatgtgctag

SEQ ID NO: 154551 - DNA, 1101 bp, synthetic construct
  misc_feature 1..1101: note = Description of Artificial Sequence: Synthetic coding sequence
  source 1..1101: mol_type = other DNA
atgtggaatgccaccccatctgaggagcccggcttcaacctgaccctggccgacctggactgggatgccagccctggaaatgacagcctgggagatgagctgctgcagctgtttcctgcccccctgctggccggcgtgacagccacctgtgtggccctgtttgtggtgggcattgctggcaacctgctgaccatgctggtggtgagccgcttccgggagctgcggaccaccaccaacctgtacctgagctccatggccttcagtgacctgctgatcttcctgtgcatgcccctggacctggtgcggctgtggcagtaccggccctggaactttggagacctgctgtgcaagctgttccagtttgtgtctgagagctgcacctacgccaccgtgctgaccatcacagccctgtctgtggagcgctactttgccatctgcttccccctgcgggccaaggtggtggtgaccaagggccgggtgaagctggtgatctttgtgatctgggccgtggccttctgcagcgctggccccatctttgtgctggtgggcgtggagcatgaaaatggaacagacccctgggacaccaatgaatgtcggcccacagaatttgctgtgcgcagcggcctgctgactgtgatggtgtgggtgagcagcatcttcttcttcctgcccgtcttctgcctgactgtgctgtacagcctgattggaaggaagctgtggaggagaagaagaggagatgctgtggtgggcgccagcctgcgggaccagaaccacaagcagacagtgaagatgctggccgtggtggtgtttgccttcatcctgtgctggctgcccttccacgtgggccgctacctgttcagcaagagctttgagcccggcagcctggagatcgcccagatcagccagtactgcaacctggtgtcctttgtgctcttctacctgtctgctgccatcaaccccatcctgtacaacatcatgagcaagaagtacagagtggccgtgttccggctgctgggctttgagcccttcagccagaggaagctgagcaccctgaaggatgagagcagccgggcctggacagagagcagcatcaacacctag

SEQ ID NO: 154552 - DNA, 870 bp, synthetic construct
  misc_feature 1..870: note = Description of Artificial Sequence: Synthetic coding sequence
  source 1..870: mol_type = other DNA
atgtggaatgccaccccatctgaggagcccggcttcaacctgaccctggccgacctggactgggatgccagccctggaaatgacagcctgggagatgagctgctgcagctgtttcctgcccccctgctggccggcgtgacagccacctgtgtggccctgtttgtggtgggcattgctggcaacctgctgaccatgctggtggtgagccgcttccgggagctgcggaccaccaccaacctgtacctgagctccatggccttcagtgacctgctgatcttcctgtgcatgcccctggacctggtgcggctgtggcagtaccggccctggaactttggagacctgctgtgcaagctgttccagtttgtgtctgagagctgcacctacgccaccgtgctgaccatcacagccctgtctgtggagcgctactttgccatctgcttccccctgcgggccaaggtggtggtgaccaagggccgggtgaagctggtgatctttgtgatctgggccgtggccttctgcagcgctggccccatctttgtgctggtgggcgtggagcatgaaaatggaacagacccctgggacaccaatgaatgtcggcccacagaatttgctgtgcgcagcggcctgctgactgtgatggtgtgggtgagcagcatcttcttcttcctgcccgtcttctgcctgactgtgctgtacagcctgattggaaggaagctgtggaggagaagaagaggagatgctgtggtgggcgccagcctgcgggaccagaaccacaagcagacagtgaagatgctgggcggcagccagagggccctgcggctgagcctggccggccccatcctgagcctgtgcctgctgcccagcctgtag

SEQ ID NO: 154553 - DNA, 666 bp, synthetic construct
  misc_feature 1..666: note = Description of Artificial Sequence: Synthetic coding sequence
  source 1..666: mol_type = other DNA
atggcctttgtgaagagcggctggctgctgcggcagagcaccatcctgaagcgctggaagaagaactggtttgacctgtggagcgatggccacctgatctactatgatgaccagacccggcagaacatcgaggacaaggtgcacatgcccatggactgcatcaacatcagaacaggccaggagtgccgggacacccagcccccagatggcaagagcaaggactgcatgctgcagatcgtgtgcagagatggcaagaccatcagcctgtgtgccgagagcacagatgactgcctggcctggaagttcaccctgcaggacagcaggaccaacacagcctacgtgggcagcgctgtgatgacagatgagacctctgtggtgagcagccccccaccctacacagcctatgctgccccagcccctgaggcctacggctacggcccctacggcggggcctacccacctggcacccaggtggtgtatgctgccaacggccaggcctatgctgtgccctaccagtacccctatgccggcctgtatggccagcagcctgccaaccaggtgatcatccgggagcgctacagagacaatgacagcgacctggccctgggcatgctggccggggccgccaccggcatggccctgggcagcctcttctgggtgttctag

SEQ ID NO: 154554 - DNA, 1230 bp, synthetic construct
  misc_feature 1..1230: note = Description of Artificial Sequence: Synthetic coding sequence
  source 1..1230: mol_type = other DNA
atgggcaacagctatgccggccagctgaagaccaccaggtttgaggaggtgctgcacaacagcattgaggccagcctgcggagcaacaacctggtgccccggcccatcttcagccagctgtacctggaggccgagcagcagctggccgccctggagggcggcagccgggtggacaatgaggaggaggaggaggagggggagggcggcctggagaccaatggaccacccaaccccttccagctgcaccccctgcctgagggctgctgcaccacagatggcttctgccaggccggcaaggacctgcggctggtgtccatcagcaatgagcccatggatgtgcctgctggcttcctgctggtgggcgtgaagagccccagcctgcctgaccacctgctggtgtgtgctgtggacaagcgcttcctgcctgatgacaatggccacaatgccctgctgggcttcagcggcaactgtgtgggctgtgggaagaagggcttctgctacttcacagagttcagcaaccacatcaacctgaagctgaccacccagcccaagaagcagaagcacctgaagtactacctggtgagaaatgcccagggcaccctgaccaagggccccctcatctgctggaagggcagcgagttccgcagccggcagatcccagccagcacctgcagcagcagcctcttccctgccctggagagcacagctgccttccccagcgagcctgtgcccggcaccaaccccagcatcctgatgggcgcccagcaggccggccctgccagtgaccaccccagcctgaatgctgccatgggccctgctgtgttcaacgggaaggacagccccaagtgccagcagctggccaagaacaacctgctggccctgccccggcccagcgccctgggcatcctgagcaacagcggcccccccaagaagaggcacaagggctggagccctgagagccccagcgccccagatggcggctgcccccagggcggcggcaacagagccaagtatgagagcgctggcatgagctgtgtgccccaggtgggcctggtgggccctgcctctgtgaccttccctgtggtggccagcggggagcctgtgtctgtgcctgacaacctgctgaagatctgcaaggccaagcctgtgatcttcaaggtgtttgtgaatggagccacccagatggtggccctgggccctgctgagcccgccagccccaggagcctgtag

SEQ ID NO: 154555 - DNA, 1374 bp, synthetic construct
  misc_feature 1..1374: note = Description of Artificial Sequence: Synthetic coding sequence
  source 1..1374: mol_type = other DNA
atgggcaacagctatgccggccagctgaagaccaccaggtttgaggaggtgctgcacaacagcattgaggccagcctgcggagcaacaacctggtgccccggcccatcttcagccagctgtacctggaggccgagcagcagctggccgccctggagggcggcagccgggtggacaatgaggaggaggaggaggagggggagggcggcctggagaccaatggaccacccaaccccttccagctgcaccccctgcctgagggctgctgcaccacagatggcttctgccaggccggcaaggacctgcggctggtgtccatcagcaatgagcccatggatgtgcctgctggcttcctgctggtgggcgtgaagagccccagcctgcctgaccacctgctggtgtgtgctgtggacaagcgcttcctgcctgatgacaatggccacaatgccctgctgggcttcagcggcaactgtgtgggctgtgggaagaagggcttctgctacttcacagagttcagcaaccacatcaacctgaagctgaccacccagcccaagaagcagaagcacctgaagtactacctggtgagaaatgcccagggcaccctgaccaagggccccctcatctgctggaagggcagcgagttccgcagccggcagatcccagccagcacctgcagcagcagcctcttccctgccctggagagcacagctgccttccccagcgagcctgtgcccggcaccaaccccagcatcctgatgggcgcccagcaggccggccctgccagtgaccaccccagcctgaatgctgccatgggccctgctgtgttcaacgggaaggacagccccaagtgccagcagctggccaagaacaacctgctggccctgccccggcccagcgccctgggcatcctgagcaacagcggcccccccaagaagaggcacaagggctggagccctgagagccccagcgccccagatggcggctgcccccagggcggcggcaacagagccaagtatgagagcgctggcatgagctgtgtgccccaggtgggcctggtgggccctgcctctgtgaccttccctgtggtggccagcggggagcctgtgtctgtgcctgacaacctgctgaagatctgcaaggccaagcctgtgatcttcaagggccacggcaacttcccctacctgtgtggcaacctgaatgatgtggtggtgagccccctgctgtacacctgctaccagaacagccagagcgtgtcccgggcctatgagcagtacggggccagcgccatccagcccatcagcgaggagatgcagctgctgctgactgtgtactacctggtgcagctggcccaccagatcagaaatccagatgtgtag

SEQ ID NO: 154556 - DNA, 5850 bp, synthetic construct
  misc_feature 1..5850: note = Description of Artificial Sequence: Synthetic coding sequence
  source 1..5850: mol_type = other DNA
atgggcaacagctatgccggccagctgaagaccaccaggtttgaggaggtgctgcacaacagcattgaggccagcctgcggagcaacaacctggtgccccggcccatcttcagccagctgtacctggaggccgagcagcagctggccgccctggagggcggcagccgggtggacaatgaggaggaggaggaggagggggagggcggcctggagaccaatggaccacccaaccccttccagctgcaccccctgcctgagggctgctgcaccacagatggcttctgccaggccggcaaggacctgcggctggtgtccatcagcaatgagcccatggatgtgcctgctggcttcctgctggtgggcgtgaagagccccagcctgcctgaccacctgctggtgtgtgctgtggacaagcgcttcctgcctgatgacaatggccacaatgccctgctgggcttcagcggcaactgtgtgggctgtgggaagaagggcttctgctacttcacagagttcagcaaccacatcaacctgaagctgaccacccagcccaagaagcagaagcacctgaagtactacctggtgagaaatgcccagggcaccctgaccaagggccccctcatctgctggaagggcagcgagttccgcagccggcagatcccagccagcacctgcagcagcagcctcttccctgccctggagagcacagctgccttccccagcgagcctgtgcccggcaccaaccccagcatcctgatgggcgcccagcaggccggccctgccagtgaccaccccagcctgaatgctgccatgggccctgctgtgttcaacgggaaggacagccccaagtgccagcagctggccaagaacaacctgctggccctgccccggcccagcgccctgggcatcctgagcaacagcggcccccccaagaagaggcacaagggctggagccctgagagccccagcgccccagatggcggctgcccccagggcggcggcaacagagccaagtatgagagcgctggcatgagctgtgtgccccaggtgggcctggtgggccctgcctctgtgaccttccctgtggtggccagcggggagcctgtgtctgtgcctgacaacctgctgaagatctgcaaggccaagcctgtgatcttcaagggccacggcaacttcccctacctgtgtggcaacctgaatgatgtggtggtgagccccctgctgtacacctgctaccagaacagccagagcgtgtcccgggcctatgagcagtacggggccagcgccatccagcccatcagcgaggagatgcagctgctgctgactgtgtactacctggtgcagctggccgctgaccaggtgcccctgatggaggacctggagcagatcttcctgcgctcctggagggagagccacctgacagagatccggcagtaccagcaggccccaccccagcccttccccccagcccccagcgctgctgcccctgtgaccagcgcccagctgccctggctggccagcctggccgccagcagctgcaatgattctgtgcacgtgattgaatgtgcctacagcctggccgagggcctgtctgagatgttccggctgctggtggagggcaagctggccaagaccaactacgtggtgatcatctgtgcctgccgctctgctgccatcgacagctgcatcgctgtgacaggcaagtaccaggcccgcatcctgtctgagagcctgctgaccccagctgagtaccagaaggaggtgaactatgagctggtgacaggcaaggtggacagcctgggcgccttcttcagcaccctgtgcccagagggggacatcgacatcctgctggacaagttccaccaggagaaccagggccacatcagcagcagcctggccgccagctctgtgaccaaggccgccagcctggatgtgtctggcacccctgtgtgcaccagctacaacctggagccccacagcatccggcccttccagctggccgtggcccagaagctgctgagccacgtgtgcagcattgctgacagcagcacccagaacctggacctgggcagctttgagaaggtggacttcctgatctgcatccccccatctgaggtgacctaccagcagaccctgctgcacgtgtggcacagcggcgtgctgctggagctgggcctgaagaaggagcacatgaccaagcagagggtggagcagtatgtgctgaagctggacacagaggcccagaccaagttcaaggccttcctgcagaacagcttccagaacccccacaccctgtttgtgctgattcatgaccacgcccactgggacctggtgagcagcacagtgcacaacctgtacagccagagcgaccccagcgtgggcctggtggaccggctgctgaactgccgggaggtgaaggaggcccccaacatcgtgaccctgcacgtgaccagcttcccctatgccctgcagacccagcacaccctcatcagcccctacaatgagatccactggccagccagctgcagcaatggagtggacctgtaccacgagaacaagaagtacttcggcctgtctgagttcatcgagagcaccctgagcggccacagcctgcccctgctgcgctatgacagcagctttgaggccatggtgacagccctgggcaagcgcttcccccggctgcacagcgctgtgatccgcacctttgtgctggtgcagcactacgccgccgccctgatggctgtgtctggcctgccccagatgaagaactacacctctgtggagaccctggagatcacccagaacctgctgaacagccccaagcagtgcccctgtggccacggcctgatggtgctgctgcgggtgccctgcagccccctggccgtggtggcctatgaaaggctggcccacgtgcgggcccggctggccctggaggagcactttgagatcatcctgggcagccccagcagtggagtgacagtgggcaagcactttgtgaagcagctgaggatgtggcagaagattgaagatgtggagtggaggccccagacctacctggagctggagggcctgccctgcatcctgatcttcagcggcatggacccccatggagagagcctgcccaggagcctgcgctactgtgacctgcggctcatcaacagcagctgcctggtgaggacagccctggagcaggagctgggcctggccgcctactttgtgtccaatgaggtgcccctggagaagggggccagaaatgaggccctggagagtgatgctgagaagctgagcagcacagacaatgaagatgaggagctgggcacagagggcagcaccagcgagaagaggagccccatgaagcgggagaggagccgcagccatgattctgccagcagcagcctgagcagcaaggccagcggcagcgccctgggcggggagagcagcgcccagcccacagccctgccccagggcgagcacgcccggagcccccagccccggggccctgctgaggagggccgggcccctggagagaagcagaggccccgggccagccagggccccccatctgccatcagccgccacagccctggccccaccccccagcctgactgcagcctgaggacaggccagaggtctgtgcaggtgtctgtgaccagcagctgcagccagctgagcagcagcagcggcagcagcagcagctctgtggccccagctgctggcacctgggtgctgcaggccagccagtgcagcctgaccaaggcctgccggcagccccccatcgtgttcctgcccaagctggtgtatgacatggtggtgtccacagacagcagcggcctgcccaaggccgccagcctgctgcccagccccagcgtgatgtgggccagcagcttccggcccctgctgagcaagaccatgaccagcacagagcagagcctgtactaccggcagtggacagtgccccggcccagccacatggactatggcaacagagctgagggccgggtggatggcttccacccccggcggctgctgctgagcggccccccccagatcggcaagacaggagcctacctgcagttcctgtctgtgctgagcaggatgctggtgcggctgacagaggtggatgtgtatgatgaggaggagatcaacatcaacctgcgggaggagagtgactggcactacctgcagctgagtgacccctggccagacctggagctgttcaagaagctgccctttgactacatcatccatgaccccaagtatgaagatgccagcctcatctgcagccactaccagggcatcaagtcagaagatcggggcatgagcaggaagccagaggacctgtatgtgcggcggcagacagccaggatgaggctgagcaaatatgctgcctacaacacctaccaccactgtgagcagtgccaccagtacatgggcttccacccccgctaccagctgtatgagagcaccctgcacgcctttgccttctcctacagcatgctgggggaggagatccagctgcacttcatcatccccaagagcaaggagcaccactttgtgttcagccagcccggcggccagctggagagcatgaggctgcccctggtgacagacaagagccatgagtacatcaagagccccaccttcacccccaccaccggcagacatgagcacggcctcttcaacctgtaccacgccatggatggagccagccacctgcacgtgctggtggtgaaggagtatgagatggccatctacaagaagtactggcccaaccacatcatgctggtgctgcccagcatcttcaacagcgctggggtgggcgccgcccacttcctgatcaaggagctgagctaccacaacctggagctggagaggaaccggcaggaggagctgggcatcaagccccaggacatctggcccttcatcgtcatcagtgatgacagctgtgtgatgtggaatgtggtggatgtgaacagcgctggggagaggagccgggagttctcctggagcgagagaaatgtgtccctgaagcacatcatgcagcacatcgaggccgccccagacatcatgcactacgccctgctgggcctgaggaagtggagcagcaagacccgggccagcgaggtgcaggagcccttcagccgctgccacgtgcacaacttcatcatcctgaatgtggacctgacccagaatgtgcagtacaaccagaaccgcttcctgtgtgatgatgtggacttcaacctgcgggtgcacagcgctggcctgctgctgtgccgcttcaaccgcttctctgtgatgaagaagcagatcgtggtgggcggccacaggagcttccacatcaccagcaaggtgtctgacaacagcgctgctgtggtgcctgcccagtacatctgtgccccagacagcaagcacaccttcctggccgccccagcccagctgctgctggagaagttcctgcagcaccacagccacctgttcttccccctgagcctgaagaaccacgaccaccctgtgctgtctgtggactgctacctgaacctgggcagccagatctctgtgtgctacgtgagcagccggccccacagcctgaacatcagctgcagcgacctgctcttcagcggcctgctgctgtacctgtgtgacagctttgtgggcgccagcttcctgaagaagttccacttcctgaagggggccaccctgtgtgtgatctgccaggacaggagcagcctgcggcagacagtggtgcggctggagctggaggatgagtggcagttccggctgagagatgagttccagacagccaatgccagagaagatcggcccctcttcttcctgaccggccgccacatctag

SEQ ID NO: 154557 - DNA, 1188 bp, synthetic construct
  misc_feature 1..1188: note = Description of Artificial Sequence: Synthetic coding sequence
  source 1..1188: mol_type = other DNA
atgaccctgcggcggctgaggaagctgcagcagaaggaggaggccgccgccaccccagaccctgctgcccggaccccagacagcgaggtggccccagctgcccctgtgcccaccccaggccccccagctgctgctgccaccccaggccccccagcagatgagctgtatgctgccctggaggactaccaccctgctgagctgtaccgggccctggccgtgtctgggggcaccctgcccaggaggaagggcagcggcttccgctggaagaacctgagccagagccctgagcagcagaggaaggtgctgaccctggagaaggaggacaaccagaccttcggctttgagatccagacctacggcctgcaccaccgggaggagcagagggtggagatggtgacctttgtgtgccgggtgcatgagagcagccctgcccagctggccggcctgacccctggggacaccatcgcctctgtgaatggcctgaatgtggagggcatccgccaccgggagatcgtggacatcatcaaggccagcggaaatgtgctgcggctggagaccctgtatggcaccagcatcaggaaggccgagctggaggcccggctgcagtacctgaagcagaccctgtatgagaagtggggcgagtaccgcagcctgatggtgcaggagcagaggctggtgcacggcctggtggtgaaggaccccagcatctatgacaccctggagagcgtgcgcagctgcctgtatggagctggcctgctgcccggcagcctgcccttcggccccctgctggccgtgcccggccggccccggggcggggcccggcgggcccggggagatgctgatgatgctgtgtaccacacctgcttcttcggggacagcgagcccccagccctgcccccacctcctcctccagcccgggccttcggccctggccctgctgagaccccagctgtgggccctggccctggcccccgggccgccctgagccgcagcgcctctgtgcgctgtgccggccctgggggcggcggcggcggcggggcccctggggccctgtggacagaggcccgggagcaggccctgtgtggccctggcctgaggaagaccaagtaccgctccttcagaagaaggctgctgaagttcatccctggcctgaacagaagcctggaggaggaggagagccagctgtag

SEQ ID NO: 154558 - DNA, 759 bp, synthetic construct
  misc_feature 1..759: note = Description of Artificial Sequence: Synthetic coding sequence
  source 1..759: mol_type = other DNA
atgaccctgctgcccagcaaaggaggagacaccatcgcctctgtgaatggcctgaatgtggagggcatccgccaccgggagatcgtggacatcatcaaggccagcggaaatgtgctgcggctggagaccctgtatggcaccagcatcaggaaggccgagctggaggcccggctgcagtacctgaagcagaccctgtatgagaagtggggcgagtaccgcagcctgatggtgcaggagcagaggctggtgcacggcctggtggtgaaggaccccagcatctatgacaccctggagagcgtgcgcagctgcctgtatggagctggcctgctgcccggcagcctgcccttcggccccctgctggccgtgcccggccggccccggggcggggcccggcgggcccggggagatgctgatgatgctgtgtaccacacctgcttctttggagacagcgagcccccagccctgcccccacctcctcctccagcccgggcctttggacctggccctgctgagaccccagctgtgggccctggccctggccccagggctgccctgagccgcagcgcctctgtgcgctgtgccggccctgggggcggcggcggcggcggggcccctggggccctgtggacagaggcccgggagcaggccctgtgtggccctggcctgaggaagaccaagtaccgctccttcagaagaaggctgctgaagttcatccctggcctgaacagaagcctggaggaggaggagagccagctgtag

SEQ ID NO: 154559 - DNA, 759 bp, synthetic construct; identical to SEQ ID NO: 154558
  misc_feature 1..759: note = Description of Artificial Sequence: Synthetic coding sequence
  source 1..759: mol_type = other DNA

SEQ ID NO: 154560 - DNA, 654 bp, synthetic construct
  misc_feature 1..654: note = Description of Artificial Sequence: Synthetic coding sequence
  source 1..654: mol_type = other DNA
atggccgcccagtgtgtgcggctggcccggcgcagcctgcctgccctggccctgagcctgcggcccagcccccggctgctgtgcacagccaccaagcagaagaacagcggccagaacctggaggaggacatgggccagagcgagcagaaggctgaccccccagccacagagaagaccctgctggaggagaaggtgaagctggaggagcagctgaaggagaccgtggagaagtacaagagggccctggccgacacagagaacctgcggcagaggagccagaagctggtggaggaggccaagctgtatggcatccaggccttctgcaaggacctgctggaggtggctgatgtgctggagaaggccacccagtgtgtgcccaaggaggagatcaaggatgacaacccccacctgaagaacctgtatgagggcctggtgatgacagaggtgcagatccagaaggtgttcaccaagcacggcctgctgaagctgaaccctgtgggcgccaagtttgacccctatgaacatgaggccctcttccacacccctgtggagggcaaggagcccggcaccgtggccctggtgtccaaggtgggctacaagctgcacggccgcaccctgcggcctgccctggtgggcgtggtgaaggaggcctag

SEQ ID NO: 154561 - DNA, 591 bp, synthetic construct
  misc_feature 1..591: note = Description of Artificial Sequence: Synthetic coding sequence
  source 1..591: mol_type = other DNA
atggccgcccagtgtgtgcggctggcccggcgcagcctgcctgccctggccctgagcctgcggcccagcccccggctgctgtgcacagccaccaagcagaagaacagcggccagaacctggaggaggacatgggccagagcgagcagctgaaggagaccgtggagaagtacaagagggccctggccgacacagagaacctgcggcagaggagccagaagctggtggaggaggccaagctgtatggcatccaggccttctgcaaggacctgctggaggtggctgatgtgctggagaaggccacccagtgtgtgcccaaggaggagatcaaggatgacaacccccacctgaagaacctgtatgagggcctggtgatgacagaggtgcagatccagaaggtgttcaccaagcacggcctgctgaagctgaaccctgtgggcgccaagtttgacccctatgagcacgaggccctcttccacacccctgtggagggcaaggagcccggcaccgtggccctggtgtccaaggtgggctacaagctgcacggccgcaccctgcggcctgccctggtgggcgtggtgaaggaggcctag

SEQ ID NO: 154562 - DNA, 2880 bp, synthetic construct
  misc_feature 1..2880: note = Description of Artificial Sequence: Synthetic coding sequence
  source 1..2880: mol_type = other DNA
atggccctgctgggcaagagatgtgatgtgcccaccaacggctgcggccctgaccgctggaacagcgccttcaccaggaaggatgagatcatcaccagcctggtgtctgccctggacagcatgtgcagcgccctgagcaagctgaatgctgaggtggcctgtgtggccgtgcatgatgaaagtgcctttgtggtgggcacagagaagggccgcatgttcctgaatgccaggaaggagctgcagagcgacttcctgcgcttctgccggggccccccctggaaggaccctgaggccgagcaccccaagaaggtgcagagaggagagggcggcggccgcagcctgcccaggagcagcctggagcacggcagtgatgtgtacctgctgaggaagatggtggaggaggtgtttgatgtgctgtacagcgaggccctgggccgggcctctgtggtgcccctgccctatgaaaggctgctgcgggagcccggcctgctggccgtgcagggcctgcctgagggcctggccttccggcggccagcagaatatgaccccaaggccctgatggccatcctggagcacagccaccgcatccgcttcaagctgaagaggcccctggaggatggcggccgggacagcaaggccctggtggagctgaatggagtgtccctcatccccaagggcagccgggactgtggcctgcacggccaggcccccaaggtgcccccccaggacctgcccccaacagccaccagcagctccatggccagcttcctgtacagcacagccctgcccaaccacgccatccgggagctgaagcaggaggcccccagctgccccctggcccccagcgacctgggcctgagccggcccatgcctgagcccaaggccaccggggcccaggacttcagtgactgctgcggccagaagcccaccggccctgggggccccctcatccagaatgtgcacgccagcaagaggatcctcttcagcatcgtgcatgacaagtctgagaagtgggatgccttcatcaaggagacagaggacatcaacaccctgagagaatgtgtgcagatcctcttcaacagccgctatgcagaggccctgggcctggaccacatggtgcctgtgccctacaggaagatcgcctgtgaccctgaggccgtggagatcgtgggcatcccagacaagatccccttcaagaggccctgcacctacggcgtgcccaagctgaagaggatcctggaggagcggcacagcatccacttcatcatcaagaggatgtttgatgagcgcatcttcaccggcaacaagttcaccaaggacaccaccaagctggagcccgccagccccccagaggacaccagcgctgaggtgtcccgggccaccgtgctggacctggccggaaatgcccggagtgacaagggctccatgtctgaggactgtggccctggcaccagcggggagctgggcggcctgcggcccatcaagattgagcctgaggacctggacatcatccaggtgacagtgcctgaccccagccccaccagcgaggagatgacagacagcatgcctggccacctgcccagtgaagattctggctacggcatggagatgctgacagacaagggcctgtctgaagatgcccggcctgaggagaggcctgtggaggacagccatggagatgtgatccggcccctgaggaagcaggtggagctgctcttcaacaccaggtatgccaaggccatcggcatcagcgagcctgtgaaggtgccctacagcaagttcctgatgcaccctgaggagctgtttgtggtgggcctgcctgagggcatcagcctgcggcggcccaactgcttcggcatcgccaagctgaggaagatcctggaggccagcaacagcatccagtttgtgatcaagaggcctgagctgctgacagagggcgtgaaggagcccatcatggacagccagggcacagccagcagcctgggcttcagccccccagccctgcccccagagcgggacagcggggaccccctggtggatgagagcctgaagaggcagggcttccaggagaactatgatgcccggctgagcagaattgatattgccaacaccctgcgggagcaggtgcaggacctcttcaacaagaagtatggagaggccctgggcatcaagtaccctgtgcaggtgccctacaagaggatcaagagcaaccctggcagcgtcatcatcgagggcctgcccccaggcatccccttcaggaagccctgcaccttcggcagccagaacctggagcgcatcctggccgtggccgacaagatcaagttcaccgtgacccggcccttccagggcctcatccccaagccagatgaagatgatgccaaccggctgggggagaaggtgatcctgcgggagcaggtgaaggagctgttcaatgagaagtacggggaggccctgggcctgaacagacctgtgctggtgccctacaagctgatccgggacagcccagatgctgtggaggtgacaggcctgcctgatgacatccccttcaggaaccccaacacctatgacatccaccggctggagaagatcctgaaggcccgggagcacgtgaggatggtgatcatcaaccagctgcagccctttgctgagatctgcaatgatgccaaggtgcctgccaaggacagcagcatccccaagaggaagaggaagagggtgtctgagggcaacagcgtgagcagcagcagcagcagcagcagcagcagcagcagcaacccagattctgtggccagcgccaaccagatcagcctggtgcagtggcccatgtacatggtggactatgccggcctgaatgtgcagctgcccggccccctgaactactag

SEQ ID NO: 154563 - DNA, 2835 bp, synthetic construct
  misc_feature 1..2835: note = Description of Artificial Sequence: Synthetic coding sequence
  source 1..2835: mol_type = other DNA
atggccctgctgggcaagagatgtgatgtgcccaccaacggctgcggccctgaccgctggaacagcgccttcaccaggaaggatgagatcatcaccagcctggtgtctgccctggacagcatgtgcagcgccctgagcaagctgaatgctgaggtggcctgtgtggccgtgcatgatgaaagtgcctttgtggtgggcacagagaagggccgcatgttcctgaatgccaggaaggagctgcagagcgacttcctgcgcttctgccggggccccccctggaaggaccctgaggccgagcaccccaagaaggtgcagagaggagagggcggcggccgcagcctgcccaggagcagcctggagcacggcagtgatgtgtacctgctgaggaagatggtggaggaggtgtttgatgtgctgtacagcgaggccctgggccgggcctctgtggtgcccctgccctatgaaaggctgctgcgggagcccggcctgctggccgtgcagggcctgcctgagggcctggccttccggcggccagcagaatatgaccccaaggccctgatggccatcctggagcacagccaccgcatccgcttcaagctgaagaggcccctggaggatggcggccgggacagcaaggccctggtggagctgaatggagtgtccctcatccccaagggcagccgggactgtggcctgcacggccaggcccccaaggtgcccccccaggacctgcccccaacagccaccagcagctccatggccagcttcctgtacagcacagccctgcccaaccacgccatccgggagctgaagcaggaggcccccagctgccccctggcccccagcgacctgggcctgagccggcccatgcctgagcccaaggccaccggggcccaggacttcagtgactgctgcggccagaagcccaccggccctgggggccccctcatccagaatgtgcacgccagcaagaggatcctcttcagcatcgtgcatgacaagtctgagaagtgggatgccttcatcaaggagacagaggacatcaacaccctgagagaatgtgtgcagatcctcttcaacagccgctatgcagaggccctgggcctggaccacatggtgcctgtgccctacaggaagatcgcctgtgaccctgaggccgtggagatcgtgggcatcccagacaagatccccttcaagaggccctgcacctacggcgtgcccaagctgaagaggatcctggaggagcggcacagcatccacttcatcatcaagaggatgtttgatgagcgcatcttcaccggcaacaagttcaccaaggacaccaccaagctggagcccgccagccccccagaggacaccagcgctgaggtgtcccgggccaccgtgctggacctggccggaaatgcccggagtgacaagggctccatgtctgaggactgtggccctggcaccagcggggagctgggcggcctgcggcccatcaagattgagcctgaggacctggacatcatccaggtgacagtgcctgaccccagccccaccagcgaggagatgacagacagcatgcctggccacctgcccagtgaagattctggctacggcatggagatgctgacagacaagggcctgtctgaagatgcccggcctgaggagaggcctgtggaggacagccatggagatgtgatccggcccctgaggaagcaggtggagctgctcttcaacaccaggtatgccaaggccatcggcatcagcgagcctgtgaaggtgccctacagcaagttcctgatgcaccctgaggagctgtttgtggtgggcctgcctgagggcatcagcctgcggcggcccaactgcttcggcatcgccaagctgaggaagatcctggaggccagcaacagcatccagtttgtgatcaagaggcctgagctgctgacagagggcgtgaaggagcccatcatggacagccaggagcgggacagcggggaccccctggtggatgagagcctgaagaggcagggcttccaggagaactatgatgcccggctgagcagaattgacatcgccaacaccctgcgggagcaggtgcaggacctcttcaacaagaagtacggggaggccctgggcatcaagtaccctgtgcaggtgccctacaagaggatcaagagcaaccctggcagcgtcatcatcgagggcctgcccccaggcatccccttcaggaagccctgcaccttcggcagccagaacctggagcgcatcctggccgtggccgacaagatcaagttcaccgtgacccggcccttccagggcctcatccccaagccagatgaagatgatgccaaccggctgggggagaaggtgatcctgcgggagcaggtgaaggagctgttcaatgagaagtatggagaggccctgggcctgaacagacctgtgctggtgccctacaagctgatccgggacagcccagatgctgtggaggtgacaggcctgcctgatgacatccccttcaggaaccccaacacctatgacatccaccggctggagaagatcctgaaggcccgggagcacgtgaggatggtgatcatcaaccagctgcagccctttgctgagatctgcaatgatgccaaggtgcctgccaaggacagcagcatccccaagaggaagaggaagagggtgtctgagggcaacagcgtgagcagcagcagcagcagcagcagcagcagcagcagcaacccagacagcgtggccagcgccaaccagatcagcctggtgcagtggcccatgtacatggtggactatgccggcctgaatgtgcagctgcccggccccctgaactactag

SEQ ID NO: 154564 - DNA, 2931 bp, synthetic construct
  misc_feature 1..2931: note = Description of Artificial Sequence: Synthetic coding sequence
  source 1..2931: mol_type = other DNA
atggccctgctgggcaagagatgtgatgtgcccaccaacggctgcggccctgaccgctggaacagcgccttcaccaggaaggatgagatcatcaccagcctggtgtctgccctggacagcatgtgcagcgccctgagcaagctgaatgctgaggtggcctgtgtggccgtgcatgatgaaagtgcctttgtggtgggcacagagaagggccgcatgttcctgaatgccaggaaggagctgcagagcgacttcctgcgcttctgcctgtctgctgcccagcaccgggccgccaccagccagctggagggccgggtggtgagaagagtgctgactgtggccagccgggccctgtgccccaccggcggccccccctggaaggaccctgaggccgagcaccccaagaaggtgcagagaggagagggcggcggccgcagcctgcccaggagcagcctggagcacggcagtgatgtgtacctgctgaggaagatggtggaggaggtgtttgatgtgctgtacagcgaggccctgggccgggcctctgtggtgcccctgccctatgaaaggctgctgcgggagcccggcctgctggccgtgcagggcctgcctgagggcctggccttccggcggccagcagaatatgaccccaaggccctgatggccatcctggagcacagccaccgcatccgcttcaagctgaagaggcccctggaggatggcggccgggacagcaaggccctggtggagctgaatggagtgtccctcatccccaagggcagccgggactgtggcctgcacggccaggcccccaaggtgcccccccaggacctgcccccaacagccaccagcagctccatggccagcttcctgtacagcacagccctgcccaaccacgccatccgggagctgaagcaggaggcccccagctgccccctggcccccagcgacctgggcctgagccggcccatgcctgagcccaaggccaccggggcccaggacttcagtgactgctgcggccagaagcccaccggccctgggggccccctcatccagaatgtgcacgccagcaagaggatcctcttcagcatcgtgcatgacaagtctgagaagtgggatgccttcatcaaggagacagaggacatcaacaccctgagagaatgtgtgcagatcctcttcaacagccgctatgcagaggccctgggcctggaccacatggtgcctgtgccctacaggaagatcgcctgtgaccctgaggccgtggagatcgtgggcatcccagacaagatccccttcaagaggccctgcacctacggcgtgcccaagctgaagaggatcctggaggagcggcacagcatccacttcatcatcaagaggatgtttgatgagcgcatcttcaccggcaacaagttcaccaaggacaccaccaagctggagcccgccagccccccagaggacaccagcgctgaggtgtcccgggccaccgtgctggacctggccggaaatgcccggagtgacaagggctccatgtctgaggactgtggccctggcaccagcggggagctgggcggcctgcggcccatcaagattgagcctgaggacctggacatcatccaggtgacagtgcctgaccccagccccaccagcgaggagatgacagacagcatgcctggccacctgcccagtgaagattctggctacggcatggagatgctgacagacaagggcctgtctgaagatgcccggcctgaggagaggcctgtggaggacagccatggagatgtgatccggcccctgaggaagcaggtggagctgctcttcaacaccaggtatgccaaggccatcggcatcagcgagcctgtgaaggtgccctacagcaagttcctgatgcaccctgaggagctgtttgtggtgggcctgcctgagggcatcagcctgcggcggcccaactgcttcggcatcgccaagctgaggaagatcctggaggccagcaacagcatccagtttgtgatcaagaggcctgagctgctgacagagggcgtgaaggagcccatcatggacagccaggagcgggacagcggggaccccctggtggatgagagcctgaagaggcagggcttccaggagaactatgatgcccggctgagcagaattgacatcgccaacaccctgcgggagcaggtgcaggacctcttcaacaagaagtacggggaggccctgggcatcaagtaccctgtgcaggtgccctacaagaggatcaagagcaaccctggcagcgtcatcatcgagggcctgcccccaggcatccccttcaggaagccctgcaccttcggcagccagaacctggagcgcatcctggccgtggccgacaagatcaagttcaccgtgacccggcccttccagggcctcatccccaagccagatgaagatgatgccaaccggctgggggagaaggtgatcctgcgggagcaggtgaaggagctgttcaatgagaagtatggagaggccctgggcctgaacagacctgtgctggtgccctacaagctgatccgggacagcccagatgctgtggaggtgacaggcctgcctgatgacatccccttcaggaaccccaacacctatgacatccaccggctggagaagatcctgaaggcccgggagcacgtgaggatggtgatcatcaaccagctgcagccctttgctgagatctgcaatgatgccaaggtgcctgccaaggacagcagcatccccaagaggaagaggaagagggtgtctgagggcaacagcgtgagcagcagcagcagcagcagcagcagcagcagcagcaacccagacagcgtggccagcgccaaccagatcagcctggtgcagtggcccatgtacatggtggactatgccggcctgaatgtgcagctgcccggccccctgaactactag

SEQ ID NO: 154565 - DNA, 609 bp, synthetic construct
  misc_feature 1..609: note = Description of Artificial Sequence: Synthetic coding sequence
  source 1..609: mol_type = other DNA
atgagctgtgtgccctggaagggggacaaggccaagtctgagagcctggagctgccccaggccgccccaccccagatctaccacgagaagcagaggcgggagctgtgtgccctgcacgccctgaacaacgtgttccaggacagcaatgccttcacccgggacaccctgcaggagatcttccagaggctgagccccaacaccatggtgaccccccacaagaagtccatgctgggcaatggaaattatgatgtgaatgtcatcatggccgccctgcagaccaagggctatgaggccgtgtggtgggacaagagaagagatgtgggcgtcatcgccctgaccaacgtgatgggcttcatcatgaacctgcccagcagcctgtgctggggccccctgaagctgcccctgaagaggcagcactggatctgtgtgcgggaggtgggcggggcctactacaacctggacagcaagctgaagatgcctgagtggattggaggagagagcgagctgaggaagttcctgaagcaccacctgcggggcaagaactgtgagctgctgctggtggtgcctgaggaggtggaggcccaccagagctggaggacagatgtgtag

SEQ ID NO: 154566 - DNA, 1545 bp, synthetic construct
  misc_feature 1..1545: note = Description of Artificial Sequence: Synthetic coding sequence
  source 1..1545: mol_type = other DNA
atgaagtggaggctgcaggagggccgcggggaggccgtgtaccagatcggcgtggaggacaatggcctgctggtgggcctggccgaggaggagatgagggccagcctgaagaccctgcacaggatggccgagaaggtgggcgctgacatcaccgtgctgcgggagcgggaggtggactatgacagcgacatgcccaggaagatcacagaggtgctggtgaggaaggtgcctgacaaccagcagttcctggacctgcgggtggccgtgctgggcaatgtggacagcggcaagagcaccctgctgggcgtgctgacccagggcgagctggacaatggccggggccgggcccggctgaacctcttccgccacctgcacgagatccagagcggccgcaccagcagcatcagctttgagatcctgggcttcaacagcaaaggagaggtggtgaactacagcgacagcaggacagctgaggagatctgtgagagcagcagcaagatgatcaccttcatcgacctggccggccaccacaagtacctgcacaccaccatcttcggcctgaccagctactgcccagactgtgccctgctgctggtgtctgccaacacaggaattgctggcaccacccgggagcacctgggcctggccctggccctgaaggtgcccttcttcatcgtggtgtccaagattgacctgtgtgccaagaccaccgtggagaggacagtgcggcagctggagcgggtgctgaagcagcccggctgccacaaggtgcccatgctggtgaccagtgaagatgatgctgtgacagctgcccagcagtttgcccagagccccaacgtgacccccatcttcaccctgagctctgtgtctggagagagcctggacctgctgaaggtgttcctgaacatcctgccccccctgaccaacagcaaggagcaggaggagctgatgcagcagctgacagagttccaggtggatgagatctacacagtgcctgaggtgggcaccgtggtgggcggcaccctgagcagcggcatctgccgggagggggaccagctggtggtgggccccacagatgatggctgcttcctggagctgcgggtgtgcagcatccagaggaacagaagtgcctgccgggtgctgcgggccggccaggccgccaccctggccctgggggactttgaccgggccctgctgaggaagggcatggtgatggtgtccccagagatgaaccccaccatctgcagcgtgtttgaggccgagatcgtgctgctcttccacgccaccaccttccggcggggcttccaggtgacagtgcacgtgggcaatgtgcggcagacagctgtggtggagaagatccacgccaaggacaagctgaggactggagagaaggctgtggtgcgcttccgcttcctgaagcaccctgagtacctgaaggtgggcgccaagctgctcttccgggagggcgtgaccaagggcatcggccacgtgacagatgtgcaggccatcacagctggggaggcccaggccaacatgggcttctag

SEQ ID NO: 154567 - DNA, 1809 bp, synthetic construct
  misc_feature 1..1809: note = Description of Artificial Sequence: Synthetic coding sequence
  source 1..1809: mol_type = other DNA
atggacagccgggtgtctgagctgtttggaggctgctgcaggcctgggggcggccctgctgtgggcggcaccctgaaggcccggggggccggcagcagcagcggctgcggcggccccaagggcaagaagaagaatggaagaaacagaggaggcaaggccaacaaccccccctacctgcccccagaggccgaggatggcaacatcgagtacaagctgaagctggtgaaccccagccagtacagatttgagcacctggtgacccagatgaagtggaggctgcaggagggccgcggggaggccgtgtaccagatcggcgtggaggacaatggcctgctggtgggcctggccgaggaggagatgagggccagcctgaagaccctgcacaggatggccgagaaggtgggcgctgacatcaccgtgctgcgggagcgggaggtggactatgacagcgacatgcccaggaagatcacagaggtgctggtgaggaaggtgcctgacaaccagcagttcctggacctgcgggtggccgtgctgggcaatgtggacagcggcaagagcaccctgctgggcgtgctgacccagggcgagctggacaatggccggggccgggcccggctgaacctcttccgccacctgcacgagatccagagcggccgcaccagcagcatcagctttgagatcctgggcttcaacagcaaaggagaggtggtgaactacagcgacagcaggacagctgaggagatctgtgagagcagcagcaagatgatcaccttcatcgacctggccggccaccacaagtacctgcacaccaccatcttcggcctgaccagctactgcccagactgtgccctgctgctggtgtctgccaacacaggaattgctggcaccacccgggagcacctgggcctggccctggccctgaaggtgcccttcttcatcgtggtgtccaagattgacctgtgtgccaagaccaccgtggagaggacagtgcggcagctggagcgggtgctgaagcagcccggctgccacaaggtgcccatgctggtgaccagtgaagatgatgctgtgacagctgcccagcagtttgcccagagccccaacgtgacccccatcttcaccctgagctctgtgtctggagagagcctggacctgctgaaggtgttcctgaacatcctgccccccctgaccaacagcaaggagcaggaggagctgatgcagcagctgacagagttccaggtggatgagatctacacagtgcctgaggtgggcaccgtggtgggcggcaccctgagcagcggcatctgccgggagggggaccagctggtggtgggccccacagatgatggctgcttcctggagctgcgggtgtgcagcatccagaggaacagaagtgcctgccgggtgctgcgggccggccaggccgccaccctggccctgggggactttgaccgggccctgctgaggaagggcatggtgatggtgtccccagagatgaaccccaccatctgcagcgtgtttgaggccgagatcgtgctgctcttccacgccaccaccttccggcggggcttccaggtgacagtgcacgtgggcaatgtgcggcagacagctgtggtggagaagatccacgccaaggacaagctgaggactggagagaaggctgtggtgcgcttccgcttcctgaagcaccctgagtacctgaaggtgggcgccaagctgctcttccgggagggcgtgaccaagggcatcggccacgtgacagatgtgcaggccatcacagctggggaggcccaggccaacatgggcttctag

SEQ ID NO: 154568 - DNA, 735 bp, synthetic construct
  misc_feature 1..735: note = Description of Artificial Sequence: Synthetic coding sequence
  source 1..735: mol_type = other DNA
atgaagtggaggctgcaggagggccgcggggaggccatcttcaccctgagctctgtgtctggagagagcctggacctgctgaaggtgttcctgaacatcctgccccccctgaccaacagcaaggagcaggaggagctgatgcagcagctgacagagttccaggtggatgagatctacacagtgcctgaggtgggcaccgtggtgggcggcaccctgagcagcggcatctgccgggagggggaccagctggtggtgggccccacagatgatggctgcttcctggagctgcgggtgtgcagcatccagaggaacagaagtgcctgccgggtgctgcgggccggccaggccgccaccctggccctgggggactttgaccgggccctgctgaggaagggcatggtgatggtgtccccagagatgaaccccaccatctgcagcgtgtttgaggccgagatcgtgctgctcttccacgccaccaccttccggcggggcttccaggtgacagtgcacgtgggcaatgtgcggcagacagctgtggtggagaagatccacgccaaggacaagctgaggactggagagaaggctgtggtgcgcttccgcttcctgaagcaccctgagtacctgaaggtgggcgccaagctgctcttccgggagggcgtgaccaagggcatcggccacgtgacagatgtgcaggccatcacagctggggaggcccaggccaacatgggcttctag

SEQ ID NO: 154569 - DNA, 462 bp, synthetic construct
  misc_feature 1..462: note = Description of Artificial Sequence: Synthetic coding sequence
  source 1..462: mol_type = other DNA
tgaggcatctgccgggagggggaccagctggtggtgggccccacagatgatggctgcttcctggagctgcgggtgtgcagcatccagaggaacagaagtgcctgccgggtgctgcgggccggccaggccgccaccctggccctgggggactttgaccgggccctgctgaggaagggcatggtgatggtgtccccagagatgaaccccaccatctgcagcgtgtttgaagctgagatcgtgctgctcttccacgccaccaccttcagaagaggcttccaggtgacagtgcacgtgggcaatgtgcggcagacagctgtggtggagaagatccacgccaaggacaagctgaggactggagagaaggctgtggcccgggagcggggcgtgctgagcgccacctgcagcctgcccaccttctggaggggggccaagctgggcgtggccaggaagggccagagctag

SEQ ID NO: 154570 - DNA, 465 bp, synthetic construct
  misc_feature 1..465: note = Description of Artificial Sequence: Synthetic coding sequence
  source 1..465: mol_type = other DNA
tgaggcatctgccgggagggggaccagctggtggtgggccccacagatgatggctgcttcctggagctgcgggtgtgcagcatccagaggaacagaagtgcctgccgggtgctgcgggccggccaggccgccaccctggccctgggggactttgaccgggccctgctgaggaagggcatggtgatggtgtccccagagatgaaccccaccatctgcagcgtgtttgaagctgagatcgtgctgctcttccacgccaccaccttcagaagaggcttccaggtgacagtgcacgtgggcaatgtgcggcagacagctgtggtggagaagatccacgccaaggtgcggggcacctggcccagcatcagccctgaggtgaggaaggagggcggcctgccccagacaggccgggagctgctggaccccaccatgggcatcaagccccacctgggctgggtggccgcctag

SEQ ID NO: 154571 - DNA, 543 bp, synthetic construct
  misc_feature 1..543: note = Description of Artificial Sequence: Synthetic coding sequence
  source 1..543: mol_type = other DNA
atgcagcagctgacagagttccaggtggatgagatctacacagtgcctgaggtgggcaccgtggtgggcggcaccctgagcagcggcatctgccgggagggggaccagctggtggtgggccccacagatgatggctgcttcctggagctgcgggtgtgcagcatccagaggaacagaagtgcctgccgggtgctgcgggccggccaggccgccaccctggccctgggggactttgaccgggccctgctgaggaagggcatggtgatggtgtccccagagatgaaccccaccatctgcagcgtgtttgaggccgagatcgtgctgctcttccacgccaccaccttccggcggggcttccaggtgacagtgcacgtgggcaatgtgcggcagacagctgtggtggagaagatccacgccaaggacaagctgaggactggagagaaggctgtggcccgggagcggggcgtgctgagcgccacctgcagcctgcccaccttctggaggggggccaagctgggcgtggccaggaagggccagagctag

SEQ ID NO: 154572 - DNA, 951 bp, synthetic construct
  misc_feature 1..951: note = Description of Artificial Sequence: Synthetic coding sequence
  source 1..951: mol_type = other DNA
tgacagggcggcggggcccgggaggagaacaccagcttccgcagccgggacccccgggaggagggccagaggctggacagccaggccgaggatggcaacatcgagtacaagctgaagctggtgaaccccagccagtacagatttgagcacctggtgacccagatgaagtggaggctgcaggagggccgcggggaggccgtgtaccagatcggcgtggaggacaatggcctgctggtgggcctggccgaggaggagatgagggccagcctgaagaccctgcacaggatggccgagaaggtgggcgctgacatcaccgtgctgcgggagcgggaggtggactatgacagcgacatgcccaggaagatcacagaggtgctggtgaggaaggtgcctgacaaccagcagttcctggacctgcgggtggccgtgctgggcaatgtggacagcggcaagagcaccctgctgggcgtgctgacccagggcgagctggacaatggccggggccgggcccggctgaacctcttccgccacctgcacgagatccagagcggccgcaccagcagcatcagctttgagatcctgggcttcaacagcaaaggagaggtggtgaactacagcgacagcaggacagctgaggagatctgtgagagcagcagcaagatgatcaccttcatcgacctggccggccaccacaagtacctgcacaccaccatcttcggcctgaccagctactgcccagactgtgccctgctgctggtgtctgccaacacaggaattgctggcaccacccgggagcacctgggcctggccctggccctgaaggtgcccttcttcatcgtggtgtccaagattgacctgtgtgccaagaccaccgtggagaggacagtgcggcagctggagcgggtgctgaagcagcccggctgccacaaggtgcccatgctggtgacctag

SEQ ID NO: 154573 - DNA, 684 bp, synthetic construct
  misc_feature 1..684: note = Description of Artificial Sequence: Synthetic coding sequence
  source 1..684: mol_type = other DNA
atggacagccgggtgtctgagctgtttggaggctgctgcaggcctgggggcggccctgctgtgggcggcaccctgaaggcccggggggccggcagcagcagcggctgcggcggccccaagggcaagaagaagaatggaagaaacagaggaggcaaggccaacaaccccccctacctgcccccagaggccgaggatggcaacatcgagtacaagtacagatttgagcacctggtgacccagatgaagtggaggctgcaggagggccgcggggaggccgtgtaccagatcggcgtggaggacaatggcctgctggtgggcctggccgaggaggagatgagggccagcctgaagaccctgcacaggatggccgagaaggtgggcgctgacatcaccgtgctgcgggagcgggaggtggactatgacagcgacatgcccaggaagatcacagaggtgctggtgaggaaggtgcctgacaaccagcagttcctggacctgcgggtggccgtgctgggcaatgtggacagcggcaagagcaccctgctgggcgtgctgacccagggcgagctggacaatggccggggccgggcccggctgaacctcttccgccacctgcacgagatccagagcggccgcaccagcagcatcagctttgagatcctgggcttcaacagcaaaggagagtag

SEQ ID NO: 154574 - DNA, 1221 bp, synthetic construct
  misc_feature 1..1221: note = Description of Artificial Sequence: Synthetic coding sequence
  source 1..1221: mol_type = other DNA
atggccccagcccgctgcttcagcgcccggctgaggacagtgttccagggcgtgggccactgggccctgagcacctgggccggcctgaagcccagccggctgctgccccagagggccagcccccggctgctgtctgtgggccgggctgacctggccaagcaccaggagctgcccgggaagaagctgctgtctgagaagaagctgaagcgctactttgtggactaccgccgggtgctggtgtgtggcggcaatggaggagctggggccagctgcttccacagcgagcccaggaaggagtttggaggcccagatggaggagatggcggcaatggaggccacgtgatcctgcgggtggaccagcaggtgaagagcctgagctctgtgctgagccgctaccagggcttcagcggggaggatggcggcagcaagaactgcttcggccgctctggagctgtgctgtacatccgggtgcctgtgggcaccctggtgaaggagggcggccgggtggtggccgacctgagctgtgtgggagatgagtacatcgccgccctgggcggggccggcggcaagggcaaccgcttcttcctggccaacaacaacagagcccctgtgacctgcaccccaggccagcccggccagcagagggtgctgcacctggagctgaagacagtggcccatgctggcatggtgggcttccccaatgccggcaagagcagcctgctgcgggccatcagcaatgcccggcctgctgtggccagctaccccttcaccaccctgaagccccacgtgggcatcgtgcactatgagggccacctgcagattgctgtggccgacatccctggcatcatccggggggcccaccagaacagaggcctgggcagcgccttcctgcggcacatcgagcgctgccgcttcctgctgtttgtggtggacctgagccagcctgagccctggacccaggtggatgacctgaagtatgagctggagatgtatgagaagggcctgagcgcccggccccacgccatcgtggccaacaagattgacctgcctgaggcccaggccaacctgagccagctgcgggaccacctgggccaggaggtgattgtgctgagcgccctgaccggggagaacctggagcagctgctgctgcacctgaaggtgctgtatgatgcctatgcagaggccgagctgggccagggccggcagcccctgcgctggtag

SEQ ID NO: 154575 - DNA, 747 bp, synthetic construct
  misc_feature 1..747: note = Description of Artificial Sequence: Synthetic coding sequence
  source 1..747: mol_type = other DNA
atggccccagcccgctgcttcagcgcccggctgaggacagtgttccagggcgtgggccactgggccctgagcacctgggccggcctgaagcccagccggctgctgccccagagggccagcccccggctgctgtctgtgggccgggctgacctggccaagcaccaggagctgcccgggaagaagctgctgtctgagaagaagctgaagcgctactttgtggactaccgccgggtgctggtgtgtggcggcaatggaggagctggggccagctgcttccacagcgagcccaggaaggagtttggaggcccagatggaggagatggcggcaatggaggccacgtgatcctgcgggtggccgacatccctggcatcatccggggggcccaccagaacagaggcctgggcagcgccttcctgcggcacatcgagcgctgccgcttcctgctgtttgtggtggacctgagccagcctgagccctggacccaggtggatgacctgaagtatgagctggagatgtatgagaagggcctgagcgcccggccccacgccatcgtggccaacaagattgacctgcctgaggcccaggccaacctgagccagctgcgggaccacctgggccaggaggtgattgtgctgagcgccctgaccggggagaacctggagcagctgctgctgcacctgaaggtgctgtatgatgcctatgcagaggccgagctgggccagggccggcagcccctgcgctggtag

SEQ ID NO: 154576 - DNA, 702 bp, synthetic construct
  misc_feature 1..702: note = Description of Artificial Sequence: Synthetic coding sequence
  source 1..702: mol_type = other DNA
atggccccagcccgctgcttcagcgcccggctgaggacagtgttccagggcgtgggccactgggccctgagcacctgggccggcctgaagcccagccggctgctgccccagagggccagcccccggctgctgtctgtgggccgggctgacctggccaagcaccaggagctgcccgggaagaagctgctgtctgagaagaagctgaagcgctactttgtggactaccgccgggtgctggtgtgtggcggcaatggaggagctggggccagctgcttccacagcgagcccaggaaggagtttggaggcccagatggaggagatggcggcaatggaggccacgtgatcctgcgggtggaccagcaggtgaagagcctgagctctgtgctgagccgctaccagggcttcagcggggaggatggcggcagcaagaactgcttcggccgctctggagctgtgctgtacatccgggtgcctgtgggcaccctggtgaaggagggcggccgggtggtggccgacctgagctgtgtgggagatgagtacatcgccgccctgggcggggccggcggcaagggcaaccgcttcttcctggccaacaacaacagagcccctgtgacctgcaccccaggccagcccggccagcagagggtgctgcacctggagctgaagacagtggcccatgctggcatggtgggcttcccctag

SEQ ID NO: 154577 - DNA, 537 bp, synthetic construct
  misc_feature 1..537: note = Description of Artificial Sequence: Synthetic coding sequence
  source 1..537: mol_type = other DNA
atggtgggcttccccaatgccggcaagagcagcctgctgcgggccatcagcaatgcccggcctgctgtggccagctaccccttcaccaccctgaagccccacgtgggcatcgtgcactatgagggccacctgcagattgctgtggccgacatccctggcatcatccggggggcccaccagaacagaggcctgggcagcgccttcctgcggcacatcgagcgctgccgcttcctgctgtttgtggtggacctgagccagcctgagccctggacccaggtggatgacctgaagtatgagctggagatgtatgagaagggcctgagcgcccggccccacgccatcgtggccaacaagattgacctgcctgaggcccaggccaacctgagccagctgcgggaccacctgggccaggaggtgattgtgctgagcgccctgaccggggagaacctggagcagctgctgctgcacctgaaggtgctgtatgatgcctatgcagaggccgagctgggccagggccggcagcccctgcgctggtag

SEQ ID NO: 154578 - DNA, 864 bp, synthetic construct
  misc_feature 1..864: note = Description of Artificial Sequence: Synthetic coding sequence
  source 1..864: mol_type = other DNA
cgcagcaacctgaagagagatgtggcccacctgtaccggggcgtgggcagccgctacatcatgggcagcggggagagcttcatgcagctgcagcagaggctgctgcgggagaaggaggccaagatcaggaaggccctggaccggctgaggaagaagaggcacctgctgcggcggcagaggacccggcgggagttccctgtgatctctgtggtgggctacaccaactgtgggaagaccaccctcatcaaggccctgactggagatgctgccatccagccccgggaccagctgtttgccaccctggatgtgacagcccatgctggcaccctgcccagcaggatgacagtgctgtatgtggacaccatcggcttcctgagccagctgccccacggcctgattgagagcttcagcgccaccctggaggatgtggcccacagcgacctgatcctgcacgtgagagatgtgagccaccctgaggccgagctgcagaagtgcagcgtgctgagcaccctgcggggcctgcagctgcctgcccccctgctggacagcatggtggaggtgcacaacaaggtggacctggtgcccggctacagccccacagagcccaacgtggtgcctgtgtctgccctgcggggccacggcctgcaggagctgaaggccgagctggatgctgctgtgctgaaggccaccggccggcagatcctgaccctgcgggtgcggctggccggggcccagctgtcctggctgtacaaggaggccaccgtgcaggaggtggatgtgatcccagaagatggagctgctgatgtgcgggtcatcatcagcaacagcgcctacggcaagttcaggaagctgtttcctggatag

SEQ ID NO: 154579 - DNA, 864 bp, synthetic construct
  misc_feature 1..864: note = Description of Artificial Sequence: Synthetic coding sequence
  source 1..864: mol_type = other DNA
tgaagcaacctgaagagagatgtggcccacctgtaccggggcgtgggcagccgctacatcatgggcagcggggagagcttcatgcagctgcagcagaggctgctgcgggagaaggaggccaagatcaggaaggccctggaccggctgaggaagaagaggcacctgctgcggcggcagaggacccggcgggagttccctgtgatctctgtggtgggctacaccaactgtgggaagaccaccctcatcaaggccctgactggagatgctgccatccagccccgggaccagctgtttgccaccctggatgtgacagcccatgctggcaccctgcccagcaggatgacagtgctgtatgtggacaccatcggcttcctgagccagctgccccacggcctgattgagagcttcagcgccaccctggaggatgtggcccacagcgacctgatcctgcacgtgagagatgtgagccaccctgaggccgagctgcagaagtgcagcgtgctgagcaccctgcggggcctgcagctgcctgcccccctgctggacagcatggtggaggtgcacaacaaggtggacctggtgcccggctacagccccacagagcccaacgtggtgcctgtgtctgccctgcggggccacggcctgcaggagctgaaggccgagctggatgctgctgtgctgaaggccaccggccggcagatcctgaccctgcgggtgcggctggccggggcccagctgtcctggctgtacaaggaggccaccgtgcaggaggtggatgtgatcccagaagatggagctgctgatgtgcgggtcatcatcagcaacagcgcctacggcaagttcaggaagctgtttcctggatag

SEQ ID NO: 154580 - DNA, 891 bp, synthetic construct
  misc_feature 1..891: note = Description of Artificial Sequence: Synthetic coding sequence
  source 1..891: mol_type = other DNA
atgaccctgaacaacgtgaccatgaggcagggcaccgtgggcatgcagccccagcagcagcgctggagcatcccagcagatggccgccacctgatggtgcagaaggagccccaccagtacagccacaggaacagacattctgccaccccagaggaccactgcagaagatcctggagcagtgacagcacagattctgtcatcagcagcgagagcggcaacacctactacagagtggtgctgattggagagcagggcgtgggcaagagcaccctggccaacatctttgctggggtgcatgacagcatggacagcgactgtgaggtgctgggggaggacacctatgaaagaaccctgatggtggatggagagagcgccaccatcatcctgctggacatgtgggagaacaagggggagaatgagtggctgcatgaccactgcatgcaggtgggagatgcctacctgattgtgtacagcatcacagaccgggccagctttgagaaggccagcgagctgcgcatccagctgcggcgggcccggcagacagaggacatccccatcatcctggtgggcaacaagagtgacctggtgcgctgccgggaggtgtctgtgtctgagggccgggcctgtgctgtggtgtttgactgcaagttcatcgagaccagcgctgctgtgcagcacaacgtgaaggagctgtttgagggcatcgtgcggcaggtgcggctgcggcgggacagcaaggagaagaatgaaagaaggctggcctaccagaagaggaaggagagcatgcccaggaaggcccggcgcttctggggcaagatcgtggccaagaacaacaagaacatggccttcaagctgaagagcaagagctgccacgacctgtctgtgctgtag

SEQ ID NO: 154581 - DNA, 891 bp, synthetic construct; identical to SEQ ID NO: 154580
  misc_feature 1..891: note = Description of Artificial Sequence: Synthetic coding sequence
  source 1..891: mol_type = other DNA

SEQ ID NO: 154582 - DNA, 282 bp, synthetic construct
  misc_feature 1..282: note = Description of Artificial Sequence: Synthetic coding sequence
  source 1..282: mol_type = other DNA
atgaccctgaacaacgtgaccatgaggcagggcaccgtgggcatgcagccccagcagcagcgctggagcatcccagcagatggccgccacctgatggtgcagaaggagccccaccagtacagccacaggaacagacattctgccaccccagaggaccactgcagaagatcctggagcagtgacagcacagattctgtcatcagcagcgagagcggcaacacctactacagagtggtgctgattggagagcagggcgtgggcaagagcaccctggccaactag

SEQ ID NO: 154583 - DNA, 927 bp, synthetic construct
  misc_feature 1..927: note = Description of Artificial Sequence: Synthetic coding sequence
  source 1..927: mol_type = other DNA
atggtgatggagaagcccagccccctgctggtgggccgggagtttgtgcggcagtactacaccctgctgaaccaggccccagacatgctgcaccgcttctacggcaagaacagcagctatgtgcacggcggcctggacagcaatggcaagccagcagatgctgtgtatggccagaaggaggtggaggagcctgaggagcggcagcagaccccagaggtggtgcctgatgacagcggcaccttctatgaccaggccgtggtgtccaatgacatggaggagcacctggaggagcctgtggccgagcctgagccagaccctgagcctgagcctgagcaggagcctgtgtctgagatccaggaggagaagccacccaggcctgagagcaagccagagagccagatccccccccagaggccccagagggaccagagggtgcgggagcagaggatcaacatccccccccagaggggcccccggcccatccgggaggccggggagcagggcgacatcgagcccaggaggatggtgcgccacccagacagccaccagctgttcatcggcaacctgccccatgaggtggacaagtctgagctgaaggacttcttccagagctatggaaatgtggtggagctgcgcatcaacagcggcggcaagctgcccaactttggatttgtggtgtttgatgacagcgagcctgtgcagaaggtgctgagcaaccggcccatcatgttccggggggaggtgcggctgaatgtggaggagaagaagaccagggctgcccgggagggggacagaagagacaaccggctgcggggccctgggggcccccggggcggcctgggcggcggcatgaggggccccccccggggcggcatggtgcagaagccaggcttcggcgtgggccggggcctggccccccggcagtag

SEQ ID NO: 154584 - DNA, 1401 bp, synthetic construct
  misc_feature 1..1401: note = Description of Artificial Sequence: Synthetic coding sequence
  source 1..1401: mol_type = other DNA
atggtgatggagaagcccagccccctgctggtgggccgggagtttgtgcggcagtactacaccctgctgaaccaggccccagacatgctgcaccgcttctacggcaagaacagcagctatgtgcacggcggcctggacagcaatggcaagccagcagatgctgtgtatggccagaaggagatccacaggaaggtgatgagccagaacttcaccaactgccacaccaagatcagacatgtggatgcccacgccaccctgaatgatggagtggtggtgcaggtgatgggcctgctgagcaacaacaaccaggccctgcggcgcttcatgcagacctttgtgctggcccctgagggctctgtggccaacaagttctacgtgcacaatgacatcttccgctaccaggatgaggtgtttggaggctttgtgacagagccccaggaggagagcgaggaggaggtggaggagcctgaggagcggcagcagaccccagaggtggtgcctgatgacagcggcaccttctatgaccaggccgtggtgtccaatgacatggaggagcacctggaggagcctgtggccgagcctgagccagaccctgagcctgagcctgagcaggagcctgtgtctgagatccaggaggagaagccagagcctgtgctggaggagacagccccagaagatgcccagaagagcagcagccctgccccagctgacatcgcccagacagtgcaggaggacctgcggaccttctcctgggcctctgtgaccagcaagaacctgccccccagcggggctgtgcctgtgacaggcatcccccctcatgtggtgaaggtgcctgccagccagcccaggcctgagagcaagccagagagccagatccccccccagaggccccagagggaccagagggtgcgggagcagaggatcaacatccccccccagaggggcccccggcccatccgggaggccggggagcagggcgacatcgagcccaggaggatggtgcgccacccagacagccaccagctgttcatcggcaacctgccccatgaggtggacaagtctgagctgaaggacttcttccagagctatggaaatgtggtggagctgcgcatcaacagcggcggcaagctgcccaactttggatttgtggtgtttgatgacagcgagcctgtgcagaaggtgctgagcaaccggcccatcatgttccggggggaggtgcggctgaatgtggaggagaagaagaccagggctgcccgggagggggacagaagagacaaccggctgcggggccctgggggcccccggggcggcctgggcggcggcatgaggggccccccccggggcggcatggtgcagaagccaggcttcggcgtgggccggggcctggccccccggcagtag

SEQ ID NO: 154585 - DNA, 1401 bp, synthetic construct; identical to SEQ ID NO: 154584
  misc_feature 1..1401: note = Description of Artificial Sequence: Synthetic coding sequence
  source 1..1401: mol_type = other DNA

SEQ ID NO: 154586 - DNA, 318 bp, synthetic construct
  misc_feature 1..318: note = Description of Artificial Sequence: Synthetic coding sequence
  source 1..318: mol_type = other DNA
atggtgatggagaagcccagccccctgctggtgggccgggagtttgtgcggcagtactacaccctgctgaaccaggccccagacatgctgcaccgcttctacggcaagaacagcagctatgtgcacggcggcctggacagcaatggcaagccagcagatgctgtgtatggccagaaggagatccacaggaaggtgatgagccagaacttcaccaactgccacaccaagatcagacatgtggatgcccacgccaccctgaatgatggagtggtggtgcaggtgatgggcctgctgagcaacaacaaccaggccctgtag

SEQ ID NO: 154587 - DNA, 369 bp, synthetic construct
  misc_feature 1..369: note = Description of Artificial Sequence: Synthetic coding sequence
  source 1..369: mol_type = other DNA
atggtgatggagaagcccagccccctgctggtgggccgggagtttgtgcggcagtactacaccctgctgaaccaggccccagacatgctgcaccgcttctacggcaagaacagcagctatgtgcacggcggcctggacagcaatggcaagccagcagatgctgtgtatggccagaaggagatccacaggaaggtgatgagccagaacttcaccaactgccacaccaagatcagacatgtggatgcccacgccaccctgaatgatggagtggtggtgcaggtgatgggcctgctgagcaacaacaaccaggccctgcggcgcttcatgcagacctttgtgctggcccctgagagcctgaagaagaagtag

SEQ ID NO: 154588 - DNA, 354 bp, synthetic construct
  misc_feature 1..354: note = Description of Artificial Sequence: Synthetic coding sequence
  source 1..354: mol_type = other DNA
atggtgatggagaagcccagccccctgctggtgggccgggagtttgtgcggcagtactacaccctgctgaaccaggccccagacatgctgcaccgcttctacggcaagaacagcagctatgtgcacggcggcctggacagcaatggcaagccagcagatgctgtgtatggccagaaggagatccacaggaaggtgatgagccagaacttcaccaactgccacaccaagatcagacatgtggatgcccacgccaccctgaatgatggagtggtggtgcaggtgatgggcctgctgagcaacaacaaccaggccctgcggcgcttcatgcagacctttgtgctggcccctgagtag

SEQ ID NO: 154589 - DNA, 369 bp, synthetic construct; identical to SEQ ID NO: 154587
  misc_feature 1..369: note = Description of Artificial Sequence: Synthetic coding sequence
  source 1..369: mol_type = other DNA

SEQ ID NO: 154590 - DNA, 321 bp, synthetic construct
  misc_feature 1..321: note = Description of Artificial Sequence: Synthetic coding sequence
  source 1..321: mol_type = other DNA
atggtgatggagaagcccagccccctgctggtgggccgggagtttgtgcggcagtactacaccctgctgaaccaggccccagacatgctgcaccgcttctacggcaagaacagcagctatgtgcacggcggcctggacagcaatggcaagccagcagatgctgtgtatggccagaaggagatccacaggaaggtgatgagccagaacttcaccaactgccacaccaagatcagacatgtggatgcccacgccaccctgaatgatggagtggtggtgcaggtgatgggcctgctgagcaacaacaaccaggccctgaggtag

SEQ ID NO: 154591 - DNA, 855 bp, synthetic construct
  misc_feature 1..855: note = Description of Artificial Sequence: Synthetic coding sequence
  source 1..855: mol_type = other DNA
atggaggagcacctggaggagcctgtggccgagcctgagccagaccctgagcctgagcctgagcaggagcctgtgtctgagatccaggaggagaagccagagcctgtgctggaggagacagccccagaagatgcccagaagagcagcagccctgccccagctgacatcgcccagacagtgcaggaggacctgcggaccttctcctgggcctctgtgaccagcaagaacctgccccccagcggggctgtgcctgtgacaggcatcccccctcatgtggtgaaggtgcctgccagccagcccaggcctgagagcaagccagagagccagatccccccccagaggccccagagggaccagagggtgcgggagcagaggatcaacatccccccccagaggggcccccggcccatccgggaggccggggagcagggcgacatcgagcccaggaggatggtgcgccacccagacagccaccagctgttcatcggcaacctgccccatgaggtggacaagtctgagctgaaggacttcttccagagctatggaaatgtggtggagctgcgcatcaacagcggcggcaagctgcccaactttggatttgtggtgtttgatgacagcgagcctgtgcagaaggtgctgagcaaccggcccatcatgttccggggggaggtgcggctgaatgtggaggagaagaagaccagggctgcccgggagggggacagaagagacaaccggctgcggggccctgggggcccccggggcggcctgggcggcggcatgaggggccccccccggggcggcatggtgcagaagccaggcttcggcgtgggccggggcctggccccccggcagtag

SEQ ID NO: 154592 - DNA, 4359 bp, synthetic construct
  misc_feature 1..4359: note = Description of Artificial Sequence: Synthetic coding sequence
  source 1..4359: mol_type = other DNA
atggtgaagctggacatccacaccctggcccaccacctgaagcaggagcggctgtatgtgaacagcgagaagcagctgatccagaggctgaatgctgatgtgctgaagacagctgagaagctgtacagaacagcctggatcgccaagcagcagaggatcaacctggacaggctcatcatcaccagcgctgaggccagccctgctgagtgctgccagcacgccaagatcctggaggacacccagtttgtggatggctacaagcagctgggcttccaggagacagcctacggggagttcctgagccggctgcgggagaaccccaggctcatcgccagcagcctggtggccggggagaagctgaaccaggagaacacccagagcgtcatctacacagtgttcaccagcctgtatggcaactgcatcatgcaggaggatgagagctacctgctgcaggtgctgcgctacctgattgaatttgagctgaaggagagtgacaacccccggcggctgctgcggcggggcacctgtgccttcagcatcctcttcaagctgttcagcgagggcctcttcagcgccaagctgttcctgacagccaccctgcacgagcccatcatgcagctgctggtggaggatgaggaccacctggagacagaccccaacaagctgattgagcgcttcagccccagccagcaggagaagctgtttggagagaagggcagtgaccgcttccggcagaaggtgcaggagatggtggagagcaatgaggccaagctggtggccctggtgaacaagttcatcggctacctgaagcagaacacctactgcttcccccacagcctgcgctggatcgtgtcccagatgtacaagaccctgagctgtgtggaccggctggaggtgggggaggtgcgggccatgtgcacagacctgctgctggcctgcttcatctgcccagctgtggtgaaccctgagcagtatggcatcatcagtgatgcccccatcaatgaggtggcccgcttcaacctgatgcaggtgggccgcctgctgcagcagctggccatgacaggcagcgaggagggggaccccaggaccaagagcagcctgggcaagtttgacaagagctgtgtggccgccttcctggatgtggtgattggaggccgggctgtggagaccccacccctgagctctgtgaacctgctggagggcctgagcaggacagtggtgtacatcacctacagccagctgatcaccctggtgaacttcatgaagtctgtgatgtctggggaccagctgcgggaggacaggatggccctggacaacctgctggccaacctgcccccagccaagccaggcaagagcagcagcctggagatgaccccctacaacaccccccagctgagccctgccaccaccccagccaacaagaagaaccggctgcccatcgccaccaggagccgcagcaggaccaacatgctgatggacctgcacatggaccacgagggcagcagccaggagaccatccaggaggtgcagcctgaggaggtgctggtgatcagcctgggcaccggcccccagctgaccccaggcatgatgtctgaaaatgaggtgctgaacatgcagctgagtgatggcggccagggagatgtgcctgtggatgagaacaagctgcacggcaagccagacaagaccctgcgcttcagcctgtgcagcgacaacctggagggcatcagcgagggccccagcaacagaagcaacagcgtgagcagcctggacctggagggggagagcgtgtctgagctgggcgccggccccagcggcagcaatggagtggaggccctgcagctgctggagcacgagcaggccaccacccaggacaacctggatgacaagctgaggaagtttgagatccgggacatgatgggcctgacagatgaccgggacatcagcgagaccgtgtctgagacctggagcacagatgtgctgggcagtgactttgaccccaacattgatgaggaccggctgcaggagattgctggagctgctgctgagaacatgctgggcagcctgctgtgcctgcccggcagcggctctgtgctgctggacccctgcaccggcagcaccatcagcgagaccaccagcgaggcctggagcgtggaggtgctgcccagcgacagcgaggccccagacctgaagcaggaggagcggctgcaggagctggagagctgcagcggcctgggcagcaccagtgatgacacagatgtgcgggaggtgagcagccggcccagcaccccaggcctgtctgtggtgtctggcatcagcgccaccagcgaggacatccccaacaagattgaggacctgcggtctgagtgcagcagtgactttggaggcaaggacagcgtgaccagcccagacatggatgagatcacccatggagccagcgctgtggtgcggcccaaggtgcactacgcccggcccagccaccccccaccagacccccccatcctggagggcgctgtgggcggcaatgaggcccggctgcccaactttggcagccacgtgctgaccccagctgagatggaggccttcaagcagaggcacagctacccagagcggctggtgcgcagccgcagcagtgacatcgtgtcctctgtgcggcggcccatgtctgaccccagctggaacagaagacctggaaatgaggagcgggagctgcccccagctgctgccatcggggccaccagcctggtggccgccccccacagcagcagcagcagccccagcaaggacagcagcagaggagaaacagaggagaggaaggacagtgatgatgagaagagtgacaggaaccggccctggtggaggaagagatttgtgtctgccatgcccaaggcccccatccccttcaggaagaaggagaagcaggagaaggacaaggatgacctgggccctgaccgcttcagcaccctgacagatgaccccagcccccggctgagcgcccaggcccaggtggccgaggacatcctggacaagtacagaaatgccatcaagaggaccagccccagtgatggagccatggccaactatgagagcactggagacaaccacgaccgggacctgagcagcaagctgctgtaccacagcgacaaggaggtgatgggagatggagagagcgcccatgacagccccagagatgaggccctgcagaacatctctgcagatgacctgcctgattctgccagccaggccgcccacccccaggacagcgccttctcctacagagatgccaagaagaagctgcggctggccctgtgcagcgctgacagcgtggccttccctgtgctgacccacagcaccagaaatggcctgcctgaccacacagatcctgaggacaatgagatcgtgtgcttcctgaaggtgcagattgctgaggccatcaacctgcaggacaagaacctgatggcccagctgcaggagaccatgagatgtgtgtgccgctttgacaacagaacctgcaggaagctgctggccagcattgctgaggactacaggaagagggccccctacatcgcctacctgacccgctgccggcagggcctgcagaccacccaggcccacctggagcggctgctgcagagggtgctgcgggacaaggaggtggccaaccgctacttcaccaccgtgtgtgtgcggctgctgctggagagcaaggagaagaagatccgggagttcatccaggacttccagaagctgacagctgctgatgacaagacagcccaggtggaggacttcctgcagttcctgtatggagccatggcccaggatgtgatctggcagaatgccagcgaggagcagctgcaggatgcccagctggccatcgagaggtctgtgatgaaccgcatcttcaagctggccttctaccccaaccaggatggagacatcctgcgggaccaggtgctgcacgagcacatccagaggctgagcaaggtggtgacagccaaccaccgggccctgcagatccctgaggtgtacctgcgggaggccccctggcccagcgcccagagcgagatccgcaccatcagcgcctacaagaccccccgggacaaggtgcagtgcatcctgaggatgtgcagcaccatcatgaacctgctgagcctggccaatgaagattctgtgcctggagcagatgactttgtgcctgtgctggtgtttgtgctgatcaaggccaaccccccctgcctgctgagcacagtgcagtacatcagcagcttctacgccagctgcctgagcggggaggagagctactggtggatgcagttcaccgctgctgtggagttcatcaagaccattgatgacaggaagtag

SEQ ID NO: 154593 - DNA, 1494 bp, synthetic construct
  misc_feature 1..1494: note = Description of Artificial Sequence: Synthetic coding sequence
  source 1..1494: mol_type = other DNA
atggtgaagctggacatccacaccctggcccaccacctgaagcaggagcggctgtatgtgaacagcgagaagcagctgatccagaggctgaatgctgatgtgctgaagacagctgagaagctgtacagaacagcctggatcgccaagcagcagaggatcaacctggacaggctcatcatcaccagcgctgaggccagccctgctgagtgctgccagcacgccaagatcctggaggacacccagtttgtggatggctacaagcagctgggcttccaggagacagcctacggggagttcctgagccggctgcgggagaaccccaggctcatcgccagcagcctggtggccggggagaagctgaaccaggagaacacccagagcgtcatctacacagtgttcaccagcctgtatggcaactgcatcatgcaggaggatgagagctacctgctgcaggtgctgcgctacctgattgaatttgagctgaaggagagtgacaacccccggcggctgctgcggcggggcacctgtgccttcagcatcctcttcaagctgttcagcgagggcctcttcagcgccaagctgttcctgacagccaccctgcacgagcccatcatgcagctgctggtggaggatgaggaccacctggagacagaccccaacaagctgattgagcgcttcagccccagccagcaggagaagctgtttggagagaagggcagtgaccgcttccggcagaaggtgcaggagatggtggagagcaatgaggccaagctggtggccctggtgaacaagttcatcggctacctgaagcagaacacctactgcttcccccacagcctgcgctggatcgtgtcccagatgtacaagaccctgagctgtgtggaccggctggaggtgggggaggtgcgggccatgtgcacagacctgctgctggcctgcttcatctgcccagctgtggtgaaccctgagcagtatggcatcatcagtgatgcccccatcaatgaggtggcccgcttcaacctgatgcaggtgggccgcctgctgcagcagctggccatgacaggcagcgaggagggggaccccaggaccaagagcagcctgggcaagtttgacaagagctgtgtggccgccttcctggatgtggtgattggaggccgggctgtggagaccccacccctgagctctgtgaacctgctggagggcctgagcaggacagtggtgtacatcacctacagccagctgatcaccctggtgaacttcatgaagtctgtgatgtctggggaccagctgcgggaggacaggatggccctggacaacctgctggccaacctgcccccagccaagccaggcaagagcagcagcctggagatgaccccctacaacaccccccagctgagccctgccaccaccccagccaacaagaagaaccggctgcccatcggcaaggagaacttctcctactggagcttcctgctgaacctgatcttccactag

SEQ ID NO: 154594 - DNA, 4437 bp, synthetic construct
  misc_feature 1..4437: note = Description of Artificial Sequence: Synthetic coding sequence
  source 1..4437: mol_type = other DNA
atggtgaagctggacatccacaccctggcccaccacctgaagcaggagcggctgtatgtgaacagcgagaagcagctgatccagaggctgaatgctgatgtgctgaagacagctgagaagctgtacagaacagcctggatcgccaagcagcagaggatcaacctggacaggctcatcatcaccagcgctgaggccagccctgctgagtgctgccagcacgccaagatcctggaggacacccagtttgtggatggctacaagcagctgggcttccaggagacagcctacggggagttcctgagccggctgcgggagaaccccaggctcatcgccagcagcctggtggccggggagaagctgaaccaggagaacacccagagcgtcatctacacagtgttcaccagcctgtatggcaactgcatcatgcaggaggatgagagctacctgctgcaggtgctgcgctacctgattgaatttgagctgaaggagagtgacaacccccggcggctgctgcggcggggcacctgtgccttcagcatcctcttcaagctgttcagcgagggcctcttcagcgccaagctgttcctgacagccaccctgcacgagcccatcatgcagctgctggtggaggatgaggaccacctggagacagaccccaacaagctgattgagcgcttcagccccagccagcaggagaagctgtttggagagaagggcagtgaccgcttccggcagaaggtgcaggagatggtggagagcaatgaggccaagctggtggccctggtgaacaagttcatcggctacctgaagcagaacacctactgcttcccccacagcctgcgctggatcgtgtcccagatgtacaagaccctgagctgtgtggaccggctggaggtgggggaggtgcgggccatgtgcacagacctgctgctggcctgcttcatctgcccagctgtggtgaaccctgagcagtatggcatcatcagtgatgcccccatcaatgaggtggcccgcttcaacctgatgcaggtgggccgcctgctgcagcagctggccatgacaggcagcgaggagggggaccccaggaccaagagcagcctgggcaagtttgacaagagctgtgtggccgccttcctggatgtggtgattggaggccgggctgtggagaccccacccctgagctctgtgaacctgctggagggcctgagcaggacagtggtgtacatcacctacagccagctgatcaccctggtgaacttcatgaagtctgtgatgtctggggaccagctgcgggaggacaggatggccctggacaacctgctggccaacctgcccccagccaagccaggcaagagcagcagcctggagatgaccccctacaacaccccccagctgagccctgccaccaccccagccaacaagaagaaccggctgcccatcgccaccaggagccgcagcaggaccaacatgctgatggacctgcacatggaccacgagggcagcagccaggagaccatccaggaggtgcagcctgaggaggtgctggtgatcagcctgggcaccggcccccagctgaccccaggcatgatgtctgaaaatgaggtgctgaacatgcagctgagtgatggcggccagggagatgtgcctgtggatgagaacaagctgcacggcaagccagacaagaccctgcgcttcagcctgtgcagcgacaacctggagggcatcagcgagggccccagcaacagaagcaacagcgtgagcagcctggacctggagggggagagcgtgtctgagctgggcgccggccccagcggcagcaatggagtggaggccctgcagctgctggagcacgagcaggccaccacccaggacaacctggatgacaagctgaggaagtttgagatccgggacatgatgggcctgacagatgaccgggacatcagcgagaccgtgtctgagacctggagcacagatgtgctgggcagtgactttgaccccaacattgatgaggaccggctgcaggagattgctggagctgctgctgagaacatgctgggcagcctgctgtgcctgcccggcagcggctctgtgctgctggacccctgcaccggcagcaccatcagcgagaccaccagcgaggcctggagcgtggaggtgctgcccagcgacagcgaggccccagacctgaagcaggaggagcggctgcaggagctggagagctgcagcggcctgggcagcaccagtgatgacacagatgtgcgggaggtgagcagccggcccagcaccccaggcctgtctgtggtgtctggcatcagcgccaccagcgaggacatccccaacaagattgaggacctgcggtctgagtgcagcagtgactttggaggcaaggacagcgtgaccagcccagacatggatgagatcacccatggagcccaccagctgaccagcccccccagccagagcgagagcctgctggccatgtttgaccccctgagcagccatgagggcgccagcgctgtggtgcggcccaaggtgcactacgcccggcccagccaccccccaccagacccccccatcctggagggcgctgtgggcggcaatgaggcccggctgcccaactttggcagccacgtgctgaccccagctgagatggaggccttcaagcagaggcacagctacccagagcggctggtgcgcagccgcagcagtgacatcgtgtcctctgtgcggcggcccatgtctgaccccagctggaacagaagacctggaaatgaggagcgggagctgcccccagctgctgccatcggggccaccagcctggtggccgccccccacagcagcagcagcagccccagcaaggacagcagcagaggagaaacagaggagaggaaggacagtgatgatgagaagagtgacaggaaccggccctggtggaggaagagatttgtgtctgccatgcccaaggcccccatccccttcaggaagaaggagaagcaggagaaggacaaggatgacctgggccctgaccgcttcagcaccctgacagatgaccccagcccccggctgagcgcccaggcccaggtggccgaggacatcctggacaagtacagaaatgccatcaagaggaccagccccagtgatggagccatggccaactatgagagcactggagacaaccacgaccgggacctgagcagcaagctgctgtaccacagcgacaaggaggtgatgggagatggagagagcgcccatgacagccccagagatgaggccctgcagaacatctctgcagatgacctgcctgattctgccagccaggccgcccacccccaggacagcgccttctcctacagagatgccaagaagaagctgcggctggccctgtgcagcgctgacagcgtggccttccctgtgctgacccacagcaccagaaatggcctgcctgaccacacagatcctgaggacaatgagatcgtgtgcttcctgaaggtgcagattgctgaggccatcaacctgcaggacaagaacctgatggcccagctgcaggagaccatgagatgtgtgtgccgctttgacaacagaacctgcaggaagctgctggccagcattgctgaggactacaggaagagggccccctacatcgcctacctgacccgctgccggcagggcctgcagaccacccaggcccacctggagcggctgctgcagagggtgctgcgggacaaggaggtggccaaccgctacttcaccaccgtgtgtgtgcggctgctgctggagagcaaggagaagaagatccgggagttcatccaggacttccagaagctgacagctgctgatgacaagacagcccaggtggaggacttcctgcagttcctgtatggagccatggcccaggatgtgatctggcagaatgccagcgaggagcagctgcaggatgcccagctggccatcgagaggtctgtgatgaaccgcatcttcaagctggccttctaccccaaccaggatggagacatcctgcgggaccaggtgctgcacgagcacatccagaggctgagcaaggtggtgacagccaaccaccgggccctgcagatccctgaggtgtacctgcgggaggccccctggcccagcgcccagagcgagatccgcaccatcagcgcctacaagaccccccgggacaaggtgcagtgcatcctgaggatgtgcagcaccatcatgaacctgctgagcctggccaatgaagattctgtgcctggagcagatgactttgtgcctgtgctggtgtttgtgctgatcaaggccaaccccccctgcctgctgagcacagtgcagtacatcagcagcttctacgccagctgcctgagcggggaggagagctactggtggatgcagttcaccgctgctgtggagttcatcaagaccattgatgacaggaagtag

SEQ ID NO: 154595 - DNA, 4464 bp, synthetic construct
  misc_feature 1..4464: note = Description of Artificial Sequence: Synthetic coding sequence
  source 1..4464: mol_type = other DNA
atggtgaagctggacatccacaccctggcccaccacctgaagcaggagcggctgtatgtgaacagcgagaagcagctgatccagaggctgaatgctgatgtgctgaagacagctgagaagctgtacagaacagcctggatcgccaagcagcagaggatcaacctggacaggctcatcatcaccagcgctgaggccagccctgctgagtgctgccagcacgccaagatcctggaggacacccagtttgtggatggctacaagcagctgggcttccaggagacagcctacggggagttcctgagccggctgcgggagaaccccaggctcatcgccagcagcctggtggccggggagaagctgaaccaggagaacacccagagcgtcatctacacagtgttcaccagcctgtatggcaactgcatcatgcaggaggatgagagctacctgctgcaggtgctgcgctacctgattgaatttgagctgaaggagagtgacaacccccggcggctgctgcggcggggcacctgtgccttcagcatcctcttcaagctgttcagcgagggcctcttcagcgccaagctgttcctgacagccaccctgcacgagcccatcatgcagctgctggtggaggatgaggaccacctggagacagaccccaacaagctgattgagcgcttcagccccagccagcaggagaagctgtttggagagaagggcagtgaccgcttccggcagaaggtgcaggagatggtggagagcaatgaggccaagctggtggccctggtgaacaagttcatcggctacctgaagcagaacacctactgcttcccccacagcctgcgctggatcgtgtcccagatgtacaagaccctgagctgtgtggaccggctggaggtgggggaggtgcgggccatgtgcacagacctgctgctggcctgcttcatctgcccagctgtggtgaaccctgagcagtatggcatcatcagtgatgcccccatcaatgaggtggcccgcttcaacctgatgcaggtgggccgcctgctgcagcagctggccatgacaggcagcgaggagggggaccccaggaccaagagcagcctgggcaagtttgacaagagctgtgtggccgccttcctggatgtggtgattggaggccgggctgtggagaccccacccctgagctctgtgaacctgctggagggcctgagcaggacagtggtgtacatcacctacagccagctgatcaccctggtgaacttcatgaagtctgtgatgtctggggaccagctgcgggaggacaggatggccctggacaacctgctggccaacctgcccccagccaagccaggcaagagcagcagcctggagatgaccccctacaacaccccccagctgagccctgccaccaccccagccaacaagaagaaccggctgcccatcgccaccaggagccgcagcaggaccaacatgctgatggacctgcacatggaccacgagggcagcagccaggagaccatccaggaggtgcagcctgaggaggtgctggtgatcagcctgggcaccggcccccagctgaccccaggcatgatgtctgaaaatgaggtgctgaacatgcagctgagtgatggcggccagggagatgtgcctgtggatgagaacaagctgcacggcaagccagacaagaccctgcgcttcagcctgtgcagcgacaacctggagggcatcagcgagggccccagcaacagaagcaacagcgtgagcagcctggacctggagggggagagcgtgtctgagctgggcgccggccccagcggcagcaatggagtggaggccctgcagctgctggagcacgagcaggccaccacccaggacaacctggatgacaagctgaggaagtttgagatccgggacatgatgggcctgacagatgaccgggacatcagcgagaccgtgtctgagacctggagcacagatgtgctgggcagtgactttgaccccaacattgatgaggaccggctgcaggagattgctggagctgctgctgagaacatgctgggcagcctgctgtgcctgcccggcagcggctctgtgctgctggacccctgcaccggcagcaccatcagcgagaccaccagcgaggcctggagcgtggaggtgctgcccagcgacagcgaggccccagacctgaagcaggaggagcggctgcaggagctggagagctgcagcggcctgggcagcaccagtgatgacacagatgtgcgggaggtgagcagccggcccagcaccccaggcctgtctgtggtgtctggcatcagcgccaccagcgaggacatccccaacaagattgaggacctgcggtctgagtgcagcagtgactttggaggcaaggacagcgtgaccagcccagacatggatgagatcacccatgacttcctgtacatcctgcagcccaagcagcacttccagcacatcgaggccgaggccgacatgaggatccagctgagcagcagcgcccaccagctgaccagcccccccagccagagcgagagcctgctggccatgtttgaccccctgagcagccatgaaggagccagcgctgtggtgcggcccaaggtgcactacgcccggcccagccaccccccaccagacccccccatcctggagggcgctgtgggcggcaatgaggcccggctgcccaactttggcagccacgtgctgaccccagctgagatggaggccttcaagcagaggcacagctacccagagcggctggtgcgcagccgcagcagtgacatcgtgtcctctgtgagaagacccatgtctgaccccagctggaacagaagacctggaaatgaggagcgggagctgcccccagctgctgccatcggggccaccagcctggtggccgccccccacagcagcagcagcagccccagcaaggacagcagcagaggagaaacagaggagaggaaggacagtgatgatgagaagagtgacaggaaccggccctggtggaggaagagatttgtgtctgccatgcccaaggcccccatccccttcaggaagaaggagaagcaggagaaggacaaggatgacctgggccctgaccgcttcagcaccctgacagatgaccccagcccccggctgagcgcccaggcccaggtggccgaggacatcctggacaagtacagaaatgccatcaagaggaccagccccagtgatggagccatggccaactatgagagcacagaggtgatgggagatggagagagcgcccatgacagccccagagatgaggccctgcagaacatctctgcagatgacctgcctgacagcgccagccaggccgcccacccccaggacagcgccttctcctacagagatgccaagaagaagctgcggctggccctgtgcagcgctgacagcgtggccttccctgtgctgacccacagcaccagaaatggcctgcctgaccacacagatcctgaagataatgaaattgtgtgcttcctgaaggtgcagattgctgaggccatcaacctgcaggacaagaacctgatggcccagctgcaggagaccatgagatgtgtgtgccgctttgacaacagaacctgcaggaagctgctggccagcattgctgaggactacaggaagagggccccctacatcgcctacctgacccgctgccggcagggcctgcagaccacccaggcccacctggagcggctgctgcagagggtgctgcgggacaaggaggtggccaaccgctacttcaccaccgtgtgtgtgcggctgctgctggagagcaaggagaagaagatccgggagttcatccaggacttccagaagctgacagctgctgatgacaagacagcccaggtggaggacttcctgcagttcctgtatggagccatggcccaggacgtcatctggcagaatgccagcgaggagcagctgcaggatgcccagctggccatcgagaggtctgtgatgaaccgcatcttcaagctggccttctaccccaaccaggatggagacatcctgcgggaccaggtgctgcacgagcacatccagaggctgagcaaggtggtgacagccaaccaccgggccctgcagatccctgaggtgtacctgcgggaggccccctggcccagcgcccagagcgagatccgcaccatcagcgcctacaagaccccccgggacaaggtgcagtgcatcctgaggatgtgcagcaccatcatgaacctgctgagcctggccaatgaagacagcgtgcctggagcagatgactttgtgcctgtgctggtgtttgtgctgatcaaggccaaccccccctgcctgctgagcacagtgcagtacatcagcagcttctacgccagctgcctgtctggagaggagagctactggtggatgcagttcaccgctgctgtggagttcatcaagaccattgatgacaggaagtag

SEQ ID NO: 154596 - DNA, 2514 bp, synthetic construct
  misc_feature 1..2514: note = Description of Artificial Sequence: Synthetic coding sequence
  source 1..2514: mol_type = other DNA
tgaaactgcatcatgcaggaggatgagagctacctgctgcaggtgctgcgctacctgattgaatttgagctgaaggagagtgacaacccccggcggctgctgcggcggggcacctgtgccttcagcatcctcttcaagctgttcagcgagggcctcttcagcgccaagctgttcctgacagccaccctgcacgagcccatcatgcagctgctggtggaggatgaggaccacctggagacagaccccaacaagctgattgagcgcttcagccccagccagcaggagaagctgtttggagagaagggcagtgaccgcttccggcagaaggtgcaggagatggtggagagcaatgaggccaagctggtggccctggtgaacaagttcatcggctacctgaagcagaacacctactgcttcccccacagcctgcgctggatcgtgtcccagatgtacaagaccctgagctgtgtggaccggctggaggtgggggaggtgcgggccatgtgcacagacctgctgctggcctgcttcatctgcccagctgtggtgaaccctgagcagtatggcatcatcagtgatgcccccatcaatgaggtggcccgcttcaacctgatgcaggtgggccgcctgctgcagcagctggccatgactggaagtgaggagggggaccccaggaccaagagcagcctgggcaagtttgacaagagctgtgtggccgccttcctggatgtggtgattggaggccgggctgtggagaccccacccctgagctctgtgaacctgctggagggcctgagcaggacagtggtgtacatcacctacagccagctgatcaccctggtgaacttcatgaagtctgtgatgtctggggaccagctgcgggaggacaggatggccctggacaacctgctggccaacctgcccccagccaagccaggcaagagcagcagcctggagatgaccccctacaacaccccccagctgagccctgccaccaccccagccaacaagaagaaccggctgcccatcgccaccaggagccgcagcaggaccaacatgctgatggacctgcacatggaccacgagggcagcagccaggagaccatccaggaggtgcagcctgaggaggtgctggtgatcagcctgggcaccggcccccagctgaccccaggcatgatgtctgaaaatgaggtgctgaacatgcagctgagtgatggcggccagggagatgtgcctgtggatgagaacaagctgcacggcaagccagacaagaccctgcgcttcagcctgtgcagcgacaacctggagggcatcagcgagggccccagcaacagaagcaacagcgtgagcagcctggacctggagggggagagcgtgtctgagctgggcgccggccccagcggcagcaatggagtggaggccctgcagctgctggagcacgagcaggccaccacccaggacaacctggatgacaagctgaggaagtttgagatccgggacatgatgggcctgacagatgaccgggacatcagcgagaccgtgtctgagacctggagcacagatgtgctgggcagtgactttgaccccaacattgatgaagatcggctgcaggagattgctggagctgctgctgagaacatgctgggcagcctgctgtgcctgcccggcagcggctctgtgctgctggacccctgcaccggcagcaccatcagcgagaccaccagcgaggcctggagcgtggaggtgctgcccagcgacagcgaggccccagacctgaagcaggaggagcggctgcaggagctggagagctgcagcggcctgggcagcaccagtgatgacacagatgtgcgggaggtgagcagccggcccagcaccccaggcctgtctgtggtgtctggcatcagcgccaccagcgaggacatccccaacaagattgaggacctgcggagtgaatgttccagtgactttggaggcaaggacagcgtgaccagcccagacatggatgagatcacccacggggccagcgctgtggtgcggcccaaggtgcactacgcccggcccagccaccccccaccagacccccccatcctggagggcgctgtgggcggcaatgaggcccggctgcccaactttggcagccacgtgctgaccccagctgagatggaggccttcaagcagaggcacagctacccagagcggctggtgcgcagccgcagcagtgacatcgtgtcctctgtgagaagacccatgtctgaccccagctggaacagaagacctggaaatgaggagcgggagctgcccccagctgctgccatcggggccaccagcctggtggccgccccccacagcagcagcagcagccccagcaaggacagcagcagaggagaaacagaggagaggaaggacagtgatgatgagaagagtgacaggaaccggccctggtggaggaagagatttgtgtctgccatgcccaaggcccccatccccttcaggaagaaggagaagcaggagtag

SEQ ID NO: 154597 - DNA, 2493 bp, synthetic construct
  misc_feature 1..2493: note = Description of Artificial Sequence: Synthetic coding sequence
  source 1..2493: mol_type = other DNA
tgactgcggcggggcacctgtgccttcagcatcctcttcaagctgttcagcgagggcctcttcagcgccaagctgttcctgacagccaccctgcacgagcccatcatgcagctgctggtggaggatgaggaccacctggagacagaccccaacaagctgattgagcgcttcagccccagccagcaggagaagctgtttggagagaagggcagtgaccgcttccggcagaaggtgcaggagatggtggagagcaatgaggccaagctggtggccctggtgaacaagttcatcggctacctgaagcagaacacctactgcttcccccacagcctgcgctggatcgtgtcccagatgtacaagaccctgagctgtgtggaccggctggaggtgggggaggtgcgggccatgtgcacagacctgctgctggcctgcttcatctgcccagctgtggtgaaccctgagcagtatggcatcatcagtgatgcccccatcaatgaggtggcccgcttcaacctgatgcaggtgggccgcctgctgcagcagctggccatgactggaagtgaggagggggaccccaggaccaagagcagcctgggcaagtttgacaagagctgtgtggccgccttcctggatgtggtgattggaggccgggctgtggagaccccacccctgagctctgtgaacctgctggagggcctgagcaggacagtggtgtacatcacctacagccagctgatcaccctggtgaacttcatgaagtctgtgatgtctggggaccagctgcgggaggacaggatggccctggacaacctgctggccaacctgcccccagccaagccaggcaagagcagcagcctggagatgaccccctacaacaccccccagctgagccctgccaccaccccagccaacaagaagaaccggctgcccatcggccagcagctggccgccatcacagcctgggacagcagcgccaccaacatcaccagccacatcaccgtggtgaccccatttgccaccaggagccgcagcaggaccaacatgctgatggacctgcacatggaccacgagggcagcagccaggagaccatccaggaggtgcagcctgaggaggtgctggtgatcagcctgggcaccggcccccagctgaccccaggcatgatgtctgaaaatgaggtgctgaacatgcagctgagtgatggcggccagggagatgtgcctgtggatgagaacaagctgcacggccccagcaacagaagcaacagcgtgagcagcctggacctggagggggagagcgtgtctgagctgggcgccggccccagcggcagcaatggagtggaggccctgcagctgctggagcacgagcaggccaccacccaggacaacctggatgacaagctgaggaagtttgagatccgggacatgatgggcctgacagatgaccgggacatcagcgagaccgtgtctgagacctggagcacagatgtgctgggcagtgactttgaccccaacattgatgaagatcggctgcaggagattgctggagctgctgctgagaacatgctgggcagcctgctgtgcctgcccggcagcggctctgtgctgctggacccctgcaccggcagcaccatcagcgagaccaccagcgaggcctggagcgtggaggtgctgcccagcgacagcgaggccccagacctgaagcaggaggagcggctgcaggagctggagagctgcagcggcctgggcagcaccagtgatgacacagatgtgcgggaggtgagcagccggcccagcaccccaggcctgtctgtggtgtctggcatcagcgccaccagcgaggacatccccaacaagattgaggacctgcggagtgaatgttccagtgactttggaggcaaggacagcgtgaccagcccagacatggatgagatcacccacggggcccaccagctgaccagcccccccagccagagcgagagcctgctggccatgtttgaccccctgagcagccatgaaggagccagcgctgtggtgcggcccaaggtgcactacgcccggcccagccaccccccaccagacccccccatcctggagggcgctgtgggcggcaatgaggcccggctgcccaactttggcagccacgtgctgaccccagctgagatggaggccttcaagcagaggcacagctacccagagcggctggtgcgcagccgcagcagtgacatcgtgtcctctgtgagaagacccatgtctgaccccagctggaacagaagacctggaaatgaggagcgggagctgcccccagctgctgccatcggggccaccagcctggtggccgccccccacagcagcagcagcagccccagcaaggacagcagcagaggagaaacagaggagaggaaggacagtgatgatgagaagagtgacaggaaccggccctggtggaggaagagatttgtgtctgccatgcccaaggcccccatccccttctag

SEQ ID NO: 154598 - DNA, 516 bp, synthetic construct
  misc_feature 1..516: note = Description of Artificial Sequence: Synthetic coding sequence
  source 1..516: mol_type = other DNA
atggtgcagtggcccaggatgtcctatggcaagaccagggtgatgaaccgcatcttcaagctggccttctaccccaaccaggatggagacatcctgcgggaccaggtgctgcacgagcacatccagaggctgagcaaggtggtgacagccaaccaccgggccctgcagatccctgaggtgtacctgcgggaggccccctggcccagcgcccagagcgagatccgcaccatcagcgcctacaagaccccccgggacaaggtgcagtgcatcctgaggatgtgcagcaccatcatgaacctgctgagcctggccaatgaagacagcgtgcctggagcagatgactttgtgcctgtgctggtgtttgtgctgatcaaggccaaccccccctgcctgctgagcacagtgcagtacatcagcagcttctacgccagctgcctgtctggagaggagagctactggtggatgcagttcaccgctgctgtggagttcatcaagaccattgatgacaggaagtag

SEQ ID NO: 154599 - DNA, 354 bp, synthetic construct
  misc_feature 1..354: note = Description of Artificial Sequence: Synthetic coding sequence
  source 1..354: mol_type = other DNA
atggtgaagctggacatccacaccctggcccaccacctgaagcaggagcggctgtatgtgaacagcgagaagcagctgatccagaggctgaatgctgatgtgctgaagacagctgagaagctgtacagaacagcctggatcgccaagcagcagaggatcaacctggacaggctcatcatcaccagcgctgaggccagccctgctgagtgctgccagcacgccaagatcctggaggacacccagtttgtggatggctacaagcagctgggcttccaggagacagcctacggggagttcctgagccggctgcgggagaaccccaggctcatcgccagcagcctggtggccggctag

SEQ ID NO: 154600 - DNA, 2967 bp, synthetic construct
  misc_feature 1..2967: note = Description of Artificial Sequence: Synthetic coding sequence
  source 1..2967: mol_type = other DNA
atggtgaagctggacatccacaccctggcccaccacctgaagcaggagcggctgtatgtgaacagcgagaagcagctgatccagaggctgaatgctgatgtgctgaagacagctgagaagctgtacagaacagcctggatcgccaagcagcagaggatcaacctggacaggctcatcatcaccagcgctgaggccagccctgctgagtgctgccagcacgccaagatcctggaggacacccagtttgtggatggctacaagcagctgggcttccaggagacagcctacggggagttcctgagccggctgcgggagaaccccaggctcatcgccagcagcctggtggccggggagaagctgaaccaggagaacacccagagcgtcatctacacagtgttcaccagcctgtatggcaactgcatcatgcaggaggatgagagctacctgctgcaggtgctgcgctacctgattgaatttgagctgaaggagagtgacaacccccggcggctgctgcggcggggcacctgtgccttcagcatcctcttcaagctgttcagcgagggcctcttcagcgccaagctgttcctgacagccaccctgcacgagcccatcatgcagctgctggtggaggatgaggaccacctggagacagaccccaacaagctgattgagcgcttcagccccagccagcaggagaagctgtttggagagaagggcagtgaccgcttccggcagaaggtgcaggagatggtggagagcaatgaggccaagctggtggccctggtgaacaagttcatcggctacctgaagcagaacacctactgcttcccccacagcctgcgctggatcgtgtcccagatgtacaagaccctgagctgtgtggaccggctggaggtgggggaggtgcgggccatgtgcacagacctgctgctggcctgcttcatctgcccagctgtggtgaaccctgagcagtatggcatcatcagtgatgcccccatcaatgaggtggcccgcttcaacctgatgcaggtgggccgcctgctgcagcagctggccatgacaggcagcgaggagggggaccccaggaccaagagcagcctgggcaagtttgacaagagctgtgtggccgccttcctggatgtggtgattggaggccgggctgtggagaccccacccctgagctctgtgaacctgctggagggcctgagcaggacagtggtgtacatcacctacagccagctgatcaccctggtgaacttcatgaagtctgtgatgtctggggaccagctgcgggaggacaggatggccctggacaacctgctggccaacctgcccccagccaagccaggcaagagcagcagcctggagatgaccccctacaacaccccccagctgagccctgccaccaccccagccaacaagaagaaccggctgcccatcgccaccaggagccgcagcaggaccaacatgctgatggacctgcacatggaccacgagggcagcagccaggagaccatccaggaggtgcagcctgaggaggtgctggtgatcagcctgggcaccggcccccagctgaccccaggcatgatgtctgaaaatgaggtgctgaacatgcagctgagtgatggcggccagggagatgtgcctgtggatgagaacaagctgcacggcaagccagacaagaccctgcgcttcagcctgtgcagcgacaacctggagggcatcagcgagggccccagcaacagaagcaacagcgtgagcagcctggacctggagggggagagcgtgtctgagctgggcgccggccccagcggcagcaatggagtggaggccctgcagctgctggagcacgagcaggccaccacccaggacaacctggatgacaagctgaggaagtttgagatccgggacatgatgggcctgacagatgaccgggacatcagcgagaccgtgtctgagacctggagcacagatgtgctgggcagtgactttgaccccaacattgatgaggaccggctgcaggagattgctggagctgctgctgagaacatgctgggcagcctgctgtgcctgcccggcagcggctctgtgctgctggacccctgcaccggcagcaccatcagcgagaccaccagcgaggcctggagcgtggaggtgctgcccagcgacagcgaggccccagacctgaagcaggaggagcggctgcaggagctggagagctgcagcggcctgggcagcaccagtgatgacacagatgtgcgggaggtgagcagccggcccagcaccccaggcctgtctgtggtgtctggcatcagcgccaccagcgaggacatccccaacaagattgaggacctgcggtctgagtgcagcagtgactttggaggcaaggacagcgtgaccagcccagacatggatgagatcacccatggagcccaccagctgaccagcccccccagccagagcgagagcctgctggccatgtttgaccccctgagcagccatgagggcgccagcgctgtggtgcggcccaaggtgcactacgcccggcccagccaccccccaccagacccccccatcctggagggcgctgtgggcggcaatgaggcccggctgcccaactttggcagccacgtgctgaccccagctgagatggaggccttcaagcagaggcacagctacccagagcggctggtgcgcagccgcagcagtgacatcgtgtcctctgtgcggcggcccatgtctgaccccagctggaacagaagacctggaaatgaggagcgggagctgcccccagctgctgccatcggggccaccagcctggtggccgccccccacagcagcagcagcagccccagcaaggacagcagcagaggagaaacagaggagaggaaggacagtgatgatgagaagagtgacaggaaccggccctggtggaggaagagatttgtgtctgccatgcccaagtag

SEQ ID NO: 154601 - DNA, 4437 bp, synthetic construct; identical to SEQ ID NO: 154594
  misc_feature 1..4437: note = Description of Artificial Sequence: Synthetic coding sequence
  source 1..4437: mol_type = other DNA

SEQ ID NO: 154602 - DNA, 2271 bp, synthetic construct
  misc_feature 1..2271: note = Description of Artificial Sequence: Synthetic coding sequence
  source 1..2271: mol_type = other DNA
atggtgaagctggacatccacaccctggcccaccacctgaagcaggagcggctgtatgtgaacagcgagaagcagctgatccagaggctgaatgctgatgtgctgaagacagctgagaagctgtacagaacagcctggatcgccaagcagcagaggatcaacctggacaggctcatcatcaccagcgctgaggccagccctgctgagtgctgccagcacgccaagatcctggaggacacccagtttgtggatggctacaagcagctgggcttccaggagacagcctacggggagttcctgagccggctgcgggagaaccccaggctcatcgccagcagcctggtggccggggagaagctgaaccaggagaacacccagagcgtcatctacacagtgttcaccagcctgtatggcaactgcatcatgcaggaggatgagagctacctgctgcaggtgctgcgctacctgattgaatttgagctgaaggagagtgacaacccccggcggctgctgcggcggggcacctgtgccttcagcatcctcttcaagctgttcagcgagggcctcttcagcgccaagctgttcctgacagccaccctgcacgagcccatcatgcagctgctggtggaggatgaggaccacctggagacagaccccaacaagctgattgagcgcttcagccccagccagcaggagaagctgtttggagagaagggcagtgaccgcttccggcagaaggtgcaggagatggtggagagcaatgaggccaagctggtggccctggtgaacaagttcatcggctacctgaagcagaacacctactgcttcccccacagcctgcgctggatcgtgtcccagatgtacaagaccctgagctgtgtggaccggctggaggtgggggaggtgcgggccatgtgcacagacctgctgctggcctgcttcatctgcccagctgtggtgaaccctgagcagtatggcatcatcagtgatgcccccatcaatgaggtggcccgcttcaacctgatgcaggtgggccgcctgctgcagcagctggccatgacaggcagcgaggagggggaccccaggaccaagagcagcctgggcaagtttgacaagagctgtgtggccgccttcctggatgtggtgattggaggccgggctgtggagaccccacccctgagctctgtgaacctgctggagggcctgagcaggacagtggtgtacatcacctacagccagctgatcaccctggtgaacttcatgaagtctgtgatgtctggggaccagctgcgggaggacaggatggccctggacaacctgctggccaacctgcccccagccaagccaggcaagagcagcagcctggagatgaccccctacaacaccccccagctgagccctgccaccaccccagccaacaagaagaaccggctgcccatcgccaccaggagccgcagcaggaccaacatgctgatggacctgcacatggaccacgagggcagcagccaggagaccatccaggaggtgcagcctgaggaggtgctggtgatcagcctgggcaccggcccccagctgaccccaggcatgatgtctgaaaatgaggtgctgaacatgcagctgagtgatggcggccagggagatgtgcctgtggatgagaacaagctgcacggcaagccagacaagaccctgcgcttcagcctgtgcagcgacaacctggagggcatcagcgagggccccagcaacagaagcaacagcgtgagcagcctggacctggagggggagagcgtgtctgagctgggcgccggccccagcggcagcaatggagtggaggccctgcagctgctggagcacgagcaggccaccacccaggacaacctggatgacaagctgaggaagtttgagatccgggacatgatgggcctgacagatgaccgggacatcagcgagaccgtgtctgagacctggagcacagatgtgctgggcagtgactttgaccccaacattgatgaggaccggctgcaggagattgctggagctgctgctgagaacatgctgggcagcctgctgtgcctgcccggcagcggctctgtgctgctggacccctgcaccggcagcaccatcagcgagaccaccagcgaggcctggagcgtggaggtgctgcccagcgacagcgaggccccagacctgaagcaggaggagcggctgcaggagctggagagctgcagcggcctgggcagcaccagtgatgacacagatgtgcgggaggcctag

SEQ ID NO: 154603 - DNA, 921 bp, synthetic construct
  misc_feature 1..921: note = Description of Artificial Sequence: Synthetic coding sequence
  source 1..921: mol_type = other DNA
atgggcggcaggaagatggccacagatgaagaaaatgtgtatggcctggaggagaatgcccagagccggcaggagagcacccggcggctcatcctggtgggccgcactggagctgggaagagcgccactggaaacagcatcctgggccagaggcgcttcttcagccggctgggcgccacctctgtgacccgggcctgcaccaccggcagccgccgctgggacaagtgccacgtggaggtggtggacaccccagacatcttcagcagccaggtgtccaagacagaccccggctgtgaggagcggggccactgctacctgctgagcgcccctggcccccacgccctgctgctggtgacccagctgggccgcttcaccgcccaggaccagcaggccgtgcggcaggtgcgggacatgtttggagaagatgtgctgaagtggatggtgattgtgttcaccaggaaagaagacctggccggcggcagcctgcatgactatgtgagcaacacagagaacagagccctgcgggagctggtggccgagtgtggcggccgggtgtgtgcctttgacaacagagccaccggccgggagcaggaggcccaggtggagcagctgctgggcatggtggagggcctggtgctggagcacaagggggcccactacagcaatgaggtgtatgagctggcccaggtgctgcgctgggccggccctgaggagcggctgcggcgggtggccgagcgggtggccgcccgggtgcagaggcggccctggggcgcctggctgagcgcccggctgtggaagtggctgaagagccccaggtcctggaggctgggcctggccctgctgctgggcggggccctgctcttctgggtgctgctgcaccggcgctggagcgaggccgtggccgaggtgggccctgactag

SEQ ID NO: 154604 - DNA, 681 bp, synthetic construct
  misc_feature 1..681: note = Description of Artificial Sequence: Synthetic coding sequence
  source 1..681: mol_type = other DNA
atgtcctgggtgcaggccgccagcctcatccagggccctggggacaagggagatgtgtttgatgaggaggctgatgagagcctgctggcccagcgggagtggcagagcaacatgcagaggagagtgaaggagggctacagagatggcattgatgctgggaaggctgtgaccctgcagcagggcttcaaccagggctacaagaagggagctgaggtgatcctgaactacggccgcctgcggggcaccctgagcgccctgctgtcctggtgccacctgcacaacaacaacagcaccctcatcaacaagatcaacaacctgctggatgctgtgggccagtgtgaggagtatgtgctgaagcacctgaagagcatcaccccacccagccacgtggtggacctgctggacagcattgaggacatggacctgtgccacgtggtgcctgctgagaagaagattgatgaggccaaggatgagcggctgtgtgagaacaatgctgagttcaacaagaactgcagcaagagccacagcggcatcgactgcagctatgtggagtgctgcaggacccaggagcacgcccacagcgagaaccccagccccacctggatcctggagcagacagccagcctggtgaagcagctgggcctgtctgtggatgtgctgcagcacctgaagcagctgtag

SEQ ID NO: 154605 - DNA, 990 bp, synthetic construct
  misc_feature 1..990: note = Description of Artificial Sequence: Synthetic coding sequence
  source 1..990: mol_type = other DNA
atggccgcccagtatggctccatgtccttcaaccccagcacccctggggccagctatggccctggccggcaggagcccaggaacagccagctgagaattgtgctggtgggcaagacaggagctgggaagagcgccaccggcaacagcatcctgggcaggaaggtgttccacagcggcacagctgccaagagcatcaccaagaagtgtgagaagaggagcagctcctggaaggagacagagctggtggtggtggacaccccaggcatctttgacacagaggtgcccaatgctgagaccagcaaggagatcatccgctgcatcctgctgaccagccctggcccccacgccctgctgctggtggtgcccctgggccgctacacagaggaggagcacaaggccacagagaagatcctgaagatgtttggagagcgggcccgctccttcatgatcctgatcttcaccaggaaggatgacctgggggacaccaacctgcatgactacctgcgggaggcccctgaggacatccaggacctgatggacatctttggagaccgctactgtgccctgaacaacaaggccaccggggctgagcaggaggcccagagggcccagctgctgggcctcatccagagggtggtgcgggagaacaaggagggctgctacaccaacaggatgtaccagagagctgaggaggagatccagaagcagacccaggccatgcaggagctgcaccgggtggagctggagcgggagaaggcccgcatccgggaggagtatgaggagaagatcaggaagctggaggacaaggtggagcaggagaagaggaagaagcagatggagaagaagctggccgagcaggaggcccactatgctgtgcggcagcagagggccaggacagaggtggagagcaaggatggcatcctggagctgatcatgacagccctgcagatcgccagcttcatcctgctgcggctgtttgctgaggactag

SEQ ID NO: 154606 - DNA, 786 bp, synthetic construct
  misc_feature 1..786: note = Description of Artificial Sequence: Synthetic coding sequence
  source 1..786: mol_type = other DNA
atggccgcccagtatggctccatgtccttcaaccccagcacccctggggccagctatggccctggccggcaggagcccaggaacagccagctgagaattgtgctggtgggcaagacaggagctgggaagagcgccaccggcaacagcatcctgggcaggaaggtgttccacagcggcacagctgccaagagcatcaccaagaagatcctgaagatgtttggagagcgggcccgctccttcatgatcctgatcttcaccaggaaggatgacctgggggacaccaacctgcatgactacctgcgggaggcccctgaggacatccaggacctgatggacatctttggagaccgctactgtgccctgaacaacaaggccaccggggctgagcaggaggcccagagggcccagctgctgggcctcatccagagggtggtgcgggagaacaaggagggctgctacaccaacaggatgtaccagagagctgaggaggagatccagaagcagacccaggccatgcaggagctgcaccgggtggagctggagcgggagaaggcccgcatccgggaggagtatgaggagaagatcaggaagctggaggacaaggtggagcaggagaagaggaagaagcagatggagaagaagctggccgagcaggaggcccactatgctgtgcggcagcagagggccaggacagaggtggagagcaaggatggcatcctggagctgatcatgacagccctgcagatcgccagcttcatcctgctgcggctgtttgctgaggactag

SEQ ID NO: 154607 - DNA, 456 bp, synthetic construct
  misc_feature 1..456: note = Description of Artificial Sequence: Synthetic coding sequence
  source 1..456: mol_type = other DNA
atggccgcccagtatggctccatgtccttcaaccccagcacccctggggccagctatggagagcgggccttcagcgccccccagacccggctgcagggcggccctggccggcaggagcccaggaacagccagctgagaattgtgctggtgggcaagacaggagctgggaagagcgccaccggcaacagcatcctgggcaggaaggtgttccacagcggcacagctgccaagagcatcaccaagaagtgtgagaagaggagcagctcctggaaggagacagagctggtggtggtggacaccccaggcatctttgacacagaggtgcccaatgctgagaccagcaaggagatcatccgctgcatcctgctgaccagccctggcccccacgccctgctgctggtggtgcccctgggccgctacacagaggaggagcacaaggccacagagaagatctag

SEQ ID NO: 154608 - DNA, 924 bp, synthetic construct
  misc_feature 1..924: note = Description of Artificial Sequence: Synthetic coding sequence
  source 1..924: mol_type = other DNA
atgggcggcttccagaggggcaagtatggcaccatggccgagggccgctctgaggacaacctgagcgccaccccaccagccctgcgcatcatcctggtgggcaagacaggctgtgggaagagcgccactggaaacagcatcctgggccagcctgtgtttgagagcaagctgcgggcccagagcgtgaccaggacctgccaggtgaagacaggcacctggaatggaaggaaggtgctggtggtggacacccccagcatctttgagagccaggccgacacccaggagctgtacaagaacatcggggactgctacctgctgagcgcccctggcccccacgtgctgctgctggtgatccagctgggccgcttcaccgcccaggacacagtggccatcaggaaggtgaaggaggtgtttggcaccggggccatgagacatgtggtgatcctcttcacccacaaggaggacctgggcggccaggccctggatgattatgtggccaacacagacaactgcagcctgaaggacctggtgagagaatgtgagcggcgctactgtgccttcaacaactggggctctgtggaggagcagaggcagcagcaggccgagctgctggccgtgattgagcggctgggccgggagcgggagggcagcttccacagcaatgacctcttcctggatgcccagctgctgcagaggactggagctggggcctgccaggaggactaccggcagtaccaggccaaggtggagtggcaggtggagaagcacaagcaggagctgcgggagaatgaaagcaactgggcctacaaggccctgctgcgggtgaagcacctgatgctgctgcactatgagatctttgtgttcctgctgctgtgcagcatcctcttcttcatcatcttcctgttcatcttccactacatctag

SEQ ID NO: 154609 - DNA, 1032 bp, synthetic construct
  misc_feature 1..1032: note = Description of Artificial Sequence: Synthetic coding sequence
  source 1..1032: mol_type = other DNA
atggagctgagcgccccagcccacggcagcagcctgacagccagcgcccagccccccagcgtgacagccaccctggaggaccgggcccagcagcccttcctggagaggatgggcggcttccagaggggcaagtatggcaccatggccgagggccgctctgaggacaacctgagcgccaccccaccagccctgcgcatcatcctggtgggcaagacaggctgtgggaagagcgccactggaaacagcatcctgggccagcctgtgtttgagagcaagctgcgggcccagagcgtgaccaggacctgccaggtgaagacaggcacctggaatggaaggaaggtgctggtggtggacacccccagcatctttgagagccaggccgacacccaggagctgtacaagaacatcggggactgctacctgctgagcgcccctggcccccacgtgctgctgctggtgatccagctgggccgcttcaccgcccaggacacagtggccatcaggaaggtgaaggaggtgtttggcaccggggccatgagacatgtggtgatcctcttcacccacaaggaggacctgggcggccaggccctggatgattatgtggccaacacagacaactgcagcctgaaggacctggtgagagaatgtgagcggcgctactgtgccttcaacaactggggctctgtggaggagcagaggcagcagcaggccgagctgctggccgtgattgagcggctgggccgggagcgggagggcagcttccacagcaatgacctcttcctggatgcccagctgctgcagaggactggagctggggcctgccaggaggactaccggcagtaccaggccaaggtggagtggcaggtggagaagcacaagcaggagctgcgggagaatgaaagcaactgggcctacaaggccctgctgcgggtgaagcacctgatgctgctgcactatgagatctttgtgttcctgctgctgtgcagcatcctcttcttcatcatcttcctgttcatcttccactacatctag

SEQ ID NO: 154610 - DNA, 879 bp, synthetic construct
  misc_feature 1..879: note = Description of Artificial Sequence: Synthetic coding sequence
  source 1..879: mol_type = other DNA
atggaggaggaggagtatgagcagatcccccaggagaaccccccagaggagctgagccaggaccctgtgctggagctgagcggcggcctgcgggagaaggagcagaagaccccccggcggctgcggctcatcctgatgggcaagacaggcagcggcaagagcgccaccggcaacagcatcctgggcagagatgtgtttgagagcaagctgagcaccaggcctgtgaccaagaccagccagaggaggagccgggagtgggccggcaaggagctggaggtgattgacacccccaacatcctgagcccccaggtgtccccagaggtggctgatgccatctgccaggccatcgtgctgagcgcccctggcccccatgctgtgctgctggtgacccagctgggccgcttcacagatgaggaccagcaggtggtgcggcggctgcaggaggtgtttggagtgggcgtgctgggccacaccatcctggtgttcaccaggaaggaggacctggccggcggcagcctggaggactatgtgcgggagaccaacaaccaggccctggcctggctggatgtgaccctggcccggcggcactgcggcttcaacaacagagcccagggcgaggagcaggaggcccagctgcgggagctgatggagaaggtggaggccatcatgtgggagaatgaaggagactactacagcaacaaggcctaccagtacacccagcagaacttccggctgaaggagctgcaggagcggcaggtgtcccagggccagggctctgaagatgtgcctggagaggagagctggctggagggcctgagccagatccagaaggagagcgaggaggcccaccgctgcctgctgggcaaggctgacctgtag

SEQ ID NO: 154611 - DNA, 1062 bp, synthetic construct
  misc_feature 1..1062: note = Description of Artificial Sequence: Synthetic coding sequence
  source 1..1062: mol_type = other DNA
aagccctggtactgggtgtcctggtgcagcatcggccaggtgtccctcttcttcctgggcagcgccctggccctgggagaaaatgtgcagccccacctgcagggctgcggccccaggatggtggcccagcgctggttccagggccgctgctggagcttcaccatctgcccctgcagcctgggcgtgcaccctgaggcccctggagatgacaagatgggctacatgggcccctaccccagcagcctgtgcttcctgtggatcttcctgggcctgcgggagaaggagcagaagaccccccggcggctgcggctcatcctgatgggcaagacaggcagcggcaagagcgccactggaaacagcatcctgggcagagatgtgtttgagagcaagctgagcaccaggcctgtgaccaagaccagccagaggaggagccgggagtgggccggcaaggagctggaggtgattgacacccccaacatcctgagcccccaggtgtccccagaggtggctgatgccatctgccaggccatcgtgctgagcgcccctggcccccatgctgtgctgctggtgacccagctgggccgcttcacagatgaggaccagcaggtggtgcggcggctgcaggaggtgtttggagtgggcgtgctgggccacaccatcctggtgttcaccaggaaagaagacctggccggcggcagcctggaggactatgtgcgggagaccaacaaccaggccctggcctggctggatgtgaccctggcccggcggcactgcggcttcaacaacagagcccagggcgaggagcaggaggcccagctgcgggagctgatggagaaggtggaggccatcatgtgggagaatgaaggagactactacagcaacaaggcctaccagtacacccagcagaacttccggctgaaggagctgcaggagcggcaggtgtcccagggccagggctctgaagatgtgcctggagaggagagctggctggagggcctgagccagatccagaaggagagcgaggaggcccaccgctgcctgctgggcaaggctgacctgtag

SEQ ID NO: 154612 - DNA, 189 bp, synthetic construct
  misc_feature 1..189: note = Description of Artificial Sequence: Synthetic coding sequence
  source 1..189: mol_type = other DNA
atggaggaggaggagtatgagcagatcccccaggagaaccccccagaggagctgagccaggaccctgtgctggagctgagcggcggcctggcccggggcggccgccgctacctgcccagccacaggctcatccggccccgggccccccggcgggcccctggggacaccactggacctgtgcatggatag

SEQ ID NO: 154613 - DNA, 1266 bp, synthetic construct
  misc_feature 1..1266: note = Description of Artificial Sequence: Synthetic coding sequence
  source 1..1266: mol_type = other DNA
atgcgctggatcctcttcatcggggccctgattggcagcagcatctgtggccaggagaagttcttcggggaccaggtgctgcgcatcaacgtgagaaatggagatgagatcagcaagctgagccagctggtgaacagcaacaacctgaagctgaacttctggaagagccccagcagcttcaacagacctgtggatgtgctggtgcccagcgtgtccctgcaggccttcaagagcttcctgcggagccagggcctggagtatgctgtgaccatcgaggacctgcaggccctgctggacaatgaagatgatgagatgcagcacaatgaaggccaggagaggagcagcaacaacttcaactacggggcctaccacagcctggaggccatctaccacgagatggacaacattgctgctgacttcccagacctggccaggagagtgaagattggccacagctttgagaaccggcccatgtatgtgctgaagttcagcactggaaaaggagtgcggcggcctgctgtgtggctgaatgccggcatccacagccgggagtggatcagccaggccacagccatctggacagccaggaagatcgtgtctgactaccagagggaccctgccatcaccagcatcctggagaagatggacatcttcctgctgcctgtggccaacccagatggctacgtgtacacccagacccagaaccggctgtggaggaagaccaggagcaggaaccctggcagcagctgcattggagctgaccccaacagaaactggaatgccagctttgctgggaagggggccagtgacaacccctgcagcgaggtgtaccacggcccccacgccaacagcgaggtggaggtgaagtctgtggtggacttcatccagaagcacggcaacttcaagggcttcatcgacctgcacagctacagccagctgctgatgtacccctacggctacagcgtgaagaaggccccagatgctgaggagctggacaaggtggcccggctggccgccaaggccctggcctctgtgtctggaacagagtaccaggtgggccccacctgcaccaccgtgtacccagccagcggcagcagcattgactgggcctatgacaatggcatcaagtttgccttcacctttgagctgcgggacaccggcacctacggcttcctgctgcctgccaaccagatcatccccacagctgaggagacctggctgggcctgaagaccatcatggagcacgtgcgggacaacctgtactag

SEQ ID NO: 154614 - DNA, 927 bp, synthetic construct
  misc_feature 1..927: note = Description of Artificial Sequence: Synthetic coding sequence
  source 1..927: mol_type = other DNA
atggtgcactgcagctgtgtgctcttcagaaaatatggcaacttcatcgacaagctgcggctcttcacccggggcggcagcggcggcatgggctacccccggctgggcggggagggcggcaaaggaggagatgtgtgggtggtggcccagaacaggatgaccctgaagcagctgaaggaccgctaccccaggaagagatttgtggccggcgtgggcgccaacagcaagttccccaatgctgggaagagcagcctgctgagctgtgtgtcccatgccaagccagccatcgctgactatgccttcaccaccctgaagccagagctgggcaagatcatgtacagcgacttcaagcagatctctgtggccgacctgcccggcctcatcgagggcgcccacatgaacaagggcatgggccacaagttcctgaagcacattgaaagaacccggcagctgctgtttgtggtggacatcagcggcttccagctgagcagccacacccagtacagaacagcctttgagaccatcatcctgctgaccaaggagctggagctgtacaaggaggagctgcagaccaagccagccctgctggccgtgaacaagatggacctgcctgatgcccaggacaagttccacgagctgatgagccagctgcagaaccccaaggacttcctgcacctgtttgagaagaacatgatccctgagaggacagtggagttccagcacatcatccccatctctgctgtgactggagagggcatcgaggagctgaagaactgcatcaggaagagcctggatgagcaggccaaccaggagaatgatgccctgcacaagaagcagctgctgaacctgtggatcagtgacaccatgagcagcacagagccccccagcaagcatgctgtgaccaccagcaagatggacatcatctag

SEQ ID NO: 154615 - DNA, 711 bp, synthetic construct
  misc_feature 1..711: note = Description of Artificial Sequence: Synthetic coding sequence
  source 1..711: mol_type = other DNA
atgtctgcccccagcgccacccccatctttgcccctggagagaactgcagccctgcctggggcgccgccccagctgcctatgatgctgctgacacccacctgcgcatcctgggcaagcctgtgatggagcgctgggagaccccctacatgcacgccctggccgccgccgccagcagcaagggcggccgggtgctggaggtgggcttcggcatggccatcgccgccagcaaggtgcaggaggcccccattgatgagcactggatcatcgagtgcaatgatggagtcttccagaggctgcgggactgggccccccggcagacccacaaggtgatccccctgaagggcctgtgggaggatgtggcccccaccctgcctgatggccactttgatggcatcctgtatgacacctaccccctgtctgaggagacctggcacacccaccagttcaacttcatcaagaaccacgccttccggctgctgaagccaggcggcgtgctgacctactgcaacctgacctcctggggcgagctgatgaagagcaagtacagcgacatcaccatcatgtttgaggagacccaggtgcctgccctgctggaggccggcttcagaagagagaacatcagaacagaggtgatggccctggtgcccccagctgactgccgctactatgccttcccccagatgatcacccccctggtgaccaagggctag

SEQ ID NO: 154616 - DNA, 810 bp, synthetic construct
  misc_feature 1..810: note = Description of Artificial Sequence: Synthetic coding sequence
  source 1..810: mol_type = other DNA
atgtctgcccccagcgccacccccatctttgcccctggagagaactgcagccctgcctggggcgccgccccagctgcctatgatgctgctgacacccacctgcgcatcctgggcaagcctgtgatggagcgctgggagaccccctacatgcacgccctggccgccgccgccagcagcaagggcggccgggtgctggaggtgggcttcggcatggccatcgccgccagcaaggtgcaggaggcccccattgatgagcactggatcatcgagtgcaatgatggagtcttccagaggctgcgggactgggccccccggcagacccacaaggtgatccccctgaagggcctgtgggaggatgtggcccccaccctgcctgatggccactttgatggcatcctgtatgacacctaccccctgtctgaggagacctggcacacccaccagttcaacttcatcaagaaccacgccttccggctgctgaagccaggcggcgtgctgacctactgcaacctgacctcctggggcgagctgatgaagagcaagtacagcgacatcaccatcatgtttgaggtgcggcccccagaggtgccccacggcagccctggcagtgacctgggctggggctgggagggcgctgctggggccaccctgctgcctggagagggccccttcctgaccccctgggtgggctggacagtgctggtgcacctggagatcaaggtgctgtgcctggcccagtggctgcctggagctgtggcccaggtgtacaaccccagcacagtggagggccggggcggccagatcgcctag

SEQ ID NO: 154617 - DNA, 1416 bp, synthetic construct
  misc_feature 1..1416: note = Description of Artificial Sequence: Synthetic coding sequence
  source 1..1416: mol_type = other DNA
atgtgtgccgcccagatgccacccctggcccacatcttccggggcacctttgtgcacagcacctggacctgccccatggaggtgctgcgggaccacctgctgggcgtgtctgattctgggaagatcgtgttcctggaggaggccagccagcaggagaagctggccaaggagtggtgcttcaagccctgtgagatccgggagctgagccaccacgagttcttcatgcctggcctggtggacacccacatccacgccagccagtacagctttgctggcagcagcattgacctgcccctgctggagtggctgaccaagtacaccttccctgctgagcaccgcttccagaacatcgactttgctgaggaggtgtacaccagggtggtgcggaggaccctgaagaatggcaccaccacagcctgctactttgccaccatccacacagacagcagcctgctgctggccgacatcacagacaagtttggccagagggcctttgtgggcaaggtgtgcatggacctgaatgacaccttccctgagtacaaggagaccacagaggagagcatcaaggagacagaaagatttgtgtctgagatgctgcagaagaactacagccgggtgaagcccatcgtgaccccccgcttcagcctgagctgcagcgagaccctgatgggagagctgggcaacatcgccaagacccgggacctgcacatccagagccacatcagtgaaaatagagatgaggtggaggccgtgaagaacctgtaccccagctacaagaactacacctctgtgtatgacaagaacaacctgctgaccaacaagacagtgatggcccacggctgctacctgtctgctgaggagctgaatgtgttccacgagcggggggccagcatcgcccactgccccaacagcaacctgagcctgagcagcggcttcctgaatgtgctggaggtgctgaagcatgaggtgaagattggcctgggcacagatgtggccggcggctacagctacagcatgctggatgccatccggcgggctgtgatggtgagcaacatcctgctgatcaacaaggtgaatgagaagagcctgaccctgaaggaggtgttccggctggccaccctgggcggcagccaggccctgggcctggatggagagatcggcaactttgaggtgggcaaggagtttgatgccatcctgatcaaccccaaggccagtgacagccccatcgacctcttctatggagacttctttggagacatcagcgaggccgtcatccagaagttcctgtacctgggagatgacagaaatattgaggaggtgtatgtgggcggcaagcaggtggtgcccttcagcagctctgtgaaggagaccatccacctgcctgccagcagcccccaccccccacccttcccctag

SEQ ID NO: 154618 - DNA, 1365 bp, synthetic construct
  misc_feature 1..1365: note = Description of Artificial Sequence: Synthetic coding sequence
  source 1..1365: mol_type = other DNA
atgtgtgccgcccagatgccacccctggcccacatcttccggggcacctttgtgcacagcacctggacctgccccatggaggtgctgcgggaccacctgctgggcgtgtctgattctgggaagatcgtgttcctggaggaggccagccagcaggagaagctggccaaggagtggtgcttcaagccctgtgagatccgggagctgagccaccacgagttcttcatgcctggcctggtggacacccacatccacgccagccagtacagctttgctggcagcagcattgacctgcccctgctggagtggctgaccaagtacaccttccctgctgagcaccgcttccagaacatcgactttgctgaggaggtgtacaccagggtggtgcggaggaccctgaagaatggcaccaccacagcctgctactttgccaccatccacacagacagcagcctgctgctggccgacatcacagacaagtttggccagagggcctttgtgggcaaggtgtgcatggacctgaatgacaccttccctgagtacaaggagaccacagaggagagcatcaaggagacagaaagatttgtgtctgagatgctgcagaagaactacagccgggtgaagcccatcgtgaccccccgcttcagcctgagctgcagcgagaccctgatgggagagctgggcaacatcgccaagacccgggacctgcacatccagagccacatcagtgaaaatagagatgaggtggaggccgtgaagaacctgtaccccagctacaagaactacacctctgtgtatgacaagaacaacctgctgaccaacaagacagtgatggcccacggctgctacctgtctgctgaggagctgaatgtgttccacgagcggggggccagcatcgcccactgccccaacagcaacctgagcctgagcagcggcttcctgaatgtgctggaggtgctgaagcatgaggtgaagattggcctgggcacagatgtggccggcggctacagctacagcatgctggatgccatccggcgggctgtgatggtgagcaacatcctgctgatcaacaaggtgaatgagaagagcctgaccctgaaggaggtgttccggctggccaccctgggcggcagccaggccctgggcctggatggagagatcggcaactttgaggtgggcaaggagtttgatgccatcctgatcaaccccaaggccagtgacagccccatcgacctcttctatggagacttctttggagacatcagcgaggccgtcatccagaagttcctgtacctgggagatgacagaaatattgaggaggtgtatgtgggcggcaagcaggtggtgcccttcagcagctctgtgtag

SEQ ID NO: 154619 - DNA, 1182 bp, synthetic construct
  misc_feature 1..1182: note = Description of Artificial Sequence: Synthetic coding sequence
  source 1..1182: mol_type = other DNA
atgttcctggaggaggccagccagcaggagaagctggccaaggagtggtgcttcaagccctgtgagatccgggagctgagccaccacgagttcttcatgcctggcctggtggacacccacatccacgccagccagtacagctttgctggcagcagcattgacctgcccctgctggagtggctgaccaagtacaccttccctgctgagcaccgcttccagaacatcgactttgctgaggaggtgtacaccagggtggtgcggaggaccctgaagaatggcaccaccacagcctgctactttgccaccatccacacagacagcagcctgctgctggccgacatcacagacaagtttggccagagggcctttgtgggcaaggtgtgcatggacctgaatgacaccttccctgagtacaaggagaccacagaggagagcatcaaggagacagaaagatttgtgtctgagatgctgcagaagaacagccacatcagtgaaaatagagatgaggtggaggccgtgaagaacctgtaccccagctacaagaactacacctctgtgtatgacaagaacaacctgctgaccaacaagacagtgatggcccacggctgctacctgtctgctgaggagctgaatgtgttccacgagcggggggccagcatcgcccactgccccaacagcaacctgagcctgagcagcggcttcctgaatgtgctggaggtgctgaagcatgaggtgaagattggcctgggcacagatgtggccggcggctacagctacagcatgctggatgccatccggcgggctgtgatggtgagcaacatcctgctgatcaacaaggtgaatgagaagagcctgaccctgaaggaggtgttccggctggccaccctgggcggcagccaggccctgggcctggatggagagatcggcaactttgaggtgggcaaggagtttgatgccatcctgatcaaccccaaggccagtgacagccccatcgacctcttctatggagacttctttggagacatcagcgaggccgtcatccagaagttcctgtacctgggagatgacagaaatattgaggaggtgtatgtgggcggcaagcaggtggtgcccttcagcagctctgtgaaggagaccatccacctgcctgccagcagcccccaccccccacccttcccctag

SEQ ID NO: 154620 - DNA, 1233 bp, synthetic construct
  misc_feature 1..1233: note = Description of Artificial Sequence: Synthetic coding sequence
  source 1..1233: mol_type = other DNA
atggaggtgctgcgggaccacctgctgggcgtgtctgacagcggcaagatcgtgttcctggaggaggccagccagcaggagaagctggccaaggagtggtgcttcaagccctgtgagatccgggagctgagccaccacgagttcttcatgcctggcctggtggacacccacatccacgccagccagtacagctttgctggcagcagcattgacctgcccctgctggagtggctgaccaagtacaccttccctgctgagcaccgcttccagaacatcgactttgctgaggaggtgtacaccagggtggtgcggaggaccctgaagaatggcaccaccacagcctgctactttgccaccatccacacagacagcagcctgctgctggccgacatcacagacaagtttggccagagggcctttgtgggcaaggtgtgcatggacctgaatgacaccttccctgagtacaaggagaccacagaggagagcatcaaggagacagaaagatttgtgtctgagatgctgcagaagaacagccacatcagcgagaacagagatgaggtggaggccgtgaagaacctgtaccccagctacaagaactacacctctgtgtatgacaagaacaacctgctgaccaacaagacagtgatggcccacggctgctacctgtctgctgaggagctgaatgtgttccacgagcggggggccagcatcgcccactgccccaacagcaacctgagcctgagcagcggcttcctgaatgtgctggaggtgctgaagcatgaggtgaagattggcctgggcacagatgtggccggcggctacagctacagcatgctggatgccatcagaagagctgtgatggtgagcaacatcctgctgatcaacaaggtgaatgagaagagcctgaccctgaaggaggtgttccggctggccaccctgggcggcagccaggccctgggcctggatggagaaattggcaactttgaggtgggcaaggagtttgatgccatcctgatcaaccccaaggccagtgacagccccatcgacctcttctacggggacttcttcggggacatcagcgaggccgtcatccagaagttcctgtacctgggagatgacaggaacatcgaggaggtgtatgtgggcggcaagcaggtggtgcccttcagcagctctgtgaaggagaccatccacctgcctgccagcagcccccaccccccacccttcccctag

SEQ ID NO: 154621 - DNA, 588 bp, synthetic construct
  misc_feature 1..588: note = Description of Artificial Sequence: Synthetic coding sequence
  source 1..588: mol_type = other DNA
atgaccctcttccagaacacccggcggcccctgaggaacagaagcaggaagctgcgggactgccacagcgtgacccaggccggcgtgcagtggagggacctgagcagcctgaagcccccacctcctgtgttcaagcgcttcagctgcctgagcctgcccagctcctgggactacagatttgtgtctgagatgctgcagaagaactacagccgggtgaagcccatcgtgaccccccgcttcagcctgagctgcagcgagaccctgatgggagagctgggcaacatcgccaagacccgggacctgcacatccagagccacatcagtgaaaatagagatgaggtggaggccgtgaagaacctgtaccccagctacaagaactacacctctgtgtatgacaagaacaacctgctgaccaacaagacagtgatggcccacggctgctacctgtctgctgaggagctgaatgtgttccacgagcggggggccagcatcgcccactgccccaacagcaacctgagcctgagcagcggcttcctgaatgtgctggaggtgctgaagcatgaggtgaagattggcctgggcacctag

SEQ ID NO: 154622 - DNA, 540 bp, synthetic construct
  misc_feature 1..540: note = Description of Artificial Sequence: Synthetic coding sequence
  source 1..540: mol_type = other DNA
gagcggggggccagcatcgcccactgccccaacagcaacctgagcctgagcagcggcttcctgaatgtgctggaggtgctgaagcatgaggtgaagattggcctgggcacagatgtggccggcggctacagctacagcatgctggatgccatccggcgggctgtgatggtgagcaacatcctgctgatcaacaaggtgaatgagaagagcctgaccctgaaggaggtgttccggctggccaccctgggcggcagccaggccctgggcctggatggagagatcggcaactttgaggtgggcaaggagtttgatgccatcctgatcaaccccaaggccagtgacagccccatcgacctcttctatggagacttctttggagacatcagcgaggccgtcatccagaagttcctgtacctgggagatgacagaaatattgaggaggtgtatgtgggcggcaagcaggtggtgcccttcagcagctctgtgaaggagaccatccacctgcctgccagcagcccccaccccccacccttcccctag

SEQ ID NO: 154623 - DNA, 1365 bp, synthetic construct; identical to SEQ ID NO: 154618
  misc_feature 1..1365: note = Description of Artificial Sequence: Synthetic coding sequence
  source 1..1365: mol_type = other DNA

SEQ ID NO: 154624 - DNA, 1143 bp, synthetic construct
  misc_feature 1..1143: note = Description of Artificial Sequence: Synthetic coding sequence
  source 1..1143: mol_type = other DNA
atgcctggcctggtggacacccacatccacgccagccagtacagctttgctggcagcagcattgacctgcccctgctggagtggctgaccaagtacaccttccctgctgagcaccgcttccagaacatcgactttgctgaggaggtgtacaccagggtggtgcggaggaccctgaagaatggcaccaccacagcctgctactttgccaccatccacacagacagcagcctgctgctggccgacatcacagacaagtttggccagagggcctttgtgggcaaggtgtgcatggacctgaatgacaccttccctgagtacaaggagaccacagaggagagcatcaaggagacagaaagatttgtgtctgagatgctgcagaagaactacagccgggtgaagcccatcgtgaccccccgcttcagcctgagctgcagcgagaccctgatgggagagctgggcaacatcgccaagacccgggacctgcacatccagagccacatcagtgaaaatagagatgaggtggaggccgtgaagaacctgtaccccagctacaagaactacacctctgtgtatgacaagaacaacctgctgaccaacaagacagtgatggcccacggctgctacctgtctgctgaggagctgaatgtgttccacgagcggggggccagcatcgcccactgccccaacagcaacctgagcctgagcagcggcttcctgaatgtgctggaggtgctgaagcatgaggtgaagattggcctgggcacagatgtggccggcggctacagctacagcatgctggatgccatccggcgggctgtgatggtgagcaacatcctgctgatcaacaaggtgaatgagaagagcctgaccctgaaggaggtgttccggctggccaccctgggcggcagccaggccctgggcctggatggagagatcggcaactttgaggtgggcaaggagtttgatgccatcctgatcaaccccaaggccagtgacagccccatcgacctcttctatggagacttctttggagacatcagcgaggccgtcatccagaagttcctgtacctgggagatgacagaaatattgaggaggtgtatgtgggcggcaagcaggtggtgcccttcagcagctctgtgtag

SEQ ID NO: 154625 - DNA, 2082 bp, synthetic construct
  misc_feature 1..2082: note = Description of Artificial Sequence: Synthetic coding sequence
  source 1..2082: mol_type = other DNA
atggccctgtgcaatggagacagcaagctggagaatgccggcggggacctgaaggatggccaccaccactatgagggcgctgtggtgatcctggatgctggggcccagtatggcaaggtgattgacagaagagtgcgggagctgtttgtgcagagcgagatcttccccctggagaccccagcctttgccatcaaggagcagggcttccgggccatcatcatcagcggcggccccaacagcgtgtatgcagaagatgccccctggtttgatcctgccatcttcaccatcggcaagcctgtgctgggcatctgctacggcatgcagatgatgaacaaggtgtttggaggcaccgtgcacaagaagtctgtgagagaagatggagtcttcaacatctctgtggacaacacctgcagcctcttccggggcctgcagaaggaggaggtggtgctgctgacccatggagacagcgtggacaaggtggctgatggcttcaaggtggtggcccggagcggcaacatcgtggccggcatcgccaatgaaagcaagaagctgtatggagcccagttccaccctgaggtgggcctgacagaaaatggcaaggtgatcctgaagaacttcctgtatgacattgctggctgcagcggcaccttcaccgtgcagaaccgggagctggagtgcatccgggagatcaaggagcgggtgggcaccagcaaggtgctggtgctgctgagcggcggcgtggacagcacagtgtgcacagccctgctgaacagagccctgaaccaggagcaggtgattgctgtgcacatcgacaatggcttcatgaggaagcgggagagccagagcgtggaggaggccctgaagaagctgggcatccaggtgaaggtgatcaatgctgcccacagcttctacaacggcaccaccaccctgcccatcagtgatgaggacaggacccccaggaagaggatcagcaagaccctgaacatgaccaccagccctgaggagaagaggaagatcatcggggacacctttgtgaagatcgccaatgaagtcatcggggagatgaacctgaagccagaggaggtgttcctggcccagggcaccctgcggccagacctgattgagagcgccagcctggtggccagcggcaaggccgagctgatcaagacccaccacaatgacacagagctgatcaggaagctgcgggaggagggcaaggtgattgagcccctgaaggacttccacaaggatgaggtgcgcatcctgggccgggagctgggcctgcctgaggagctggtgagccgccaccccttccctggccctggcctggccatccgggtcatctgtgccgaggagccctacatctgcaaggacttccctgagaccaacaacatcctgaagatcgtggccgacttcagcgcctctgtgaagaagccccacaccctgctgcagagggtgaaggcctgcaccacagaggaggaccaggagaagctgatgcagatcaccagcctgcacagcctgaatgccttcctgctgcccatcaagacagtgggcgtgcagggcgactgccgcagctacagctatgtgtgtggcatcagcagcaaggatgagccagactgggagagcctcatcttcctggcccggctcatccccaggatgtgccacaacgtgaacagagtggtgtacatcttcggcccccctgtgaaggagcccccaacagatgtgacccccaccttcctgaccaccggggtgctgagcaccctgcggcaggccgactttgaggcccacaacatcctgcgggagagcggctacgccggcaagatcagccagatgcctgtgatcctgacccccctgcactttgaccgggaccccctgcagaagcagcccagctgccagaggtctgtggtgatccgcaccttcatcaccagtgacttcatgacaggcatcccagccaccccaggaaatgagatccctgtggaggtggtgctgaagatggtgacagagatcaagaagatccctggcatcagccgcatcatgtatgacctgaccagcaagcccccaggcaccacagagtgggagtag

SEQ ID NO: 154626 - DNA, 1929 bp, synthetic construct
  misc_feature 1..1929: note = Description of Artificial Sequence: Synthetic coding sequence
  source 1..1929: mol_type = other DNA
atgctggaggagaccctgaggatggccaccaccaccatcaaggagcagggcttccgggccatcatcatcagcggcggccccaacagcgtgtatgcagaagatgccccctggtttgatcctgccatcttcaccatcggcaagcctgtgctgggcatctgctacggcatgcagatgatgaacaaggtgtttggaggcaccgtgcacaagaagtctgtgcgggaggatggagtcttcaacatctctgtggacaacacctgcagcctcttccggggcctgcagaaggaggaggtggtgctgctgacccacggggacagcgtggacaaggtggctgatggcttcaaggtggtggcccggagcggcaacatcgtggccggcatcgccaatgaaagcaagaagctgtatggagcccagttccaccctgaggtgggcctgacagaaaatggcaaggtgatcctgaagaacttcctgtatgacattgctggctgcagcggcaccttcaccgtgcagaaccgggagctggagtgcatccgggagatcaaggagcgggtgggcaccagcaaggtgctggtgctgctgtctggaggagtggacagcacagtgtgcacagccctgctgaacagagccctgaaccaggagcaggtgattgctgtgcacatcgacaatggcttcatgaggaagcgggagagccagagcgtggaggaggccctgaagaagctgggcatccaggtgaaggtgatcaatgctgcccacagcttctacaacggcaccaccaccctgcccatcagtgatgaggacaggacccccaggaagaggatcagcaagaccctgaacatgaccaccagccctgaggagaagaggaagatcattggagacacctttgtgaagatcgccaatgaggtgattggagagatgaacctgaagccagaggaggtgttcctggcccagggcaccctgcggccagacctgattgaaagtgccagcctggtggccagcggcaaggccgagctgatcaagacccaccacaatgacacagagctgatcaggaagctgcgggaggagggcaaggtgattgagcccctgaaggacttccacaaggatgaggtgcgcatcctgggccgggagctgggcctgcctgaggagctggtgagccgccaccccttccctggccctggcctggccatccgggtcatctgtgccgaggagccctacatctgcaaggacttccctgagaccaacaacatcctgaagatcgtggccgacttcagcgcctctgtgaagaagccccacaccctgctgcagagggtgaaggcctgcaccacagaggaggaccaggagaagctgatgcagatcaccagcctgcacagcctgaatgccttcctgctgcccatcaagacagtgggcgtgcagggcgactgccgcagctacagctatgtgtgtggcatcagcagcaaggatgagccagactgggagagcctcatcttcctggcccggctcatccccaggatgtgccacaacgtgaacagagtggtgtacatctttggacctcctgtgaaggagcccccaacagatgtgacccccaccttcctgaccactggagtgctgagcaccctgcggcaggccgactttgaggcccacaacatcctgcgggagagcggctacgccggcaagatcagccagatgcctgtgatcctgacccccctgcactttgaccgggaccccctgcagaagcagcccagctgccagaggtctgtggtgatccgcaccttcatcaccagtgacttcatgacaggcatcccagccaccccaggaaatgagatccctgtggaggtggtgctgaagatggtgacagagatcaagaagatccctggcatcagccgcatcatgtatgacctgaccagcaagcccccaggcaccacagagtgggagtag

SEQ ID NO: 154627 - DNA, 2082 bp, synthetic construct; identical to SEQ ID NO: 154625
  misc_feature 1..2082: note = Description of Artificial Sequence: Synthetic coding sequence
  source 1..2082: mol_type = other DNA

SEQ ID NO: 154628 - DNA, 1146 bp, synthetic construct
  misc_feature 1..1146: note = Description of Artificial Sequence: Synthetic coding sequence
  source 1..1146: mol_type = other DNA
atgtctggagtggtgaggaccctgagccgctgcctgctgcctgctgaggccggcggggcccgggagaggagagctggcagcggggccagagatgctgagcgggaggcccggcggcgcagccgggacattgatgccctgctggcccgggagaggagagctgtgcggcggctggtgaagatcctgctgctgggcgctggggagagcggcaagagcaccttcctgaagcagatgaggatcatccacggccgggagtttgaccagaaggccctgctggagttccgggacaccatctttgacaacatcctgaagggcagccgggtgctggtggatgcccgggacaagctgggcatcccctggcagtacagtgaaaatgagaagcacggcatgttcctgatggcctttgagaacaaggccggcctgcctgtggagcccgccaccttccagctgtatgtgcctgccctgagcgccctgtggagggacagcggcatccgggaggccttcagcagaagaagtgagttccagctgggggagagcgtgaagtacttcctggacaacctggacagaattggccagctgaactacttccccagcaagcaggacatcctgctggccaggaaggccaccaagggcatcgtggagcatgactttgtgatcaagaagatccccttcaagatggtggatgtgggcggccagaggagccagaggcagaagtggttccagtgctttgatggcatcaccagcatcctcttcatggtgagcagcagtgaatatgaccaggtgctgatggaggacaggaggaccaaccggctggtggagagcatgaacatctttgagaccatcgtgaacaacaagctgttcttcaacgtgtccatcatcctcttcctgaacaagatggacctgctggtggagaaggtgaagacagtgtccatcaagaagcacttcccagacttccggggggacccccaccggctggaggatgtgcagcgctacctggtgcagtgctttgacaggaagagaagaaacagaagcaagcccctcttccaccacttcaccacagccatcgacacagaaaatgtgcgctttgtgttccacgctgtgaaggacaccatcctgcaggagaacctgaaggacatcatgctgcagtag

SEQ ID NO: 154629 - DNA, 702 bp, synthetic construct
  misc_feature 1..702: note = Description of Artificial Sequence: Synthetic coding sequence
  source 1..702: mol_type = other DNA
atgatctaccccctcatcgtgctgcccctgtgtgcctcctggcactggggcctcatcagaaaaggaattgtgctcttctggggcgagagcgtgaagtacttcctggacaacctggacagaattggccagctgaactacttccccagcaagcaggacatcctgctggccaggaaggccaccaagggcatcgtggagcatgactttgtgatcaagaagatccccttcaagatggtggatgtgggcggccagaggagccagaggcagaagtggttccagtgctttgatggcatcaccagcatcctcttcatggtgagcagcagtgaatatgaccaggtgctgatggaggacaggaggaccaaccggctggtggagagcatgaacatctttgagaccatcgtgaacaacaagctgttcttcaacgtgtccatcatcctcttcctgaacaagatggacctgctggtggagaaggtgaagacagtgtccatcaagaagcacttcccagacttccggggggacccccaccggctggaggatgtgcagcgctacctggtgcagtgctttgacaggaagagaagaaacagaagcaagcccctcttccaccacttcaccacagccatcgacacagaaaatgtgcgctttgtgttccacgctgtgaaggacaccatcctgcaggagaacctgaaggacatcatgctgcagtag

SEQ ID NO: 154630 - DNA, 867 bp, synthetic construct
  misc_feature 1..867: note = Description of Artificial Sequence: Synthetic coding sequence
  source 1..867: mol_type = other DNA
atgaggatcatccacggccgggagtttgaccagaaggccctgctggagttccgggacaccatctttgacaacatcctgaagggcagccgggtgctggtggatgcccgggacaagctgggcatcccctggcagtacagtgaaaatgagaagcacggcatgttcctgatggcctttgagaacaaggccggcctgcctgtggagcccgccaccttccagctgtatgtgcctgccctgagcgccctgtggagggacagcggcatccgggaggccttcagcagaagaagtgagttccagctgaactacttccccagcaagcaggacatcctgctggccaggaaggccaccaagggcatcgtggagcatgactttgtgatcaagaagatccccttcaagatggtggatgtgggcggccagaggagccagaggcagaagtggttccagtgctttgatggcatcaccagcatcctcttcatggtgagcagcagtgaatatgaccaggtgctgatggaggacaggaggaccaaccggctggtggagagcatgaacatctttgagaccatcgtgaacaacaagctgttcttcaacgtgtccatcatcctcttcctgaacaagatggacctgctggtggagaaggtgaagacagtgtccatcaagaagcacttcccagacttccggggggacccccaccggctggaggatgtgcagcgctacctggtgcagtgctttgacaggaagagaagaaacagaagcaagcccctcttccaccacttcaccacagccatcgacacagaaaatgtgcgctttgtgttccacgctgtgaaggacaccatcctgcaggagaacctgaaggacatcatgctgcagtag

SEQ ID NO: 154631 - DNA, 1080 bp, synthetic construct
  misc_feature 1..1080: note = Description of Artificial Sequence: Synthetic coding sequence
  source 1..1080: mol_type = other DNA
atgaccctggagagcatgatggcctgctgcctgagtgatgaggtgaaggagagcaagaggatcaatgctgagattgagaagcagctgcggcgggacaagagagatgcccggcgggagctgaagctgctgctgctgggcactggagagagcggcaagagcaccttcatcaagcagatgaggatcatccatggagctggctacagcgaggaggacaagaggggcttcaccaagctggtgtaccagaacatcttcaccgccatgcaggccatgatccgggccatggagaccctgaagatcctgtacaagtatgagcagaacaaggccaatgccctgctgatccgggaggtggatgtggagaaggtgaccacctttgagcaccagtatgtgtctgccatcaagaccctgtgggaggaccccggcatccaggagtgctatgacagaagaagagagtaccagctgagtgacagcgccaagtactacctgacagatgtggacagaattgccaccctgggctacctgcccacccagcaggatgtgctgcgggtgcgggtgcccaccaccggcatcatcgagtacccctttgacctggagaacatcatcttcaggatggtggatgtgggcggccagaggagtgaaagaaggaagtggatccactgctttgaaaatgtgaccagcatcatgttcctggtggccctgtctgaatatgaccaggtgctggtggagagtgacaatgaaaataggatggaggagagcaaggccctcttccgcaccatcatcacctacccctggttccagaacagcagcgtcatcctcttcctgaacaagaaggacctgctggaggacaagatcctgtacagccacctggtggactacttccctgagtttgatggcccccagagagatgcccaggccgcccgggagttcatcctgaagatgtttgtggacctgaacccagacagcgacaagatcatctacagccacttcacctgtgccacagacacagagaacatccgctttgtgtttgctgctgtgaaggacaccatcctgcagctgaacctgaaggagtacaacctggtgtag

SEQ ID NO: 154632 - DNA, 1059 bp, synthetic construct
  misc_feature 1..1059: note = Description of Artificial Sequence: Synthetic coding sequence
  source 1..1059: mol_type = other DNA
atggctgacttcctgcccagccgctctgtgctgtctgtgtgcttccctggctgcctgctgaccagcggggaggccgagcagcagaggaagagcaaggagattgacaagtgcctgagccgggagaagacctacgtgaagaggctggtgaagatcctgctgctgggcgctggggagagcggcaagagcacctacagcaatgtcatcaagggcatgagggtgctggtggatgcccgggagaagctgcacatcccctggggagacaacagcaaccagcagcacggggacaagatgatgagctttgacacccgggcccccatggccgcccagggcatggtggagaccagggtcttcctgcagtacctgcctgccatccgggccctgtgggccgacagcggcatccagaatgcctatgacagaagaagagagttccagctgggggagagcgtgaagtacttcctggacaacctggacaagctgggggagccagactacatccccagccagcaggacatcctgctggcccggcggcccaccaagggcatccacgagtatgactttgagatcaagaatgtgcccttcaagatggtggatgtgggcggccagaggtctgagaggaagcgctggtttgagtgctttgacagcgtgaccagcatcctcttcctggtgagcagcagcgagtttgaccaggtgctgatggaggaccggctgaccaaccggctgacagagagcctgaacatctttgagaccatcgtgaacaacagagtcttcagcaatgtgtccatcatcctcttcctgaacaagacagacctgctggaggagaaggtgcagatcgtgtccatcaaggactacttcctggagtttgaaggagacccccactgcctgagagatgtgcagaagttcctggtggagtgcttcaggaacaagagaagagaccagcagcagaagcccctgtaccaccacttcaccacagccatcaacacagagaacatccggctggtgttcagagatgtgaaggacaccatcctgcatgacaacctgaagcagctgatgctgcagtag

SEQ ID NO: 154633 - DNA, 1134 bp, synthetic construct
  misc_feature 1..1134: note = Description of Artificial Sequence: Synthetic coding sequence
  source 1..1134: mol_type = other DNA
atggctgacttcctgcccagccgctctgtgctgtctgtgtgcttccctggctgcctgctgaccagcggggaggccgagcagcagaggaagagcaaggagattgacaagtgcctgagccgggagaagacctacgtgaagaggctggtgaagatcctgctgctgggcgctggggagagcggcaagagcaccttcctgaagcagatgaggatcatccacggccaggactttgaccagagggcccgggaggagttccggcccaccatctacagcaatgtcatcaagggcatgagggtgctggtggatgcccgggagaagctgcacatcccctggggagacaacagcaaccagcagcacggggacaagatgatgagctttgacacccgggcccccatggccgcccagggcatggtggagaccagggtcttcctgcagtacctgcctgccatccgggccctgtgggccgacagcggcatccagaatgcctatgacagaagaagagagttccagctgggggagagcgtgaagtacttcctggacaacctggacaagctgggggagccagactacatccccagccagcaggacatcctgctggcccggcggcccaccaagggcatccatgaatatgactttgagatcaagaatgtgcccttcaagatggtggatgtgggcggccagaggtctgagaggaagcgctggtttgaatgttttgattctgtgaccagcatcctcttcctggtgagcagcagcgagtttgaccaggtgctgatggaggaccggctgaccaaccggctgacagagagcctgaacatctttgagaccatcgtgaacaacagagtcttcagcaatgtgtccatcatcctcttcctgaacaagacagacctgctggaggagaaggtgcagatcgtgtccatcaaggactacttcctggagtttgaaggagacccccactgcctgagagatgtgcagaagttcctggtggagtgcttcaggaacaagaggcgggaccagcagcagaagcccctgtaccaccacttcaccacagccatcaacacagagaacatccggctggtgttcagagatgtgaaggacaccatcctgcatgacaacctgaagcagctgatgctgcagtag

SEQ ID NO: 154634 - DNA, 849 bp, synthetic construct
  misc_feature 1..849: note = Description of Artificial Sequence: Synthetic coding sequence
  source 1..849: mol_type = other DNA
atgagggtgctggtggatgcccgggagaagctgcacatcccctggggagacaacagcaaccagcagcacggggacaagatgatgagctttgacacccgggcccccatggccgcccagggcatggtggagaccagggtcttcctgcagtacctgcctgccatccgggccctgtgggccgacagcggcatccagaatgcctatgacagaagaagagagttccagctgggggagagcgtgaagtacttcctggacaacctggacaagctgggggagccagactacatccccagccagcaggacatcctgctggcccggcggcccaccaagggcatccacgagtatgactttgagatcaagaatgtgcccttcaagatggtggatgtgggcggccagaggtctgagaggaagcgctggtttgagtgctttgacagcgtgaccagcatcctcttcctggtgagcagcagcgagtttgaccaggtgctgatggaggaccggctgaccaaccggctgacagagagcctgaacatctttgagaccatcgtgaacaacagagtcttcagcaatgtgtccatcatcctcttcctgaacaagacagacctgctggaggagaaggtgcagatcgtgtccatcaaggactacttcctggagtttgaaggagacccccactgcctgagagatgtgcagaagttcctggtggagtgcttcaggaacaagagaagagaccagcagcagaagcccctgtaccaccacttcaccacagccatcaacacagagaacatccggctggtgttcagagatgtgaaggacaccatcctgcatgacaacctgaagcagctgatgctgcagtag

SEQ ID NO: 154635 - DNA, 1068 bp, synthetic construct
  misc_feature 1..1068: note = Description of Artificial Sequence: Synthetic coding sequence
  source 1..1068: mol_type = other DNA
atggccggctgctgctgcctgtctgctgaggagaaggagagccagaggatctctgctgagattgagcggcagctgcggcgggacaagaaggatgcccggcgggagctgaagctgctgctgctgggcactggagagagcggcaagagcaccttcatcaagcagatgaggatcatccacggcagcggctacagtgatgaggacaggaagggcttcaccaagctggtgtaccagaacatcttcaccgccatgcaggccatgatccgggccatggacaccctgcgcatccagtatgtgtgtgagcagaacaaggaaaatgcccagatcatccgggaggtggaggtggacaaggtgtccatgctgagccgggagcaggtggaggccatcaagcagctgtggcaggaccccggcatccaggagtgctatgacagaagaagagagtaccagctgagtgacagcgccaagtactacctgacagacatcgacagaattgccacccccagctttgtgcccacccagcaggatgtgctgcgggtgcgggtgcccaccaccggcatcatcgagtacccctttgacctggagaacatcatcttcaggatggtggatgtgggcggccagaggagtgaaagaaggaagtggatccactgctttgagagcgtgaccagcatcatcttcctggtggccctgtctgaatatgaccaggtgctggctgaatgtgacaatgaaaataggatggaggagagcaaggccctcttcaagaccatcatcacctacccctggttcctgaacagcagcgtcatcctcttcctgaacaagaaggacctgctggaggagaagatcatgtacagccacctgatctcctacttccctgagtacacaggccccaagcaggatgtgcgggccgcccgggacttcatcctgaagctgtaccaggaccagaacccagacaaggagaaggtgatctacagccacttcacctgtgccacagacacagacaacatccgctttgtgtttgctgctgtgaaggacaccatcctgcagctgaacctgcgggagttcaacctggtgtag

SEQ ID NO: 154636 - DNA, 1125 bp, synthetic construct
  misc_feature 1..1125: note = Description of Artificial Sequence: Synthetic coding sequence
  source 1..1125: mol_type = other DNA
atggcccggagcctgacctggcgctgctgcccctggtgcctgacagaagatgagaaggctgctgcccgggtggaccaggagatcaaccgcatcctgctggagcagaagaagcaggacagaggagagctgaagctgctgctgctgggccctggagagagcggcaagagcaccttcatcaagcagatgaggatcatccacggggccggctacagcgaggaggagaggaagggcttccggcccctggtgtaccagaacatctttgtgtccatgagggccatgattgaggccatggagcggctgcagatccccttcagcaggcctgagagcaagcaccacgccagcctggtgatgagccaggacccctacaaggtgaccacctttgagaagagatatgctgctgccatgcagtggctgtggagagatgctggcatccgggcctactatgaaagaagaagagagttccacctgctggacagcgctgtgtactacctgagccacctggagcgcatcacagaggagggctacgtgcccacagcccaggatgtgctgcggagcaggatgcccaccaccggcatcaatgagtactgcttctctgtgcagaagaccaacctgcgcatcgtggatgtgggcggccagaagtctgagaggaagaagtggatccactgctttgaaaatgtgattgccctgatctacctggccagcctgtctgaatatgaccagtgcctggaggagaacaaccaggagaacaggatgaaggagagcctggccctgtttggcaccatcctggagctgccctggttcaagagcaccagcgtcatcctcttcctgaacaagacagacatcctggaggagaagatccccaccagccacctggccacctacttccccagcttccagggccccaagcaggatgctgaggccgccaagcgcttcatcctggacatgtacaccaggatgtacacaggctgtgtggatggccctgagggcagcaagaagggggcccggagcagaagactcttcagccactacacctgtgccacagacacccagaacatcaggaaggtgttcaaggatgtgcgggacagcgtgctggcccgctacctggatgagatcaacctgctgtag

SEQ ID NO: 154637 - DNA, 1065 bp, synthetic construct
  misc_feature 1..1065: note = Description of Artificial Sequence: Synthetic coding sequence
  source 1..1065: mol_type = other DNA
atgggctgcaccctgtctgctgaggagagagctgccctggagaggagcaaggccatcgagaagaacctgaaggaggatggcatctctgctgccaaggatgtgaagctgctgctgctgggcgctggggagagcggcaagagcaccatcgtgaagcagatgaagatcatccatgaagatggcttcagcggggaggatgtgaagcagtacaagcctgtggtgtacagcaacaccatccagagcctggccgccatcgtgcgggccatggacaccctgggcattgaatatggagacaaggagaggaaggcagatgccaagatggtgtgtgatgtggtgtccaggatggaggacacagagcccttctctgctgagctgctgagcgccatgatgaggctgtggggagacagcggcatccaggagtgcttcaacagaagccgggagtaccagctgaatgacagcgccaagtactacctggacagcctggacagaattggagctgctgactaccagcccacagagcaggacatcctgcggaccagggtgaagaccactggaattgtggagacccacttcaccttcaagaacctgcacttccggctgtttgatgtgggcggccagaggtctgagaggaagaagtggatccactgctttgaagatgtgacagccatcatcttctgtgtggccctgagcggctatgaccaggtgctgcatgaagatgagaccaccaacaggatgcatgagagcctgatgctgtttgacagcatctgcaacaacaagttcttcatcgacaccagcatcatcctcttcctgaacaagaaggacctgtttggagagaagatcaagaagagccccctgaccatctgcttccctgagtacacaggccccaacacctatgaagatgctgctgcctacatccaggcccagtttgagagcaagaacagaagccccaacaaggagatctactgccacatgacctgtgccacagacaccaacaacatccaggtggtgtttgatgctgtgacagacatcatcatcgccaacaacctgcggggctgcggcctgtactag

SEQ ID NO: 154638 - DNA, 1065 bp, synthetic construct
  misc_feature 1..1065: note = Description of Artificial Sequence: Synthetic coding sequence
  source 1..1065: mol_type = other DNA
atgggctgcaccctgtctgctgaggagagagctgccctggagaggagcaaggccatcgagaagaacctgaaggaggatggcatctctgctgccaaggatgtgaagctgctgctgctgggcgctggggagagcggcaagagcaccatcgtgaagcagatgaagatcatccatgaagatggcttcagcggggaggatgtgaagcagtacaagcctgtggtgtacagcaacaccatccagagcctggccgccatcgtgcgggccatggacaccctgggcattgaatatggagacaaggagaggaaggcagatgccaagatggtgtgtgatgtggtgtccaggatggaggacacagagcccttctctgctgagctgctgagcgccatgatgaggctgtggggagacagcggcatccaggagtgcttcaacagaagccgggagtaccagctgaatgacagcgccaagtactacctggacagcctggacagaattggagctgctgactaccagcccacagagcaggacatcctgcggaccagggtgaagaccactggaattgtggagacccacttcaccttcaagaacctgcacttccggctgtttgatgtgggcggccagaggtctgagaggaagaagtggatccactgctttgaagatgtgacagccatcatcttctgtgtggccctgagcggctatgaccaggtgctgcatgaagatgagaccaccaacaggatgcatgagagcctgaagctgtttgacagcatctgcaacaacaagtggttcacagacaccagcatcatcctcttcctgaacaagaaggacatctttgaggagaagatcaagaagagccccctgaccatctgcttccctgagtacacaggccccagcgccttcacagaggccgtggcctacatccaggcccagtatgagagcaagaacaagagcgcccacaaggagatctacacccacgtgacctgtgccacagacaccaacaacatccagtttgtgtttgatgctgtgacagatgtgatcatcgccaagaacctgcggggctgcggcctgtactag

SEQ ID NO: 154639 - DNA, 1146 bp, synthetic construct
  misc_feature 1..1146: note = Description of Artificial Sequence: Synthetic coding sequence
  source 1..1146: mol_type = other DNA
atgggctgcctgggcggcaacagcaagaccacagaggaccagggcgtggatgagaaggagcggcgggaggccaacaagaagattgagaagcagctgcagaaggagcggctggcctacaaggccacccaccggctgctgctgctgggcgctggggagagcggcaagagcaccatcgtgaagcagatgaggatcctgcacgtgaatggcttcaaccctgaggagaagaagcagaagatcctggacatcaggaagaatgtgaaggatgccatcgtgaccatcgtgtctgccatgagcaccatcatcccccctgtgcccctggccaaccctgagaaccagttcagaagtgactacatcaagagcatcgcccccatcacagactttgagtacagccaggagttctttgaccacgtgaagaagctgtgggatgatgaaggagtgaaggcctgctttgagaggagcaatgagtaccagctgattgactgtgcccagtacttcctggagagaattgattctgtgtccctggtggactacacccccacagaccaggacctgctgcgctgccgggtgctgaccagcggcatctttgagacccgcttccaggtggacaaggtgaacttccacatgtttgatgtgggcggccagagagatgagaggaggaagtggatccagtgcttcaatgatgtgacagccatcatctacgtggccgcctgcagcagctacaacatggtgatccgggaggacaacaacaccaaccggctgcgggagagcctggacctgtttgagagcatctggaacaaccgctggctgcggaccatcagcatcatcctcttcctgaacaagcaggacatgctggccgagaaggtgctggccggcaagagcaagattgaggactacttcccagaatatgccaactacacagtgcctgaagatgccaccccagatgctggggaggaccccaaggtgacccgggccaagttcttcatccgggacctcttcctgcgcatcagcacagccactggagatggcaagcactactgctacccccacttcacctgtgctgtggacacagagaacatccggcgggtcttcaatgactgccgggacatcatccagaggatgcacctgaagcagtatgagctgctgtag

SEQ ID NO: 154640 - DNA, 1377 bp, synthetic construct
  misc_feature 1..1377: note = Description of Artificial Sequence: Synthetic coding sequence
  source 1..1377: mol_type = other DNA
atgggcctgtgctacagcctgcggcccctgctgtttggaggccctggagatgacccctgtgccgccagcgagccccctgtggaggatgcccagcctgccccagccccagccctggcccctgtgcgggccgccgcccgggacacagcccggaccctgctgccccggggcggggagggcagccctgcctgtgcccggcccaaggctgacaagcccaaggagaagaggcagaggacagagcagctgtctgctgaggagcgggaggccgccaaggagcgggaggccgtgaaggaggccaggaaggtgtcccggggcatcgacaggatgctgcgggaccagaagagggacctgcagcagacccaccggctgctgctgctgggcgctggggagagcggcaagagcaccatcgtgaagcagatgaggatcctgcacgtgaatggcttcaaccctgaggagaagaagcagaagatcctggacatcaggaagaatgtgaaggatgccatcgtgaccatcgtgtctgccatgagcaccatcatcccccctgtgcccctggccaaccctgagaaccagttcagaagtgactacatcaagagcatcgcccccatcacagactttgagtacagccaggagttctttgaccacgtgaagaagctgtgggatgatgagggcgtgaaggcctgctttgagaggagcaatgagtaccagctgattgactgtgcccagtacttcctggagagaattgacagcgtgtccctggtggactacacccccacagaccaggacctgctgcgctgccgggtgctgaccagcggcatctttgagacccgcttccaggtggacaaggtgaacttccacatgtttgatgtgggcggccagagagatgaaagaaggaagtggatccagtgcttcaatgatgtgacagccatcatctacgtggccgcctgcagcagctacaacatggtgatccgggaggacaacaacaccaaccggctgcgggagagcctggacctgtttgagagcatctggaacaaccgctggctgcggaccatcagcatcatcctcttcctgaacaagcaggacatgctggccgagaaggtgctggccggcaagagcaagattgaggactacttcccagaatatgccaactacacagtgcctgaagatgccaccccagatgctggggaggaccccaaggtgacccgggccaagttcttcatccgggacctcttcctgcgcatcagcacagccactggagatggcaagcactactgctacccccacttcacctgtgctgtggacacagagaacatcagaagagtcttcaatgactgccgggacatcatccagaggatgcacctgaagcagtatgagctgctgtag

SEQ ID NO: 154641 - DNA, 1146 bp, synthetic construct; identical to SEQ ID NO: 154639
  misc_feature 1..1146: note = Description of Artificial Sequence: Synthetic coding sequence
  source 1..1146: mol_type = other DNA

SEQ ID NO: 154642 - DNA, 1146 bp, synthetic construct; identical to SEQ ID NO: 154639
  misc_feature 1..1146: note = Description of Artificial Sequence: Synthetic coding sequence
  source 1..1146: mol_type = other DNA

SEQ ID NO: 154643 - DNA, 525 bp, synthetic construct
  misc_feature 1..525: note = Description of Artificial Sequence: Synthetic coding sequence
  source 1..525: mol_type = other DNA
atgtttgatgtgggcggccagagagatgaaagaaggaagtggatccagtgcttcaatgatgtgacagccatcatctacgtggccgcctgcagcagctacaacatggtgatccgggaggacaacaacaccaaccggctgcgggagagcctggacctgtttgagagcatctggaacaaccgctggctgcggaccatcagcatcatcctcttcctgaacaagcaggacatgctggccgagaaggtgctggccggcaagagcaagattgaggactacttcccagaatatgccaactacacagtgcctgaagatgccaccccagatgctggggaggaccccaaggtgacccgggccaagttcttcatccgggacctcttcctgcgcatcagcacagccactggagatggcaagcactactgctacccccacttcacctgtgctgtggacacagagaacatcagaagagtcttcaatgactgccgggacatcatccagaggatgcacctgaagcagtatgagctgctgtag

SEQ ID NO: 154644 - DNA, 963 bp, synthetic construct
  misc_feature 1..963: note = Description of Artificial Sequence: Synthetic coding sequence
  source 1..963: mol_type = other DNA
atgaggatcctgcacgtgaatggcttcaaccctgaggagaagaagcagaagatcctggacatcaggaagaatgtgaaggatgccatcgtgaccatcgtgtctgccatgagcaccatcatcccccctgtgcccctggccaaccctgagaaccagttcagaagtgactacatcaagagcatcgcccccatcacagactttgagtacagccaggagttctttgaccacgtgaagaagctgtgggatgatgagggcgtgaaggcctgctttgagaggagcaatgagtaccagctgattgactgtgcccagtacttcctggagagaattgacagcgtgtccctggtggactacacccccacagaccaggacctgctgcgctgccgggtgctgaccagcggcatctttgagacccgcttccaggtggacaaggtgaacttccacatgtttgatgtgggcggccagagagatgaaagaaggaagtggatccagtgcttcaatgatgtgacagccatcatctacgtggccgcctgcagcagctacaacatggtgatccgggaggacaacaacaccaaccggctgcgggagagcctggacctgtttgagagcatctggaacaaccgctggctgcggaccatcagcatcatcctcttcctgaacaagcaggacatgctggccgagaaggtgctggccggcaagagcaagattgaggactacttcccagaatatgccaactacacagtgcctgaagatgccaccccagatgctggggaggaccccaaggtgacccgggccaagttcttcatccgggacctcttcctgcgcatcagcacagccactggagatggcaagcactactgctacccccacttcacctgtgctgtggacacagagaacatcagaagagtcttcaatgactgccgggacatcatccagaggatgcacctgaagcagtatgagctgctgtag

SEQ ID NO: 154645 - DNA, 1065 bp, synthetic construct
  misc_feature 1..1065: note = Description of Artificial Sequence: Synthetic coding sequence
  source 1..1065: mol_type = other DNA
atgggctgcaccctgtctgctgaggacaaggctgctgtggagaggagcaagatgattgacaggaacctgagagaagatggagagaaggccgcccgggaggtgaagctgctgctgctgggcgctggggagagcggcaagagcaccatcgtgaagcagatgaagatcatccatgaagctggctacagcgaggaggagtgcaagcagtacaaggctgtggtgtacagcaacaccatccagagcatcatcgccatcatccgggccatgggccgcctgaagattgactttggagacagcgcccgggcagatgatgcccggcagctgtttgtgctggccggggctgctgaggagggcttcatgacagctgagctggccggggtcatcaagaggctgtggaaggacagcggcgtgcaggcctgcttcaacagaagccgggagtaccagctgaatgattctgctgcctactacctgaatgacctggaccgcatcgcccagcccaactacatccccacccagcaggatgtgctgcggaccagggtgaagaccaccggcatcgtggagacccacttcaccttcaaggacctgcacttcaagatgtttgatgtgggcggccagaggtctgagaggaagaagtggatccactgctttgaaggagtgacagccatcatcttctgtgtggccctgagtgactatgacctggtgctggccgaggatgaggagatgaacaggatgcatgagagcatgaagctgtttgacagcatctgcaacaacaagtggttcacagacaccagcatcatcctcttcctgaacaagaaggacctgtttgaggagaagatcaagaagagccccctgaccatctgctacccagaatatgccggcagcaacacctatgaggaggccgccgcctacatccagtgccagtttgaggacctgaacaagaggaaggacaccaaggagatctacacccacttcacctgtgccacagacaccaagaatgtgcagtttgtgtttgatgctgtgacagatgtgatcatcaagaacaacctgaaggactgtggcctcttctag

SEQ ID NO: 154646 - DNA, 72 bp, synthetic construct
  misc_feature 1..72: note = Description of Artificial Sequence: Synthetic coding sequence
  source 1..72: mol_type = other DNA
atgggctgcaccctgtctgctgaggacaaggctgctgtggagaggagcaagatgattgacaggaacctgtag

SEQ ID NO: 154647 - DNA, 909 bp, synthetic construct
  misc_feature 1..909: note = Description of Artificial Sequence: Synthetic coding sequence
  source 1..909: mol_type = other DNA
atgaagatcatccatgaagctggctacagcgaggaggagtgcaagcagtacaaggctgtggtgtacagcaacaccatccagagcatcatcgccatcatccgggccatgggccgcctgaagattgactttggagacagcgcccgggcagatgatgcccggcagctgtttgtgctggccggggctgctgaggagggcttcatgacagctgagctggccggggtcatcaagaggctgtggaaggacagcggcgtgcaggcctgcttcaacagaagccgggagtaccagctgaatgattctgctgcctactacctgaatgacctggaccgcatcgcccagcccaactacatccccacccagcaggatgtgctgcggaccagggtgaagaccaccggcatcgtggagacccacttcaccttcaaggacctgcacttcaagatgtttgatgtgggcggccagaggtctgagaggaagaagtggatccactgctttgaaggagtgacagccatcatcttctgtgtggccctgagtgactatgacctggtgctggccgaggatgaggagatgaacaggatgcatgagagcatgaagctgtttgacagcatctgcaacaacaagtggttcacagacaccagcatcatcctcttcctgaacaagaaggacctgtttgaggagaagatcaagaagagccccctgaccatctgctacccagaatatgccggcagcaacacctatgaggaggccgccgcctacatccagtgccagtttgaggacctgaacaagaggaaggacaccaaggagatctacacccacttcacctgtgccacagacaccaagaatgtgcagtttgtgtttgatgctgtgacagatgtgatcatcaagaacaacctgaaggactgtggcctcttctag

SEQ ID NO: 154648 - DNA, 1020 bp, synthetic construct
  misc_feature 1..1020: note = Description of Artificial Sequence: Synthetic coding sequence
  source 1..1020: mol_type = other DNA
atggagtatgccggccacctgcctgccagcagcgcccagggcaccatcctggcctgcaccagctgcacaggagctggggagagcggcaagagcaccatcgtgaagcagatgaagatcatccatgaagatggctacagcgaggaggagtgccggcagtacagagctgtggtgtacagcaacaccatccagagcatcatggccatcgtgaaggccatgggcaacctgcagattgactttgctgaccccagcagagcagatgatgcccggcagctgtttgccctgagctgcacagctgaggagcagggcgtgctgcctgatgacctgtctggagtcatccggcggctgtgggccgaccatggagtgcaggcctgcttcggccgcagccgggagtaccagctgaatgacagcgctgcctactacctgaatgacctggagagaattgcccagagcgactacatccccacccagcaggatgtgctgcggaccagggtgaagaccactggaattgtggagacccacttcaccttcaaggacctgcacttcaagatgtttgatgtgggcggccagaggtctgagaggaagaagtggatccactgctttgagggcgtgacagccatcatcttctgtgtggccctgagcgcctatgacctggtgctggctgaagatgaggagatgaacaggatgcatgagagcatgaagctgtttgacagcatctgcaacaacaagtggttcacagacaccagcatcatcctcttcctgaacaagaaggacctgtttgaggagaagatcacccacagccccctgaccatctgcttccctgagtacaccggggccaacaagtatgatgaggccgccagctacatccagagcaagtttgaggacctgaacaagaggaaggacaccaaggagatctacacccacttcacctgtgccacagacaccaagaatgtgcagtttgtgtttgatgctgtgacagatgtgatcatcaagaacaacctgaaggactgtggcctcttctag

SEQ ID NO: 154649 - DNA, 1068 bp, synthetic construct
  misc_feature 1..1068: note = Description of Artificial Sequence: Synthetic coding sequence
  source 1..1068: mol_type = other DNA
atgggctgcaccgtgtctgctgaggacaaggctgctgctgagaggagcaagatgattgacaagaacctgagagaagatggagagaaggccgcccgggaggtgaagctgctgctgctgggcgctggggagagcggcaagagcaccatcgtgaagcagatgaagatcatccatgaagatggctacagcgaggaggagtgccggcagtacagagctgtggtgtacagcaacaccatccagagcatcatggccatcgtgaaggccatgggcaacctgcagattgactttgctgaccccagcagagcagatgatgcccggcagctgtttgccctgagctgcacagctgaggagcagggcgtgctgcctgatgacctgtctggagtcatccggcggctgtgggccgaccatggagtgcaggcctgcttcggccgcagccgggagtaccagctgaatgacagcgctgcctactacctgaatgacctggagagaattgcccagagcgactacatccccacccagcaggatgtgctgcggaccagggtgaagaccactggaattgtggagacccacttcaccttcaaggacctgcacttcaagatgtttgatgtgggcggccagaggtctgagaggaagaagtggatccactgctttgagggcgtgacagccatcatcttctgtgtggccctgagcgcctatgacctggtgctggctgaagatgaggagatgaacaggatgcatgagagcatgaagctgtttgacagcatctgcaacaacaagtggttcacagacaccagcatcatcctcttcctgaacaagaaggacctgtttgaggagaagatcacccacagccccctgaccatctgcttccctgagtacaccggggccaacaagtatgatgaggccgccagctacatccagagcaagtttgaggacctgaacaagaggaaggacaccaaggagatctacacccacttcacctgtgccacagacaccaagaatgtgcagtttgtgtttgatgctgtgacagatgtgatcatcaagaacaacctgaaggactgtggcctcttctag

SEQ ID NO: 154650 - DNA, 1020 bp, synthetic construct
  misc_feature 1..1020: note = Description of Artificial Sequence: Synthetic coding sequence
  source 1..1020: mol_type = other DNA
atgacagagggcgtgaagaccctgggctggaccaagcagaagggcggctgccactggggccgctctgagggcgctggggagagcggcaagagcaccatcgtgaagcagatgaagatcatccatgaagatggctacagcgaggaggagtgccggcagtacagagctgtggtgtacagcaacaccatccagagcatcatggccatcgtgaaggccatgggcaacctgcagattgactttgctgaccccagcagagcagatgatgcccggcagctgtttgccctgagctgcacagctgaggagcagggcgtgctgcctgatgacctgtctggagtcatccggcggctgtgggccgaccatggagtgcaggcctgcttcggccgcagccgggagtaccagctgaatgacagcgctgcctactacctgaatgacctggagagaattgcccagagcgactacatccccacccagcaggatgtgctgcggaccagggtgaagaccactggaattgtggagacccacttcaccttcaaggacctgcacttcaagatgtttgatgtgggcggccagaggtctgagaggaagaagtggatccactgctttgagggcgtgacagccatcatcttctgtgtggccctgagcgcctatgacctggtgctggctgaagatgaggagatgaacaggatgcatgagagcatgaagctgtttgacagcatctgcaacaacaagtggttcacagacaccagcatcatcctcttcctgaacaagaaggacctgtttgaggagaagatcacccacagccccctgaccatctgcttccctgagtacaccggggccaacaagtatgatgaggccgccagctacatccagagcaagtttgaggacctgaacaagaggaaggacaccaaggagatctacacccacttcacctgtgccacagacaccaagaatgtgcagtttgtgtttgatgctgtgacagatgtgatcatcaagaacaacctgaaggactgtggcctcttctag

SEQ ID NO: 154651 - DNA, 912 bp, synthetic construct
  misc_feature 1..912: note = Description of Artificial Sequence: Synthetic coding sequence
  source 1..912: mol_type = other DNA
atgaagatcatccatgaagatggctacagcgaggaggagtgccggcagtacagagctgtggtgtacagcaacaccatccagagcatcatggccatcgtgaaggccatgggcaacctgcagattgactttgctgaccccagcagagcagatgatgcccggcagctgtttgccctgagctgcacagctgaggagcagggcgtgctgcctgatgacctgtctggagtcatccggcggctgtgggccgaccatggagtgcaggcctgcttcggccgcagccgggagtaccagctgaatgacagcgctgcctactacctgaatgacctggagagaattgcccagagcgactacatccccacccagcaggatgtgctgcggaccagggtgaagaccactggaattgtggagacccacttcaccttcaaggacctgcacttcaagatgtttgatgtgggcggccagaggtctgagaggaagaagtggatccactgctttgagggcgtgacagccatcatcttctgtgtggccctgagcgcctatgacctggtgctggctgaagatgaggagatgaacaggatgcatgagagcatgaagctgtttgacagcatctgcaacaacaagtggttcacagacaccagcatcatcctcttcctgaacaagaaggacctgtttgaggagaagatcacccacagccccctgaccatctgcttccctgagtacaccggggccaacaagtatgatgaggccgccagctacatccagagcaagtttgaggacctgaacaagaggaaggacaccaaggagatctacacccacttcacctgtgccacagacaccaagaatgtgcagtttgtgtttgatgctgtgacagatgtgatcatcaagaacaacctgaaggactgtggcctcttctag

SEQ ID NO: 154652 - DNA, 957 bp, synthetic construct
  misc_feature 1..957: note = Description of Artificial Sequence: Synthetic coding sequence
  source 1..957: mol_type = other DNA
atgagaggagctggggagagcggcaagagcaccatcgtgaagcagatgaagatcatccatgaagatggctacagcgaggaggagtgccggcagtacagagctgtggtgtacagcaacaccatccagagcatcatggccatcgtgaaggccatgggcaacctgcagattgactttgctgaccccagcagagcagatgatgcccggcagctgtttgccctgagctgcacagctgaggagcagggcgtgctgcctgatgacctgagcggggtcatccggcggctgtgggccgaccacggcgtgcaggcctgcttcggccgcagccgggagtaccagctgaatgattctgctgcctactacctgaatgacctggagcgcatcgcccagagcgactacatccccacccagcaggatgtgctgcggaccagggtgaagaccaccggcatcgtggagacccacttcaccttcaaggacctgcacttcaagatgtttgatgtgggcggccagaggtctgagaggaagaagtggatccactgctttgaaggagtgacagccatcatcttctgtgtggccctgagcgcctatgacctggtgctggccgaggatgaggagatgaacaggatgcatgagagcatgaagctgtttgacagcatctgcaacaacaagtggttcacagacaccagcatcatcctcttcctgaacaagaaggacctgtttgaggagaagatcacccacagccccctgaccatctgcttccctgagtacacaggagccaacaagtatgatgaagctgccagctacatccagagcaagtttgaggacctgaacaagaggaaggacaccaaggagatctacacccacttcacctgtgccacagacaccaagaatgtgcagtttgtgtttgatgctgtgacagatgtgatcatcaagaacaacctgaaggactgtggcctcttctag

SEQ ID NO: 154653 - DNA, 825 bp, synthetic construct
  misc_feature 1..825: note = Description of Artificial Sequence: Synthetic coding sequence
  source 1..825: mol_type = other DNA
atggccatcgtgaaggccatgggcaacctgcagattgactttgctgaccccagcagagcagatgatgcccggcagctgtttgccctgagctgcacagctgaggagcagggcgtgctgcctgatgacctgagcggggtcatccggcggctgtgggccgaccacggcgtgcaggcctgcttcggccgcagccgggagtaccagctgaatgattctgctgcctactacctgaatgacctggagcgcatcgcccagagcgactacatccccacccagcaggatgtgctgcggaccagggtgaagaccaccggcatcgtggagacccacttcaccttcaaggacctgcacttcaagatgtttgatgtgggcggccagaggtctgagaggaagaagtggatccactgctttgaaggagtgacagccatcatcttctgtgtggccctgagcgcctatgacctggtgctggccgaggatgaggagatgaacaggatgcatgagagcatgaagctgtttgacagcatctgcaacaacaagtggttcacagacaccagcatcatcctcttcctgaacaagaaggacctgtttgaggagaagatcacccacagccccctgaccatctgcttccctgagtacacaggagccaacaagtatgatgaagctgccagctacatccagagcaagtttgaggacctgaacaagaggaaggacaccaaggagatctacacccacttcacctgtgccacagacaccaagaatgtgcagtttgtgtttgatgctgtgacagatgtgatcatcaagaacaacctgaaggactgtggcctcttctag

SEQ ID NO: 154654 - DNA, 1086 bp, synthetic construct
  misc_feature 1..1086: note = Description of Artificial Sequence: Synthetic coding sequence
  source 1..1086: mol_type = other DNA
atgggctgcaccgtgtctgctgaggacaaggctgctgctgagaggagcaagatgattgacaagaacctgagagaagatggagagaaggccgcccgggaggtgaagctgctgctgctgggcgctggggagagcggcaagagcaccatcgtgaagcagatgaagatcatccatgaagatggctacagcgaggaggagtgccggcagtacagagctgtggtgtacagcaacaccatccagagcatcatggccatcgtgaaggccatgggcaacctgcagattgactttgctgaccccagcagagcagatgatgcccggcagctgtttgccctgagctgcacagctgaggagcagggcgtgctgcctgatgacctgtctggagtcatccggcggctgtgggccgaccatggagtgcaggcctgcttcggccgcagccgggagtaccagctgaatgacagcgctgcctactacctgaatgacctggagagaattgcccagagcgactacatccccacccagcaggatgtgctgcggaccagggtgaagaccactggaattgtggagacccacttcaccttcaaggacctgcacttcaagatgtttgatgtgggcggccagaggtctgagaggaagaagtggatccactgctttgagggcgtgacagccatcatcttctgtgtggccctgagcgcctatgacctggtgctggctgaagatgaggagatgaacaggatgcatgagagcatgaagctgtttgacagcatctgcaacaacaagtggttcacagacaccagcatcatcctcttcctgaacaagaaggacctgtttgaggagaagatcacccacagccccctgaccatctgcttccctgagtacaccggggccaacaagtatgatgaggccgccagctacatccagagcaagtttgaggacctgaacaagaggaaggacaccaaggagatctacacccacttcacctgtgccacagacaccaagagcaggaagctgttccgggagaactacctgaagctgagtgaccctgaccagcagcccccaccagcccccctgcccagcgacagcgtgccctag

SEQ ID NO: 154655 - DNA, 1065 bp, synthetic construct
  misc_feature 1..1065: note = Description of Artificial Sequence: Synthetic coding sequence
  source 1..1065: mol_type = other DNA
atgggctgcaccctgtctgctgaggacaaggctgctgtggagaggagcaagatgattgacaggaacctgagagaagatggagagaaggccgccaaggaggtgaagctgctgctgctgggcgctggggagagcggcaagagcaccatcgtgaagcagatgaagatcatccatgaagatggctacagtgaagatgagtgcaagcagtacaaggtggtggtgtacagcaacaccatccagagcatcatcgccatcatccgggccatgggccgcctgaagattgactttggagaggccgcccgggcagatgatgcccggcagctgtttgtgctggccggcagcgctgaggagggcgtgatgaccccagagctggccggggtcatcaagaggctgtggagagatggaggagtgcaggcctgcttcagccgcagccgggagtaccagctgaatgattctgccagctactacctgaatgacctggaccgcatcagccagagcaactacatccccacccagcaggatgtgctgcggaccagggtgaagaccaccggcatcgtggagacccacttcaccttcaaggacctgtacttcaagatgtttgatgtgggcggccagaggtctgagaggaagaagtggatccactgctttgaaggagtgacagccatcatcttctgtgtggccctgagtgactatgacctggtgctggccgaggatgaggagatgaacaggatgcatgagagcatgaagctgtttgacagcatctgcaacaacaagtggttcacagagaccagcatcatcctcttcctgaacaagaaggacctgtttgaggagaagatcaagaggagccccctgaccatctgctacccagagtacacaggcagcaacacctatgaggaggccgccgcctacatccagtgccagtttgaggacctgaacagaaggaaggacaccaaggagatctacacccacttcacctgtgccacagacaccaagaatgtgcagtttgtgtttgatgctgtgacagatgtgatcatcaagaacaacctgaaggaatgtggcctgtactag

SEQ ID NO: 154656 - DNA, 2652 bp, synthetic construct
  misc_feature 1..2652: note = Description of Artificial Sequence: Synthetic coding sequence
  source 1..2652: mol_type = other DNA
atggctgaaaattctgtgctgaccagcaccactggaagaaccagcctggccgacagcagcatctttgacagcaaggtgacagagatcagcaaggagaacctgctgattggcagcaccagctatgtggaggaggagatgccccagatcgagaccagggtcatcctggtgcaggaggccggcaagcaggaggagctgatcaaggccctgaaggacatcaaggtgggctttgtgaagatggagagcgtggaggagtttgagggcctggacagccctgagtttgaaaatgtgtttgtggtgacagacttccaggacagcgtcttcaatgacctgtacaaggctgactgcagggtcatcggcccccctgtggtgctgaactgcagccagaagggggagcccctgcccttcagctgccggcccctgtactgcacctccatgatgaacctggtgctgtgcttcaccggcttcaggaagaaggaggagctggtgcggctggtgaccctggtgcaccacatgggcggcgtcatcaggaaggacttcaacagcaaggtgacccacctggtggccaactgcacccagggcgagaagttccgggtggccgtgtccctgggcacccccatcatgaagccagagtggatctacaaggcctgggagaggagaaatgagcaggacttctacgccgctgtggatgacttcagaaatgagttcaaggtgccccccttccaggactgcatcctgtccttcctgggcttcagtgatgaggagaagaccaacatggaggagatgacagagatgcagggcggcaagtacctgcccctgggagatgagcgctgcacccacctggtggtggaggagaacatcgtgaaggacctgccctttgagcccagcaagaagctgtatgtggtgaagcaggagtggttctggggcagcatccagatggatgcccgggccggggagaccatgtacctgtatgagaaggccaacaccccagagctgaagaagtctgtgtccatgctgagcctgaacacccccaacagcaacaggaagagaagaaggctgaaggagaccctggcccagctgagccgggagacagatgtgagccccttcccccccaggaagaggccttctgctgagcacagcctgagcatcggcagcctgctggacatcagcaacaccccagagagcagcatcaactacggggacacccccaagagctgcaccaagagcagcaagagcagcacccctgtgcccagcaagcagagcgcccgctggcaggtggccaaggagctgtaccagacagagagcaactacgtgaacatcctggccaccatcatccagctgttccaggtgcccctggaggaggagggccagaggggcggccccatcctggcccctgaggagatcaagaccatcttcggcagcatcccagacatctttgatgtgcacaccaagatcaaggatgacctggaggacctgattgtgaactgggatgagagcaagagcattggagacatcttcctgaagtacagcaaggacctggtgaagacctaccccccatttgtgaacttctttgagatgagcaaggagaccatcatcaagtgtgagaagcagaagccccgcttccacgccttcctgaagatcaaccaggccaagccagaatgtggccggcagagcctggtggagctgctgatccggcctgtgcagaggctgcccagcgtggccctgctgctgaatgacctgaagaagcacacagcagatgagaacccagacaagagcaccctggagaaggccatcggcagcctgaaggaggtgatgacccacatcaatgaagacaagaggaagacagaggcccagaagcagatctttgatgtggtgtatgaggtggatggctgcccagccaacctgctgagcagccacaggagcctggtgcagagggtggagaccatcagcctgggggagcacccctgtgacagaggagagcaggtgaccctcttcctgttcaatgactgcctggagatcgccaggaagaggcacaaggtgattggcaccttccgcagcccccacggccagacccggcccccagccagcctgaagcacatccacctgatgcccctgagccagatcaagaaggtgctggacatccgggagacagaggactgccacaatgcctttgccctgctggtgcggcccccaacagagcaggccaacgtgctgctgtccttccagatgaccagtgatgagctgcccaaggagaactggctgaagatgctgtgcagacatgtggccaacaccatctgcaaggcagatgctgagaacctgatctacacagctgaccctgagagctttgaggtgaacaccaaggacatggacagcaccctgagccgggccagccgggccatcaagaagaccagcaagaaggtgacccgggccttctccttcagcaagacccccaagagggccctgcggcgggccctgatgaccagccacggctctgtggagggccgcagccccagcagcaatgacaagcacgtgatgagccggctgagcagcaccagcagcctggccggcatccccagccccagcctggtgtccctgcccagcttctttgagcggcgcagccacaccctgagccgcagcaccacccacctgatctag

SEQ ID NO: 154657 - DNA, 1053 bp, synthetic construct
  misc_feature 1..1053: note = Description of Artificial Sequence: Synthetic coding sequence
  source 1..1053: mol_type = other DNA
atgggcgctggggccagcgctgaggagaagcacagccgggagctggagaagaagctgaaggaggatgctgagaaggatgccaggacagtgaagctgctgctgctgggcgctggggagagcggcaagagcaccatcgtgaagcagatgaagatcatccaccaggacggctacagcctggaggagtgcctggagttcatcgccatcatctacggcaacaccctgcagagcatcctggccatcgtgcgggccatgaccaccctgaacatccagtatggagacagcgcccggcaggatgatgccaggaagctgatgcacatggctgacaccatcgaggagggcaccatgcccaaggagatgtctgacatcatccagaggctgtggaaggacagcggcatccaggcctgctttgagcgggccagcgagtaccagctgaatgattctgctggctactacctgagtgacctggagcggctggtgaccccaggctacgtgcccacagagcaggatgtgctgcggagccgggtgaagaccaccggcatcatcgagacccagttctccttcaaggacctgaacttcaggatgtttgatgtgggcggccagaggtctgagaggaagaagtggatccactgctttgaaggagtgacctgcatcatcttcatcgccgccctgagcgcctatgacatggtgctggtggaggatgatgaggtgaacaggatgcatgagagcctgcacctgttcaacagcatctgcaaccaccgctactttgccaccaccagcatcgtgctcttcctgaacaagaaggatgtgttctttgagaagatcaagaaggcccacctgagcatctgcttcccagactatgatggccccaacacctatgaagatgctggcaactacatcaaggtgcagttcctggagctgaacatgagaagagatgtgaaggagatctacagccacatgacctgtgccacagacacccagaatgtgaagtttgtgtttgatgctgtgacagacatcatcatcaaggagaacctgaaggactgtggcctcttctag

SEQ ID NO: 154658 - DNA, 1065 bp, synthetic construct
  misc_feature 1..1065: note = Description of Artificial Sequence: Synthetic coding sequence
  source 1..1065: mol_type = other DNA
atgggcagcggggccagcgctgaggacaaggagctggccaagaggagcaaggagctggagaagaagctgcaggaggatgctgacaaggaggccaagacagtgaagctgctgctgctgggcgctggggagagcggcaagagcaccatcgtgaagcagatgaagatcatccaccaggacggctacagcccagaagaatgtctggagttcaaggccatcatctatggaaatgtgctgcagagcatcctggccatcatccgggccatgaccaccctgggcattgattatgcagagcccagctgtgctgatgatggccggcagctgaacaacctggccgacagcattgaggagggcaccatgcctcctgagctggtggaggtgatccggcggctgtggaaggatggaggagtgcaggcctgctttgaaagagctgctgagtaccagctgaatgattctgccagctactacctgaaccagctggagcgcatcacagatcctgagtacctgcccagcgagcaggatgtgctgcggagccgggtgaagaccaccggcatcatcgagaccaagttctctgtgaaggacctgaacttcaggatgtttgatgtgggcggccagaggtctgagaggaagaagtggatccactgctttgaaggagtgacctgcatcatcttctgtgccgccctgagcgcctatgacatggtgctggtggaggatgatgaggtgaacaggatgcatgagagcctgcacctgttcaacagcatctgcaaccacaagttctttgctgccaccagcatcgtgctcttcctgaacaagaaggacctgtttgaggagaagatcaagaaggtgcacctgagcatctgcttcccagaatatgatggcaacaacagctatgatgatgctggcaactacatcaagagccagttcctggacctgaacatgaggaaggatgtgaaggagatctacagccacatgacctgtgccacagacacccagaatgtgaagtttgtgtttgatgctgtgacagacatcatcatcaaggagaacctgaaggactgtggcctcttctag

SEQ ID NO: 154659 - DNA, 1068 bp, synthetic construct
  misc_feature 1..1068: note = Description of Artificial Sequence: Synthetic coding sequence
  source 1..1068: mol_type = other DNA
atgggctgccggcagagcagcgaggagaaggaggccgcccggcgcagcagaagaattgacagacacctgcggtctgagagccagaggcagaggcgggagatcaagctgctgctgctgggcaccagcaacagcggcaagagcaccatcgtgaagcagatgaagatcatccacagcggcggcttcaacctggaggcctgcaaggagtacaagcccctcatcatctacaatgccatcgacagcctgacccgcatcatccgggccctggccgccctgagaattgacttccacaacccagaccgggcctatgatgctgtgcagctgtttgccctgactggacctgctgagagcaaaggagagatcaccccagagctgctgggcgtgatgaggcggctgtgggccgaccccggggcccaggcctgcttcagccgcagcagcgagtaccacctggaggacaatgctgcctactacctgaatgacctggagagaattgctgctgctgactacatccccaccgtggaggacatcctgcggagccgggacatgaccactggaattgtggagaacaagttcaccttcaaggagctgaccttcaagatggtggatgtgggcggccagaggtctgagaggaagaagtggatccactgctttgagggcgtgacagccatcatcttctgtgtggagctgagcggctatgacctgaagctgtatgaggacaaccagaccagcaggatggccgagagcctgcggctgtttgacagcatctgcaacaacaactggttcatcaacaccagcctcatcctcttcctgaacaagaaggacctgctggccgagaagatccgccgcatccccctgaccatctgcttccctgagtacaagggccagaacacctatgaggaggccgctgtgtacatccagaggcagtttgaggacctgaacagaaacaaggagaccaaggagatctacagccacttcacctgtgccacagacaccagcaacatccagtttgtgtttgatgctgtgacagatgtgatcatccagaacaacctgaagtacatcggcctgtgctag

SEQ ID NO: 154660 - DNA, 912 bp, synthetic construct
  misc_feature 1..912: note = Description of Artificial Sequence: Synthetic coding sequence
  source 1..912: mol_type = other DNA
atgaagatcatccacagcggcggcttcaacctggaggcctgcaaggagtacaagcccctcatcatctacaatgccatcgacagcctgacccgcatcatccgggccctggccgccctgagaattgacttccacaacccagaccgggcctatgatgctgtgcagctgtttgccctgactggacctgctgagagcaaaggagagatcaccccagagctgctgggcgtgatgaggcggctgtgggccgaccccggggcccaggcctgcttcagccgcagcagcgagtaccacctggaggacaatgctgcctactacctgaatgacctggagagaattgctgctgctgactacatccccaccgtggaggacatcctgcggagccgggacatgaccactggaattgtggagaacaagttcaccttcaaggagctgaccttcaagatggtggatgtgggcggccagaggtctgagaggaagaagtggatccactgctttgagggcgtgacagccatcatcttctgtgtggagctgagcggctatgacctgaagctgtatgaggacaaccagaccagcaggatggccgagagcctgcggctgtttgacagcatctgcaacaacaactggttcatcaacaccagcctcatcctcttcctgaacaagaaggacctgctggccgagaagatccgccgcatccccctgaccatctgcttccctgagtacaagggccagaacacctatgaggaggccgctgtgtacatccagaggcagtttgaggacctgaacagaaacaaggagaccaaggagatctacagccacttcacctgtgccacagacaccagcaacatccagtttgtgtttgatgctgtgacagatgtgatcatccagaacaacctgaagtacatcggcctgtgctag

SEQ ID NO: 154661 - DNA, 1188 bp, synthetic construct
  misc_feature 1..1188: note = Description of Artificial Sequence: Synthetic coding sequence
  source 1..1188: mol_type = other DNA
atgtgtgaccagaccttcctggtgaatgtgtttggcagctgtgacaagtgcttcaagcagagggccctgcggcctgtgttcaagaagagccagcagctgagctactgcagcacctgtgccgagatcatggccacagagggcctgcatgaaaatgagaccctggccagcctgaagtctgaggccgagagcctgaagggcaagctggaggaggagcgggccaagctgcatgatgtggagctgcaccaggtggccgagcgggtggaggccctgggccagtttgtgatgaagaccaggaggaccctgaagggccacggcaacaaggtgctgtgcatggactggtgcaaggacaagaggcgcatcgtgagcagcagccaggacggcaaggtgattgtgtgggacagcttcaccaccaacaaggagcacgctgtgaccatgccctgcacctgggtgatggcctgtgcctatgcccccagcggctgtgccatcgcctgtggcggcctggacaacaagtgcagcgtgtaccccctgacctttgacaagaatgaaaacatggccgccaagaagaagtctgtggccatgcacaccaactacctgagcgcctgcagcttcaccaacagcgacatgcagatcctgacagccagcggagatggcacctgtgccctgtgggatgtggagagcggccagctgctgcagagcttccacggccacggggctgatgtgctgtgcctggacctggcccccagcgagaccggcaacacctttgtgtctgggggctgtgacaagaaggccatggtgtgggacatgaggagcggccagtgtgtgcaggcctttgagacccatgaaagtgacatcaacagcgtgcgctactaccccagcggagatgcctttgccagcggcagtgatgatgccacctgccgcctgtatgacctgcgggctgaccgggaggtggccatctacagcaaggagagcatcatctttggagccagctctgtggacttcagcctgagcggccgcctgctgtttgctggctacaatgactacaccatcaacgtgtgggatgtgctgaagggcagccgggtgtccatcctgtttggacatgaaaatagagtgtccaccctgcgggtgtccccagatggaacagccttctgcagcggctcctgggaccacaccctgcgggtgtgggcctag

SEQ ID NO: 154662 - DNA, 1062 bp, synthetic construct
  misc_feature 1..1062: note = Description of Artificial Sequence: Synthetic coding sequence
  source 1..1062: mol_type = other DNA
atggccacagagggcctgcatgaaaatgagaccctggccagcctgaagtctgaggccgagagcctgaagggcaagctggaggaggagcgggccaagctgcatgatgtggagctgcaccaggtggccgagcgggtggaggccctgggccagtttgtgatgaagaccaggaggaccctgaagggccacggcaacaaggtgctgtgcatggactggtgcaaggacaagaggcgcatcgtgagcagcagccaggacggcaaggtgattgtgtgggacagcttcaccaccaacaaggagcacgctgtgaccatgccctgcacctgggtgatggcctgtgcctatgcccccagcggctgtgccatcgcctgtggcggcctggacaacaagtgcagcgtgtaccccctgacctttgacaagaatgaaaacatggccgccaagaagaagtctgtggccatgcacaccaactacctgagcgcctgcagcttcaccaacagcgacatgcagatcctgacagccagcggagatggcacctgtgccctgtgggatgtggagagcggccagctgctgcagagcttccacggccacggggctgatgtgctgtgcctggacctggcccccagcgagaccggcaacacctttgtgtctgggggctgtgacaagaaggccatggtgtgggacatgaggagcggccagtgtgtgcaggcctttgagacccatgaaagtgacatcaacagcgtgcgctactaccccagcggagatgcctttgccagcggcagtgatgatgccacctgccgcctgtatgacctgcgggctgaccgggaggtggccatctacagcaaggagagcatcatctttggagccagctctgtggacttcagcctgagcggccgcctgctgtttgctggctacaatgactacaccatcaacgtgtgggatgtgctgaagggcagccgggtgtccatcctgtttggacatgaaaatagagtgtccaccctgcgggtgtccccagatggaacagccttctgcagcggctcctgggaccacaccctgcgggtgtgggcctag

SEQ ID NO: 154663 - DNA, 852 bp, synthetic construct
  misc_feature 1..852: note = Description of Artificial Sequence: Synthetic coding sequence
  source 1..852: mol_type = other DNA
atggccacagagggcctgcatgaaaatgagaccctggccagcctgaagtctgaggccgagagcctgaagggcaagctggaggaggagcgggccaagctgcatgatgtggagctgcaccaggtggccgagcgggtggaggccctgggccagtttgtgatgaagaccaggaggaccctgaagggccacggcaacaaggtgctgtgcatggactggtgcaaggacaagaggcgcatcgtgagcagcagccaggacggcaaggtgattgtgtgggacagcttcaccaccaacaagatcctgacagccagcggagatggcacctgtgccctgtgggatgtggagagcggccagctgctgcagagcttccacggccacggggctgatgtgctgtgcctggacctggcccccagcgagaccggcaacacctttgtgtctgggggctgtgacaagaaggccatggtgtgggacatgaggagcggccagtgtgtgcaggcctttgagacccatgaaagtgacatcaacagcgtgcgctactaccccagcggagatgcctttgccagcggcagtgatgatgccacctgccgcctgtatgacctgcgggctgaccgggaggtggccatctacagcaaggagagcatcatctttggagccagctctgtggacttcagcctgagcggccgcctgctgtttgctggctacaatgactacaccatcaacgtgtgggatgtgctgaagggcagccgggtgtccatcctgtttggacatgaaaatagagtgtccaccctgcgggtgtccccagatggaacagccttctgcagcggctcctgggaccacaccctgcgggtgtgggcctag

SEQ ID NO: 154664 - DNA, 582 bp, synthetic construct
  misc_feature 1..582: note = Description of Artificial Sequence: Synthetic coding sequence
  source 1..582: mol_type = other DNA
atgagcaagctgctgatcctgatcctgacagccagcggagatggcacctgtgccctgtgggatgtggagagcggccagctgctgcagagcttccacggccacggggctgatgtgctgtgcctggacctggcccccagcgagaccggcaacacctttgtgtctgggggctgtgacaagaaggccatggtgtgggacatgaggagcggccagtgtgtgcaggcctttgagacccatgaaagtgacatcaacagcgtgcgctactaccccagcggagatgcctttgccagcggcagtgatgatgccacctgccgcctgtatgacctgcgggctgaccgggaggtggccatctacagcaaggagagcatcatctttggagccagctctgtggacttcagcctgagcggccgcctgctgtttgctggctacaatgactacaccatcaacgtgtgggatgtgctgaagggcagccgggtgtccatcctgtttggacatgaaaatagagtgtccaccctgcgggtgtccccagatggaacagccttctgcagcggctcctgggaccacaccctgcgggtgtgggcctag

SEQ ID NO: 154665 - DNA, 1023 bp, synthetic construct
  misc_feature 1..1023: note = Description of Artificial Sequence: Synthetic coding sequence
  source 1..1023: mol_type = other DNA
atgtctgagctggaccagctgcggcaggaggccgagcagctgaagaaccagatcagagatgccaggaaggcctgtgctgatgccaccctgagccagatcaccaacaacattgatcctgtgggccgcatccagatgaggaccaggaggaccctgcggggccacctggccaagatctatgccatgcactggggcacagacagccggctgctggtgtctgccagccaggacggcaagctgatcatctgggacagctacaccaccaacaaggtgcacgccatccccctgcggagctcctgggtgatgacctgtgcctatgcccccagcggcaactacgtggcctgtggcggcctggacaacatctgcagcatctacaacctgaagacccgggagggcaatgtgcgggtgtcccgggagctggccggccacacaggctacctgagctgctgccgcttcctggatgacaaccagatcgtgaccagcagcggggacaccacctgtgccctgtgggacattgaaacaggccagcagaccaccaccttcaccggccacactggagatgtgatgagcctgagcctggccccagacacccggctgtttgtgtctggggcctgtgatgccagcgccaagctgtgggatgtgcgggagggcatgtgccggcagaccttcaccggccatgaaagtgacatcaatgccatctgcttcttccccaatggaaatgcctttgccactggaagtgatgatgccacctgccgcctgtttgacctgcgggctgaccaggagctgatgacctacagccatgacaacatcatctgtggcatcacctctgtgtccttcagcaagagcggccgcctgctgctggccggctatgatgacttcaactgcaatgtgtgggatgccctgaaggctgacagagctggggtgctggccggccatgacaacagagtgtcctgcctgggcgtgacagatgatggcatggctgtggccaccggctcctgggacagcttcctgaagatctggaactag

SEQ ID NO: 154666 - DNA, 1023 bp, synthetic construct; identical to SEQ ID NO: 154665
  misc_feature 1..1023: note = Description of Artificial Sequence: Synthetic coding sequence
  source 1..1023: mol_type = other DNA

SEQ ID NO: 154667 - DNA, 597 bp, synthetic construct
  misc_feature 1..597: note = Description of Artificial Sequence: Synthetic coding sequence
  source 1..597: mol_type = other DNA
tgaggctacctgagctgctgccgcttcctggatgacaaccagatcgtgaccagcagcggggacaccacctgtgccctgtgggacattgaaacaggccagcagaccaccaccttcaccggccacactggagatgtgatgagcctgagcctggccccagacacccggctgtttgtgtctggggcctgtgatgccagcgccaagctgtgggatgtgcgggagggcatgtgccggcagaccttcaccggccatgaaagtgacatcaatgccatctgcttcttccccaatggaaatgcctttgccactggaagtgatgatgccacctgccgcctgtttgacctgcgggctgaccaggagctgatgacctacagccatgacaacatcatctgtggcatcacctctgtgtccttcagcaagagcggccgcctgctgctggccggctatgatgacttcaactgcaatgtgtgggatgccctgaaggctgacagagctggggtgctggccggccatgacaacagagtgtcctgcctgggcgtgacagatgatggcatggctgtggccaccggctcctgggacagcttcctgaagatctggaactag

SEQ ID NO: 154668 - DNA, 444 bp, synthetic construct
  misc_feature 1..444: note = Description of Artificial Sequence: Synthetic coding sequence
  source 1..444: mol_type = other DNA
atgtctgagctggaccagctgcggcaggaggccgagcagctgaagaaccagatcagagatgccaggaaggcctgtgctgatgccaccctgagccagatcaccaacaacattgatcctgtgggccgcatccagatgaggaccaggaggaccctgcggggccacctggccaagatctatgccatgcactggggcacagacagccggctgctggtgtctgccagccaggacggcaagctgatcatctgggacagctacaccaccaacaaggtgcacgccatccccctgcggagctcctgggtgatgacctgtgcctatgcccccagcggcaactacgtggcctgtggcggcctggacaacatctgcagcatctacaacctgaagacccgggagggcaatgtgcgggtgtcccgggagctggccggccacacaggcacctgcccctag

SEQ ID NO: 154669 - DNA, 327 bp, synthetic construct
  misc_feature 1..327: note = Description of Artificial Sequence: Synthetic coding sequence
  source 1..327: mol_type = other DNA
atgtctgagctggaccagctgcggcaggaggccgagcagctgaagaaccagatcagagatgccaggaaggcctgtgctgatgccaccctgagccagatcaccaacaacattgatcctgtgggccgcatccagatgaggaccaggaggaccctgcggggccacctggccaagatctatgccatgcactggggcacagacagccggctgctggtgtctgccagccaggacggcaagctgatcatctgggacagctacaccaccaacaaggtgcacgccatccccctgcggagctcctgggtgatgacctgtgcctatgcccccagctag

SEQ ID NO: 154670 - DNA, 405 bp, synthetic construct
  misc_feature 1..405: note = Description of Artificial Sequence: Synthetic coding sequence
  source 1..405: mol_type = other DNA
atgtctgagctggaccagctgcggcaggaggccgagcagctgaagaaccagatccgcatcaccaacaacatcgaccctgtgggccgcatccagatgaggaccaggaggaccctgcggggccacctggccaagatctatgccatgcactggggcacagacagccggctgctggtgtctgccagccaggacggcaagctgatcatctgggacagctacaccaccaacaaggtgcacgccatccccctgcggagctcctgggtgatgacctgtgcctatgcccccagcggcaactacgtggcctgtggcggcctggacaacatctgcagcatctacaacctgaagacccgggagggcaatgtgcgggtgtcccgggagctggccggccacacaggcacctgcccctag

SEQ ID NO: 154671 - DNA, 723 bp, synthetic construct
  misc_feature 1..723: note = Description of Artificial Sequence: Synthetic coding sequence
  source 1..723: mol_type = other DNA
atgacctgtgcctatgcccccagcggcaactacgtggcctgtggcggcctggacaacatctgcagcatctacaacctgaagacccgggagggcaatgtgcgggtgtcccgggagctggccggccacacaggctacctgagctgctgccgcttcctggatgacaaccagatcgtgaccagcagcggggacaccacctgtgccctgtgggacattgaaacaggccagcagaccaccaccttcaccggccacactggagatgtgatgagcctgagcctggccccagacacccggctgtttgtgtctggggcctgtgatgccagcgccaagctgtgggatgtgcgggagggcatgtgccggcagaccttcaccggccatgaaagtgacatcaatgccatctgcttcttccccaatggaaatgcctttgccactggaagtgatgatgccacctgccgcctgtttgacctgcgggctgaccaggagctgatgacctacagccatgacaacatcatctgtggcatcacctctgtgtccttcagcaagagcggccgcctgctgctggccggctatgatgacttcaactgcaatgtgtgggatgccctgaaggctgacagagctggggtgctggccggccatgacaacagagtgtcctgcctgggcgtgacagatgatggcatggctgtggccaccggctcctgggacagcttcctgaagatctggaactag

SEQ ID NO: 154672 - DNA, 984 bp, synthetic construct
  misc_feature 1..984: note = Description of Artificial Sequence: Synthetic coding sequence
  source 1..984: mol_type = other DNA
atgacagccccctgccccccacctcctccagacccccagtttgtgctgcggggcacccagagccctgtgcacgccctgcacttctgtgagggcgcccaggcccagggccggcccctgctcttcagcggcagccagagcggcctggtgcacatctggagcctgcagaccaggagagctgtgaccaccctggatggccacggcggccagtgtgtgacctggctgcagaccctgccccagggccggcagctgctgagccagggccgggacctgaagctgtgcctgtgggacctggccgagggccgctctgctgtggtggacagcgtgtgcctggagagcgtgggcttctgccgcagcagcatcctggccggcggccagccccgctggaccctggccgtgcccggccggggcagtgatgaggtgcagatcctggagatgcccagcaagacctctgtgtgtgccctgaagcccaaggcagatgccaagctgggcatgcccatgtgcctgcggctgtggcaggccgactgcagcagccggcccctgctgctggccggctatgaagatggctctgtggtgctgtgggatgtgtctgagcagaaggtgtgcagccgcatcgcctgccacgaggagcctgtgatggacctggactttgacagccagaaggcccggggcatcagcggcagcgctgggaaggccctggccgtgtggagcctggactggcagcaggccctgcaggtgcggggcacccatgagctgaccaaccctggcattgctgaggtgaccatccggccagacaggaagatcctggccacagctggctgggaccaccgcatccgggtcttccactggaggaccatgcagcccctggccgtgctggccttccacagcgctgctgtgcagtgtgtggccttcaccgcagatggcctgctggccgccggcagcaaggaccagaggatcagcctgtggagcctgtacccccgggcctag

SEQ ID NO: 154673 - DNA, 984 bp, synthetic construct; identical to SEQ ID NO: 154672
  misc_feature 1..984: note = Description of Artificial Sequence: Synthetic coding sequence
  source 1..984: mol_type = other DNA

SEQ ID NO: 154674 - DNA, 639 bp, synthetic construct
  misc_feature 1..639: note = Description of Artificial Sequence: Synthetic coding sequence
  source 1..639: mol_type = other DNA
atgacagccccctgccccccacctcctccagacccccagtttgtgctgcggggcacccagagccctgtgcacgccctgcacttctgtgagggcgcccaggcccagggccggcccctgctcttcagcggcagccagagcggcctggtgcacatctggagcctgcagaccaggagagctgtgaccaccctggatggccacggcggccagtgtgtgacctggctgcagaccctgccccagggccggcagctgctgagccagggccgggacctgaagctgtgcctgtgggacctggccgagggccgctctgctgtggtggacagcgtgtgcctggagagcgtgggcttctgccgcagcagcatcctggccggcggccagccccgctggaccctggccgtgcccggccggggcagtgatgaggtgcagatcctggagatgcccagcaagacctctgtgtgtgccctgaagcccaaggcagatgccaagctgggcatgcccatgtgcctgcggctgtggcaggccgactgcagcagccggcccctgctgctggccggctatgaagatggctctgtggtgctgtgggatgtgtctgagcagaaggtgtgcagccgcatcgcctgccacgaggagcccggcctgtag

SEQ ID NO: 154675 - DNA, 1023 bp, synthetic construct
  misc_feature 1..1023: note = Description of Artificial Sequence: Synthetic coding sequence
  source 1..1023: mol_type = other DNA
atgtctgagctggagcagctgcggcaggaggccgagcagctgaggaaccagatcagagatgccaggaaggcctgtggggacagcaccctgacccagatcacagctggcctggaccctgtgggccgcatccagatgaggaccaggaggaccctgcggggccacctggccaagatctatgccatgcactggggcacagacagccggctgctggtgtctgccagccaggacggcaagctgatcatctgggacagctacaccaccaacaaggtgcacgccatccccctgcggagctcctgggtgatgacctgtgcctatgcccccagcggcaactttgtggcctgtggcggcctggacaacatctgcagcatctacagcctgaagacccgggagggcaatgtgcgggtgtcccgggagctgcccggccacacaggctacctgagctgctgccgcttcctggatgacaaccagatcatcaccagcagcggggacaccacctgtgccctgtgggacattgaaacaggccagcagacagtgggctttgctggccacagcggagatgtgatgagcctgagcctggccccagatggccgcacctttgtgtctggggcctgtgatgccagcatcaagctgtgggatgtgcgggacagcatgtgccggcagaccttcatcggccatgaaagtgacatcaatgctgtggccttcttccccaacggctacgccttcaccactggaagtgatgatgccacctgccgcctgtttgacctgcgggctgaccaggagctgctgatgtacagccatgacaacatcatctgtggcatcacctctgtggccttcagccgcagcggccgcctgctgctggccggctatgatgacttcaactgcaacatctgggatgccatgaagggggacagagctggggtgctggccggccatgacaacagagtgtcctgcctgggcgtgacagatgatggcatggctgtggccaccggctcctgggacagcttcctgaagatctggaactag

SEQ ID NO: 154676 - DNA, 1023 bp, synthetic construct; identical to SEQ ID NO: 154675
  misc_feature 1..1023: note = Description of Artificial Sequence: Synthetic coding sequence
  source 1..1023: mol_type = other DNA

SEQ ID NO: 154677 - DNA, 1023 bp, synthetic construct; identical to SEQ ID NO: 154675
  misc_feature 1..1023: note = Description of Artificial Sequence: Synthetic coding sequence
  source 1..1023: mol_type = other DNA

SEQ ID NO: 154678 - DNA, 459 bp, synthetic construct
  misc_feature 1..459: note = Description of Artificial Sequence: Synthetic coding sequence
  source 1..459: mol_type = other DNA
atgtctgagctggagcagctgcggcaggaggccgagcagctgaggaaccagatcagagatgccaggaaggcctgtggggacagcaccctgacccagatcacagctggcctggaccctgtgggccgcatccagatgaggaccaggaggaccctgcggggccacctggccaagatctatgccatgcactggggcacagacagccggctgctggtgtctgccagccaggacggcaagctgatcatctgggacagctacaccaccaacaaggtgcacgccatccccctgcggagctcctgggtgatgacctgtgcctatgcccccagcggcaactttgtggcctgtggcggcctggacaacatctgcagcatctacagcctgaagacccgggagggcaatgtgcgggtgtcccgggagctgcccggccacacaggctacctgagctgctgccgcttcctgtag

SEQ ID NO: 154679 - DNA, 723 bp, synthetic construct
  misc_feature 1..723: note = Description of Artificial Sequence: Synthetic coding sequence
  source 1..723: mol_type = other DNA
atgacctgtgcctatgcccccagcggcaactttgtggcctgtggcggcctggacaacatctgcagcatctacagcctgaagacccgggagggcaatgtgcgggtgtcccgggagctgcccggccacacaggctacctgagctgctgccgcttcctggatgacaaccagatcatcaccagcagcggggacaccacctgtgccctgtgggacattgaaacaggccagcagacagtgggctttgctggccacagcggagatgtgatgagcctgagcctggccccagatggccgcacctttgtgtctggggcctgtgatgccagcatcaagctgtgggatgtgcgggacagcatgtgccggcagaccttcatcggccatgaaagtgacatcaatgctgtggccttcttccccaacggctacgccttcaccactggaagtgatgatgccacctgccgcctgtttgacctgcgggctgaccaggagctgctgatgtacagccatgacaacatcatctgtggcatcacctctgtggccttcagccgcagcggccgcctgctgctggccggctatgatgacttcaactgcaacatctgggatgccatgaagggggacagagctggggtgctggccggccatgacaacagagtgtcctgcctgggcgtgacagatgatggcatggctgtggccaccggctcctgggacagcttcctgaagatctggaactag

SEQ ID NO: 154680 - DNA, 891 bp, synthetic construct
  misc_feature 1..891: note = Description of Artificial Sequence: Synthetic coding sequence
  source 1..891: mol_type = other DNA
atgaggaccaggaggaccctgcggggccacctggccaagatctatgccatgcactggggcacagacagccggctgctggtgtctgccagccaggacggcaagctgatcatctgggacagctacaccaccaacaaggtgcacgccatccccctgcggagctcctgggtgatgacctgtgcctatgcccccagcggcaactttgtggcctgtggcggcctggacaacatctgcagcatctacagcctgaagacccgggagggcaatgtgcgggtgtcccgggagctgcccggccacacaggctacctgagctgctgccgcttcctggatgacaaccagatcatcaccagcagcggggacaccacctgtgccctgtgggacattgaaacaggccagcagacagtgggctttgctggccacagcggagatgtgatgagcctgagcctggccccagatggccgcacctttgtgtctggggcctgtgatgccagcatcaagctgtgggatgtgcgggacagcatgtgccggcagaccttcatcggccatgaaagtgacatcaatgctgtggccttcttccccaacggctacgccttcaccactggaagtgatgatgccacctgccgcctgtttgacctgcgggctgaccaggagctgctgatgtacagccatgacaacatcatctgtggcatcacctctgtggccttcagccgcagcggccgcctgctgctggccggctatgatgacttcaactgcaacatctgggatgccatgaagggggacagagctggggtgctggccggccatgacaacagagtgtcctgcctgggcgtgacagatgatggcatggctgtggccaccggctcctgggacagcttcctgaagatctggaactag

SEQ ID NO: 154681 - DNA, 723 bp, synthetic construct; identical to SEQ ID NO: 154679
  misc_feature 1..723: note = Description of Artificial Sequence: Synthetic coding sequence
  source 1..723: mol_type = other DNA

SEQ ID NO: 154682 - DNA, 699 bp, synthetic construct
  misc_feature 1..699: note = Description of Artificial Sequence: Synthetic coding sequence
  source 1..699: mol_type = other DNA
atgtctgagctggagcagctgcggcaggaggccgagcagctgaggaaccagatcagagatgccaggaaggcctgtggggacagcaccctgacccagatcacagctggcctggaccctgtgggccgcatccagatgaggaccaggaggaccctgcggggccacctggccaagatctatgccatgcactggggcacagacagccggctgctggtgtctgccagccaggacggcaagctgatcatctgggacagctacaccaccaacaaggtgcacgccatccccctgcggagctcctgggtgatgacctgtgcctatgcccccagcggcaactttgtggcctgtggcggcctggacaacatctgcagcatctacagcctgaagacccgggagggcaatgtgcgggtgtcccgggagctgcccggccacacaggctacctgagctgctgccgcttcctggatgacaaccagatcatcaccagcagcggggacaccacctgtgccctgtgggacattgaaacaggccagcagacagtgggctttgctggccacagcggagatgtgatgagcctgagcctggccccagatggccgcacctttgtgtctggggcctgtgatgccagcatcaagctgtgggatgtgcgggacagcatgtgccggcagaccttcatcggccatgaaagtgacatcaatgctgtgtag

SEQ ID NO: 154683 - DNA, 891 bp, synthetic construct; identical to SEQ ID NO: 154680
  misc_feature 1..891: note = Description of Artificial Sequence: Synthetic coding sequence
  source 1..891: mol_type = other DNA

SEQ ID NO: 154684 - DNA, 756 bp, synthetic construct
  misc_feature 1..756: note = Description of Artificial Sequence: Synthetic coding sequence
  source 1..756: mol_type = other DNA
atgtctgagctggagcagctgcggcaggaggccgagcagctgaggaaccagatcagagatgccaggaaggcctgtggggacagcaccctgacccagatcacagctggcctggaccctgtgggccgcatccagatgaggaccaggaggaccctgcggggccacctggccaagatctatgccatgcactggggcacagacagccggctgctggtgtctgccagccaggacggcaagctgatcatctgggacagctacaccaccaacaaggtgcacgccatccccctgcggagctcctgggtgatgacctgtgcctatgcccccagcggcaactttgtggcctgtggcggcctggacaacatctgcagcatctacagcctgaagacccgggagggcaatgtgcgggtgtcccgggagctgcccggccacacaggctacctgagctgctgccgcttcctggatgacaaccagatcatcaccagcagcggggacaccacctgtgccctgtgggacattgaaacaggccagcagacagtgggctttgctggccacagcggagatgtgatgagcctgagcctggccccagatggccgcacctttgtgtctggggcctgtgatgccagcatcaagctgtgggatgtgcgggacagcatgtgccggcagaccttcatcggccatgaaagtgacatcaatgctgtggccttcttccccaacggctacgccttcaccactggaagtgatgatgccacctgcaggtag

SEQ ID NO: 154685 - DNA, 828 bp, synthetic construct
  misc_feature 1..828: note = Description of Artificial Sequence: Synthetic coding sequence
  source 1..828: mol_type = other DNA
atgtctgctgaggtgaaggtgacaggccagaaccaggagcagttcctgctgctggccaagagcgccaagggagctgccctggccaccctcatccaccaggtgctggaggcccctggggtgtatgtgtttggagagctgctggacatgcccaacgtgcgggagctggccgagagtgactttgccagcaccttccggctgctgactgtgtttgcctacggcacctacgccgactacctggccgaggccaggaacctgccccccctgacagaggcccagaagaacaagctgcggcacctgtctgtggtgaccctggccgccaaggtgaagtgcatcccctatgctgtgctgctggaggccctggccctgagaaatgtgcggcagctggaggacctggtgattgaagctgtgtatgcagatgtgctgcggggcagcctggaccagaggaaccagaggctggaggtggactacagcatcggccgggacatccagaggcaggacctgagcgccatcgcccggaccctgcaggagtggtgtgtgggctgtgaggtggtgctgagcggcatcgaggagcaggtgtcccgggccaaccagcacaaggagcagcagctgggcctgaagcagcagattgaaagtgaggtggccaacctgaagaagaccatcaaggtgaccacagctgctgctgctgctgccaccagccaggaccctgagcagcacctgacagagctgcgggagcccgcccctggcaccaaccagaggcagcccagcaagaaggccagcaagggcaagggcctgcggggcagcgccaagatctggagcaagagcaactag

SEQ ID NO: 154686 - DNA, 387 bp, synthetic construct
  misc_feature 1..387: note = Description of Artificial Sequence: Synthetic coding sequence
  source 1..387: mol_type = other DNA
atgaccagcctgtttgcccaggagatccggctgagcaagagacatgaggagatcgtgtcccagaggctgatgctgctgcagcagatggagaacaagctgggggaccagcacacagagaaggccagccagctgcagacagtggagacagccttcaagaggaacctgagcctgctgaaggacattgaagctgctgagaagagcctgcagacccgcatccaccccctgcccaggcctgaggtggtgtccctggagacccgctactgggcctctgtggaggagtacatccccaagtgggagcagttcctgctgggccgggccccctacccctttgctgtggagaaccagaatgaagctgagaacaccatccagaatgaggcccagaggtag

SEQ ID NO: 154687 - DNA, 1023 bp, synthetic construct
  misc_feature 1..1023: note = Description of Artificial Sequence: Synthetic coding sequence
  source 1..1023: mol_type = other DNA
atgtctgagctggagcagctgcggcaggaggccgagcagctgaggaaccagatccaggatgccaggaaggcctgcaatgatgccaccctggtgcagatcaccagcaacatggattctgtgggccgcatccagatgaggaccaggaggaccctgcggggccacctggccaagatctatgccatgcactggggctatgacagccggctgctggtgtctgccagccaggacggcaagctgatcatctgggacagctacaccaccaacaagatgcacgccatccccctgcggagctcctgggtgatgacctgtgcctatgcccccagcggcaactacgtggcctgtggcggcctggacaacatctgcagcatctacaacctgaagacccgggagggcaatgtgcgggtgtcccgggagctgcccggccacacaggctacctgagctgctgccgcttcctggatgacagccagatcgtgaccagcagcggggacaccacctgtgccctgtgggacattgaaacagcccagcagaccaccaccttcaccggccacagcggagatgtgatgagcctgagcctgagcccagacatgaggacctttgtgtctggggcctgtgatgccagcagcaagctgtgggacatcagagatggcatgtgccggcagagcttcaccggccacgtgtctgacatcaatgctgtgtccttcttccccaacggctacgcctttgccactggaagtgatgatgccacctgccgcctgtttgacctgcgggctgaccaggagctgctgctgtacagccatgacaacatcatctgtggcatcacctctgtggccttcagcaagagcggccgcctgctgctggccggctatgatgacttcaactgcaatgtgtgggacaccctgaagggggacagagctggggtgctggccggccatgacaacagagtgtcctgcctgggcgtgacagatgatggcatggctgtggccaccggctcctgggacagcttcctgcgcatctggaactag

SEQ ID NO: 154688 - DNA, 240 bp, synthetic construct
  misc_feature 1..240: note = Description of Artificial Sequence: Synthetic coding sequence
  source 1..240: mol_type = other DNA
atgtctgagctggagcagctgcggcaggaggccgagcagctgaggaaccagatccaggatgccaggaaggcctgcaatgatgccaccctggtgcagatcaccagcaacatggattctgtgggccgcatccagatgaggaccaggaggaccctgcggggccacctggccaagatctatgccatgcactggggctatgacagccggctgctggtgtctgccagccaggacggcaagctgtag

SEQ ID NO: 154689 - DNA, 204 bp, synthetic construct
  misc_feature 1..204: note = Description of Artificial Sequence: Synthetic coding sequence
  source 1..204: mol_type = other DNA
atggaggagtgggatgtgccccagatgaagaaggaggtggagagcctgaagtaccagctggccttccagcgggagatggccagcaagaccatccctgagctgctgaagtggattgaagatggcatccccaaggaccccttcctgaacccagacctgatgaagaacaacccctgggtggagaagggcaagtgcaccatcctgtag

SEQ ID NO: 154690 - DNA, 216 bp, synthetic construct
  misc_feature 1..216: note = Description of Artificial Sequence: Synthetic coding sequence
  source 1..216: mol_type = other DNA
atggccagcaacaacacagccagcatcgcccaggccaggaagctggtggagcagctgaagatggaggccaacatcgaccgcatcaaggtgtccaaggctgctgctgacctgatggcctactgtgaggcccacgccaaggaggaccccctgctgacccctgtgcctgccagcgagaaccccttccgggagaagaagttcttctgtgccatcctgtag

SEQ ID NO: 154691 - DNA, 309 bp, synthetic construct
  misc_feature 1..309: note = Description of Artificial Sequence: Synthetic coding sequence
  source 1..309: mol_type = other DNA
atgcagggcaagctgcagccccccatggagcgggaggccagagatggagtgcccagcggcaaggtgttcctgaaggacctgagcagcacccccatggccagcaacaacacagccagcatcgcccaggccaggaagctggtggagcagctgaagatggaggccaacatcgaccgcatcaaggtgtccaaggctgctgctgacctgatggcctactgtgaggcccacgccaaggaggaccccctgctgacccctgtgcctgccagcgagaaccccttccgggagaagaagttcttctgtgccatcctgtag

SEQ ID NO: 154692 - DNA, 216 bp, synthetic construct; identical to SEQ ID NO: 154690
  misc_feature 1..216: note = Description of Artificial Sequence: Synthetic coding sequence
  source 1..216: mol_type = other DNA

SEQ ID NO: 154693 - DNA, 216 bp, synthetic construct; identical to SEQ ID NO: 154690
  misc_feature 1..216: note = Description of Artificial Sequence: Synthetic coding sequence
  source 1..216: mol_type = other DNA

SEQ ID NO: 154694 - DNA, 216 bp, synthetic construct; identical to SEQ ID NO: 154690
  misc_feature 1..216: note = Description of Artificial Sequence: Synthetic coding sequence
  source 1..216: mol_type = other DNA

SEQ ID NO: 154695 - DNA, 216 bp, synthetic construct; identical to SEQ ID NO: 154690
  misc_feature 1..216: note = Description of Artificial Sequence: Synthetic coding sequence
  source 1..216: mol_type = other DNA

SEQ ID NO: 154696 - DNA, 333 bp, synthetic construct
  misc_feature 1..333: note = Description of Artificial Sequence: Synthetic coding sequence
  source 1..333: mol_type = other DNA
atggtgtacctgcaggccaagacccgcatccctgagcacaggaaggtgacccagctgatcaagtgctggagcccagacctgaaccctgtgttcctgaaggacctgagcagcacccccatggccagcaacaacacagccagcatcgcccaggccaggaagctggtggagcagctgaagatggaggccaacatcgaccgcatcaaggtgtccaaggctgctgctgacctgatggcctactgtgaggcccacgccaaggaggaccccctgctgacccctgtgcctgccagcgagaaccccttccgggagaagaagttcttctgtgccatcctgtag

SEQ ID NO: 154697 - DNA, 207 bp, synthetic construct
  misc_feature 1..207: note = Description of Artificial Sequence: Synthetic coding sequence
  source 1..207: mol_type = other DNA
atgagcggcagcagctctgtggccgccatgaagaaggtggtgcagcagctgcggctggaggccggcctgaacagagtgaaggtgtcccaggccgctgctgacctgaagcagttctgcctgcagaatgcccagcacgaccccctgctgactggagtgagcagcagcaccaaccccttccggccccagaaggtgtgcagcttcctgtag

SEQ ID NO: 154698 - DNA, 207 bp, synthetic construct; identical to SEQ ID NO: 154697
  misc_feature 1..207: note = Description of Artificial Sequence: Synthetic coding sequence
  source 1..207: mol_type = other DNA

SEQ ID NO: 154699 - DNA, 225 bp, synthetic construct
  misc_feature 1..225: note = Description of Artificial Sequence: Synthetic coding sequence
  source 1..225: mol_type = other DNA
atgcctgtgatcaacatcgaggacctgacagagaaggacaagctgaagatggaggtggaccagctgaagaaggaggtgaccctggagaggatgctggtgtccaagtgctgtgaggaggtgcgggactatgtggaggagaggtctggagaggaccccctggtgaagggcatccctgaggacaagaaccccttcaaggagctgaagggcggctgtgtgatctcctag

SEQ ID NO: 154700 - DNA, 225 bp, synthetic construct; identical to SEQ ID NO: 154699
  misc_feature 1..225: note = Description of Artificial Sequence: Synthetic coding sequence
  source 1..225: mol_type = other DNA

SEQ ID NO: 154701 - DNA, 210 bp, synthetic construct
  misc_feature 1..210: note = Description of Artificial Sequence: Synthetic coding sequence
  source 1..210: mol_type = other DNA
atggcccaggacctgtctgagaaggacctgctgaagatggaggtggagcagctgaagaaggaggtgaagaacacccgcatccccatcagcaaggccggcaaggagatcaaggagtatgtggaggcccaggccggaaatgaccccttcctgaagggcatccctgaggacaagaaccccttcaaggagaagggcggctgcctgatctcctag

SEQ ID NO: 154702 - DNA, 210 bp, synthetic construct; identical to SEQ ID NO: 154701
  misc_feature 1..210: note = Description of Artificial Sequence: Synthetic coding sequence
  source 1..210: mol_type = other DNA

SEQ ID NO: 154703 - DNA, 210 bp, synthetic construct; identical to SEQ ID NO: 154701
  misc_feature 1..210: note = Description of Artificial Sequence: Synthetic coding sequence
  source 1..210: mol_type = other DNA

SEQ ID NO: 154704 - DNA, 210 bp, synthetic construct; identical to SEQ ID NO: 154701
  misc_feature 1..210: note = Description of Artificial Sequence: Synthetic coding sequence
  source 1..210: mol_type = other DNA

SEQ ID NO: 154705 - DNA, 210 bp, synthetic construct; identical to SEQ ID NO: 154701
  misc_feature 1..210: note = Description of Artificial Sequence: Synthetic coding sequence
  source 1..210: mol_type = other DNA

SEQ ID NO: 154706 - DNA, 1080 bp, synthetic construct
  misc_feature 1..1080: note = Description of Artificial Sequence: Synthetic coding sequence
  source 1..1080: mol_type = other DNA
atgaccctggagagcatcatggcctgctgcctgtctgaggaggccaaggaggcccggcgcatcaatgatgaaattgagcggcagctgcggcgggacaagagagatgcccggcgggagctgaagctgctgctgctgggcactggagagagcggcaagagcaccttcatcaagcagatgaggatcatccacggcagcggctacagtgatgaggacaagaggggcttcaccaagctggtgtaccagaacatcttcaccgccatgcaggccatgatccgggccatggacaccctgaagatcccctacaagtatgagcacaacaaggcccacgcccagctggtgcgggaggtggatgtggagaaggtgtctgcctttgagaacccctacgtggatgccatcaagagcctgtggaatgaccccggcatccaggagtgctatgacagaagaagagagtaccagctgagtgacagcaccaagtactacctgaatgacctggacagagtggccgaccctgcctacctgcccacccagcaggatgtgctgcgggtgcgggtgcccaccaccggcatcatcgagtacccctttgacctgcagagcgtcatcttcaggatggtggatgtgggcggccagaggagtgaaagaaggaagtggatccactgctttgaaaatgtgaccagcatcatgttcctggtggccctgtctgaatatgaccaggtgctggtggagagtgacaatgaaaataggatggaggagagcaaggccctcttccgcaccatcatcacctacccctggttccagaacagcagcgtcatcctcttcctgaacaagaaggacctgctggaggagaagatcatgtacagccacctggtggactacttcccagaatatgatggcccccagagagatgcccaggccgcccgggagttcatcctgaagatgtttgtggacctgaacccagacagcgacaagatcatctacagccacttcacctgtgccacagacacagagaacatccgctttgtgtttgctgctgtgaaggacaccatcctgcagctgaacctgaaggagtacaacctggtgtag

SEQ ID NO: 154707 - DNA, 474 bp, synthetic construct
  misc_feature 1..474: note = Description of Artificial Sequence: Synthetic coding sequence
  source 1..474: mol_type = other DNA
atggtggatgtgggcggccagaggagtgaaagaaggaagtggatccactgctttgaaaatgtgaccagcatcatgttcctggtggccctgtctgaatatgaccaggtgctggtggagagtgacaatgaaaataggatggaggagagcaaggccctcttccgcaccatcatcacctacccctggttccagaacagcagcgtcatcctcttcctgaacaagaaggacctgctggaggagaagatcatgtacagccacctggtggactacttcccagaatatgatggcccccagagagatgcccaggccgcccgggagttcatcctgaagatgtttgtggacctgaacccagacagcgacaagatcatctacagccacttcacctgtgccacagacacagagaacatccgctttgtgtttgctgctgtgaaggacaccatcctgcagctgaacctgaaggagtacaacctggtgtag

SEQ ID NO: 154708 - DNA, 513 bp, synthetic construct
  misc_feature 1..513: note = Description of Artificial Sequence: Synthetic coding sequence
  source 1..513: mol_type = other DNA
atgggagagcgctgggccgacagccagctggacagccgcagcacccacggcaccggggagagcggcaagagcaccttcatcaagcagatgaggatcatccacggcagcggctacagtgatgaggacaagaggggcttcaccaagctggtgtaccagaacatcttcaccgccatgcaggccatgatccgggccatggacaccctgaagatcccctacaagtatgagcacaacaaggcccacgcccagctggtgcgggaggtggatgtggagaaggtgtctgcctttgagaacccctacgtggatgccatcaagagcctgtggaatgaccccggcatccaggagtgctatgacagaagaagagagtaccagctgagtgacagcaccaagtactacctgaatgacctggacagagtggccgaccctgcctacctgcccacccagcaggatgtgctgcgggtgcgggtgcccaccaccggcatcatcgagtacccctttgacctgcagagcgtgtag

SEQ ID NO: 154709 - DNA, 1824 bp, synthetic construct
  misc_feature 1..1824: note = Description of Artificial Sequence: Synthetic coding sequence
  source 1..1824: mol_type = other DNA
atgcccaggaagaagcccttctctgtgaagcagaagaagaagcagctgcaggacaagcgggagaggaagaggggcctgcaggacggcctgcggagcagcagcaacagccgcagcggcagccgggagcggcgggaggagcagacagacaccagtgatggagagagcgtgacccaccacatccggcggctgaaccagcagcccagccagggcctgggcccccggggctatgaccccaaccgctaccgcctgcactttgagcgggacagccgggaggaggtggagaggaggaagagagctgcccgggagcaggtgctgcagcctgtgtctgctgagctgctggagctggacatccgggaggtgtaccagcccggctctgtgctggacttccccaggaggcctccctggagctatgagatgagcaaggagcagctgatgagccaggaggagaggagcttccaggactacctgggcaagatccacggggcctacagcagcgagaagctgagctactttgagcacaacctggagacctggaggcagctgtggagggtgctggagatgtctgacatcgtgctgctgatcacagacatccgccaccctgtggtgaacttccccccagccctgtatgaatatgtgactggagagctgggcctggccctggtgctggtgctgaacaaggtggacctggcccccccagccctggtggtggcctggaagcactacttccaccagcactacccccagctgcacgtggtgctcttcaccagcttcccccgggaccccaggaccccccaggaccccagctctgtgctgaagaagagcagaagaagaggccggggctggacccgggccctgggccctgagcagctgctgcgggcctgtgaggccatcaccgtgggcaaggtggacctgagctcctggagggagaagatcgccagagatgtggccggggccacctggggcaatggcagcggggaggaggaggaggaggaggatggccctgctgtgctggtggagcagcagacagacagcgccatggagcccaccggccccacccaggagcgctacaaggatggagtggtgaccatcggctgtgtgggcttccccaacgtgggcaagagcagcctcatcaatggcctggtgggcaggaaggtggtgtctgtgtccaggaccccaggccacacccgctacttccagacctacttcctgacccccagcgtgaagctgtgtgactgccccggcctcatcttccccagcctgctgccccggcagctgcaggtgctggccggcatctaccccatcgcccagatccaggagccctacacagctgtgggctacctggccagccgcatccctgtgcaggccctgctgcacctgcggcaccctgaggccgaggaccccagcgctgagcacccctggtgtgcctgggacatctgtgaggcctgggccgagaagaggggctacaagacagccaaggccgccagaaatgatgtgtacagagctgccaacagcctgctgcggctggccgtggatggccgcctgagcctgtgcttccaccccccaggctacagcgagcagaagggcacctgggagagccaccctgagaccacagagctggtggtgctgcagggccgggtgggccctgctggagatgaggaggaggaggaggaggaggagctgagcagcagctgtgaggaggagggggaggaggacagagatgctgatgaggagggggagggagatgaggagacccccaccagcgcccctggcagcagcctggccggcaggaacccctatgccctgctgggggaggatgagtgctag

SEQ ID NO: 154710 - DNA, 1224 bp, synthetic construct
  misc_feature 1..1224: note = Description of Artificial Sequence: Synthetic coding sequence
  source 1..1224: mol_type = other DNA
gtggtgaacttccccccagccctgtatgaatatgtgactggagagctgggcctggccctggtgctggtgctgaacaaggtggacctggcccccccagccctggtggtggcctggaagcactacttccaccagcactacccccagctgcacgtggtgctcttcaccagcttcccccgggaccccaggaccccccaggaccccagctctgtgctgaagaagagcagaagaagaggccggggctggacccgggccctgggccctgagcagctgctgcgggcctgtgaggccatcaccgtgggcaaggtggacctgagctcctggagggagaagatcgccagagatgtggccggggccacctggggcaatggcagcggggaggaggaggaggaggaggatggccctgctgtgctggtggagcagcagacagacagcgccatggagcccaccggccccacccaggagcgctacaaggatggagtggtgaccatcggctgtgtgggcttccccaacgtgggcaagagcagcctcatcaatggcctggtgggcaggaaggtggtgtctgtgtccaggaccccaggccacacccgctacttccagacctacttcctgacccccagcgtgaagctgtgtgactgccccggcctcatcttccccagcctgctgccccggcagctgcaggtgctggccggcatctaccccatcgcccagatccaggagccctacacagctgtgggctacctggccagccgcatccctgtgcaggccctgctgcacctgcggcaccctgaggccgaggaccccagcgctgagcacccctggtgtgcctgggacatctgtgaggcctgggccgagaagaggggctacaagacagccaaggccgccagaaatgatgtgtacagagctgccaacagcctgctgcggctggccgtggatggccgcctgagcctgtgcttccaccccccaggctacagcgagcagaagggcacctgggagagccaccctgagaccacagagctggtggtgctgcagggccgggtgggccctgctggagatgaggaggaggaggaggaggaggagctgagcagcagctgtgaggaggagggggaggaggacagagatgctgatgaggagggggagggagatgaggagacccccaccagcgcccctggcagcagcctggccggcaggaacccctatgccctgctgggggaggatgagtgctag

SEQ ID NO: 154711 - DNA, 1824 bp, synthetic construct; identical to SEQ ID NO: 154709
  misc_feature 1..1824: note = Description of Artificial Sequence: Synthetic coding sequence
  source 1..1824: mol_type = other DNA

SEQ ID NO: 154712 - DNA, 795 bp, synthetic construct
  misc_feature 1..795: note = Description of Artificial Sequence: Synthetic coding sequence
  source 1..795: mol_type = other DNA
atgggagagcgggtgctgtggcccctgcgggccggccagcactggaggcaccggcccctgcctgctggcctgcaggacggcctgcggagcagcagcaacagccgcagcggcagccgggagcggcgggaggagcagacagacaccagtgatggagagagcgtgacccaccacatccggcggctgaaccagcagcccagccagggcctgggcccccggggctatgaccccaaccgctaccgcctgcactttgagcgggacagccgggaggaggtggagaggaggaagagagctgcccgggagcaggtgctgcagcctgtgtctgctgagctgctggagctggacatccgggaggtgtaccagcccggctctgtgctggacttccccaggaggcctccctggagctatgagatgagcaaggagcagctgatgagccaggaggagaggagcttccaggactacctgggcaagatccacggggcctacagcagcgagaagctgagctactttgagcacaacctggagacctggaggcagctgtggagggtgctggagatgtctgacatcgtgctgctgatcacagacatccgccaccctgtggtgaacttccccccagccctgtatgaatatgtgactggagagctgggcctggccctggtgctggtgctgaacaaggtggacctggcccccccagccctggtggtggcctggaagcactacttccaccagcactacccccagctgcacgtggtgctcttcaccagcttcccccgggaccccaggaccccccaggactag

SEQ ID NO: 154713 - DNA, 1824 bp, synthetic construct; identical to SEQ ID NO: 154709
  misc_feature 1..1824: note = Description of Artificial Sequence: Synthetic coding sequence
  source 1..1824: mol_type = other DNA

SEQ ID NO: 154714 - DNA, 1290 bp, synthetic construct
  misc_feature 1..1290: note = Description of Artificial Sequence: Synthetic coding sequence
  source 1..1290: mol_type = other DNA
atggaggccgctgtggtgctggagatgtctgacatcgtgctgctgatcacagacatccgccaccctgtggtgaacttccccccagccctgtatgaatatgtgactggagagctgggcctggccctggtgctggtgctgaacaaggtggacctggcccccccagccctggtggtggcctggaagcactacttccaccagcactacccccagctgcacgtggtgctcttcaccagcttcccccgggaccccaggaccccccaggaccccagctctgtgctgaagaagagcagaagaagaggccggggctggacccgggccctgggccctgagcagctgctgcgggcctgtgaggccatcaccgtgggcaaggtggacctgagctcctggagggagaagatcgccagagatgtggccggggccacctggggcaatggcagcggggaggaggaggaggaggaggatggccctgctgtgctggtggagcagcagacagacagcgccatggagcccaccggccccacccaggagcgctacaaggatggagtggtgaccatcggctgtgtgggcttccccaacgtgggcaagagcagcctcatcaatggcctggtgggcaggaaggtggtgtctgtgtccaggaccccaggccacacccgctacttccagacctacttcctgacccccagcgtgaagctgtgtgactgccccggcctcatcttccccagcctgctgccccggcagctgcaggtgctggccggcatctaccccatcgcccagatccaggagccctacacagctgtgggctacctggccagccgcatccctgtgcaggccctgctgcacctgcggcaccctgaggccgaggaccccagcgctgagcacccctggtgtgcctgggacatctgtgaggcctgggccgagaagaggggctacaagacagccaaggccgccagaaatgatgtgtacagagctgccaacagcctgctgcggctggccgtggatggccgcctgagcctgtgcttccaccccccaggctacagcgagcagaagggcacctgggagagccaccctgagaccacagagctggtggtgctgcagggccgggtgggccctgctggagatgaggaggaggaggaggaggaggagctgagcagcagctgtgaggaggagggggaggaggacagagatgctgatgaggagggggagggagatgaggagacccccaccagcgcccctggcagcagcctggccggcaggaacccctatgccctgctgggggaggatgagtgctag

SEQ ID NO: 154715 - DNA, 1824 bp, synthetic construct; identical to SEQ ID NO: 154709
  misc_feature 1..1824: note = Description of Artificial Sequence: Synthetic coding sequence
  source 1..1824: mol_type = other DNA

SEQ ID NO: 154716 - DNA, 1215 bp, synthetic construct
  misc_feature 1..1215: note = Description of Artificial Sequence: Synthetic coding sequence
  source 1..1215: mol_type = other DNA
atgagcaaggagcagctgatgagccaggaggagaggagcttccaggactacctgggcaagatccacggggcctacagcagcgagaagctgagctactttgagcacaacctggagacctggaggcagctgtggagggtgctggagatgtctgacatcgtgctgctgatcacagacatccgccaccctgtggtgaacttccccccagccctgtatgaatatgtgactggagagctgggcctggccctggtgctggtgctgaacaaggtggacctggcccccccagccctggtggtggcctggaagcactacttccaccagcactacccccagctgcacgtggtgctcttcaccagcttcccccgggaccccaggaccccccaggaccccagctctgtgctgaagaagagcagaagaagaggccggggctggacccgggccctgggccctgagcagctgctgcgggcctgtgaggccatcaccgtgggcaagggcttccccaacgtgggcaagagcagcctcatcaatggcctggtgggcaggaaggtggtgtctgtgtccaggaccccaggccacacccgctacttccagacctacttcctgaccccatctgtgaagctgtgtgactgccccggcctcatcttccccagcctgctgccccggcagctgcaggtgctggccggcatctaccccatcgcccagatccaggagccctacacagctgtgggctacctggccagccgcatccctgtgcaggccctgctgcacctgcggcaccctgaggccgaggaccccagcgctgagcacccctggtgtgcctgggacatctgtgaggcctgggccgagaagaggggctacaagacagccaaggccgccagaaatgatgtgtaccgggccgccaacagcctgctgcggctggccgtggatggccgcctgagcctgtgcttccaccccccaggctacagcgagcagaagggcacctgggagagccaccctgagaccacagagctggtggtgctgcagggccgggtgggccctgctggagatgaggaggaggaggaggaggaggagctgagcagcagctgtgaggaggagggggaggaggacagagatgctgatgaggagggggagggagatgaggagacccccaccagcgcccctggcagcagcctggccggcaggaacccctatgccctgctgggagaagatgaatgttag

SEQ ID NO: 154717 - DNA, 795 bp, synthetic construct; identical to SEQ ID NO: 154712
  misc_feature 1..795: note = Description of Artificial Sequence: Synthetic coding sequence
  source 1..795: mol_type = other DNA

SEQ ID NO: 154718 - DNA, 795 bp, synthetic construct; identical to SEQ ID NO: 154712
  misc_feature 1..795: note = Description of Artificial Sequence: Synthetic coding sequence
  source 1..795: mol_type = other DNA

SEQ ID NO: 154719 - DNA, 795 bp, synthetic construct; identical to SEQ ID NO: 154712
  misc_feature 1..795: note = Description of Artificial Sequence: Synthetic coding sequence
  source 1..795: mol_type = other DNA

SEQ ID NO: 154720 - DNA, 1824 bp, synthetic construct; identical to SEQ ID NO: 154709
  misc_feature 1..1824: note = Description of Artificial Sequence: Synthetic coding sequence
  source 1..1824: mol_type = other DNA

SEQ ID NO: 154721 - DNA, 1824 bp, synthetic construct; identical to SEQ ID NO: 154709
  misc_feature 1..1824: note = Description of Artificial Sequence: Synthetic coding sequence
  source 1..1824: mol_type = other DNA

SEQ ID NO: 154722 - DNA, 795 bp, synthetic construct; identical to SEQ ID NO: 154712
  misc_feature 1..795: note = Description of Artificial Sequence: Synthetic coding sequence
  source 1..795: mol_type = other DNA

SEQ ID NO: 154723 - DNA, 795 bp, synthetic construct; identical to SEQ ID NO: 154712
  misc_feature 1..795: note = Description of Artificial Sequence: Synthetic coding sequence
  source 1..795: mol_type = other DNA

SEQ ID NO: 154724 - DNA, 1824 bp, synthetic construct; identical to SEQ ID NO: 154709
  misc_feature 1..1824: note = Description of Artificial Sequence: Synthetic coding sequence
  source 1..1824: mol_type = other DNA

SEQ ID NO: 154725 - DNA, 201 bp, synthetic construct
  misc_feature 1..201: note = Description of Artificial Sequence: Synthetic coding sequence
  source 1..201: mol_type = other DNA
gtggtgaacttccccccagccctgtatgaatatgtgactggagagctgggcctggccctggtgctggtgctgaacaaggtggacctggcccccccagccctggtggtggcctggaagcactacttccaccagcactacccccagctgcacgtggtgctcttcaccagcttcccccgggaccccaggaccccccaggactag

SEQ ID NO: 154726 - DNA, 795 bp, synthetic construct; identical to SEQ ID NO: 154712
  misc_feature 1..795: note = Description of Artificial Sequence: Synthetic coding sequence
  source 1..795: mol_type = other DNA

SEQ ID NO: 154727 - DNA, 1215 bp, synthetic construct; identical to SEQ ID NO: 154716
  misc_feature 1..1215: note = Description of Artificial Sequence: Synthetic coding sequence
  source 1..1215: mol_type = other DNA

SEQ ID NO: 154728 - DNA, 789 bp, synthetic construct
  misc_feature 1..789: note = Description of Artificial Sequence: Synthetic coding sequence
  source 1..789: mol_type = other DNA
atggagcccaccggccccacccaggagcgctacaaggatggagtggtgaccatcggctgtgtgggcttccccaacgtgggcaagagcagcctcatcaatggcctggtgggcaggaaggtggtgtctgtgtccaggaccccaggccacacccgctacttccagacctacttcctgaccccatctgtgaagctgtgtgactgccccggcctcatcttccccagcctgctgccccggcagctgcaggtgctggccggcatctaccccatcgcccagatccaggagccctacacagctgtgggctacctggccagccgcatccctgtgcaggccctgctgcacctgcggcaccctgaggccgaggaccccagcgctgagcacccctggtgtgcctgggacatctgtgaggcctgggccgagaagaggggctacaagacagccaaggccgccagaaatgatgtgtaccgggccgccaacagcctgctgcggctggccgtggatggccgcctgagcctgtgcttccaccccccaggctacagcgagcagaagggcacctgggagagccaccctgagaccacagagctggtggtgctgcagggccgggtgggccctgctggagatgaggaggaggaggaggaggaggagctgagcagcagctgtgaggaggagggggaggaggacagagatgctgatgaggagggggagggagatgaggagacccccaccagcgcccctggcagcagcctggccggcaggaacccctatgccctgctgggagaagatgaatgttag

SEQ ID NO: 154729 - DNA, 789 bp, synthetic construct; identical to SEQ ID NO: 154728
  misc_feature 1..789: note = Description of Artificial Sequence: Synthetic coding sequence
  source 1..789: mol_type = other DNA

SEQ ID NO: 154730 - DNA, 1290 bp, synthetic construct; identical to SEQ ID NO: 154714
  misc_feature 1..1290: note = Description of Artificial Sequence: Synthetic coding sequence
  source 1..1290: mol_type = other DNA

SEQ ID NO: 154731 - DNA, 1215 bp, synthetic construct; identical to SEQ ID NO: 154716
  misc_feature 1..1215: note = Description of Artificial Sequence: Synthetic coding sequence
  source 1..1215: mol_type = other DNA

SEQ ID NO: 154732 - DNA, 1215 bp, synthetic construct; identical to SEQ ID NO: 154716
  misc_feature 1..1215: note = Description of Artificial Sequence: Synthetic coding sequence
  source 1..1215: mol_type = other DNA

SEQ ID NO: 154733 - DNA, 789 bp, synthetic construct; identical to SEQ ID NO: 154728
  misc_feature 1..789: note = Description of Artificial Sequence: Synthetic coding sequence
  source 1..789: mol_type = other DNA

SEQ ID NO: 154734 - DNA, 1290 bp, synthetic construct; identical to SEQ ID NO: 154714
  misc_feature 1..1290: note = Description of Artificial Sequence: Synthetic coding sequence
  source 1..1290: mol_type = other DNA

SEQ ID NO: 154735 - DNA, 1290 bp, synthetic construct; identical to SEQ ID NO: 154714
  misc_feature 1..1290: note = Description of Artificial Sequence: Synthetic coding sequence
  source 1..1290: mol_type = other DNA

SEQ ID NO: 154736 - DNA, 789 bp, synthetic construct; identical to SEQ ID NO: 154728
  misc_feature 1..789: note = Description of Artificial Sequence: Synthetic coding sequence
  source 1..789: mol_type = other DNA

SEQ ID NO: 154737 - DNA, 1215 bp, synthetic construct; identical to SEQ ID NO: 154716
  misc_feature 1..1215: note = Description of Artificial Sequence: Synthetic coding sequence
  source 1..1215: mol_type = other DNA

SEQ ID NO: 154738 - DNA, 1290 bp, synthetic construct; identical to SEQ ID NO: 154714
  misc_feature 1..1290: note = Description of Artificial Sequence: Synthetic coding sequence
  source 1..1290: mol_type = other DNA

SEQ ID NO: 154739 - DNA, 1290 bp, synthetic construct; identical to SEQ ID NO: 154714
  misc_feature 1..1290: note = Description of Artificial Sequence: Synthetic coding sequence
  source 1..1290: mol_type = other DNA

SEQ ID NO: 154740 - DNA, 789 bp, synthetic construct; identical to SEQ ID NO: 154728
  misc_feature 1..789: note = Description of Artificial Sequence: Synthetic coding sequence
  source 1..789: mol_type = other DNA

SEQ ID NO: 154741 - DNA, 1290 bp, synthetic construct; identical to SEQ ID NO: 154714
  misc_feature 1..1290: note = Description of Artificial Sequence: Synthetic coding sequence
  source 1..1290: mol_type = other DNA

SEQ ID NO: 154742 - DNA, 1215 bp, synthetic construct; identical to SEQ ID NO: 154716
  misc_feature 1..1215: note = Description of Artificial Sequence: Synthetic coding sequence
  source 1..1215: mol_type = other DNA

SEQ ID NO: 154743 - DNA, 1215 bp, synthetic construct; identical to SEQ ID NO: 154716
  misc_feature 1..1215: note = Description of Artificial Sequence: Synthetic coding sequence
  source 1..1215: mol_type = other DNA

SEQ ID NO: 154744 - DNA, 789 bp, synthetic construct; identical to SEQ ID NO: 154728
  misc_feature 1..789: note = Description of Artificial Sequence: Synthetic coding sequence
  source 1..789: mol_type = other DNA

SEQ ID NO: 154745 - DNA, 2196 bp, synthetic construct
  misc_feature 1..2196: note = Description of Artificial Sequence: Synthetic coding sequence
  source 1..2196: mol_type = other DNA
atggtgaagcccaagtacaagggccgcagcaccatcaaccccagcaaggccagcaccaacccagacagagtgcagggcgccggcggccagaacatgagggaccgggccaccatccggcggctgaacatgtaccggcagaaggagaggaggaacagccggggcaagatcatcaagcccctgcagtaccagagcacagtggccagcggcaccgtggcccgggtggagcccaacatcaagtggtttggaaacaccagggtcatcaagcagagcagcctgcagaagttccaggaggagatggacacagtgatgaaggacccctacaaggtggtgatgaagcagagcaagctgcccatgagcctgctgcatgaccgcatccggccccacaacctgaaggtgcacatcctggacacagagagctttgagaccaccttcggccccaagagccagaggaagaggcccaacctgtttgccagtgacatgcagagcctgattgaaaatgctgagatgagcacagagagctatgaccagggcaaggaccgggacctggtgacagaagatactggagtgagaaatgaggcccaggaggagatctacaagaagggccagagcaagaggatctggggcgagctgtacaaggtgattgacagcagtgatgtggtggtgcaggtgctggatgcccgggaccccatgggcaccaggagcccccacatcgagacctacctgaagaaggagaagccctggaagcacctgatctttgtgctgaacaagtgtgacctggtgcccacctgggccaccaagcgctgggtggccgtgctgagccaggactaccccaccctggccttccacgccagcctgaccaacccctttggaaaaggagccttcatccagctgctgcggcagtttgggaagctgcacacagacaagaagcagatctctgtgggcttcatcggctaccccaacgtgggcaagagcagcgtcatcaacaccctgcggagcaagaaggtgtgcaatgtggcccccatcgccggggagaccaaggtgtggcagtacatcaccctgatgaggcgcatcttcctgattgactgccctggggtggtgtaccccagcgaggacagcgagacagacatcgtgctgaagggcgtggtgcaggtggagaagatcaagagccctgaggaccacatcggggctgtgctggagcgggccaagccagagtacatcagcaagacctacaagattgacagctgggagaatgctgaggacttcctggagaagctggccttcagaacaggcaagctgctgaagggcggggagccagacctgcagacagtgggcaagatggtgctgaatgactggcagaggggccgcatccccttctttgtgaagcccccaaatgctgagcccctggtggccccccagctgctgcccagcagcagcctggaggtggtgcctgaggccgcccagaacaaccctggagaggaggtgacagaaacagctggggagggcagcgagagcatcatcaaggaggagacagaggagaacagccactgtgatgccaacacagagatgcagcagatcctgaccagggtgcggcagaactttgggaagatcaacgtggtgccccagttctctggagatgacctggtgcctgtggaggtgtctgacctggaggaggagctggagagcttcagtgatgaggaggaggaggagcaggagcagcagagagatgatgctgaggagagcagcagcgagcctgaggaggagaatgtgggcaatgacaccaaggctgtgatcaaggccctggatgagaagatcgccaagtaccagaagttcctggacaaggccaaggccaagaagttctctgctgtgcgcatcagcaagggcctgtctgagaagatctttgccaagccagaggagcagaggaagaccctggaggaggatgtggatgaccgggcccccagcaagaagggcaagaagaggaaggcccagcgggaggaggagcaggagcacagcaacaaggccccccgggccctgaccagcaaggagaggagaagagctgtgcggcagcagaggcccaagaaggtgggcgtgcgctactatgagacccacaacgtgaagaacagaaacagaaacaagaagaagaccaatgattctgagggccagaagcacaagaggaagaagttccggcagaagcagtag

SEQ ID NO: 154746 - DNA, 579 bp, synthetic construct
  misc_feature 1..579: note = Description of Artificial Sequence: Synthetic coding sequence
  source 1..579: mol_type = other DNA
atgcagagcctgattgaaaatgctgagatgagcacagagagctatgaccagggcaaggaccgggacctggtgacagaggacaccggggtgagaaatgaggcccaggaggagatctacaagaagggccagagcaagaggatctggggcgagctgtacaaggtgattgacagcagtgatgtggtggtgcaggtgctggatgcccgggaccccatgggcaccaggagcccccacatcgagacctacctgaagaaggagaagccctggaagcacctgatctttgtgctgaacaagtgtgacctggtgcccacctgggccaccaagcgctgggtggccgtgctgagccaggactaccccaccctggccttccacgccagcctgaccaacccctttgggaagggggccttcatccagctgctgcggcagtttgggaagctgcacacagacaagaagcagatctctgtgggcttcatcggctacccaaatgtgggcaagagcagcgtcatcaacaccctgcggagcaagaaggtgtgcaatgtggcccccatcgccggggagaccaaggtgtccatcctgctgtag

SEQ ID NO: 154747 - DNA, 1614 bp, synthetic construct
  misc_feature 1..1614: note = Description of Artificial Sequence: Synthetic coding sequence
  source 1..1614: mol_type = other DNA
atgacctgccacaagcgctacaagatccagaagaaggtgcgggagcaccacaggaagctgaggaaggaggccaagaagaggggccacaagaagcccaggaaggaccccggggtgcccaacagcgcccccttcaaggaggccctgctgcgggaggccgagctgaggaagcagaggctggaggagctgaagcagcagcagaagctggaccggcagaaggagctggagaagaagaggaagctggagaccaacccagacatcaagcccagcaatgtggagcccatggagaaggagtttggcctgtgcaagacagagaacaaggccaagagcggcaagcagaacagcaagaagctgtactgccaggagctgaagaaggtgattgaggccagtgatgtggtgctggaggtgctggatgcccgggaccccctgggctgccgctgcccccaggtggaggaggccatcgtgcagagcggccagaagaagctggtgctgatcctgaacaagagtgacctggtgcccaaggagaacctggagagctggctgaactacctgaagaaggagctgcccaccgtggtgttccgggccagcaccaagcccaaggacaagggcaagatcaccaagagggtgaaggccaagaagaatgctgcccccttccgctctgaggtgtgcttcggcaaggagggcctgtggaagctgctgggcggcttccaggagacctgcagcaaggccatccgggtgggcgtcatcggcttccccaacgtgggcaagagcagcatcatcaacagcctgaagcaggagcagatgtgcaatgtgggcgtgtccatgggcctgaccaggtccatgcaggtggtgcccctggacaagcagatcaccatcatcgacagccccagcttcatcgtgagccccctgaacagcagcagcgccctggccctgcggagccctgccagcattgaggtggtgaagcccatggaggccgccagcgccatcctgagccaggctgatgcccggcaggtggtgctgaagtacacagtgcccggctacagaaacagcctggagttcttcaccgtgctggcccagaggcggggcatgcaccagaagggcggcatccccaacgtggagggcgccgccaagctgctgtggagcgagtggacaggagccagcctggcctactactgccacccccccacctcctggaccccaccaccctacttcaatgaaagcatcgtggtggacatgaagagcggcttcaacctggaggagctggagaagaacaatgcccagagcatccgggccatcaagggcccccacctggccaacagcatcctcttccagagcagcggcctgaccaacggcatcatcgaggagaaggacatccacgaggagctgcccaagaggaaggagaggaagcaggaggagagagaagatgacaaggacagcgaccaggagaccgtggatgaggaggtggatgagaacagcagcggcatgtttgctgctgaggagaccggggaggccctgtctgaggagaccacagctggggagcagagcaccaggagcttcatcctggacaagatcatcgaggaggatgatgcctatgacttcagcacagattatgtgtag

SEQ ID NO: 154748 - DNA, 1650 bp, synthetic construct
  misc_feature 1..1650: note = Description of Artificial Sequence: Synthetic coding sequence
  source 1..1650: mol_type = other DNA
atgaagaggcccaagctgaagaaggccagcaagaggatgacctgccacaagcgctacaagatccagaagaaggtgcgggagcaccacaggaagctgaggaaggaggccaagaagaggggccacaagaagcccaggaaggaccccggggtgcccaacagcgcccccttcaaggaggccctgctgcgggaggccgagctgaggaagcagaggctggaggagctgaagcagcagcagaagctggaccggcagaaggagctggagaagaagaggaagctggagaccaacccagacatcaagcccagcaatgtggagcccatggagaaggagtttggcctgtgcaagacagagaacaaggccaagagcggcaagcagaacagcaagaagctgtactgccaggagctgaagaaggtgattgaggccagtgatgtggtgctggaggtgctggatgcccgggaccccctgggctgccgctgcccccaggtggaggaggccatcgtgcagagcggccagaagaagctggtgctgatcctgaacaagagtgacctggtgcccaaggagaacctggagagctggctgaactacctgaagaaggagctgcccaccgtggtgttccgggccagcaccaagcccaaggacaagggcaagatcaccaagagggtgaaggccaagaagaatgctgcccccttccgctctgaggtgtgcttcggcaaggagggcctgtggaagctgctgggcggcttccaggagacctgcagcaaggccatccgggtgggcgtcatcggcttccccaacgtgggcaagagcagcatcatcaacagcctgaagcaggagcagatgtgcaatgtgggcgtgtccatgggcctgaccaggtccatgcaggtggtgcccctggacaagcagatcaccatcatcgacagccccagcttcatcgtgagccccctgaacagcagcagcgccctggccctgcggagccctgccagcattgaggtggtgaagcccatggaggccgccagcgccatcctgagccaggctgatgcccggcaggtggtgctgaagtacacagtgcccggctacagaaacagcctggagttcttcaccgtgctggcccagaggcggggcatgcaccagaagggcggcatccccaacgtggagggcgccgccaagctgctgtggagcgagtggacaggagccagcctggcctactactgccacccccccacctcctggaccccaccaccctacttcaatgaaagcatcgtggtggacatgaagagcggcttcaacctggaggagctggagaagaacaatgcccagagcatccgggccatcaagggcccccacctggccaacagcatcctcttccagagcagcggcctgaccaacggcatcatcgaggagaaggacatccacgaggagctgcccaagaggaaggagaggaagcaggaggagagagaagatgacaaggacagcgaccaggagaccgtggatgaggaggtggatgagaacagcagcggcatgtttgctgctgaggagaccggggaggccctgtctgaggagaccacagctggggagcagagcaccaggagcttcatcctggacaagatcatcgaggaggatgatgcctatgacttcagcacagattatgtgtag

SEQ ID NO: 154749 - DNA, 291 bp, synthetic construct
  misc_feature 1..291: note = Description of Artificial Sequence: Synthetic coding sequence
  source 1..291: mol_type = other DNA
atgacctgccacaagcgctacaagatccagaagaaggtgcgggagcaccacaggaagctgaggaaggaggccaagaagaggggccacaagaagcccaggaaggaccccggggtgcccaacagcgcccccttcaaggaggccctgctgcgggaggccgagctgaggaagcagaggctggaggagctgaagcagcagcagaagctggaccggcagaaggagctggagaagaagaggaagctggagaccaacccagacatcaagcccagcaatgtggagcccatggagaagtag

SEQ ID NO: 154750 - DNA, 408 bp, synthetic construct
  misc_feature 1..408: note = Description of Artificial Sequence: Synthetic coding sequence
  source 1..408: mol_type = other DNA
atgacctgccacaagcgctacaagatccagaagaaggtgcgggagcaccacaggaagctgaggaaggaggccaagaagaggggccacaagaagcccaggaaggaccccggggtgcccaacagcgcccccttcaaggaggccctgctgcgggaggccgagctgaggaagcagaggctggaggagctgaagcagcagcagaagctggaccggcagaaggagctggagaagaagaggaagctggagaccaacccagacatcaagcccagcaatgtggagcccatggagaaggagtttggcctgtgcaagacagagaacaaggccaagagcggcaagcagaacagcaagaagctgtactgccaggagctgaagaaggtgattgaggccagtgatgtggtgctggaggtgtag

SEQ ID NO: 154751 - DNA, 417 bp, synthetic construct
  misc_feature 1..417: note = Description of Artificial Sequence: Synthetic coding sequence
  source 1..417: mol_type = other DNA
atgaagaggcccaagctgaagaaggccagcaagaggatgacctgccacaagcgctacaagatccagaagaaggtgcgggagcaccacaggaagctgaggaaggaggccaagaagaggggccacaagaagcccaggaaggaccccggggtgcccaacagcgcccccttcaaggaggccctgctgcgggaggccgagctgaggaagcagaggctggaggagctgaagcagcagcagaagctggaccggcagaaggagctggagaagaagaggaagctggagaccaacccagacatcaagcccagcaatgtggagcccatggagaaggagtttggcctgtgcaagacagagaacaaggccaagagcggcaagcagaacagcaagaagctgtactgccaggagctgaagaaggtgtcctag

SEQ ID NO: 154752 - DNA, 1038 bp, synthetic construct
  misc_feature 1..1038: note = Description of Artificial Sequence: Synthetic coding sequence
  source 1..1038: mol_type = other DNA
atgcccagaattgatgctgacctgaagctggacttcaaggatgtgctgctgcggcccaagaggagcagcctgaagagcagagctgaggtggacctggagaggaccttcaccttcaggaacagcaagcagacctacagcggcatccccatcatcgtggccaacatggacacagtgggcacctttgagatggctgctgtgatgagccagcacagcatgttcaccgccatccacaagcactacagcctggatgactggaagctgtttgccaccaaccaccctgagtgcctgcagaatgtggccgtgagcagcggcagcggccagaatgacctggagaagatgaccagcatcctggaggccgtgccccaggtgaagttcatctgcctggatgtggccaacggctacagcgagcactttgtggagtttgtgaagctggtgcgggccaagtttcctgagcacaccatcatggctggaaatgtggtgactggagagatggtggaggagctgatcctgtctggagctgacatcatcaaggtgggcgtgggccctggctctgtgtgcaccaccaggaccaagacaggagtgggctacccccagctgtctgctgtgattgaatgtgccgacagcgcccacggcctgaagggccacatcatcagtgatggcggctgcacctgccctggagatgtggccaaggccttcggggccggggctgactttgtgatgctgggcggcatgttcagcggccacacagaatgtgccggggaggtgtttgaaagaaatggaaggaagctgaagctgttctacggcatgagcagtgacacagccatgaacaagcatgctggaggagtggccgagtaccgggccagcgagggcaagacagtggaggtgccctacaagggagatgtggagaacaccatcctggacatcctgggcggcctgcggagcacctgcacctacgtgggcgccgccaagctgaaggagctgagcagaagagccaccttcatccgggtgacccagcagcacaacacagtgttctcctag

SEQ ID NO: 154753 - DNA, 1230 bp, synthetic construct
  misc_feature 1..1230: note = Description of Artificial Sequence: Synthetic coding sequence
  source 1..1230: mol_type = other DNA
atgccccacatcgacaatgatgtgaagctggacttcaaggatgtgctgctgcggcccaagaggagcaccctgaagagccgctctgaggtggacctgaccaggagcttctccttcaggaacagcaagcagacctacagcggcgtgcccatcatcgccgccaacatggacacagtgggcacctttgagatggccaaggtgctgtgcaagttcagcctcttcaccgctgtgcacaagcactacagcctggtgcagtggcaggagtttgctggccagaacccagactgcctggagcacctggccgccagcagcggcaccggcagcagtgactttgagcagctggagcagatcctggaggccatcccccaggtgaagtacatctgcctggatgtggccaacggctacagcgagcactttgtggagtttgtgaaggatgtgaggaagcgcttcccccagcacaccatcatggctggaaatgtggtgactggagagatggtggaggagctgatcctgtctggagctgacatcatcaaggtgggcatcggccctggctctgtgtgcaccaccaggaagaagacaggagtgggctacccccagctgtctgctgtgatggagtgtgctgatgctgcccacggcctgaagggccacatcatcagtgatggcggctgcagctgccctggagatgtggccaaggccttcggggccggggctgactttgtgatgctgggcggcatgctggccggccacagcgagagcggcggggagctgattgaaagagatggcaagaagtacaagctgttctacggcatgagcagcgagatggccatgaagaagtatgctgggggcgtggccgagtaccgctacgtgtggaggcccaggagcctggtgattgtgtggaggcagaacagctggctgctgcggggcggctggtacagcagccagaggtccatggtgaacagaggctccatgctgggctctgtggagaagagcctgggcctgagaaatcctgagggggaggacaacaaggtgttccccaccctgcgggccagcgagggcaagacagtggaggtgcccttcaagggagatgtggagcacaccatccgggacatcctgggcggcatccgcagcacctgcacctacgtgggcgccgccaagctgaaggagctgagcaggaggaccaccttcatccgggtgacccagcaggtgaaccccatcttcagcgaggcctgctag

SEQ ID NO: 154754 - DNA, 1047 bp, synthetic construct
  misc_feature 1..1047: note = Description of Artificial Sequence: Synthetic coding sequence
  source 1..1047: mol_type = other DNA
atgccccacatcgacaatgatgtgaagctggacttcaaggatgtgctgctgcggcccaagaggagcaccctgaagagccgctctgaggtggacctgaccaggagcttctccttcaggaacagcaagcagacctacagcggcgtgcccatcatcgccgccaacatggacacagtgggcacctttgagatggccaaggtgctgtgcaagttcagcctcttcaccgctgtgcacaagcactacagcctggtgcagtggcaggagtttgctggccagaacccagactgcctggagcacctggccgccagcagcggcaccggcagcagtgactttgagcagctggagcagatcctggaggccatcccccaggtgaagtacatctgcctggatgtggccaacggctacagcgagcactttgtggagtttgtgaaggatgtgaggaagcgcttcccccagcacaccatcatggctggaaatgtggtgactggagagatggtggaggagctgatcctgtctggagctgacatcatcaaggtgggcatcggccctggctctgtgtgcaccaccaggaagaagacaggagtgggctacccccagctgtctgctgtgatggagtgtgctgatgctgcccacggcctgaagggccacatcatcagtgatggcggctgcagctgccctggagatgtggccaaggccttcggggccggggctgactttgtgatgctgggcggcatgctggccggccacagcgagagcggcggggagctgattgaaagagatggcaagaagtacaagctgttctacggcatgagcagcgagatggccatgaagaagtatgctgggggcgtggccgagtaccgggccagcgagggcaagacagtggaggtgcccttcaagggagatgtggagcacaccatccgggacatcctgggcggcatccgcagcacctgcacctacgtgggcgccgccaagctgaaggagctgagcaggaggaccaccttcatccgggtgacccagcaggtgaaccccatcttcagcgaggcctgctag

SEQ ID NO: 154755 - DNA, 1047 bp, synthetic construct; identical to SEQ ID NO: 154754
  misc_feature 1..1047: note = Description of Artificial Sequence: Synthetic coding sequence
  source 1..1047: mol_type = other DNA

SEQ ID NO: 154756 - DNA, 1101 bp, synthetic construct
  misc_feature 1..1101: note = Description of Artificial Sequence: Synthetic coding sequence
  source 1..1101: mol_type = other DNA
atgaccagctgcctgcctgccctgcgcttcatcgccaccccccggctgagcgccatgccccacatcgacaatgatgtgaagctggacttcaaggatgtgctgctgcggcccaagaggagcaccctgaagagccgctctgaggtggacctgaccaggagcttctccttcaggaacagcaagcagacctacagcggcgtgcccatcatcgccgccaacatggacacagtgggcacctttgagatggccaaggtgctgtgcaagttcagcctcttcaccgctgtgcacaagcactacagcctggtgcagtggcaggagtttgctggccagaacccagactgcctggagcacctggccgccagcagcggcaccggcagcagtgactttgagcagctggagcagatcctggaggccatcccccaggtgaagtacatctgcctggatgtggccaacggctacagcgagcactttgtggagtttgtgaaggatgtgaggaagcgcttcccccagcacaccatcatggctggaaatgtggtgactggagagatggtggaggagctgatcctgtctggagctgacatcatcaaggtgggcatcggccctggctctgtgtgcaccaccaggaagaagacaggagtgggctacccccagctgtctgctgtgatggagtgtgctgatgctgcccacggcctgaagggccacatcatcagtgatggcggctgcagctgccctggagatgtggccaaggccttcggggccggggctgactttgtgatgctgggcggcatgctggccggccacagcgagagcggcggggagctgattgaaagagatggcaagaagtacaagctgttctacggcatgagcagcgagatggccatgaagaagtatgctgggggcgtggccgagtaccgggccagcgagggcaagacagtggaggtgcccttcaagggagatgtggagcacaccatccgggacatcctgggcggcatccgcagcacctgcacctacgtgggcgccgccaagctgaaggagctgagcaggaggaccaccttcatccgggtgacccagcaggtgaaccccatcttcagcgaggcctgctag

SEQ ID NO: 154757 - DNA, 1047 bp, synthetic construct
  misc_feature 1..1047: note = Description of Artificial Sequence: Synthetic coding sequence
  source 1..1047: mol_type = other DNA
atgccccacatcgacaatgatgtgaagctggacttcaaggatgtgctgctgcggcccaagaggagcaccctgaagagccgctctgaggtggacctgaccaggagcttctccttcaggaacagcaagcagacctacagcggcgtgcccatcatcgccgccaacatggacacagtgggcacctttgagatggccaaggtgctgtgcaagttcagcctcttcaccgctgtgcacaagcactacagcctggtgcagtggcaggagtttgctggccagaacccagactgcctggagagcatctggctgcctgcccaggcccaggccctgctgaccctgagctcctggaacagatcctggaagctgttccccaggaagtacatctgcctggatgtggccaacggctacagcgagcactttgtggagtttgtgaaggatgtgaggaagcgcttcccccagcacaccatcatggctggaaatgtggtgactggagagatggtggaggagctgatcctgtctggagctgacatcatcaaggtgggcatcggccctggctctgtgtgcaccaccaggaagaagacaggagtgggctacccccagctgtctgctgtgatggagtgtgctgatgctgcccacggcctgaagggccacatcatcagtgatggcggctgcagctgccctggagatgtggccaaggccttcggggccggggctgactttgtgatgctgggcggcatgctggccggccacagcgagagcggcggggagctgattgaaagagatggcaagaagtacaagctgttctacggcatgagcagcgagatggccatgaagaagtatgctgggggcgtggccgagtaccgggccagcgagggcaagacagtggaggtgcccttcaagggagatgtggagcacaccatccgggacatcctgggcggcatccgcagcacctgcacctacgtgggcgccgccaagctgaaggagctgagcaggaggaccaccttcatccgggtgacccagcaggtgaaccccatcttcagcgaggcctgctag

SEQ ID NO: 154758 - DNA, 1047 bp, synthetic construct; identical to SEQ ID NO: 154754
  misc_feature 1..1047: note = Description of Artificial Sequence: Synthetic coding sequence
  source 1..1047: mol_type = other DNA

SEQ ID NO: 154759 - DNA, 1779 bp, synthetic construct
  misc_feature 1..1779: note = Description of Artificial Sequence: Synthetic coding sequence
  source 1..1779: mol_type = other DNA
atggccagcgagatccacatgacaggccccatgtgcctgattgagaacaccaacggccgcctgatggccaaccctgaggccctgaagatcctgagcgccatcacccagcccatggtggtggtggccatcgtgggcctgtacagaacaggcaagagctacctgatgaacaagctggccggcaagaagaagggcttcagcctgggcagcacagtgcagagccacaccaagggcatctggatgtggtgtgtgccccaccccaagaagccaggccacatcctggtgctgctggacacagagggcctgggagatgtggagaagggggacaaccagaatgacagctggatctttgccctggccgtgctgctgagcagcacctttgtgtacaacagcatcggcaccatcaaccagcaggccatggaccagctgtactacgtgacagagctgacccaccgcatccgcagcaagagcagcccagatgaaaatgaaaatgaggtggaggacagcgctgactttgtgtccttcttcccagactttgtgtggaccctgcgggacttcagcctggacctggaggctgatggccagcccctgaccccagatgagtacctgacctacagcctgaagctgaagaagggcaccagccagaaggatgagaccttcaacctgccccggctgtgcatcaggaagttcttccccaagaagaagtgctttgtgtttgacaggcctgtgcacaggaggaagctggcccagctggagaagctgcaggatgaggagctggaccctgagtttgtgcagcaggtggccgacttctgcagctacatcttcagcaacagcaagaccaagaccctgagcggcggcatccaggtgaatggcccccggctggagagcctggtgctgacctacgtgaatgccatcagcagcggggacctgccctgcatggagaatgctgtgctggccctggcccagattgaaaattctgctgctgtgcagaaggccatcgcccactatgagcagcagatgggccagaaggtgcagctgcccacagagaccctgcaggagctgctggacctgcaccgggacagcgagcgggaggccatcgaggtgttcatccgcagcagcttcaaggatgtggaccacctgttccagaaggagctggccgcccagctggagaagaagagagatgacttctgcaagcagaaccaggaggccagcagtgaccgctgcagcgccctgctgcaggtgatcttcagccccctggaggaggaggtgaaggccggcatctacagcaagccaggcggctaccgcctgtttgtgcagaagctgcaggacctgaagaagaagtactatgaggagcccaggaagggcatccaggccgaggagatcctgcagacctacctgaagagcaaggagagcatgacagatgccatcctgcagacagaccagaccctgacagagaaggagaaggagattgaggtggagcgggtgaaggccgagagcgcccaggccagcgccaagatgctgcaggagatgcagaggaagaatgagcagatgatggagcagaaggagaggagctaccaggagcacctgaagcagctgacagagaagatggagaatgacagagtgcagctgctgaaggagcaggagaggaccctggccctgaagctgcaggagcaggagcagctgctgaaggagggcttccagaaggagagccgcatcatgaagaatgagatccaggacctgcagaccaagatgagaagaaggaaggcctgcaccatctcctag

SEQ ID NO: 154760 - DNA, 1668 bp, synthetic construct
  misc_feature 1..1668: note = Description of Artificial Sequence: Synthetic coding sequence
  source 1..1668: mol_type = other DNA
atggtggtggtggccatcgtgggcctgtacagaacaggcaagagctacctgatgaacaagctggccggcaagaagaagggcttcagcctgggcagcacagtgcagagccacaccaagggcatctggatgtggtgtgtgccccaccccaagaagccaggccacatcctggtgctgctggacacagagggcctgggagatgtggagaagggggacaaccagaatgacagctggatctttgccctggccgtgctgctgagcagcacctttgtgtacaacagcatcggcaccatcaaccagcaggccatggaccagctgtactacgtgacagagctgacccaccgcatccgcagcaagagcagcccagatgaaaatgaaaatgaggtggaggacagcgctgactttgtgtccttcttcccagactttgtgtggaccctgcgggacttcagcctggacctggaggctgatggccagcccctgaccccagatgagtacctgacctacagcctgaagctgaagaagggcaccagccagaaggatgagaccttcaacctgccccggctgtgcatcaggaagttcttccccaagaagaagtgctttgtgtttgacaggcctgtgcacaggaggaagctggcccagctggagaagctgcaggatgaggagctggaccctgagtttgtgcagcaggtggccgacttctgcagctacatcttcagcaacagcaagaccaagaccctgagcggcggcatccaggtgaatggcccccggctggagagcctggtgctgacctacgtgaatgccatcagcagcggggacctgccctgcatggagaatgctgtgctggccctggcccagatcgagaacagcgctgctgtgcagaaggccatcgcccactatgagcagcagatgggccagaaggtgcagctgcccacagagaccctgcaggagctgctggacctgcaccgggacagcgagcgggaggccatcgaggtgttcatccgcagcagcttcaaggatgtggaccacctgttccagaaggagctggccgcccagctggagaagaagagagatgacttctgcaagcagaaccaggaggccagcagtgaccgctgcagcgccctgctgcaggtgatcttcagccccctggaggaggaggtgaaggccggcatctacagcaagccaggcggctaccgcctgtttgtgcagaagctgcaggacctgaagaagaagtactatgaggagcccaggaagggcatccaggccgaggagatcctgcagacctacctgaagagcaaggagagcatgacagatgccatcctgcagacagaccagaccctgacagagaaggagaaggagattgaggtggagcgggtgaaggccgagagcgcccaggccagcgccaagatgctgcaggagatgcagaggaagaatgagcagatgatggagcagaaggagaggagctaccaggagcacctgaagcagctgacagagaagatggagaatgacagagtgcagctgctgaaggagcaggagaggaccctggccctgaagctgcaggagcaggagcagctgctgaaggagggcttccagaaggagagccgcatcatgaagaatgagatccaggacctgcagaccaagatgagaagaaggaaggcctgcaccatctcctag

SEQ ID NO: 154761 - DNA, 1776 bp, synthetic construct
  misc_feature 1..1776: note = Description of Artificial Sequence: Synthetic coding sequence
  source 1..1776: mol_type = other DNA
atggcccctgagatcaacctgcccggccccatgagcctgattgacaacaccaagggccagctggtggtgaaccctgaggccctgaagatcctgagcgccatcacccagcctgtggtggtggtggccatcgtgggcctgtacagaacaggcaagagctacctgatgaacaagctggccggcaagaagaatggcttcagcctgggcagcacagtgaagagccacaccaagggcatctggatgtggtgtgtgccccaccccaagaagccagagcacaccctggtgctgctggacacagagggcctgggggacatcgagaagggggacaatgaaaatgacagctggatctttgccctggccatcctgctgagcagcacctttgtgtacaacagcatgggcaccatcaaccagcaggccatggaccagctgcactacgtgacagagctgacagaccgcatcaaggccaacagcagccctggcaacaacagcgtggatgacagcgctgactttgtgtccttcttccctgcctttgtgtggaccctgcgggacttcaccctggagctggaggtggatggagagcccatcacagcagatgactacctggagctgagcctgaagctgaggaagggcacagacaagaagagcaagagcttcaatgacccccggctgtgcatcaggaagttcttccccaagaggaagtgctttgtgtttgactggccagcccccaagaagtacctggcccacctggagcagctgaaggaggaggagctgaacccagacttcatcgagcaggtggccgagttctgcagctacatcctgagccacagcaatgtgaagaccctgagcggcggcatccctgtgaatggcccccggctggagagcctggtgctgacctacgtgaatgccatcagcagcggggacctgccctgcatggagaatgctgtgctggccctggcccagattgaaaattctgctgctgtggagaaggccatcgcccactatgagcagcagatgggccagaaggtgcagctgcccacagagaccctgcaggagctgctggacctgcaccgggacagcgagcgggaggccatcgaggtgttcatgaagaacagcttcaaggatgtggaccagatgttccagaggaagctgggcgcccagctggaggccaggagagatgacttctgcaagcagaacagcaaggccagcagtgactgctgcatggccctgctgcaggacatcttcggccccctggaggaggatgtgaagcagggcaccttcagcaagccaggcggctaccgcctcttcacccagaagctgcaggagctgaagaacaagtactaccaggtgcccaggaagggcatccaggccaaggaggtgctgaagaagtacctggagagcaaagaagatgtggctgatgccctgctgcagacagaccagagcctgtctgagaaggagaaggccatcgaggtggagcgcatcaaggccgagagcgctgaggccgccaagaagatgctggaggagatccagaagaagaatgaggagatgatggagcagaaggagaagagctaccaggagcacgtgaagcagctgacagagaagatggagcgggaccgggcccagctgatggccgagcaggagaagaccctggccctgaagctgcaggagcaggagcggctgctgaaggagggctttgaaaatgaaagcaagaggctgcagaaggacatctgggacatccagatgaggagcaagagcctggagcccatctgcaacatcctgtag

SEQ ID NO: 154762 - DNA, 1776 bp, synthetic construct; identical to SEQ ID NO: 154761
  misc_feature 1..1776: note = Description of Artificial Sequence: Synthetic coding sequence
  source 1..1776: mol_type = other DNA

SEQ ID NO: 154763 - DNA, 1323 bp, synthetic construct
  misc_feature 1..1323: note = Description of Artificial Sequence: Synthetic coding sequence
  source 1..1323: mol_type = other DNA
atggcccctgagatccacatgacaggccccatgtgcctgattgagaacaccaacggggagctggtggccaaccctgaggccctgaagatcctgagcgccatcacccagcctgtggtggtggtggccatcgtgggcctgtacagaacaggcaagagctacctgatgaacaagctggccggcaagaacaagggcttcagcctgggcagcacagtgaagagccacaccaagggcatctggatgtggtgtgtgccccaccccaagaagccagagcacaccctggtgctgctggacacagagggcctgggagatgtgaagaagggggacaaccagaatgacagctggatcttcaccctggccgtgctgctgagcagcaccctggtgtacaacagcatgggcaccatcaaccagcaggccatggaccagctgtactacgtgacagagctgacccaccgcatccgcagcaagagcagcccagatgaaaatgaaaatgaagacagcgctgactttgtgtccttcttcccagactttgtgtggaccctgcgggacttcagcctggacctggaggctgatggccagcccctgaccccagatgagtacctggagtacagcctgaagctgacccagggcaccagccagaaggacaagaacttcaacctgccccggctgtgcatcaggaagttcttccccaagaagaagtgctttgtgtttgacctgcccatccacaggaggaagctggcccagctggagaagctgcaggatgaggagctggaccctgagtttgtgcagcaggtggccgacttctgcagctacatcttcagcaacagcaagaccaagaccctgagcggcggcatcaaggtgaatggcccccggctggagagcctggtgctgacctacatcaatgccatcagcagaggagacctgccctgcatggagaatgctgtgctggccctggcccagattgaaaattctgctgctgtgcagaaggccatcgcccactatgaccagcagatgggccagaaggtgcagctgcctgctgagaccctgcaggagctgctggacctgcaccgggtgtctgagcgggaggccacagaggtgtacatgaagaacagcttcaaggatgtggaccacctgttccagaagaagctggccgcccagctggacaagaagagagatgacttctgcaagcagaaccaggaggccagcagtgaccgctgcagcgccctgctgcaggtgatcttcagccccctggaggaggaggtgaaggccggcatctacagcaagccaggcggctactgcctcttcatccagaagctgcaggactag

SEQ ID NO: 154764 - DNA, 1788 bp, synthetic construct
  misc_feature 1..1788: note = Description of Artificial Sequence: Synthetic coding sequence
  source 1..1788: mol_type = other DNA
atggcccctgagatccacatgacaggccccatgtgcctgattgagaacaccaacggggagctggtggccaaccctgaggccctgaagatcctgagcgccatcacccagcctgtggtggtggtggccatcgtgggcctgtacagaacaggcaagagctacctgatgaacaagctggccggcaagaacaagggcttcagcctgggcagcacagtgaagagccacaccaagggcatctggatgtggtgtgtgccccaccccaagaagccagagcacaccctggtgctgctggacacagagggcctgggagatgtgaagaagggggacaaccagaatgacagctggatcttcaccctggccgtgctgctgagcagcaccctggtgtacaacagcatgggcaccatcaaccagcaggccatggaccagctgtactacgtgacagagctgacccaccgcatccgcagcaagagcagcccagatgaaaatgaaaatgaagacagcgctgactttgtgtccttcttcccagactttgtgtggaccctgcgggacttcagcctggacctggaggctgatggccagcccctgaccccagatgagtacctggagtacagcctgaagctgacccagggcaccagccagaaggacaagaacttcaacctgccccggctgtgcatcaggaagttcttccccaagaagaagtgctttgtgtttgacctgcccatccacaggaggaagctggcccagctggagaagctgcaggatgaggagctggaccctgagtttgtgcagcaggtggccgacttctgcagctacatcttcagcaacagcaagaccaagaccctgagcggcggcatcaaggtgaatggcccccggctggagagcctggtgctgacctacatcaatgccatcagcagaggagacctgccctgcatggagaatgctgtgctggccctggcccagattgaaaattctgctgctgtgcagaaggccatcgcccactatgaccagcagatgggccagaaggtgcagctgcctgctgagaccctgcaggagctgctggacctgcaccgggtgtctgagcgggaggccacagaggtgtacatgaagaacagcttcaaggatgtggaccacctgttccagaagaagctggccgcccagctggacaagaagagagatgacttctgcaagcagaaccaggaggccagcagtgaccgctgcagcgccctgctgcaggtgatcttcagccccctggaggaggaggtgaaggccggcatctacagcaagccaggcggctactgcctcttcatccagaagctgcaggacctggagaagaagtactatgaggagcccaggaagggcatccaggccgaggagatcctgcagacctacctgaagagcaaggagagcgtgacagatgccatcctgcagacagaccagatcctgacagagaaggagaaggagattgaggtggagtgtgtgaaggccgagagcgcccaggccagcgccaagatggtggaggagatgcagatcaagtaccagcagatgatggaggagaaggagaagagctaccaggagcacgtgaagcagctgacagagaagatggagcgggagcgggcccagctgctggaggagcaggagaagaccctgaccagcaagctgcaggagcaggcccgggtgctgaaggagcgctgccagggcgagagcacccagctgcagaatgagatccagaagctgcagaagaccctgaagaagaagaccaagcgctacatgagccacaagctgaagatctag

SEQ ID NO: 154765 - DNA, 1692 bp, synthetic construct
  misc_feature 1..1692: note = Description of Artificial Sequence: Synthetic coding sequence
  source 1..1692: mol_type = other DNA
atggcccctgagatccacatgacaggccccatgtgcctgattgagaacaccaacggggagctggtggccaaccctgaggccctgaagatcctgagcgccatcacccagcctgtggtggtggtggccatcgtgggcctgtacagaacaggcaagagctacctgatgaacaagctggccggcaagaacaagggcttcagcctgggcagcacagtgaagagccacaccaagggcatctggatgtggtgtgtgccccaccccaagaagccagagcacaccctggtgctgctggacacagagggcctgggagatgtgaagaagggggacaaccagaatgacagctggatcttcaccctggccgtgctgctgagcagcaccctggtgtacaacagcatgggcaccatcaaccagcaggccatggaccagctgtactacgtgacagagctgacccaccgcatccgcagcaagagcagcccagatgaaaatgaaaatgaagacagcgctgactttgtgtccttcttcccagactttgtgtggaccctgcgggacttcagcctggacctggaggctgatggccagcccctgaccccagatgagtacctggagtacagcctgaagctgacccagggcaacaggaagctggcccagctggagaagctgcaggatgaggagctggaccctgagtttgtgcagcaggtggccgacttctgcagctacatcttcagcaacagcaagaccaagaccctgagcggcggcatcaaggtgaatggcccccggctggagagcctggtgctgacctacatcaatgccatcagcagaggagacctgccctgcatggagaatgctgtgctggccctggcccagattgaaaattctgctgctgtgcagaaggccatcgcccactatgaccagcagatgggccagaaggtgcagctgcctgctgagaccctgcaggagctgctggacctgcaccgggtgtctgagcgggaggccacagaggtgtacatgaagaacagcttcaaggatgtggaccacctgttccagaagaagctggccgcccagctggacaagaagagagatgacttctgcaagcagaaccaggaggccagcagtgaccgctgcagcgccctgctgcaggtgatcttcagccccctggaggaggaggtgaaggccggcatctacagcaagccaggcggctactgcctcttcatccagaagctgcaggacctggagaagaagtactatgaggagcccaggaagggcatccaggccgaggagatcctgcagacctacctgaagagcaaggagagcgtgacagatgccatcctgcagacagaccagatcctgacagagaaggagaaggagattgaggtggagtgtgtgaaggccgagagcgcccaggccagcgccaagatggtggaggagatgcagatcaagtaccagcagatgatggaggagaaggagaagagctaccaggagcacgtgaagcagctgacagagaagatggagcgggagcgggcccagctgctggaggagcaggagaagaccctgaccagcaagctgcaggagcaggcccgggtgctgaaggagcgctgccagggcgagagcacccagctgcagaatgagatccagaagctgcagaagaccctgaagaagaagaccaagcgctacatgagccacaagctgaagatctag

SEQ ID NO: 154766 - DNA, 414 bp, synthetic construct
  misc_feature 1..414: note = Description of Artificial Sequence: Synthetic coding sequence
  source 1..414: mol_type = other DNA
caggatgaggagctggaccctgagtttgtgcagcaggtggccgacttctgcagctacatcttcagcaacagcaagaccaagaccctgagcggcggcatcaaggccgaggagatcctgcagacctacctgaagagcaaggagagcgtgacagatgccatcctgcagacagaccagatcctgacagagaaggagaaggagattgaggtggagtgtgtgaaggccgagagcgcccaggccagcgccaagatggtggaggagatgcagatcaagtaccagcagatgatggaggagaaggagaagagctaccaggagcacgtgaagcagctgacagagaagatggagcgggagcgggcccagctgctggaggagcaggagaagaccctgaccagcaagctgcaggtgtccaagtgctag

SEQ ID NO: 154767 - DNA, 1923 bp, synthetic construct
  misc_feature 1..1923: note = Description of Artificial Sequence: Synthetic coding sequence
  source 1..1923: mol_type = other DNA
atgggagagaggaccctgcacgccgctgtgcccaccccaggctacccagagagcgagagcatcatgatggcccccatctgcctggtggagaaccaggaggagcagctgactgtgaacagcaaggccctggagatcctggacaagatcagccagcctgtggtggtggtggccatcgtgggcctgtacagaacaggcaagagctacctgatgaaccggctggccggcaagagaaatggcttccccctgggcagcacagtgcagagcgagaccaagggcatctggatgtggtgtgtgccccacctgagcaagcccaaccacaccctggtgctgctggacacagagggcctgggagatgtggagaagagcaaccccaagaatgacagctggatctttgccctggccgtgctgctgagcagcagctttgtgtacaacagcgtgtccaccatcaaccaccaggccctggagcagctgcactacgtgacagagctggccgagctgatccgggccaagagctgccccaggccagatgaagctgaggacagcagcgagtttgccagcttcttcccagacttcatctggacagtgcgggacttcaccctggagctgaagctggatggcaaccccatcacagaagatgagtacctggagaatgccctgaagctgatccctgggaagaaccccaagatccagaacagcaacatgccccgggagtgcatccgccacttcttcaggaagaggaaatgttttgtgtttgaccggcccaccaatgacaagcagtacctgaaccacatggatgaggtgcctgaggagaacctggagcggcacttcctgatgcagagcgacaacttctgcagctacatcttcacccacgccaagaccaagaccctgcgggagggcatcatcgtgacaggcaagaggctgggcaccctggtggtgacctacgtggatgccatcaacagcggggctgtgccctgcctggagaatgctgtgacagccctggcccagctggagaacccagctgctgtgcagagagctgctgaccactacagccagcagatggcccagcagctgcggctgcccacagacaccctgcaggagctgctggatgtgcacgccgcctgtgagcgggaggccatcgctgtgttcatggagcacagcttcaaggatgagaaccacgagttccagaagaagctggtggacaccatcgagaagaagaagggggactttgtgctgcagaatgaggaggccagcgccaagtactgccaggccgagctgaagaggctgtctgagcacctgacagagagcatcctgcggggcatcttctctgtgcctgggggccacaacctgtacctggaggagaagaagcaggtggagtgggactacaagctggtgcccaggaaaggagtgaaggccaatgaggtgctgcagaacttcctgcagagccaggtggtggtggaggagagcatcctgcagagcgacaaggccctgacagctggggagaaggccatcgctgctgagcgggccatgaaggaggccgctgagaaggagcaggagctgctgcgggagaagcagaaggagcagcagcagatgatggaggcccaggagaggagcttccaggagtacatggcccagatggagaagaagctggaggaggagcgggagaacctgctgcgggagcacgagcggctgctgaagcacaagctgaaggtgcaggaggagatgctgaaggaggagttccagaagaagtctgagcagctgaacaaggagatcaaccagctgaaggagaagattgagagcaccaagaatgagcagctgcggctgctgaagatcctggacatggccagcaacatcatgattgtgaccctgcccggggccagcaagctgctgggcgtgggcaccaagtacctgggcagccgcatctag

SEQ ID NO: 154768 - DNA, 1761 bp, synthetic construct
  misc_feature 1..1761: note = Description of Artificial Sequence: Synthetic coding sequence
  source 1..1761: mol_type = other DNA
atggccctggagatccacatgtctgaccccatgtgcctgattgagaacttcaatgagcagctgaaggtgaaccaggaggccctggagatcctgagcgccatcacccagcctgtggtggtggtggccatcgtgggcctgtacagaacaggcaagagctacctgatgaacaagctggccggcaagaacaagggcttctctgtggccagcacagtgcagagccacaccaagggcatctggatctggtgtgtgccccaccccaactggcccaaccacaccctggtgctgctggacacagagggcctgggagatgtggagaaggctgacaacaagaatgacatccagatctttgccctggccctgctgctgagcagcacctttgtgtacaacacagtgaacaagattgaccagggcgccatcgacctgctgcacaacgtgacagagctgacagacctgctgaaggccaggaacagcccagacctggacagagtggaggaccctgctgacagcgccagcttcttcccagacctggtgtggaccctgcgggacttctgcctgggcctggagattgatggccagctggtgaccccagatgagtacctggagaacagcctgcggcccaagcagggcagtgaccagagggtgcagaacttcaacctgccccggctgtgcatccagaagttcttccccaagaagaagtgcttcatctttgacctgcctgcccaccagaagaagctggcccagctggagaccctgcctgatgatgagctggagcctgagtttgtgcagcaggtgacagagttctgcagctacatcttcagccacagcatgaccaagaccctgcccggcggcatcatggtgaatggcagccggctgaagaacctggtgctgacctacgtgaatgccatcagcagcggggacctgccctgcattgaaaatgctgtgctggccctggcccagagagaaaattctgctgctgtgcagaaggccatcgcccactatgaccagcagatgggccagaaggtgcagctgcccatggagaccctgcaggagctgctggacctgcacaggaccagcgagcgggaggccatcgaggtgttcatgaagaacagcttcaaggatgtggaccagagcttccagaaggagctggagaccctgctggatgccaagcagaatgacatctgcaagaggaacctggaggccagcagtgactactgcagcgccctgctgaaggacatcttcggccccctggaggaggccgtgaagcagggcatctacagcaagccaggcggccacaacctcttcatccagaagacagaggagctgaaggccaagtactaccgggagcccaggaagggcatccaggccgaggaggtgctgcagaagtacctgaagagcaaggagagcgtgtcccatgccatcctgcagacagaccaggccctgacagaaacagagaagaagaagaaggaggcccaggtgaaggccgaggccgagaaggccgaggcccagaggctggccgccatccagaggcagaatgagcagatgatgcaggagcgggagcggctgcaccaggagcaggtgcggcagatggagatcgccaagcagaactggctggccgagcagcagaagatgcaggagcagcagatgcaggagcaggccgcccagctgagcaccaccttccaggcccagaacagaagcctgctgtctgagctgcagcacgcccagaggacagtgaacaatgatgacccctgtgtgctgctgtag

SEQ ID NO: 154769 - DNA, 1761 bp, synthetic construct; identical to SEQ ID NO: 154768
  misc_feature 1..1761: note = Description of Artificial Sequence: Synthetic coding sequence
  source 1..1761: mol_type = other DNA

SEQ ID NO: 154770 - DNA, 1452 bp, synthetic construct
  misc_feature 1..1452: note = Description of Artificial Sequence: Synthetic coding sequence
  source 1..1452: mol_type = other DNA
atggccctggagatccacatgtctgaccccatgtgcctgattgagaacttcaatgagcagctgaaggtgaaccaggaggccctggagatcctgagcgccatcacccagcctgtggtggtggtggccatcgtgggcctgtacagaacaggcaagagctacctgatgaacaagctggccggcaagaacaagggcttctctgtggccagcacagtgcagagccacaccaagggcatctggatctggtgtgtgccccaccccaactggcccaaccacaccctggtgctgctggacacagagggcctgggagatgtggagaaggctgacaacaagaatgacatccagatctttgccctggccctgctgctgagcagcacctttgtgtacaacacagtgaacaagattgaccagggcgccatcgacctgctgcacaacgtgacagagctgacagacctgctgaaggccaggaacagcccagacctggacagagtggaggaccctgctgacagcgccagcttcttcccagacctggtgtggaccctgcgggacttctgcctgggcctggagattgatggccagctggtgaccccagatgagtacctggagaacagcctgcggcccaagcagggcagtgaccagagggtgcagaacttcaacctgccccggctgtgcatccagaagttcttccccaagaagaagtgcttcatctttgacctgcctgcccaccagaagaagctggcccagctggagaccctgcctgatgatgagctggagcctgagtttgtgcagcaggtgacagagttctgcagctacatcttcagccacagcatgaccaagaccctgcccggcggcatcatggtgaatggcagccggctgaagaacctggtgctgacctacgtgaatgccatcagcagcggggacctgccctgcattgaaaatgctgtgctggccctggcccagagagaaaattctgctgctgtgcagaaggccatcgcccactatgaccagcagatgggccagaaggtgcagctgcccatggagaccctgcaggagctgctggacctgcacaggaccagcgagcgggaggccatcgaggtgttcatgaagaacagcttcaaggatgtggaccagagcttccagaaggagctggagaccctgctggatgccaagcagaatgacatctgcaagaggaacctggaggccagcagtgactactgcagcgccctgctgaaggacatcttcggccccctggaggaggccgtgaagcagggcatctacagcaagccaggcggccacaacctcttcatccagaagacagaggagctgaaggccaagtactaccgggagcccaggaagggcatccaggccgaggaggtgctgcagaagtacctgaagagcaaggagagcgtgtcccatgccatcctgcagacagaccaggccctgacagagacctag

SEQ ID NO: 154771 - DNA, 1917 bp, synthetic construct
  misc_feature 1..1917: note = Description of Artificial Sequence: Synthetic coding sequence
  source 1..1917: mol_type = other DNA
atggccagcgagatccacatgcctggccctgtgtgcctgacagagaacaccaagggccacctggtggtgaacagcgaggccctggagatcctgagcgccatcacccagcctgtggtggtggtggccatcgtgggcctgtacagaacaggcaagagctacctgatgaacaagctggccggcaagaacaagggcttccccctgggctgcaccgtgaagtctgagaccaagggcatctggatgtggtgtgtgccccaccccagcaagcccaaccacaccctcatcctgctggacacagagggcctgggggacatggagaagagtgaccccaagagtgacagctggatctttgccctggccgtgctgctgagcagcagctttgtgtacaacagcatgggcaccatcaaccaccaggccctggagcagctgcactacgtgacagagctgacagagctgatccgggccaagagctgccccaggccagatgaggtggaggacagcagcgagtttgtgtccttcttcccagacttcatctggacagtgcgggacttcaccctggagctgaagctggatggccaccccatcacagaagatgagtacctggagaatgccctgaagctgatcagcggcaagaacccccagatccagaacagcaacaagccccgggagtggatccgccacttcttccccaagcagaagtgctttgtgtttgaccggcccatcaatgacaagaagctgctgctgcacgtggaggaggtgcgggaggaccagctggacagcaacttccagatgcagagcgagaacttctgcagctacatcttcacccacgccaagaccaagaccctgcgggagggcatcctggtgacaggcaaccggctgggcatgctggtggagacctacctggatgccatcaacagcggggccaccccctgcctggagaatgccatggctgtgctggcccagtgtgagaacagcgctgctgtgcagagagctgccaaccactacagccagcagatggcccagcaggtgcgcttccccacagacaccctgcaggagctgctggatgtgcatgctgtgtgtgagcgggaggccatcgctgtgttcatggagtacagcttcaaggacaagagccaggagttccagaagaagctggtggacaccatggagaagaagaaggaggactttgtgctgcagaatgaggaggccagcgccaagtactgccaggccgagctgaagaggctgtctgagctgctgacagagagcatcagccggggcaccttctttgtgcctgggggccacaacatctacctggaggccaagaagaagattgagcaggactacaccctggtgcccaggaagggcgtgaaggcagatgaggtgctgcagagcttcctgcagagccaggtggtgattgaggagagcatcctgcagagcgacaaggccctgacagctggggagaaggccatcgccgccaagcaggccaagaaggaggccgctgagaaggagcaggagctgctgcggcagaagcagaaggagcagcagcagatgatggaggcccaggagaggagcttccaggagaacatcgcccagctgaagaagaagatggagcgggagcgggagaactacatgagggagctgaggaagatgctgagccacaagatgaaggtgctggaggagctgctgacagagggcttcaaggagatctttgagagcctgaatgaggagatcaaccggctgaaggagcagatcgaggccgcagaaaatgaggagcccagcgtcttcagccagatcctggatgtggccggcagcatcttcatcgccgccctgcctggagctgccaagctggtggacctgggcatgaagatcctgagcagcctgtgcaaccggctgaggaaccctgggaagaagatcatctcctag

SEQ ID NO: 154772 - DNA, 1902 bp, synthetic construct
  misc_feature 1..1902: note = Description of Artificial Sequence: Synthetic coding sequence
  source 1..1902: mol_type = other DNA
atggagagcggccccaagatgctggcccctgtgtgcctggtggagaacaacaatgagcagctgctggtgaaccagcaggccatccagatcctggagaagatcagccagcctgtggtggtggtggccatcgtgggcctgtacagaacaggcaagagctacctgatgaaccacctggccggccagaaccacggcttccccctgggcagcacagtgcagagcgagaccaagggcatctggatgtggtgtgtgccccaccccagcaagcccaaccacaccctggtgctgctggacacagagggcctgggagatgtggagaagggggaccccaagaatgacagctggatctttgccctggccgtgctgctgtgcagcacctttgtgtacaacagcatgagcaccatcaaccaccaggccctggagcagctgcactacgtgacagagctgacagagctgatcaaggccaagagcagccccaggccagatggagtggaggacagcacagaatttgtgtccttcttcccagacttcctgtggacagtgcgggacttcaccctggagctgaagctgaatggccaccccatcacagaagatgagtacctggagaatgccctgaagctgatccagggcaacaacccccgggtgcagaccagcaacttcccccgggagtgcatccgccgcttcttccccaagaggaagtgctttgtgtttgaccggcccaccaatgacaaggacctgctggccaacatcgagaaggtgtctgagaagcagctggaccccaagttccaggagcagaccaacatcttctgcagctacatcttcacccacgcccggaccaagaccctgcgggagggcatcaccgtgacaggcaaccggctgggcaccctggccgtgacctacgtggaggccatcaacagcggggctgtgccctgcctggagaatgctgtgatcaccctggcccagcgggagaacagcgctgctgtgcagagagctgctgactactacagccagcagatggcccagagggtgaagctgcccacagacaccctgcaggagctgctggacatgcatgctgcctgtgagcgggaggccatcgccatcttcatggagcacagcttcaaggatgagaaccaggagttccagaagaagttcatggagaccaccatgaacaagaagggggacttcctgctgcagaatgaggagagctctgtgcagtactgccaggccaagctgaatgagctgagcaagggcctgatggagagcatctctgctggcagcttctctgtgcctgggggccacaagctgtacatggagaccaaggagcgcatcgagcaggactactggcaggtgcccaggaagggcgtgaaggccaaggaggtgttccagcgcttcctggagagccagatggtgattgaggagagcatcctgcagagcgacaaggccctgacagaccgggagaaggctgtggccgtggaccgggccaagaaggaggccgctgagaaggagcaggagctgctgaagcagaagctgcaggagcagcagcagcagatggaggcccaggacaagagcaggaaagaaaatattgcccagctgaaggagaagctgcagatggagcgggagcacctgctgcgggagcagatcatgatgctggagcacacccagaaggtgcagaatgactggctgcacgagggcttcaagaagaagtatgaggagatgaatgctgagatcagccagttcaagaggatgattgacaccaccaagaatgatgacaccccctggatcgcccggaccctggacaacctggctgatgagctgacagccatcctgagcgccccagccaagctgattggacatggagtgaagggcgtgagcagcctcttcaagaagcacaagctgcccttctag

SEQ ID NO: 154773 - DNA, 1512 bp, synthetic construct
  misc_feature 1..1512: note = Description of Artificial Sequence: Synthetic coding sequence
  source 1..1512: mol_type = other DNA
atgagcaccatcaaccaccaggccctggagcagctgcactacgtgacagagctgacagagctgatcaaggccaagagcagccccaggccagatggagtggaggacagcacagaatttgtgtccttcttcccagacttcctgtggacagtgcgggacttcaccctggagctgaagctgaatggccaccccatcacagaagatgagtacctggagaatgccctgaagctgatccagggcaacaacccccgggtgcagaccagcaacttcccccgggagtgcatccgccgcttcttccccaagaggaagtgctttgtgtttgaccggcccaccaatgacaaggacctgctggccaacatcgagaaggtgtctgagaagcagctggaccccaagttccaggagcagaccaacatcttctgcagctacatcttcacccacgcccggaccaagaccctgcgggagggcatcaccgtgacaggcaaccggctgggcaccctggccgtgacctacgtggaggccatcaacagcggggctgtgccctgcctggagaatgctgtgatcaccctggcccagcgggagaacagcgctgctgtgcagagagctgctgactactacagccagcagatggcccagagggtgaagctgcccacagacaccctgcaggagctgctggacatgcatgctgcctgtgagcgggaggccatcgccatcttcatggagcacagcttcaaggatgagaaccaggagttccagaagaagttcatggagaccaccatgaacaagaagggggacttcctgctgcagaatgaggagagctctgtgcagtactgccaggccaagctgaatgagctgagcaagggcctgatggagagcatctctgctggcagcttctctgtgcctgggggccacaagctgtacatggagaccaaggagcgcatcgagcaggactactggcaggtgcccaggaagggcgtgaaggccaaggaggtgttccagcgcttcctggagagccagatggtgattgaggagagcatcctgcagagcgacaaggccctgacagaccgggagaaggctgtggccgtggaccgggccaagaaggaggccgctgagaaggagcaggagctgctgaagcagaagctgcaggagcagcagcagcagatggaggcccaggacaagagcaggaaagaaaatattgcccagctgaaggagaagctgcagatggagcgggagcacctgctgcgggagcagatcatgatgctggagcacacccagaaggtgcagaatgactggctgcacgagggcttcaagaagaagtatgaggagatgaatgctgagatcagccagttcaagaggatgattgacaccaccaagaatgatgacaccccctggatcgcccggaccctggacaacctggctgatgagctgacagccatcctgagcgccccagccaagctgattggacatggagtgaagggcgtgagcagcctcttcaagaagcacaagctgcccttctag

SEQ ID NO: 154774 - DNA, 1815 bp, synthetic construct
  misc_feature 1..1815: note = Description of Artificial Sequence: Synthetic coding sequence
  source 1..1815: mol_type = other DNA
atggagagcggccccaagatgctggcccctgtgtgcctggtggagaacaacaatgagcagctgctggtgaaccagcaggccatccagatcctggagaagatcagccagcctgtggtggtggtggccatcgtgggcctgtacagaacaggcaagagctacctgatgaaccacctggccggccagaaccacggcttccccctggacacagagggcctgggagatgtggagaagggggaccccaagaatgacagctggatctttgccctggccgtgctgctgtgcagcacctttgtgtacaacagcatgagcaccatcaaccaccaggccctggagcagctgcactacgtgacagagctgacagagctgatcaaggccaagagcagccccaggccagatggagtggaggacagcacagaatttgtgtccttcttcccagacttcctgtggacagtgcgggacttcaccctggagctgaagctgaatggccaccccatcacagaagatgagtacctggagaatgccctgaagctgatccagggcaacaacccccgggtgcagaccagcaacttcccccgggagtgcatccgccgcttcttccccaagaggaaatgttttgtgtttgaccggcccaccaatgacaaggacctgctggccaacatcgagaaggtgtctgagaagcagctggaccccaagttccaggagcagaccaacatcttctgcagctacatcttcacccacgcccggaccaagaccctgcgggagggcatcaccgtgactggaaaccggctgggcaccctggccgtgacctacgtggaggccatcaacagcggggctgtgccctgcctggagaatgctgtgatcaccctggcccagagagaaaattctgctgctgtgcagagagctgctgactactacagccagcagatggcccagagggtgaagctgcccacagacaccctgcaggagctgctggacatgcacgccgcctgtgagcgggaggccatcgccatcttcatggagcacagcttcaaggatgagaaccaggagttccagaagaagttcatggagaccaccatgaacaagaagggggacttcctgctgcagaatgaggagagctctgtgcagtactgccaggccaagctgaatgagctgagcaagggcctgatggagagcatctctgctggcagcttctctgtgcctgggggccacaagctgtacatggagaccaaggagagaattgagcaggactactggcaggtgcccaggaaaggagtgaaggccaaggaggtgttccagcgcttcctggagagccagatggtgattgaggagagcatcctgcagagcgacaaggccctgacagaccgggagaaggctgtggccgtggaccgggccaagaaggaggccgctgagaaggagcaggagctgctgaagcagaagctgcaggagcagcagcagcagatggaggcccaggacaagagcaggaaggagaacatcgcccagctgaaggagaagctgcagatggagcgggagcacctgctgcgggagcagatcatgatgctggagcacacccagaaggtgcagaatgactggctgcacgagggcttcaagaagaagtatgaggagatgaatgctgagatcagccagttcaagaggatgattgacaccaccaagaatgatgacaccccctggatcgcccggaccctggacaacctggctgatgagctgacagccatcctgagcgccccagccaagctgattggccacggcgtgaagggcgtgagcagcctcttcaagaagcacaagctgcccttctag

SEQ ID NO: 154775 - DNA, 1299 bp, synthetic construct
  misc_feature 1..1299: note = Description of Artificial Sequence: Synthetic coding sequence
  source 1..1299: mol_type = other DNA
atgaagagcaccaagcccagcctgagccccagcaagccccagagcagcctggtgatccccaccagcctcttctgcaagaccttccccttccacttcatgtttgacaaggacatgaccatcctgcagtttggaaatggcatccggcggctgatgaacagaagagacttccagggcaagcccaactttgaggagtactttgagatcctgacccccaagatcaaccagaccttcagcggcatcatgaccatgctgaacatgcagtttgtggtgcgggtgcggcgctgggacaacagcgtgaagaagagcagccgggtgatggacctgaagggccagatgatctacatcgtggagagcagcgccatcctcttcctgggcagcccctgtgtggaccggctggaggacttcaccggccggggcctgtacctgagtgacatccccatccacaatgccctgagagatgtggtgctgattggagagcaggcccgggcccaggacggcctgaagaagaggctgggcaagctgaaggccaccctggagcaggcccaccaggccctggaggaggagaagaagaagacagtggacctgctgtgcagcatcttcccctgtgaggtggcccagcagctgtggcagggccaggtggtgcaggccaagaagttcagcaatgtgaccatgctgttcagtgacatcgtgggcttcaccgccatctgcagccagtgcagccccctgcaggtgatcaccatgctgaatgccctgtacaccaggtttgaccagcagtgtggggagctggatgtgtacaaggtggagaccatcggagatgcctactgtgtggccggcggcctgcacaaggagagtgacacccatgctgtgcagatcgccctgatggccctgaagatgatggagctgagtgatgaggtgatgagcccccatggagagcccatcaagatgagaattggcctgcacagcggctctgtgtttgctggggtggtgggcgtgaagatgccccgctactgcctgtttggaaacaacgtgaccctggccaacaagtttgagagctgcagcgtgcccaggaagatcaacgtgagccccaccacctaccgcctgctgaaggactgccccggctttgtgttcacccccaggagccgggaggagctgccccccaacttccccagcgagatccctggcatctgccacttcctggatgcctaccagcagggcaccaacagcaagccctgcttccagaagaaggatgtggaggatggaaatgccaacttcctgggcaaggccagcggcattgattag

SEQ ID NO: 154776 - DNA, 1875 bp, synthetic construct
  misc_feature 1..1875: note = Description of Artificial Sequence: Synthetic coding sequence
  source 1..1875: mol_type = other DNA
atgttctgcaccaagctgaaggacctgaagatcaccggggagtgccccttcagcctgctggcccctggccaggtgcccaatgaaagcagcgaggaggccgccggcagcagcgagagctgcaaggccaccgtgcccatctgccaggacatccctgagaagaacatccaggagagcctgccccagaggaagaccagccgcagccgggtgtacctgcacaccctggccgagagcatctgcaagctgatcttccctgagtttgagcggctgaatgtggccctgcagaggaccctggccaagcacaagatcaaggagagcaggaagagcctggagcgggaggactttgagaagaccatcgccgagcaggccgtggccgccggcgtgcctgtggaggtgatcaaggagagcctgggggaggaggtgttcaagatctgctatgaagaagatgagaacatcctgggcgtggtgggcggcaccctgaaggacttcctgaacagcttcagcaccctgctgaagcagagcagccactgccaggaggccggcaagaggggccgcctggaggatgccagcatcctgtgcctggacaaggaggatgacttcctgcacgtgtactacttcttccccaagaggaccaccagcctcatcctgcccggcatcatcaaggccgccgcccacgtgctgtatgaaacagaggtggaggtgtccctgatgccaccctgcttccacaatgactgcagcgagtttgtgaaccagccctacctgctgtacagcgtgcacatgaagagcaccaagcccagcctgagccccagcaagccccagagcagcctggtgatccccaccagcctcttctgcaagaccttccccttccacttcatgtttgacaaggacatgaccatcctgcagtttggaaatggcatccggcggctgatgaacagaagagacttccagggcaagcccaactttgaggagtactttgagatcctgacccccaagatcaaccagaccttcagcggcatcatgaccatgctgaacatgcagtttgtggtgcgggtgcggcgctgggacaacagcgtgaagaagagcagccgggtgatggacctgaagggccagatgatctacatcgtggagagcagcgccatcctcttcctgggcagcccctgtgtggaccggctggaggacttcaccggccggggcctgtacctgagtgacatccccatccacaatgccctgagagatgtggtgctgattggagagcaggcccgggcccaggacggcctgaagaagaggctgggcaagctgaaggccaccctggagcaggcccaccaggccctggaggaggagaagaagaagacagtggacctgctgtgcagcatcttcccctgtgaggtggcccagcagctgtggcagggccaggtggtgcaggccaagaagttcagcaatgtgaccatgctgttcagtgacatcgtgggcttcaccgccatctgcagccagtgcagccccctgcaggtgatcaccatgctgaatgccctgtacaccaggtttgaccagcagtgtggggagctggatgtgtacaaggtggagaccatcggagatgcctactgtgtggccggcggcctgcacaaggagagtgacacccatgctgtgcagatcgccctgatggccctgaagatgatggagctgagtgatgaggtgatgagcccccatggagagcccatcaagatgagaattggcctgcacagcggctctgtgtttgctggggtggtgggcgtgaagatgccccgctactgcctgtttggaaacaacgtgaccctggccaacaagtttgagagctgcagcgtgcccaggaagatcaacgtgagccccaccacctacagatag

SEQ ID NO: 154777 - DNA, 2292 bp, synthetic construct
  misc_feature 1..2292: note = Description of Artificial Sequence: Synthetic coding sequence
  source 1..2292: mol_type = other DNA
atgagcaggaggaagatcagcagcgagagcttcagcagcctgggcagtgactacctggagaccagccctgaggaggagggggagtgccccctgagccggctgtgctggaatggcagccgcagccccccaggccccctggagcccagccctgctgctgctgctgctgctgctgccccagcccccaccccagctgccagcgctgctgctgctgctgccacagctggggccaggagagtgcagaggagaagaagagtgaacctggacagcctgggggagagcatcagccggctgacagcccccagcccccagaccatccagcagaccctgaagaggaccctgcagtactatgagcaccaggtgattggctacagagatgctgagaagaacttccacaacatcagcaaccgctgcagctatgctgaccacagcaacaaggaggagattgaagatgtgtctggcatcctgcagtgcacagccaacatcctgggcctgaagtttgaggagatccagaagagatttggagaggagttcttcaacatctgcttccatgaaaatgaaagagtgctgcgggctgtgggcggcaccctgcaggacttcttcaatggatttgatgccctgctggagcacatccgcaccagctttgggaagcaggccaccctggagagccccagcttcctgtgcaaggagctgcctgagggcaccctgatgctgcactacttccacccccaccacatcgtgggctttgccatgctgggcatgatcaaggctgctgggaagaagatctaccgcctggatgtggaggtggagcaggtggccaatgagaagctgtgcagtgatgtgagcaaccctggcaactgcagctgcctgaccttcctgatcaaggaatgtgagaacaccaacatcatgaagaacctgccccagggcaccagccaggtgcctgctgacctgcgcatcagcatcaacaccttctgccgggccttccccttccacctgatgtttgaccccagcatgtctgtgctgcagctgggggagggcctgaggaagcagctgcgctgtgacacccacaaggtgctgaagtttgaggactgctttgagatcgtgagccccaaggtgaatgccacctttgagcgggtgctgctgcggctgagcacccccttcgtcatccgcaccaagccagaggccagcggcagcgagaacaaggacaaggtgatggaggtgaagggccagatgatccacgtgcctgagagcaacagcatcctcttcctgggcagcccctgtgtggacaagctggatgagctgatgggccggggcctgcacctgagtgacatccccatccatgatgccaccagagatgtgatcctggtgggggagcaggccaaggcccaggacggcctgaagaagaggatggacaagctgaaggccaccctggagaggacccaccaggccctggaggaggagaagaagaagacagtggacctgctgtacagcatcttccctggagatgtggcccagcagctgtggcagggccagcaggtgcaggccaggaagtttgatgatgtgaccatgctgttcagtgacatcgtgggcttcaccgccatctgtgcccagtgcacccccatgcaggtgatctccatgctgaatgagctgtacaccaggtttgaccaccagtgtggcttcctggacatctacaaggtggagaccatcggagatgcctactgtgtggccgccggcctgcacaggaagagcctgtgccacgccaagcccatcgccctgatggccctgaagatgatggagctgtctgaggaggtgctgaccccagatggccggcccatccagccccagaggtctgagctgctcttctccttccctgtgtccatccagctggtgcctgaccagcaccagagcgagacagacctgggcacagagaagatgagaattggcatccacagcggctctgtgctggccggcgtggtgggcgtgaggatgccccgctactgcctgtttggaaataatgtgaccctggccagcaagtttgagagcggcagccacccccggcgcatcaacgtgagccccaccacctaccagctgctgaagcgggaggagagcttcaccttcatccccaggagccgggaggagctgcctgacaacttccccaaggagatccctggcatctgctacttcctggaggtgaggacaggccccaagccacccaagcccagcctgagcagcagccgcatcaagaaggtgtcctacaacatcggcaccatgttcctgcgggagaccagcctgtag

SEQ ID NO: 154778 - DNA, 2199 bp, synthetic construct
  misc_feature 1..2199: note = Description of Artificial Sequence: Synthetic coding sequence
  source 1..2199: mol_type = other DNA
atgagcaggaggaagatcagcagcgagagcttcagcagcctgggcagtgactacctggagaccagccctgaggaggagggggagtgccccctgagccggctgtgctggaatggcagccgcagccccccaggccccctggagcccagccctgctgctgctgctgctgctgctgccccagcccccaccccagctgccagcgctgctgctgctgctgccacagctggggccaggagagtgcagaggagaagaagagtgaacctggacagcctgggggagagcatcagccggctgacagcccccagcccccagaccatccagcagaccctgaagaggaccctgcagtactatgagcaccaggtgattggctacagagatgctgagaagaacttccacaacatcagcaaccgctgcagctatgctgaccacagcaacaaggaggagattgaagatgtgtctggcatcctgcagtgcacagccaacatcctgggcctgaagtttgaggagatccagaagagatttggagaggagttcttcaacatctgcttccatgaaaatgaaagagtgctgcgggctgtgggcggcaccctgcaggacttcttcaatggatttgatgccctgctggagcacatccgcaccagctttgggaagcaggccaccctggagagccccagcttcctgtgcaaggagctgcctgagggcaccctgatgctgcactacttccacccccaccacatcgtgggctttgccatgctgggcatgatcaaggctgctgggaagaagatctaccgcctggatgtggaggtggagcaggtggccaatgagaagctgtgcagtgatgtgagcaaccctggcaactgcagctgcctgaccttcctgatcaaggaatgtgagaacaccaacatcatgaagaacctgccccagggcaccagccaggtgcctgctgacctgcgcatcagcatcaacaccttctgccgggccttccccttccacctgatgtttgaccccagcatgtctgtgctgcagctgggggagggcctgaggaagcagctgcgctgtgacacccacaaggtgctgaagtttgaggactgctttgagatcgtgagccccaaggtgaatgccacctttgagcgggtgctgctgcggctgagcacccccttcgtcatccgcaccaagccagaggccagcggcagcgagaacaaggacaaggtgatggaggtgaagggccagatgatccacgtgcctgagagcaacagcatcctcttcctgggcagcccctgtgtggacaagctggatgagctgatgggccggggcctgcacctgagtgacatccccatccatgatgccaccagagatgtgatcctggtgggggagcaggccaaggcccaggacggcctgaagaagaggatggacaagctgaaggccaccctggagaggacccaccaggccctggaggaggagaagaagaagacagtggacctgctgtacagcatcttccctggagatgtggcccagcagctgtggcagggccagcaggtgcaggccaggaagtttgatgatgtgaccatgctgttcagtgacatcgtgggcttcaccgccatctgtgcccagtgcacccccatgcaggtgatctccatgctgaatgagctgtacaccaggtttgaccaccagtgtggcttcctggacatctacaaggtggagaccatcggagatgcctactgtgtggccgccggcctgcacaggaagagcctgtgccacgccaagcccatcgccctgatggccctgaagatgatggagctgtctgaggaggtgctgaccccagatggccggcccatccagatgagaattggcatccacagcggctctgtgctggccggcgtggtgggcgtgaggatgccccgctactgcctgtttggaaacaacgtgaccctggccagcaagtttgaaagtggcagccacccccggcgcatcaacgtgagccccaccacctaccagctgctgaagcgggaggagagcttcaccttcatccccaggagccgggaggagctgcctgacaacttccccaaggagatccctggcatctgctacttcctggaggtgaggacaggccccaagccacccaagcccagcctgagcagcagccgcatcaagaaggtgtcctacaacatcggcaccatgttcctgcgggagaccagcctgtag

SEQ ID NO: 154779 - DNA, 2073 bp, synthetic construct
  misc_feature 1..2073: note = Description of Artificial Sequence: Synthetic coding sequence
  source 1..2073: mol_type = other DNA
atgttctgcaccaagctgaaggacctgaagatcaccggggagtgccccttcagcctgctggcccctggccaggtgcccaatgaaagcagcgaggaggccgccggcagcagcgagagctgcaaggccaccgtgcccatctgccaggacatccctgagaagaacatccaggagagcctgccccagaggaagaccagccgcagccgggtgtacctgcacaccctggccgagagcatctgcaagctgatcttccctgagtttgagcggctgaatgtggccctgcagaggaccctggccaagcacaagatcaaggagagcaggaagagcctggagcgggaggactttgagaagaccatcgccgagcaggccgtggccgccggcgtgcctgtggaggtgatcaaggagagcctgggggaggaggtgttcaagatctgctatgaagaagatgagaacatcctgggcgtggtgggcggcaccctgaaggacttcctgaacagcttcagcaccctgctgaagcagagcagccactgccaggaggccggcaagaggggccgcctggaggatgccagcatcctgtgcctggacaaggaggatgacttcctgcacgtgtactacttcttccccaagaggaccaccagcctcatcctgcccggcatcatcaaggccgccgcccacgtgctgtatgaaacagaggtggaggtgtccctgatgccaccctgcttccacaatgactgcagcgagtttgtgaaccagccctacctgctgtacagcgtgcacatgaagagcaccaagcccagcctgagccccagcaagccccagagcagcctggtgatccccaccagcctcttctgcaagaccttccccttccacttcatgtttgacaaggacatgaccatcctgcagtttggaaatggcatccggcggctgatgaacagaagagacttccagggcaagcccaactttgaggagtactttgagatcctgacccccaagatcaaccagaccttcagcggcatcatgaccatgctgaacatgcagtttgtggtgcgggtgcggcgctgggacaacagcgtgaagaagagcagccgggtgatggacctgaagggccagatgatctacatcgtggagagcagcgccatcctcttcctgggcagcccctgtgtggaccggctggaggacttcaccggccggggcctgtacctgagtgacatccccatccacaatgccctgagagatgtggtgctgattggagagcaggcccgggcccaggacggcctgaagaagaggctgggcaagctgaaggccaccctggagcaggcccaccaggccctggaggaggagaagaagaagacagtggacctgctgtgcagcatcttcccctgtgaggtggcccagcagctgtggcagggccaggtggtgcaggccaagaagttcagcaatgtgaccatgctgttcagtgacatcgtgggcttcaccgccatctgcagccagtgcagccccctgcaggtgatcaccatgctgaatgccctgtacaccaggtttgaccagcagtgtggggagctggatgtgtacaaggtggagaccatcggagatgcctactgtgtggccggcggcctgcacaaggagagtgacacccatgctgtgcagatcgccctgatggccctgaagatgatggagctgagtgatgaggtgatgagcccccatggagagcccatcaagatgagaattggcctgcacagcggctctgtgtttgctggggtggtgggcgtgaagatgccccgctactgcctgtttggaaacaacgtgaccctggccaacaagtttgagagctgcagcgtgcccaggaagatcaacgtgagccccaccacctaccgcctgctgaaggactgccccggctttgtgttcacccccaggagccgggaggagctgccccccaacttccccagcgagatccctggcatctgccacttcctggatgcctaccagcagggcaccaacagcaagccctgcttccagaagaaggatgtggaggatggaaatgccaacttcctgggcaaggccagcggcattgattag

SEQ ID NO: 154780 - DNA, 2073 bp, synthetic construct; identical to SEQ ID NO: 154779
  misc_feature 1..2073: note = Description of Artificial Sequence: Synthetic coding sequence
  source 1..2073: mol_type = other DNA

SEQ ID NO: 154781 - DNA, 2073 bp, synthetic construct; identical to SEQ ID NO: 154779
  misc_feature 1..2073: note = Description of Artificial Sequence: Synthetic coding sequence
  source 1..2073: mol_type = other DNA

SEQ ID NO: 154782 - DNA, 2073 bp, synthetic construct; identical to SEQ ID NO: 154779
  misc_feature 1..2073: note = Description of Artificial Sequence: Synthetic coding sequence
  source 1..2073: mol_type = other DNA

SEQ ID NO: 154783 - DNA, 2073 bp, synthetic construct; identical to SEQ ID NO: 154779
  misc_feature 1..2073: note = Description of Artificial Sequence: Synthetic coding sequence
  source 1..2073: mol_type = other DNA

SEQ ID NO: 154784 - DNA, 1860 bp, synthetic construct
  misc_feature 1..1860: note = Description of Artificial Sequence: Synthetic coding sequence
  source 1..1860: mol_type = other DNA
atgtatggctttgtgaaccacgccctggagctgctggtgatcagaaattatggccctgaggtgtgggaggacatcaagaaggaggcccagctggatgaggagggccagttcctggtgcgcatcatctatgatgacagcaagacctatgacctggtggccgccgccagcaaggtgctgaacctgaatgctggggagatcctgcagatgtttgggaagatgttctttgtgttctgccaggagagcggctatgacaccatcctgcgggtgctgggcagcaatgtgcgggagttcctgcagaacctggatgccctgcatgaccacctggccaccatctacccaggcatgagggcccccagcttccgctgcacagatgctgagaagggcaagggcctcatcctgcactactacagcgagcgggagggcctgcaggacatcgtgattggcatcatcaagacagtggcccagcagatccacggcacagaaattgacatgaaggtgatccagcagagaaatgaagaatgtgaccacacccagttcctgattgaggagaaggagagcaaggaggaggacttctatgaggacctggacagatttgaggagaatggcacccaggagagccgcatcagcccctacaccttctgcaaggccttccccttccacatcatctttgaccgggacctggtggtgacccagtgtggaaatgccatctacagagtgctgccccagctgcagcccggcaactgcagcctgctgagcgtcttcagcctggtgcggccccacatcgacatctccttccacggcatcctgagccacatcaacacagtgtttgtgctgcggagcaaggagggcctgctggatgtggagaagctggagtgtgaagatgagctgactggaacagagatcagctgcctgcggctgaagggccagatgatctacctgcctgaggccgacagcatcctcttcctgtgcagccccagcgtgatgaacctggatgacctgacccggcggggcctgtacctgagtgacatccccctgcatgatgccacccgggacctggtgctgctgggggagcagttccgggaggagtacaagctgacccaggagctggagatcctgacagaccggctgcagctgaccctgcgggccctggaggatgagaagaagaagacagacaccctgctgtacagcgtgctgcccccatctgtggccaatgagctgcggcacaagaggcctgtgcctgccaagagatatgacaacgtgaccatcctcttctctggaattgtgggcttcaatgccttctgcagcaagcacgccagcggggagggcgccatgaagatcgtgaacctgctgaatgacctgtacaccaggtttgacaccctgacagacagcaggaagaacccctttgtgtacaaggtggagaccgtgggggacaagtacatgacagtgtctggcctgcctgagccctgcatccaccacgcccggagcatctgccacctggccctggacatgatggagattgctggccaggtgcaggtggatggagagagcgtgcagatcaccatcggcatccacactggagaggtggtgactggagtgattggccagaggatgccccgctactgcctgtttggaaacacagtgaacctgaccagcaggacagagaccaccggggagaagggcaagatcaacgtgtctgagtacacctaccgctgcctgatgagccctgagaacagcgacccccagttccacctggagcaccggggccctgtgtccatgaagggcaagaaggagcccatgcaggtgtggttcctgagcaggaagaacacaggaacagaggagaccaagcaggatgatgactag

SEQ ID NO: 154785 - DNA, 1656 bp, synthetic construct
  misc_feature 1..1656: note = Description of Artificial Sequence: Synthetic coding sequence
  source 1..1656: mol_type = other DNA
atgtttgggaagatgttctttgtgttctgccaggagagcggctatgacaccatcctgcgggtgctgggcagcaatgtgcgggagttcctgcagaacctggatgccctgcatgaccacctggccaccatctacccaggcatgagggcccccagcttccgctgcacagatgctgagaagggcaagggcctcatcctgcactactacagcgagcgggagggcctgcaggacatcgtgattggcatcatcaagacagtggcccagcagatccacggcacagaaattgacatgaaggtgatccagcagagaaatgaagaatgtgaccacacccagttcctgattgaggagaaggagagcaaggaggaggacttctatgaggacctggacagatttgaggagaatggcacccaggagagccgcatcagcccctacaccttctgcaaggccttccccttccacatcatctttgaccgggacctggtggtgacccagtgtggaaatgccatctacagagtgctgccccagctgcagcccggcaactgcagcctgctgagcgtcttcagcctggtgcggccccacatcgacatctccttccacggcatcctgagccacatcaacacagtgtttgtgctgcggagcaaggagggcctgctggatgtggagaagctggagtgtgaagatgagctgactggaacagagatcagctgcctgcggctgaagggccagatgatctacctgcctgaggccgacagcatcctcttcctgtgcagccccagcgtgatgaacctggatgacctgacccggcggggcctgtacctgagtgacatccccctgcatgatgccacccgggacctggtgctgctgggggagcagttccgggaggagtacaagctgacccaggagctggagatcctgacagaccggctgcagctgaccctgcgggccctggaggatgagaagaagaagacagacaccctgctgtacagcgtgctgcccccatctgtggccaatgagctgcggcacaagaggcctgtgcctgccaagagatatgacaacgtgaccatcctcttctctggaattgtgggcttcaatgccttctgcagcaagcacgccagcggggagggcgccatgaagatcgtgaacctgctgaatgacctgtacaccaggtttgacaccctgacagacagcaggaagaacccctttgtgtacaaggtggagaccgtgggggacaagtacatgacagtgtctggcctgcctgagccctgcatccaccacgcccggagcatctgccacctggccctggacatgatggagattgctggccaggtgcaggtggatggagagagcgtgcagatcaccatcggcatccacactggagaggtggtgactggagtgattggccagaggatgccccgctactgcctgtttggaaacacagtgaacctgaccagcaggacagagaccaccggggagaagggcaagatcaacgtgtctgagtacacctaccgctgcctgatgagccctgagaacagcgacccccagttccacctggagcaccggggccctgtgtccatgaagggcaagaaggagcccatgcaggtgtggttcctgagcaggaagaacacaggaacagaggagaccaagcaggatgatgactag

SEQ ID NO: 154786 - DNA, 1800 bp, synthetic construct
  misc_feature 1..1800: note = Description of Artificial Sequence: Synthetic coding sequence
  source 1..1800: mol_type = other DNA
atgctgatgtgcttcatcaaggaggcccagctggatgaggagggccagttcctggtgcgcatcatctatgatgacagcaagacctatgacctggtggccgccgccagcaaggtgctgaacctgaatgctggggagatcctgcagatgtttgggaagatgttctttgtgttctgccaggagagcggctatgacaccatcctgcgggtgctgggcagcaatgtgcgggagttcctgcagaacctggatgccctgcatgaccacctggccaccatctacccaggcatgagggcccccagcttccgctgcacagatgctgagaagggcaagggcctcatcctgcactactacagcgagcgggagggcctgcaggacatcgtgattggcatcatcaagacagtggcccagcagatccacggcacagaaattgacatgaaggtgatccagcagagaaatgaagaatgtgaccacacccagttcctgattgaggagaaggagagcaaggaggaggacttctatgaggacctggacagatttgaggagaatggcacccaggagagccgcatcagcccctacaccttctgcaaggccttccccttccacatcatctttgaccgggacctggtggtgacccagtgtggaaatgccatctacagagtgctgccccagctgcagcccggcaactgcagcctgctgagcgtcttcagcctggtgcggccccacatcgacatctccttccacggcatcctgagccacatcaacacagtgtttgtgctgcggagcaaggagggcctgctggatgtggagaagctggagtgtgaagatgagctgactggaacagagatcagctgcctgcggctgaagggccagatgatctacctgcctgaggccgacagcatcctcttcctgtgcagccccagcgtgatgaacctggatgacctgacccggcggggcctgtacctgagtgacatccccctgcatgatgccacccgggacctggtgctgctgggggagcagttccgggaggagtacaagctgacccaggagctggagatcctgacagaccggctgcagctgaccctgcgggccctggaggatgagaagaagaagacagacaccctgctgtacagcgtgctgcccccatctgtggccaatgagctgcggcacaagaggcctgtgcctgccaagagatatgacaacgtgaccatcctcttctctggaattgtgggcttcaatgccttctgcagcaagcacgccagcggggagggcgccatgaagatcgtgaacctgctgaatgacctgtacaccaggtttgacaccctgacagacagcaggaagaacccctttgtgtacaaggtggagaccgtgggggacaagtacatgacagtgtctggcctgcctgagccctgcatccaccacgcccggagcatctgccacctggccctggacatgatggagattgctggccaggtgcaggtggatggagagagcgtgcagatcaccatcggcatccacactggagaggtggtgactggagtgattggccagaggatgccccgctactgcctgtttggaaacacagtgaacctgaccagcaggacagagaccaccggggagaagggcaagatcaacgtgtctgagtacacctaccgctgcctgatgagccctgagaacagcgacccccagttccacctggagcaccggggccctgtgtccatgaagggcaagaaggagcccatgcaggtgtggttcctgagcaggaagaacacaggaacagaggagaccaagcaggatgatgactag

SEQ ID NO: 154787 - DNA, 1656 bp, synthetic construct; identical to SEQ ID NO: 154785
  misc_feature 1..1656: note = Description of Artificial Sequence: Synthetic coding sequence
  source 1..1656: mol_type = other DNA

SEQ ID NO: 154788 - DNA, 3222 bp, synthetic construct
  misc_feature 1..3222: note = Description of Artificial Sequence: Synthetic coding sequence
  source 1..3222: mol_type = other DNA
atgaagaccctgctgctggacctggccctgtggagcctgctcttccagcccggctggctgtccttcagcagccaggtgtcccagaactgccacaacggcagctatgagatctctgtgctgatgatgggcaacagcgcctttgctgagcccctgaagaacctggaggatgctgtgaatgaaggcctggagatcgtgcggggccgcctgcagaatgccggcctgaatgtgacagtgaatgccaccttcatgtacagtgatggcctcatccacaacagcggggactgccgcagcagcacctgtgagggcctggacctgctgaggaagatcagcaatgcccagaggatgggctgtgtgctgattggccccagctgcacctacagcaccttccagatgtacctggacacagagctgagctaccccatgatctctgctggcagctttggcctgagctgtgactacaaggagaccctgacccggctgatgagccctgccaggaagctgatgtacttcctggtgaacttctggaagaccaatgacctgcccttcaagacctacagctggagcaccagctatgtgtacaagaatggaacagaaacagaggactgcttctggtacctgaatgccctggaggcctctgtgtcctacttcagccatgagctgggcttcaaggtggtgctgcggcaggacaaggagttccaggacatcctgatggaccacaacaggaagagcaatgtcatcatcatgtgtggcggccctgagttcctgtacaagctgaagggggacagagctgtggccgaggacatcgtcatcatcctggtggacctcttcaatgaccagtactttgaggacaacgtgacagccccagactacatgaagaatgtgctggtgctgaccctgagccctggcaacagcctgctgaacagcagcttcagcaggaacctgagccccaccaagagggactttgccctggcctacctgaatggcatcctgctgtttggccacatgctgaagatcttcctggagaatggagagaacatcaccacccccaagtttgcccacgccttcaggaacctgacctttgagggctatgatggccctgtgaccctggatgactggggagatgtggacagcaccatggtgctgctgtacacctctgtggacaccaagaagtacaaggtgctgctgacctatgacacccacgtgaacaagacctaccctgtggacatgagccccaccttcacctggaagaacagcaagctgcccaatgacatcaccggccggggcccccagatcctgatgattgctgtgttcaccctgaccggggctgtggtgctgctgctgctggtggccctgctgatgctgaggaagtacaggaaggactatgagctgcggcagaagaagtggagccacatccccccagagaacatcttccccctggagaccaatgagaccaaccacgtgtccctgaagattgatgatgacaagaggcgggacaccatccagaggctgcggcagtgcaagtatgacaagaagagggtcatcctgaaggacctgaagcacaatgatggcaacttcacagagaagcagaagattgagctgaacaagctgctgcagattgactactacaacctgaccaagttctacggcaccgtgaagctggacaccatgatcttcggcgtgattgagtactgtgagcggggcagcctgcgggaggtgctgaatgacaccatctcctacccagatggcaccttcatggactgggagttcaagatctctgtgctgtatgacatcgccaagggcatgagctacctgcacagcagcaagacagaggtgcacggccgcctgaagagcaccaactgtgtggtggacagcaggatggtggtgaagatcacagactttggctgcaacagcatcctgccccccaagaaggacctgtggacagcccctgagcacctgcggcaggccaacatcagccagaagggagatgtgtacagctatggcatcatcgcccaggagatcatcctgaggaaggagaccttctacaccctgagctgccgggacagaaatgagaagatcttccgggtggagaacagcaatggcatgaagcccttccggccagacctcttcctggagacagctgaggagaaggagctggaggtgtacctgctggtgaagaactgctgggaggaggaccctgagaagaggccagacttcaagaagattgagaccaccctggccaagatcttcggcctcttccatgaccagaagaatgaaagctacatggacaccctcatccggcggctgcagctgtacagcaggaacctggagcacctggtggaggagaggacccagctgtacaaggccgagcgggacagagctgaccggctgaacttcatgctgctgccccggctggtggtgaagagcctgaaggagaagggctttgtggagcctgagctgtatgaggaggtgaccatctacttcagtgacatcgtgggcttcaccaccatctgcaagtacagcacccccatggaggtggtggacatgctgaatgacatctacaagagctttgaccacatcgtggaccaccatgatgtgtacaaggtggagaccatcggagatgcctacatggtggccagcggcctgcccaagagaaatggaaacagacatgccattgatattgccaagatggccctggagatcctgtccttcatgggcacctttgagctggagcacctgcccggcctgcccatctggatcagaattggagtgcacagcggcccctgtgccgccggcgtggtgggcatcaagatgccccgctactgcctgtttggagacacagtgaacacagccagcaggatggagagcacaggcctgcccctgcgcatccacgtgtctggcagcaccatcgccatcctgaagaggacagagtgccagttcctgtatgaggtgcggggggagacctacctgaagggcagaggaaatgagaccacctactggctgaccggcatgaaggaccagaagttcaacctgcccaccccacccaccgtggagaaccagcagaggctgcaggccgagttcagtgacatgattgccaacagcctgcagaagaggcaggccgccggcatccgcagccagaagccccggcgggtggccagctacaagaagggcaccctggagtacctgcagctgaacaccacagacaaggagagcacctacttctag

SEQ ID NO: 154789 - DNA, 3312 bp, synthetic construct
  misc_feature 1..3312: note = Description of Artificial Sequence: Synthetic coding sequence
  source 1..3312: mol_type = other DNA
atgacagcctgtgcccggcgggccggcggcctgcctgaccccggcctgtgtggccctgcctggtgggcccccagcctgccccggctgccccgggccctgccccggctgcccctgctgctgctgctgctgctgctgcagcccccagccctgtctgctgtgttcaccgtgggcgtgctgggcccctgggcctgtgaccccatcttcagccgggcccggccagacctggccgcccggctggccgccgcccggctgaacagagaccccggcctggccggcggccccaggtttgaggtggccctgctgcctgagccctgcaggaccccaggcagcctgggcgctgtgagcagcgccctggcccgggtgtctggcctggtgggccctgtgaacccagctgcctgcaggcctgctgagctgctggccgaggaggccggcatcgccctggtgccctggggctgcccctggacccaggccgagggcaccacagccccagctgtgaccccagctgctgatgccctgtatgccctgctgcgggccttcggctgggcccgggtggccctggtgacagccccccaggacctgtgggtggaggccggccgcagcctgagcacagccctgcgggcccggggcctgcctgtggcctctgtgacctccatggagcccctggacctgagcggggcccgggaggccctgaggaaggtgagagatggcccccgggtgacagctgtgatcatggtgatgcacagcgtgctgctgggcggggaggagcagcgctacctgctggaggccgctgaggagctgggcctgacagatggcagcctggtgttcctgccctttgacaccatccactacgccctgagccctggccctgaggccctggccgccctggccaacagcagccagctgcggcgggcccatgatgctgtgctgaccctgaccaggcactgccccagcgagggctctgtgctggacagcctgcggcgggcccaggagcggcgggagctgcccagcgacctgaacctgcagcaggtgagccccctgtttggcaccatctatgatgctgtgttcctgctggcccggggcgtggccgaggcccgggctgctgctgggggccgctgggtgtctggagctgctgtggcccggcacatcagagatgcccaggtgcccggcttctgtggggacctgggcggagatgaggagcccccatttgtgctgctggacacagatgctgctggggaccggctgtttgccacctacatgctggaccctgcccggggcagcttcctgtctgctggcaccaggatgcacttcccccggggcggcagcgcccctggccctgaccccagctgctggtttgaccccaacaacatctgtggcggcggcctggagcccggcctggtgttcctgggcttcctgctggtggtgggcatgggcctggccggggccttcctggcccactacgtgcgccaccggctgctgcacatgcagatggtgtctggccccaacaagatcatcctgactgtggatgacatcaccttcctgcacccccacggcggcaccagcaggaaggtggcccagggcagccgcagcagcctgggcgcccgctccatgtctgacatccgcagcggccccagccagcacctggacagccccaacatcggcgtgtatgaaggagacagagtgtggctgaagaagtttcctggggaccagcacatcgccatccggcctgccaccaagacagccttcagcaagctgcaggagctgcggcatgaaaatgtggccctgtacctgggcctcttcctggcccggggagctgagggccctgctgccctgtgggagggcaacctggccgtggtgtctgagcactgcacccggggcagcctgcaggacctgctggcccagcgggagatcaagctggactggatgttcaagagcagcctgctgctggacctgatcaagggcatccgctacctgcaccacagaggagtggcccacggccgcctgaagagcaggaactgcatcgtggatggccgctttgtgctgaagatcacagaccacggccacggccgcctgctggaggcccagaaggtgctgcctgagccccccagggctgaggaccagctgtggacagcccctgagctgctgcgggaccctgccctggagcggcggggcaccctggccggagatgtgttcagcctggccatcatcatgcaggaggtggtgtgccgcagcgccccctatgccatgctggagctgaccccagaggaggtggtgcagagggtgcgcagccccccacccctgtgccggcccctggtgtccatggaccaggcccctgtggagtgcatcctgctgatgaagcagtgctgggccgagcagcctgagctgcggcccagcatggaccacacctttgacctcttcaagaacatcaacaagggcaggaagaccaacatcatcgacagcatgctgaggatgctggagcagtacagcagcaacctggaggacctgatccgggagaggacagaggagctggagctggagaagcagaagacagaccggctgctgacccagatgctgccccccagcgtggccgaggccctgaagacaggcacccctgtggagcctgagtactttgagcaggtgaccctgtacttcagtgacatcgtgggcttcaccaccatcagcgccatgtctgagcccatcgaggtggtggacctgctgaatgacctgtacaccctgtttgatgccatcatcggcagccatgatgtgtacaaggtggagaccatcggagatgcctacatggtggccagcggcctgccccagagaaatggccagagacatgctgctgagatcgccaacatgagcctggacatcctgtctgctgtgggcaccttcaggatgaggcacatgcctgaggtgcctgtgcgcatcagaattggcctgcacagcggcccctgtgtggccggcgtggtgggcctgaccatgccccgctactgcctgtttggagacacagtgaacacagccagcaggatggagagcacaggcctgccctaccgcatccacgtgaacctgagcacagtgggcatcctgcgggccctggacagcggctaccaggtggagctgcggggccgcacagagctgaagggcaaaggagctgaggacaccttctggctggtgggcagaagaggcttcaacaagcccatccccaagcccccagacctgcagcccggcagcagcaaccacggcatcagcctgcaggagatccccccagagaggaggaggaagctggagaaggcccggcccggccagttctcctag

SEQ ID NO: 154790 - DNA, 594 bp, synthetic construct
  misc_feature 1..594: note = Description of Artificial Sequence: Synthetic coding sequence
  source 1..594: mol_type = other DNA
atgaggaagtaccgcagccactggagccagggcgaccgggagggctaccagaggaggagcaactactatgagggcccccacaccagccacagcagccctgctgacaggacccgggaggaggtggtgacccccaccctgcctgagcacacagccaccaggagccagatggccaccagcctggacttcaagacctacgtggaccaggcctgcagagctgctgaggagtttgtgaacatctactatgagaccatggacaagagaagaagagccctgacccggctgtacctggacaaggccaccctcatctggaatggaaatgctgtgtctggcctggatgccctgaacaacttctttgacaccctgcccagcagcgagttccaggtgaacatgctggactgccagcctgtgcatgagcaggccacccagagccagaccaccgtgctggtggtgaccagcggcaccgtgaagtttgatggcaacaagcagcacttcttcaaccagaacttcctgctgacagcccagagcacccccaacaacacagtgtggaagatcgccagtgactgcttccgcttccaggactggagcagcagctag

SEQ ID NO: 154791 - DNA, 606 bp, synthetic construct
  misc_feature 1..606: note = Description of Artificial Sequence: Synthetic coding sequence
  source 1..606: mol_type = other DNA
atgggaaatgtgatggagggcaagtctgtggaggagctgagcagcacagagtgccaccagtggtacaagaagttcatgacagagtgccccagcggccagctgaccctgtatgagttccggcagttcttcggcctgaagaacctgagccccagcgccagccagtatgtggagcagatgtttgagacctttgacttcaacaaggatggctacatcgacttcatggagtatgtggccgccctgagcctggtgctgaagggcaaggtggagcagaagctgcgctggtacttcaagctgtatgatgtggatggaaatggctgcatcgacagagatgagctgctgaccatcatccaggccatccgggccatcaacccctgcagcgacaccaccatgacagctgaggagttcacagacaccgtcttcagcaagattgatgtgaatggagatggagagctgagcctggaggagttcattgaaggagtgcagaaggaccagatgctgctggacaccctgaccaggagcctggacctgaccagaattgtgcggcggctgcagaatggagagcaggatgaggagggcgcagatgaggccgctgaggccgccggctag

SEQ ID NO: 154792 - DNA, 606 bp, synthetic construct; identical to SEQ ID NO: 154791
  misc_feature 1..606: note = Description of Artificial Sequence: Synthetic coding sequence
  source 1..606: mol_type = other DNA

SEQ ID NO: 154793 - DNA, 618 bp, synthetic construct
  misc_feature 1..618: note = Description of Artificial Sequence: Synthetic coding sequence
  source 1..618: mol_type = other DNA
atggagggcaagtctgtggaggagctgagcagcacagagtgccaccagtggtacaagaagttcatgacagagtgccccagcggccagctgaccctgtatgagttccggcagttcttcggcctgaagaacctgagccccagcgccagccagtatgtggagcagatgtttgagacctttgacttcaacaaggatggctacatcgacttcatggagtatgtggccgccctgagcctggtgctgaagggcaaggtggagcagaagctgcgctggtacttcaagctgtatgatgtggatggaaatggctgcatcgacagagatgagctgctgaccatcatccagttcccccaccagtaccagaagacagccatccgggccatcaacccctgcagcgacaccaccatgacagctgaggagttcacagacaccgtcttcagcaagattgatgtgaatggagatggagagctgagcctggaggagttcattgaaggagtgcagaaggaccagatgctgctggacaccctgaccaggagcctggacctgaccagaattgtgcggcggctgcagaatggagagcaggatgaggagggcgcagatgaggccgctgaggccgccggctag

SEQ ID NO: 154794 - DNA, 606 bp, synthetic construct; identical to SEQ ID NO: 154791
  misc_feature 1..606: note = Description of Artificial Sequence: Synthetic coding sequence
  source 1..606: mol_type = other DNA

SEQ ID NO: 154795 - DNA, 267 bp, synthetic construct
  misc_feature 1..267: note = Description of Artificial Sequence: Synthetic coding sequence
  source 1..267: mol_type = other DNA
atgggaaatgtgatggagggcaagtctgtggaggagctgagcagcacagagtgccaccagtggtacaagaagttcatgacagagtgccccagcggccagctgaccctgtatgagttccggcagttcttcggcctgaagaacctgagccccagcgccagccagtatgtggagcagatgtttgagacctttgacttcaacaaggatggctacatcgacttcatggagtatgtggccgccctgagcctggtgctgaagggcaaggtgtag

SEQ ID NO: 154796 - DNA, 606 bp, synthetic construct; identical to SEQ ID NO: 154791
  misc_feature 1..606: note = Description of Artificial Sequence: Synthetic coding sequence
  source 1..606: mol_type = other DNA

SEQ ID NO: 154797 - DNA, 1020 bp, synthetic construct
  misc_feature 1..1020: note = Description of Artificial Sequence: Synthetic coding sequence
  source 1..1020: mol_type = other DNA
atggaccagaacaacagcctgcccccctatgcccagggcctggccagcccccagggcgccatgaccccaggcatccccatcttcagccccatgatgccctacggcaccggcctgaccccccagcccatccagaacaccaacagcctgagcatcctggaggagcagcagaggcagcagcagcagcagcagcagcagcagcagcagcagcagcagcagcagcagcagcagcagcagcagcagcagcagcagcagcagcagcagcagcagcagcagcagcagcagcaggccgtggccgctgctgctgtgcagcagagcaccagccagcaggccacccagggcaccagcggccaggccccccagctgttccacagccagaccctgaccacagcccccctgcccggcaccacccccctgtaccccagccccatgacccccatgacccccatcaccccagccaccccagccagcgagagcagcggcatcgtgccccagctgcagaacatcgtgtccacagtgaacctgggctgcaagctggacctgaagaccatcgccctgcgggccagaaatgctgagtacaaccccaagagatttgctgctgtgatcatgaggatccgggagcccaggaccacagccctgatcttcagcagcggcaagatggtgtgcaccggggccaagtctgaggagcagagccggctggccgccaggaaatatgcccgggtggtgcagaagctgggcttccctgccaagttcctggacttcaagatccagaacatggtgggcagctgtgatgtgaagttccccatccggctggagggcctggtgctgacccaccagcagttcagcagctatgagcctgagctgtttcctggcctcatctacaggatgatcaagccccgcatcgtgctgctgatctttgtgtctgggaaggtggtgctgactggagccaaggtgcgggcagagatctatgaggcctttgagaacatctaccccatcctgaagggcttcaggaagaccacctag

SEQ ID NO: 154798 - DNA, 519 bp, synthetic construct
  misc_feature 1..519: note = Description of Artificial Sequence: Synthetic coding sequence
  source 1..519: mol_type = other DNA
atgggccaggagttctcctgggaggaggccgaggccgccggggagattgatgtggccgagctgcaggagtggtacaagaagtttgtgatggagtgccccagcggcaccctcttcatgcatgagttcaagcgcttcttcaaggtgacagatgatgaggaggccagccagtatgtggagggcatgttccgggcctttgacaagaatggagacaacaccatcgacttcctggagtatgtggccgccctgaacctggtgctgcggggcaccctggagcacaagctgaagtggaccttcaagatctatgacaaggatggaaatggctgcatcgaccggctggagctgctgaacatcgtggagtgcagaagagagctgcagacagagcagggccagctgctgaccccagaggaggtggtggaccgcatcttcctgctggtggatgaaaatggagatggccagctgagcctgaatgaatttgtggagggcgcccggcgggacaacctgctgatgcccaccctgtag

SEQ ID NO: 154799 - DNA, 630 bp, synthetic construct
  misc_feature 1..630: note = Description of Artificial Sequence: Synthetic coding sequence
  source 1..630: mol_type = other DNA
atgggaaatggcaagagcattgctggggaccagaaggctgtgcccacccaggagacccacgtgtggtaccgcaccttcatgatggagtaccccagcggcctgcagaccctgcacgagttcaagaccctgctgggcctgcagggcctgaaccagaaggccaacaagcacatcgaccaggtgtacaacacctttgacaccaacaaggatggctttgtggacttcctggagttcatcgctgctgtgaacctgatcatgcaggagaagatggagcagaagctgaagtggtacttcaagctgtatgatgctgatggaaatggcagcattgacaagaatgagctgctggacatgttcatggctgtgcaggccctgaatggccagcagaccctgagccctgaggagttcatcaacctggtgttccacaagattgacatcaacaatgatggagagctgaccctggaggagttcatcaatggcatggccaaggaccaggacctgctggagatcgtgtacaagagctttgacttcagcaatgtgctgcgggtcatctgcaatggcaagcagcctgacatggagacagacagcagcaagagcccagacaaggccggcctgggcaaggtgaagatgaagtag

SEQ ID NO: 154800 - DNA, 591 bp, synthetic construct
  misc_feature 1..591: note = Description of Artificial Sequence: Synthetic coding sequence
  source 1..591: mol_type = other DNA
atgggaaatggcaagagcattgctggggaccagaaggctgtgcccacccaggagacccacgtgtggtaccgcaccttcatgatggagtaccccagcggcctgcagaccctgcacgagttcaagaccctgctgggcctgcagggcctgaaccagaaggccaacaagcacatcgaccaggtgtacaacacctttgacaccaacaaggatggctttgtggacttcctggagttcatcgctgctgtgaacctgatcatgcaggagaagatggagcagaagctgaagtggtacttcaagctgtatgatgctgatggaaatggcagcattgacaagaatgagctgctggacatgttcatggctgtgcaggccctgaatggccagcagaccctgagccctgaggagttcatcaacctggtgttccacaagattgacatcaacaatgatggaaatggagccaccctgtactggatcaccttccccaccaagggcatcgacttccgccgcatctaccagtggcacggcaagaggagcggcagccctggggactgcctgcaggagctgcggctgctgcagtgtgccgagagcaacctgtag

SEQ ID NO: 154801 - DNA, 348 bp, synthetic construct
  misc_feature 1..348: note = Description of Artificial Sequence: Synthetic coding sequence
  source 1..348: mol_type = other DNA
atgaatgccttcctgctgagcgccctgtgcctgctgggcgcctgggccgccctggccggcggcgtgacagtgcaggacggcaacttctccttcagcctggagagcgtgaagaagctgaaggacctgcaggagccccaggagccccgggtgggcaagctgaggaactttgcccccatccctggagagcctgtggtgcccatcctgtgcagcaaccccaacttccctgaggagctgaagcccctgtgcaaggagcccaatgcccaggagatcctgcagaggctggaggagattgctgaagatcctggcacctgtgagatctgtgcctatgctgcctgcaccggctgctag

SEQ ID NO: 154802 - DNA, 339 bp, synthetic construct
  misc_feature 1..339: note = Description of Artificial Sequence: Synthetic coding sequence
  source 1..339: mol_type = other DNA
atgggctgcagagctgccagcggcctgctgcccggggtggccgtggtgctgctgctgctgctgcagagcacccagagcgtgtacatccagtaccagggcttccgggtgcagctggagagcatgaagaagctgagtgacctggaggcccagtgggcccccagcccccggctgcaggcccagagcctgctgcctgctgtgtgccaccacccagccctgccccaggacctgcagcctgtgtgtgccagccaggaggccagcagcatcttcaagaccctgcggaccatcgccaatgatgactgtgagctgtgtgtgaatgtggcctgcaccggctgcctgtag

SEQ ID NO: 154803 - DNA, 594 bp, synthetic construct
  misc_feature 1..594: note = Description of Artificial Sequence: Synthetic coding sequence
  source 1..594: mol_type = other DNA
atgagcggccccaggcctgtggtgctgagcggccccagcggggccggcaagagcaccctgctgaagaggctgctgcaggagcacagcggcatcttcggcttctctgtgagccacaccaccaggaaccccaggcctggagaggagaatggcaaggactactactttgtgacccgggaggtgatgcagagggacattgctgctggggacttcattgaacatgctgagttcagcggcaacctgtatggcaccagcaaggtggccgtgcaggccgtgcaggccatgaaccgcatctgtgtgctggatgtggacctgcagggcgtgaggaacatcaaggccacagacctgcggcccatctacatctctgtgcagccccccagcctgcacgtgctggagcagaggctgcggcagaggaacacagaaacagaggagagcctggtgaagaggctggccgccgcccaggccgacatggagagcagcaaggagcccggcctgtttgatgtggtgatcatcaatgacagcctggaccaggcctatgcagagctgaaggaggccctgtctgaggagatcaagaaggcccagaggactggagcctag

SEQ ID NO: 154804 - DNA, 594 bp, synthetic construct; identical to SEQ ID NO: 154803
  misc_feature 1..594: note = Description of Artificial Sequence: Synthetic coding sequence
  source 1..594: mol_type = other DNA

SEQ ID NO: 154805 - DNA, 594 bp, synthetic construct; identical to SEQ ID NO: 154803
  misc_feature 1..594: note = Description of Artificial Sequence: Synthetic coding sequence
  source 1..594: mol_type = other DNA

SEQ ID NO: 154806 - DNA, 600 bp, synthetic construct
  misc_feature 1..600: note = Description of Artificial Sequence: Synthetic coding sequence
  source 1..600: mol_type = other DNA
atgagcggccccaggcctgtggtgctgagcggccccagcggggccggcaagagcaccctgctgaagaggctgctgcaggagcacagcggcatcttcggcttctctgtgtcccgggagagccgggccctggtggagggctaccacgaggagcctgaggcccggcggggggagcggcagcgggaggtgatgcagagggacattgctgctggggacttcattgaacatgctgagttcagcggcaacctgtatggcaccagcaaggtggccgtgcaggccgtgcaggccatgaaccgcatctgtgtgctggatgtggacctgcagggcgtgaggaacatcaaggccacagacctgcggcccatctacatctctgtgcagccccccagcctgcacgtgctggagcagaggctgcggcagaggaacacagaaacagaggagagcctggtgaagaggctggccgccgcccaggccgacatggagagcagcaaggagcccggcctgtttgatgtggtgatcatcaatgacagcctggaccaggcctatgcagagctgaaggaggccctgtctgaggagatcaagaaggcccagaggactggagcctag

SEQ ID NO: 154807 - DNA, 729 bp, synthetic construct
  misc_feature 1..729: note = Description of Artificial Sequence: Synthetic coding sequence
  source 1..729: mol_type = other DNA
atgagcggccccaggcctgtggtgctgagcggccccagcggggccggcaagagcaccctgctgaagaggctgctgcaggagcacagcggcatcttcggcttctctgtgagccacaccaccaggaaccccaggcctggagaggagaatggcaaggactactactttgtgacccgggaggtgatgcagagggacattgctgctggggacttcattgaacatgctgagttcagcggcaacctgtatggcaccagcaaggtggccgtgcaggccgtgcaggccatgaaccgcatctgtgtgctggatgtggacctgcagggcgtgaggaacatcaaggccacagacctgcggcccatctacatctctgtgcagccccccagcctgcacgtgctgcggctgcggcagaggaacacagaaacagaggagagcctggtgaagaggctggccgccgcccaggccgacatggagagcagcaaggagcccggcctgtttgatgtggtgatcatcaatgacagcctggaccaggcctatgcagagctgaaggaggccctgtctgaggtgggccccagcctgtgcctgcccggccagggcccccggggcggcctgggcgcccggcccctgctgtccatgaggcccctgaggaagagcaggaagctgaagggccctgcccctgaggcctgctgcctcttcagcgccccccgggcccacacaggccctggccagcagcactag

SEQ ID NO: 154808 - DNA, 657 bp, synthetic construct
  misc_feature 1..657: note = Description of Artificial Sequence: Synthetic coding sequence
  source 1..657: mol_type = other DNA
atgctgcggcggcccctggccggcctggccgccgccgccctgggccgggcccccccagatggcatgagcggccccaggcctgtggtgctgagcggccccagcggggccggcaagagcaccctgctgaagaggctgctgcaggagcacagcggcatcttcggcttctctgtgagccacaccaccaggaaccccaggcctggagaagaaaatggcaaggactactactttgtgacccgggaggtgatgcagagggacattgctgctggggacttcatcgagcacgccgagttcagcggcaacctgtatggcaccagcaaggtggccgtgcaggccgtgcaggccatgaaccgcatctgtgtgctggatgtggacctgcagggcgtgaggaacatcaaggccacagacctgcggcccatctacatctctgtgcagccccccagcctgcacgtgctggagcagaggctgcggcagaggaacacagaaacagaggagagcctggtgaagaggctggccgccgcccaggccgacatggagagcagccctgctggcctggagagctgccccacagctgctgtgaggacagctgctggccagagccctgcctgcctgatgtggagcagcctgaccacagcctggacccggcccacccagagctag

SEQ ID NO: 154809 - DNA, 594 bp, synthetic construct; identical to SEQ ID NO: 154803
  misc_feature 1..594: note = Description of Artificial Sequence: Synthetic coding sequence
  source 1..594: mol_type = other DNA

SEQ ID NO: 154810 - DNA, 726 bp, synthetic construct
  misc_feature 1..726: note = Description of Artificial Sequence: Synthetic coding sequence
  source 1..726: mol_type = other DNA
atgctgcggcggcccctggccggcctggccgccgccgccctgggccgggcccccccagatggcatgagcggccccaggcctgtggtgctgagcggccccagcggggccggcaagagcaccctgctgaagaggctgctgcaggagcacagcggcatcttcggcttctctgtgagccacaccaccaggaaccccaggcctggagaagaaaatggcaaggactactactttgtgacccgggaggtgatgcagagggacattgctgctggggacttcatcgagcacgccgagttcagcggcaacctgtatggcaccagcaaggtggccgtgcaggccgtgcaggccatgaaccgcatctgtgtgctggatgtggacctgcagggcgtgaggaacatcaaggccacagacctgcggcccatctacatctctgtgcagccccccagcctgcacgtgctggagcagaggctgcggcagaggaacacagaaacagaggagagcctggtgaagaggctggccgccgcccaggccgacatggagagcaggaaccaggagagcagcaaggaccggcggctgcggctggccgtgtgcagccgccaccctggccccatccaggaccagggcagcagcattgagcccccaccctggcaggccatccggcagctgtgtgccctgggccagcacgtggagtggaggcgctgctgcccctgtggctggaacatcctgggctag

SEQ ID NO: 154811 - DNA, 594 bp, synthetic construct; identical to SEQ ID NO: 154803
  misc_feature 1..594: note = Description of Artificial Sequence: Synthetic coding sequence
  source 1..594: mol_type = other DNA

SEQ ID NO: 154812 - DNA, 657 bp, synthetic construct
  misc_feature 1..657: note = Description of Artificial Sequence: Synthetic coding sequence
  source 1..657: mol_type = other DNA
atgctgcggcggcccctggccggcctggccgccgccgccctgggccgggcccccccagatggcatgagcggccccaggcctgtggtgctgagcggccccagcggggccggcaagagcaccctgctgaagaggctgctgcaggagcacagcggcatcttcggcttctctgtgagccacaccaccaggaaccccaggcctggagaagaaaatggcaaggactactactttgtgacccgggaggtgatgcagagggacattgctgctggggacttcatcgagcacgccgagttcagcggcaacctgtatggcaccagcaaggtggccgtgcaggccgtgcaggccatgaaccgcatctgtgtgctggatgtggacctgcagggcgtgaggaacatcaaggccacagacctgcggcccatctacatctctgtgcagccccccagcctgcacgtgctggagcagaggctgcggcagaggaacacagaaacagaggagagcctggtgaagaggctggccgccgcccaggccgacatggagagcagcaaggagcccggcctgtttgatgtggtgatcatcaatgacagcctggaccaggcctatgcagagctgaaggaggccctgtctgaggagatcaagaaggcccagaggactggagcctag

SEQ ID NO: 154813 - DNA, 762 bp, synthetic construct
  misc_feature 1..762: note = Description of Artificial Sequence: Synthetic coding sequence
  source 1..762: mol_type = other DNA
atggccggcagccagaaggaggagatcatgccaccccagcagggcgtgcccttccaggagagcggctgctggggctccatgggcgcccagagccgggagaggagcggccgggaccacagcggcacctggatctgtgccggcggcagccaggagaccttccacctgggcgcccctgtggagaccacctgcctggccggcatgagcggccccaggcctgtggtgctgagcggccccagcggggccggcaagagcaccctgctgaagaggctgctgcaggagcacagcggcatcttcggcttctctgtgagccacaccaccaggaaccccaggcctggagaggagaatggcaaggactactactttgtgacccgggaggtgatgcagagggacattgctgctggggacttcattgaacatgctgagttcagcggcaacctgtatggcaccagcaaggtggccgtgcaggccgtgcaggccatgaaccgcatctgtgtgctggatgtggacctgcagggcgtgaggaacatcaaggccacagacctgcggcccatctacatctctgtgcagccccccagcctgcacgtgctggagcagaggctgcggcagaggaacacagaaacagaggagagcctggtgaagaggctggccgccgcccaggccgacatggagagcagcaaggagcccggcctgtttgatgtggtgatcatcaatgacagcctggaccaggcctatgcagagctgaaggaggccctgtctgagtag

SEQ ID NO: 154814 - DNA, 516 bp, synthetic construct
  misc_feature 1..516: note = Description of Artificial Sequence: Synthetic coding sequence
  source 1..516: mol_type = other DNA
atgagcggccccaggcctgtggtgctgagcggccccagcggggccggcaagagcaccctgctgaagaggctgctgcaggagcacagcggcatcttcggcttctctgtgtcccgggagagcaacaccaccaggaaccccaggcctggagaagaaaatggcaaggactactactttgtgacccgggaggtgatgcagagggacattgctgctggggacttcatcgagcacgccgagttcagcggcaacctgtatggcaccagcaaggtggccgtgcaggccgtgcaggccatgaaccgcatctgtgtgctggatgtggacctgcagggcgtgaggaacatcaaggccacagacctgcggcccatctacatctctgtgcagccccccagcctgcacgtgctggagcagaggctgcggcagaggaacacagaaacagaggagagcctggtgaagaggctggccgccgcccaggccgacatggagagcgagatcaagaaggcccagaggactggagcctag

SEQ ID NO: 154815 - DNA, 819 bp, synthetic construct
  misc_feature 1..819: note = Description of Artificial Sequence: Synthetic coding sequence
  source 1..819: mol_type = other DNA
atggccggcagccagaaggaggagatcatgccaccccagcagggcgtgcccttccaggagagcggctgctggggctccatgggcgcccagagccgggagaggagcggccgggaccacagcggcacctggatctgtgccggcggcagccaggagaccttccacctgggcgcccctgtggagaccacctgcctggccgccagcctgctgacccccaggcatgtgggcccccaggcctgtggggctgagcgggccttcggctcctgggaggagcaccctgctgaggaggccgcccctggggcccagaggcacctgtggctgcagagggtgccctaccacgaggagcctgaggcccggcggggggagcggcagcgggaggtgatgcagagggacattgctgctggggacttcattgaacatgctgagttcagcggcaacctgtatggcaccagcaaggtggccgtgcaggccgtgcaggccatgaaccgcatctgtgtgctggatgtggacctgcagggcgtgaggaacatcaaggccacagacctgcggcccatctacatctctgtgcagccccccagcctgcacgtgctggagcagaggctgcggcagaggaacacagaaacagaggagagcctggtgaagaggctggccgccgcccaggccgacatggagagcaggaaccaggagagcagcaaggaccggcggctgcggctggccgtgtgcagccgccaccctggccccatccaggaccagggcagcagcattgagcccccaccctggcaggccatccggcagctgtgtgccctgggccagcacgtgtag

SEQ ID NO: 154816 - DNA, 654 bp, synthetic construct
  misc_feature 1..654: note = Description of Artificial Sequence: Synthetic coding sequence
  source 1..654: mol_type = other DNA
atgctgcggcggcccctggccggcctggccgccgccgccctgggccgggcccccccagatggcatgagcggccccaggcctgtggtgctgagcggccccagcggggccggcaagagcaccctgctgaagaggctgctgcaggagcacagcggcatcttcggcttctctgtgagccacaccaccaggaaccccaggcctggagaagaaaatggcaaggactactactttgtgacccgggaggtgatgcagagggacattgctgctggggacttcatcgagcacgccgagttcagcggcaacctgtatggcaccagcaaggtggccgtgcaggccgtgcaggccatgaaccgcatctgtgtgctggatgtggacctgcagggcgtgaggaacatcaaggccacagacctgcggcccatctacatctctgtgcagccccccagcctgcacgtgctggagcagaggctgcggcagaggaacacagaaacagaggagagcctggtgaagaggctggccgccgcccaggccgacatggagagcagcaaggagcccggcctgtttgatgtggtgatcatcaatgacagcctggaccaggcctatgcagagctgaaggaggccctgtctgaggagatcaagaaggcccagaggactggatag

SEQ ID NO: 154817 - DNA, 915 bp, synthetic construct
  misc_feature 1..915: note = Description of Artificial Sequence: Synthetic coding sequence
  source 1..915: mol_type = other DNA
atgaacagagccttcagcaggaagaaggacaagacctggatgcacaccccagaggccctgagcaagcacttcatcccctacaatgccaagttcctgggcagcacagaggtggagcagcccaagggcacagaggtggtgagagatgctgtgaggaagctgaagtttgcccggcacatcaagaagtctgagggccagaagatccccaaggtggagctgcagatcagcatctatggagtgaagatcctggagcccaagaccaaggaggtgcagcacaactgccagctgcaccgcatctccttctgtgctgatgacaagacagacaagaggatcttcaccttcatctgcaaggacagcgagagcaacaagcacctgtgctacgtgtttgacagcgagaagtgtgccgaggagatcaccctgaccatcggccaggcctttgacctggcctacaggaagttcctggagagcggcggcaaggatgtggagaccaggaagcagattgctggcctgcagaagaggatccaggacctggagacagagaacatggagctgaagaacaaggtgcaggacctggagaaccagctgcgcatcacccaggtgtctgcccccccagctggctccatgacccccaagagccccagcacagacatctttgacatgatccccttcagccccatcagccaccagagctccatgcccaccagaaatggcacccagcccccacctgtgcccagccgcagcacagagatcaagagggacctgtttggagctgagccctttgaccccttcaactgtggggctgctgacttccccccagacatccagagcaagctggatgagatgcaggagggcttcaagatgggcctgaccctggagggcaccgtcttctgcctggaccccctggacagccgctgctag

SEQ ID NO: 154818 - DNA, 915 bp, synthetic construct; identical to SEQ ID NO: 154817
  misc_feature 1..915: note = Description of Artificial Sequence: Synthetic coding sequence
  source 1..915: mol_type = other DNA

SEQ ID NO: 154819 - DNA, 915 bp, synthetic construct; identical to SEQ ID NO: 154817
  misc_feature 1..915: note = Description of Artificial Sequence: Synthetic coding sequence
  source 1..915: mol_type = other DNA

SEQ ID NO: 154820 - DNA, 504 bp, synthetic construct
  misc_feature 1..504: note = Description of Artificial Sequence: Synthetic coding sequence
  source 1..504: mol_type = other DNA
atgaacagagccttcagcaggaagaaggacaagacctggatgcacaccccagaggccctgagcaagcacttcatcccctacaatgccaagttcctgggcagcacagaggtggagcagcccaagggcacagaggtggtgagagatgctgtgaggaagctgaagtttgcccggcacatcaagaagtctgagggccagaagatccccaaggtggagctgcagatcagcatctatggagtgaagatcctggagcccaagaccaaggaggtgcagcacaactgccagctgcaccgcatctccttctgtgctgatgacaagacagacaagaggatcttcaccttcatctgcaaggacagcgagagcaacaagcacctgtgctacgtgtttgacagcgagaagtgtgtgtccatcccagatgtggtgggctggtttgtgctcttctacaagccaggcatcgtgctgctgctggccctggccaagtacctgaagatgaacaacttcctgtag

SEQ ID NO: 154821 - DNA, 915 bp, synthetic construct; identical to SEQ ID NO: 154817
  misc_feature 1..915: note = Description of Artificial Sequence: Synthetic coding sequence
  source 1..915: mol_type = other DNA

SEQ ID NO: 154822 - DNA, 207 bp, synthetic construct
  misc_feature 1..207: note = Description of Artificial Sequence: Synthetic coding sequence
  source 1..207: mol_type = other DNA
atgaacagagccttcagcaggaagaaggacaagacctggatgcacaccccagaggccctgagcaagcacttcatcccctacaatgccaagttcctgggcagcacagaggtggagcagcccaagggcacagaggtggtgagagatgctgtgaggaagctgaagtttgcccggcacatcaagaagtctgagggccagaagatcccctag

SEQ ID NO: 154823 - DNA, 504 bp, synthetic construct; identical to SEQ ID NO: 154820
  misc_feature 1..504: note = Description of Artificial Sequence: Synthetic coding sequence
  source 1..504: mol_type = other DNA

SEQ ID NO: 154824 - DNA, 585 bp, synthetic construct
  misc_feature 1..585: note = Description of Artificial Sequence: Synthetic coding sequence
  source 1..585: mol_type = other DNA
atgacagagaacagcaccagcgccccagctgccaagcccaagagggccaaggccagcaagaagagcacagaccaccccaagtacagcgacatgattgtggccgccatccaggccgagaagaacagagctggcagcagccggcagagcatccagaagtacatcaagagccactacaaggtgggggagaatgctgacagccagatcaagctgagcatcaagaggctggtgaccaccggggtgctgaagcagaccaagggcgtgggcgccagcggcagcttccggctggccaagagtgatgagcccaagaagtctgtggccttcaagaagaccaagaaggagatcaagaaggtggccacccccaagaaggccagcaagcccaagaaggccgccagcaaggcccccaccaagaagcccaaggccacccctgtgaagaaggccaagaagaagctggccgccacccccaagaaggccaagaagcccaagacagtgaaggccaagcctgtgaaggccagcaagcccaagaaggccaagcctgtgaagcccaaggccaagagcagcgccaagagagctgggaagaagaagtag

SEQ ID NO: 154825 - DNA, 534 bp, synthetic construct
  misc_feature 1..534: note = Description of Artificial Sequence: Synthetic coding sequence
  source 1..534: mol_type = other DNA
atgacagagaagagcacagaccaccccaagtacagcgacatgattgtggccgccatccaggccgagaagaacagagctggcagcagccggcagagcatccagaagtacatcaagagccactacaaggtgggagaaaatgctgacagccagatcaagctgagcatcaagaggctggtgaccactggagtgctgaagcagaccaagggcgtgggcgccagcggcagcttccggctggccaagagtgatgagcccaagaagtctgtggccttcaagaagaccaagaaggagatcaagaaggtggccacccccaagaaggccagcaagcccaagaaggccgccagcaaggcccccaccaagaagcccaaggccacccctgtgaagaaggccaagaagaagctggccgccacccccaagaaggccaagaagcccaagacagtgaaggccaagcctgtgaaggccagcaagcccaagaaggccaagcctgtgaagcccaaggccaagagcagcgccaagagagctgggaagaagaagtag

SEQ ID NO: 154826 - DNA, 411 bp, synthetic construct
  misc_feature 1..411: note = Description of Artificial Sequence: Synthetic coding sequence
  source 1..411: mol_type = other DNA
atggcccggaccaagcagacagccaggaagagcactggaggcaaggcccccaggaagcagctggccaccaaggccgccaggaagagcgcccccagcactggaggagtgaagaagccccaccgctaccggcccggcaccgtggccctgcgggagatccgccgctaccagaagagcacagagctgctgatcaggaagctgcccttccagaggctggtgcgggagatcgcccaggacttcaagacagacctgcgcttccagagcgctgccatcggggccctgcaggaggccagcgaggcctacctggtgggcctgtttgaggacaccaacctgtgtgccatccacgccaagagggtgaccatcatgcccaaggacatccagctggcccggcgcatccggggggagcgggcctag

SEQ ID NO: 154827 - DNA, 372 bp, synthetic construct
  misc_feature 1..372: note = Description of Artificial Sequence: Synthetic coding sequence
  source 1..372: mol_type = other DNA
atggcccggaccaagcagacagccaggaagagcactggaggcaaggcccccaggaagcagctggccaccaaggccgccaggaagagcgcccccagcactggaggagtgaagaagccccaccgctaccggcccggcaccgtggccctgcgggagatccgccgctaccagaagagcacagagctgctgatcaggaagctgcccttccagaggctggtgcgggagatcgcccaggacttcaagacagacctgcgcttccagagcgctgccatcggggccctgcaggtgaagtggtgggtgggccgcctgcgggtgtgcatccctgtggtgtaccaggagcagttccagatcgtggcctgtgcctacatcatctag

SEQ ID NO: 154828 - DNA, 411 bp, synthetic construct; identical to SEQ ID NO: 154826
  misc_feature 1..411: note = Description of Artificial Sequence: Synthetic coding sequence
  source 1..411: mol_type = other DNA

SEQ ID NO: 154829 - DNA, 411 bp, synthetic construct; identical to SEQ ID NO: 154826
  misc_feature 1..411: note = Description of Artificial Sequence: Synthetic coding sequence
  source 1..411: mol_type = other DNA

SEQ ID NO: 154830 - DNA, 411 bp, synthetic construct; identical to SEQ ID NO: 154826
  misc_feature 1..411: note = Description of Artificial Sequence: Synthetic coding sequence
  source 1..411: mol_type = other DNA

SEQ ID NO: 154831 - DNA, 1047 bp, synthetic construct
  misc_feature 1..1047: note = Description of Artificial Sequence: Synthetic coding sequence
  source 1..1047: mol_type = other DNA
atgccagatgagctgacagagcccggccgggccaccccagcccgggccagcagcttcctgattgagaacctgctggccgctgaggccaagggggccggccgggccacccagggagatggcagcagagaagatgaggaggaggatgatgatgatcctgaagatgaagatgctgagcaggccaggagaagaaggctgcagaggcggcggcagctgctggccggcactggacctggaggagaggcccgggcccgggccctgctgggccctggggccctgggcctgggcccccggcccccacctggccctggccccccatttgccctgggctgcggcggggccgcccgctggtacccccgggcccatggaggctacggcggcggcctgagcccagacaccagtgaccgggacagccctgagaccggggaggagatgggccgggcagagggcgcctggccccggggccctggccctggagctgtgcagcgggaggccgctgagctggccgcccggggccctgctgctggaacagaggaggccagcgagctggccgaggtgcctgctgctgctggggagacccggggcggcgtgggcgtgggcggcggcaggaagaagaagaccaggacagtgttcagccgcagccaggtgttccagctggagagcacctttgacctgaagcgctacctgagcagcgctgagcgggccggcctggccgccagcctgcagctgacagagacccaggtgaagatctggttccagaacagaagaaacaagtggaagaggcagctggccgctgagctggaggccgccagcctgagccccccaggggcccagaggctggtgcgggtgcctgtgctgtaccacgagagccccccagctgctgctgctgctggccccccagccaccctgcccttccccctggccccagctgccccagcccctcctccacccctgctgggcttcagcggggccctggcctaccccctggccgccttccctgctgctgcctctgtgcccttcctgcgggcccagatgcctggcctggtgtag

SEQ ID NO: 154832 - DNA, 822 bp, synthetic construct
  misc_feature 1..822: note = Description of Artificial Sequence: Synthetic coding sequence
  source 1..822: mol_type = other DNA
atgggcagcaaagaagatgctgggaagggctgcccagctgctgggggcgtgtcctccttcaccatccagagcatcctgggcggcggccccagcgaggccccccgggagcctgtgggctggccagccaggaagaggagcctgtctgtgtcctctgaggaggaggagccagatgatggctggaaggccccagcctgcttctgcccagaccagcacggccccaaggagcagggccccaagcaccacccccccatccccttcccctgcctgggcacccccaagggcagcggcggcagcggccctgggggcctggagaggacccccttcctgagccccagccacagcgacttcaaggaggagaaggagcggctgctgcctgctggcagccccagccctggcagcgagcggcccagagatggcggcgctgagcggcaggccggggccgccaagaagaagaccaggacagtgttcagccgcagccaggtgtaccagctggagagcacctttgacatgaagcgctacctgagcagcagcgagcgggcctgcctggccagcagcctgcagctgacagagacccaggtgaagacctggttccagaacagaagaaacaagtggaagaggcagctgtctgctgagctggaggccgccaacatggcccacgccagcgcccagaccctggtgtccatgcccctggtgttccgggacagcagcctgctgcgggtgcctgtgcccaggagcctggccttccctgcccccctgtactacccaggcagcaacctgagcgccctgcccctgtacaacctgtacaacaagctggactactag

SEQ ID NO: 154833 - DNA, 1074 bp, synthetic construct
  misc_feature 1..1074: note = Description of Artificial Sequence: Synthetic coding sequence
  source 1..1074: mol_type = other DNA
atgcctgagcccggcccagatgctgctggaacagccagcgcccagccccagcccccacctcctcctcctccagcccccaaggagagccccttcagcatcaagaacctgctgaatggagaccaccaccggcccccacccaagccccagcccccacccaggaccctgtttgccccagccagcgctgctgctgctgctgctgctgctgctgctgctgctgccaagggggccctggagggcgctgctggctttgccctgagccaggtgggggacctggccttccccaggtttgagatcccagcccagagatttgccctgcctgcccactacctggagaggagccctgcctggtggtacccctacaccctgaccccagctgggggccacctgcccaggcctgaggccagcgagaaggccctgctgcgggacagcagccctgccagcggcacagaccgggacagccctgagcccctgctgaaggctgaccctgaccacaaggagctggacagcaagagcccagatgagatcatcctggaggagagtgacagcgaggagagcaagaaggagggggaggccgcccctggagctgctggggcctctgtgggcgctgctgctgccaccccaggagctgaggactggaagaagggagctgagagccctgagaagaagccagcctgcaggaagaagaagaccaggacagtgttcagccgcagccaggtgttccagctggagagcacctttgacatgaagcgctacctgagcagcagcgagcgggccggcctggccgccagcctgcacctgacagagacccaggtgaagatctggttccagaacagaagaaacaagtggaagaggcagctggccgctgagctggaggccgccaacctgagccacgccgccgcccagagaattgtgcgggtgcccatcctgtaccacgagaacagcgctgctgagggcgctgctgctgctgctgctggggcccctgtgcctgtgtcccagcccctgctgaccttcccccaccctgtgtactacagccaccctgtggtgtcctctgtgcccctgctgcggcctgtgtag

SEQ ID NO: 154834 - DNA, 3405 bp, synthetic construct
  misc_feature 1..3405: note = Description of Artificial Sequence: Synthetic coding sequence
  source 1..3405: mol_type = other DNA
atggagagcacccccagcttcctgaagggcacccccacctgggagaagacagccccagaaaatggaattgtgcggcaggagcccggcagccccccaagagatggcctgcaccacggccccctgtgcctgggggagcccgcccccttctggaggggcgtgctgagcaccccagacagctggctgcccccaggcttcccccagggccccaaggacatgctgcccctggtggagggggagggcccccagaatggagagaggaaggtgaactggctgggcagcaaggagggcctgcgctggaaggaggccatgctgacccaccccctggccttctgtggccctgcctgccccccaagatgtggccccctgatgcctgagcacagcggcggccacctgaagagtgaccctgtggccttccggccctggcactgccccttcctgctggagaccaagatcctggagcgggcccccttctgggtgcccacctgcctgcccccctacctggtgtctggcctgcccccagagcacccctgtgactggcccctgaccccccacccctgggtgtacagcggcggccagcccaaggtgcccagcgccttcagcctgggcagcaagggcttctactacaaggaccccagcatcccccggctggccaaggagcccctggccgctgctgagcccggcctgtttggcctgaacagcggcggccacctgcagagagctggggaggccgagcggcccagcctgcaccagagagatggagagatgggcgccggccggcagcagaacccctgccccctcttcctgggccagcctgacacagtgccctggacctcctggccagcctgccccccaggcctggtgcacaccctgggcaatgtgtgggccggccctggagatggcaacctgggctaccagctgggccccccagccaccccccgctgccccagccctgagccccctgtgacccagaggggctgctgcagcagctacccacccaccaagggcggcggcctgggcccctgtgggaagtgccaggagggcctggagggcggggccagcggggccagcgagcccagcgaggaggtgaacaaggccagcggcccccgggcctgcccccccagccaccacaccaagctgaagaagacctggctgaccaggcacagcgagcagtttgagtgcccccggggctgcccagaggtggaggagaggcctgtggcccggctgcgggccctgaagagagctggcagccctgaggtgcagggcgccatgggcagccctgcccccaagaggcccccagaccccttccctggaacagctgagcagggcgccggcggctggcaggaggtgcgggacaccagcatcggcaacaaggatgtggacagcggccagcatgatgagcagaagggcccccaggacggccaggccagcctgcaggaccccggcctgcaggacatcccctgcctggccctgcctgccaagctggcccagtgccagagctgtgcccaggccgccggggagggcggcggccacgcctgccacagccagcaggtgcggcgcagccccctgggcggggagctgcagcaggaggaggacacagccaccaacagcagcagcgaggagggccctggcagcggccctgacagccggctgagcacaggcctggccaagcacctgctgagcggcctgggggaccggctgtgccgcctgctgcggcgggagcgggaggccctggcctgggcccagcgggagggccagggccctgctgtgacagaggacagccctggcatcccccgctgctgcagccgctgccaccacggcctcttcaacacccactggcgctgcccccgctgcagccaccggctgtgtgtggcctgtggccgggtggccggcaccggccgggcccgggagaaggccggcttccaggagcagagcgcagaagaatgtacccaggaggccggccatgctgcctgcagcctgatgctgacccagtttgtgagcagccaggccctggccgagctgagcacagccatgcaccaggtgtgggtgaagtttgacatccggggccactgcccctgccaggctgatgcccgggtgtgggcccctggagatgctggccagcagaaggagagcacccagaagaccccacccaccccccagcccagctgcaatggagacacccacaggaccaagagcatcaaggaggagaccccagattctgctgagaccccagcagaagatcgggccggccggggccccctgccctgccccagcctgtgtgagctgctggccagcacagctgtgaagctgtgcctgggccacgagcgcatccacatggcctttgcccctgtgaccccagccctgcccagtgatgaccgcatcaccaacatcctggacagcatcatcgcccaggtggtggagaggaagatccaggagaaggccctgggccctggcctgcgggccggccctggcctgaggaagggcctgggcctgcccctgagccctgtgcggccccggctgcccccacctggggccctgctgtggctgcaggagccccagccctgcccccggcggggcttccacctgttccaggagcactggaggcagggccagcctgtgctggtgtctggcatccagaggaccctgcagggcaacctgtggggcacagaggccctgggcgccctgggcggccaggtgcaggccctgagccccctgggccccccccagcccagcagcctgggcagcaccaccttctgggagggcttctcctggccagagctgcggcccaagagtgatgagggctctgtgctgctgctgcaccgggccctgggagatgaggacaccagccgggtggagaacctggccgccagcctgcccctgcctgagtactgtgccctgcacggcaagctgaacctggccagctacctgcccccaggcctggccctgcggcccctggagccccagctgtgggccgcctacggcgtgagcccccaccggggccacctgggcaccaagaacctgtgtgtggaggtggccgacctggtgtccatcctggtgcacgccgacacccccctgcctgcctggcaccgggcccagaaggacttcctgagcggcctggatggagagggcctgtggagccctggcagccaggtgtccacagtgtggcacgtgttccgggcccaggatgcccagaggatccgccgcttcctgcagatggtgcagggcctggtgtccacagtgtctgtgacccagcacttcctgagccctgagaccagcgccctgagcgcccagctgtgccaccagggccccagcctgcccccagactgccacctgctgtatgcccagatggactgggccgtgttccaggccgtgaaggtggccgtgggcaccctgcaggaggccaagtag

SEQ ID NO: 154835 - DNA, 3570 bp, synthetic construct
  misc_feature 1..3570: note = Description of Artificial Sequence: Synthetic coding sequence
  source 1..3570: mol_type = other DNA
atggagagcacccccagcttcctgaagggcacccccacctgggagaagacagccccagaaaatggaattgtgcggcaggagcccggcagccccccaagagatggcctgcaccacggccccctgtgcctgggggagcccgcccccttctggaggggcgtgctgagcaccccagacagctggctgcccccaggcttcccccagggccccaaggacatgctgcccctggtggagggggagggcccccagaatggagagaggaaggtgaactggctgggcagcaaggagggcctgcgctggaaggaggccatgctgacccaccccctggccttctgtggccctgcctgccccccaagatgtggccccctgatgcctgagcacagcggcggccacctgaagagtgaccctgtggccttccggccctggcactgccccttcctgctggagaccaagatcctggagcgggcccccttctgggtgcccacctgcctgcccccctacctggtgtctggcctgcccccagagcacccctgtgactggcccctgaccccccacccctgggtgtacagcggcggccagcccaaggtgcccagcgccttcagcctgggcagcaagggcttctactacaaggaccccagcatcccccggctggccaaggagcccctggccgctgctgagcccggcctgtttggcctgaacagcggcggccacctgcagagagctggggaggccgagcggcccagcctgcaccagagagatggagagatgggcgccggccggcagcagaacccctgccccctcttcctgggccagcctgacacagtgccctggacctcctggccagcctgccccccaggcctggtgcacaccctgggcaatgtgtgggccggccctggagatggcaacctgggctaccagctgggccccccagccaccccccgctgccccagccctgagccccctgtgacccagaggggctgctgcagcagctacccacccaccaagggcggcggcctgggcccctgtgggaagtgccaggagggcctggagggcggggccagcggggccagcgagcccagcgaggaggtgaacaaggccagcggcccccgggcctgcccccccagccaccacaccaagctgaagaagacctggctgaccaggcacagcgagcagtttgagtgcccccggggctgcccagaggtggaggagaggcctgtggcccggctgcgggccctgaagagagctggcagccctgaggtgcagggcgccatgggcagccctgcccccaagaggcccccagaccccttccctggaacagctgagcagggcgccggcggctggcaggaggtgcgggacaccagcatcggcaacaaggatgtggacagcggccagcatgatgagcagaagggcccccaggacggccaggccagcctgcaggaccccggcctgcaggacatcccctgcctggccctgcctgccaagctggcccagtgccagagctgtgcccaggccgccggggagggcggcggccacgcctgccacagccagcaggtgcggcgcagccccctgggcggggagctgcagcaggaggaggacacagccaccaacagcagcagcgaggagggccctggcagcggccctgacagccggctgagcacaggcctggccaagcacctgctgagcggcctgggggaccggctgtgccgcctgctgcggcgggagcgggaggccctggcctgggcccagcgggagggccagggccctgctgtgacagaggacagccctggcatcccccgctgctgcagccgctgccaccacggcctcttcaacacccactggcgctgcccccgctgcagccaccggctgtgtgtggcctgtggccgggtggccggcaccggccgggcccgggagaaggccggcttccaggagcagagcgcagaagaatgtacccaggaggccggccatgctgcctgcagcctgatgctgacccagtttgtgagcagccaggccctggccgagctgagcacagccatgcaccaggtgtgggtgaagtttgacatccggggccactgcccctgccaggctgatgcccgggtgtgggcccctggagatgctggccagcagaaggagagcacccagaagaccccacccaccccccagcccagctgcaatggagacacccacaggaccaagagcatcaaggaggagaccccagattctgctgagaccccagcagaagatcgggccggccggggccccctgccctgccccagcctgtgtgagctgctggccagcacagctgtgaagctgtgcctgggccacgagcgcatccacatggcctttgcccctgtgaccccagccctgcccagtgatgaccgcatcaccaacatcctggacagcatcatcgcccaggtggtggagaggaagatccaggagaaggccctgggccctggcctgcgggccggccctggcctgaggaagggcctgggcctgcccctgagccctgtgcggccccggctgcccccacctggggccctgctgtggctgcaggagccccagccctgcccccggcggggcttccacctgttccaggagcactggaggcagggccagcctgtgctggtgtctggcatccagaggaccctgcagggcaacctgtggggcacagaggccctgggcgccctgggcggccaggtgcaggccctgagccccctgggccccccccagcccagcagcctgggcagcaccaccttctgggagggcttctcctggccagagctgcggcccaagagtgatgagggctctgtgctgctgctgcaccgggccctgggagatgaggacaccagccgggtggagaacctggccgccagcctgcccctgcctgagtactgtgccctgcacggcaagctgaacctggccagctacctgcccccaggcctggccctgcggcccctggagccccagctgtgggccgcctacggcgtgagcccccaccggggccacctgggcaccaagaacctgtgtgtggaggtggccgacctggtgtccatcctggtgcacgccgacacccccctgcctgcctggcaccgggcccagaaggacttcctgagcggcctggatggagagggcctgtggagccctggcagccaggtgtccacagtgtggcacgtgttccgggcccaggatgcccagaggatccgccgcttcctgcagatggtgtgcccagctggagctggggccctggagcccggggcccctggcagctgctacctggatgctggcctgcggcggcggctgcgggaggagtggggcgtgtcctgctggaccctgctgcaggcccctggagaggccgtgctggtgcctgctggggccccccaccaggtgcagggcctggtgtccacagtgtctgtgacccagcacttcctgagccctgagaccagcgccctgagcgcccagctgtgccaccagggccccagcctgcccccagactgccacctgctgtatgcccagatggactgggccgtgttccaggccgtgaaggtggccgtgggcaccctgcaggaggccaagtag

SEQ ID NO: 154836 - DNA, 1410 bp, synthetic construct
  misc_feature 1..1410: note = Description of Artificial Sequence: Synthetic coding sequence
  source 1..1410: mol_type = other DNA
atggccagcccccgggagctgacccagaaccccctgaagaagatctggatgccctacagcaatggccggcctgccctgcacgcctgccagaggggcgtgtgcatgaccaactgccccaccctcatcgtgatggtgggcctgcctgcccggggcaagacctacatcagcaagaagctgacccgctacctgaactggattggagtgcccacccgggagttcaacgtgggccagtacagaagagatgtggtgaagacctacaagagctttgagttcttcctgcctgacaatgaggagggcctgaagatcaggaagcagtgtgccctggccgccctgagagatgtgcggcgcttcctgtctgaggagggcggccacgtggccgtgtttgatgccaccaacaccacccgggagcggcgggccaccatcttcaactttggagagcagaatggctacaagaccttctttgtggagagcatctgtgtggaccctgaggtgattgctgccaacatcgtgcaggtgaagctgggcagcccagactatgtgaacagagacagtgatgaggccacagaggacttcatgagaagaattgagtgctatgaaaattcctatgagagcctggatgaggacctggaccgggacctgagctacatcaagatcatggatgtgggccagagctatgtggtgaacagagtggccgaccacatccagagccgcatcgtgtactacctgatgaacatccacgtgacccccaggagcatctacctgtgcagacatggagagagcgagctgaacctgaagggccgcatcggcggggaccccggcctgagcccccggggccgggagtttgccaagagcctggcccagttcatcagtgaccagaacatcaaggacctgaaggtgtggaccagccagatgaagaggaccatccagacagctgaggccctgggcgtgccctatgagcagtggaaggtgctgaatgaaattgatgctggggtgtgtgaggagatgacctatgaggagatccaggacaactaccccctggagtttgccctgcgggaccaggacaagtaccgctaccgctaccccaagggggagagctatgaggacctggtgcagaggctggagcctgtgatcatggagctggagcggcaggagaatgtgctggtgatctgccaccaggccgtgatgcgctgcctgctggcctacttcctggacaaggctgctgagcagctgccctacctgaagtgccccctgcacacagtgctgaagctgacccctgtggcctacggctgcaaggtggagagcatcttcctgaatgtggccgctgtgaacacccaccgggaccggccccagaatgtggacatcagcaggcctcctgaggaggccctggtgacagtgcctgcccaccagtag

SEQ ID NO: 154837 - DNA, 522 bp, synthetic construct
  misc_feature 1..522: note = Description of Artificial Sequence: Synthetic coding sequence
  source 1..522: mol_type = other DNA
atgggcctgcccaggagagctggagatgctgctgagctgaggaagagcctgaagcccctgctggagaagagaagaagagcccgcatcaaccagagcctgagccagctgaagggcctcatcctgcccctgctgggccgggagaacagcaactgcagcaagctggagaaggcagatgtgctggagatgacagtgcgcttcctgcaggagctgcctgccagctcctggcccacagctgcccccctgccctgtgacagctaccgggagggctacagcgcctgtgtggcccggctggcccgggtgctgcctgcctgccgggtgctggagcctgctgtgtctgcccggctgctggagcacctgtggaggagagctgccagcgccaccctggatggcggccgggccggggacagcagcggccccagcgccccagccccagccccagccagcgcccctgagcccgccagcgcccctgtgcccagcccccccagccccccctgtggccctggcctgtggaggccctggtag

SEQ ID NO: 154838 - DNA, 231 bp, synthetic construct
  misc_feature 1..231: note = Description of Artificial Sequence: Synthetic coding sequence
  source 1..231: mol_type = other DNA
atgggcctgcccaggagagctggagatgctgctgagctgaggaagagcctgaagcccctgctggagaagagaagaagagcccgcatcaaccagagcctgagccagctgaagggcctcatcctgcccctgctgggcagagaagatgccagcggctggcacacctggctgcccctgcacgcccagaactgcttcctgctgtacatccaggcccctgagcagcccccagcctag

SEQ ID NO: 154839 - DNA, 231 bp, synthetic construct; identical to SEQ ID NO: 154838
  misc_feature 1..231: note = Description of Artificial Sequence: Synthetic coding sequence
  source 1..231: mol_type = other DNA

SEQ ID NO: 154840 - DNA, 561 bp, synthetic construct
  misc_feature 1..561: note = Description of Artificial Sequence: Synthetic coding sequence
  source 1..561: mol_type = other DNA
atggagaagaagagaagagcccgcatcaacgtgtccctggagcagctgaagagcctgctggagaagcactacagccaccagatcaggaagaggaagctggagaaggctgacatcctggagctgtctgtgaagtacatgaggagcctgcagaacagcctgcagggcctgtggcctgtgcccagaggagctgagcagcccagcggcttccgcagctgcctgcccggggtgtcccagctgctgcggagaggagatgaggtgggcagcggcctgcgctgccccctggtgcctgagagcgctgctggcagcaccatggacagcgctggcctgggccaggaggccccagccctcttccggccctgcaccccagctgtgtgggccccagccccagctgctgggggccccaggagccccccacccctgctgctgctgcctgagagcctgcccggcagcagcgcctctgtgcccccaccccagcctgccagcagccgctgtgccgagagccctggcctgggcctgcgggtgtggaggccctggggcagccctggagatgacctgaactag

SEQ ID NO: 154841 - DNA, 666 bp, synthetic construct
  misc_feature 1..666: note = Description of Artificial Sequence: Synthetic coding sequence
  source 1..666: mol_type = other DNA
atggctgctgacacccctgggaagcccagcgccagccccatggccggggccccagccagcgccagcaggaccccagacaagcccaggtctgctgctgagcacaggaagagcagcaagcctgtgatggagaagagaagaagagcccgcatcaatgaaagcctggcccagctgaagaccctcatcctggatgccctgaggaaggagagcagccgccacagcaagctggagaaggctgacatcctggagatgacagtgcgccacctgcggagcctgcggcgggtgcaggtgacagctgccctgtctgctgaccctgctgtgctgggcaagtaccgggccggcttccacgagtgcctggccgaggtgaaccgcttcctggccggctgtgagggcgtgcctgcagatgtgcgcagccggctgctgggccacctggccgcctgcctgcggcagctgggccccagccggcggcctgccagcctgagccctgctgccccagctgaggccccagcccctgaggtgtatgccggccggcccctgctgcccagcctgggcggccccttccccctgctggccccacccctgctgcccggcctgacccgggccctgcctgctgcccccagggctggcccccagggccctgggggcccctggaggccctggctgaggtag

SEQ ID NO: 154842 - DNA, 744 bp, synthetic construct
  misc_feature 1..744: note = Description of Artificial Sequence: Synthetic coding sequence
  source 1..744: mol_type = other DNA
atggctgctgacacccctgggaagcccagcgccagccccatggccggggccccagccagcgccagcaggaccccagacaagcccaggtctgctgctgagcacaggaaggtgggcagcaggcctggggtgcggggggccactggaggccgggagggccggggcacccagcctgtgcctgacccccagagcagcaagcctgtgatggagaagagaagaagagcccgcatcaatgaaagcctggcccagctgaagaccctcatcctggatgccctgaggaaggagagcagccgccacagcaagctggagaaggctgacatcctggagatgacagtgcgccacctgcggagcctgcggcgggtgcaggtgacagctgccctgtctgctgaccctgctgtgctgggcaagtaccgggccggcttccacgagtgcctggccgaggtgaaccgcttcctggccggctgtgagggcgtgcctgcagatgtgcgcagccggctgctgggccacctggccgcctgcctgcggcagctgggccccagccggcggcctgccagcctgagccctgctgccccagctgaggccccagcccctgaggtgtatgccggccggcccctgctgcccagcctgggcggccccttccccctgctggccccacccctgctgcccggcctgacccgggccctgcctgctgcccccagggctggcccccagggccctgggggcccctggaggccctggctgaggtag

SEQ ID NO: 154843 - DNA, 501 bp, synthetic construct
  misc_feature 1..501: note = Description of Artificial Sequence: Synthetic coding sequence
  source 1..501: mol_type = other DNA
atggcccccagcacagtggccgtggagctgctgagccccaaggagaagaaccggctgaggaagcctgtggtggagaagatgaggcgggaccgcatcaacagcagcattgagcagctgaagctgctgctggagcaggagtttgcccggcaccagcccaacagcaagctggagaaggctgacatcctggagatggctgtgtcctacctgaagcacagcaaggcctttgtggccgctgctggccccaagagcctgcaccaggactacagcgagggctacagctggtgcctgcaggaggccgtgcagttcctgaccctgcatgctgccagtgacacccagatgaagctgctgtaccacttccagaggcccccagctgccccagctgccccagccaaggagcccaaggcccctggggccgcccctcctccagccctgagcgccaaggccacagctgctgctgctgctgcccaccagcctgcctgtggcctgtggaggccctggtag

SEQ ID NO: 154844 - DNA, 675 bp, synthetic construct
  misc_feature 1..675: note = Description of Artificial Sequence: Synthetic coding sequence
  source 1..675: mol_type = other DNA
atggcccctcctgctgcccctggccgggacagagtgggcagagaagatgaagatggctgggagaccaggggggacaggaaggccaggaagcccctggtggagaagaagagaagagcccgcatcaatgaaagcctgcaggagctgcggctgctgctggccggggctgaggtgcaggccaagctggagaatgctgaggtgctggagctgactgtgcggcgggtgcagggcgtgctgcggggccgggcccgggagcgggagcagctgcaggccgaggccagcgagagatttgctgctggctacatccagtgcatgcatgaggtgcacacctttgtgtccacctgccaggccattgatgccaccgtggccgctgagctgctgaaccacctgctggagagcatgcccctgcgggagggcagcagcttccaggacctgctgggagatgccctggccggccccccccgggcccctggccgcagcggctggccagctggaggagcccctggcagccccatccccagccccccaggccctggagatgacctgtgcagcgacctggaggaggcccctgaggccgagctgagccaggccccagctgagggccctgacctggtgcctgctgccctgggcagcctgaccacagcccagatcgcccggtctgtgtggaggccctggtag

SEQ ID NO: 154845 - DNA, 645 bp, synthetic construct
  misc_feature 1..645: note = Description of Artificial Sequence: Synthetic coding sequence
  source 1..645: mol_type = other DNA
atggcccctcctgctgcccctggccgggacagagtgggcagagaagatgaagatggctgggagaccaggggggacaggaaggccaggaagcccctggtggagaagaagagaagagcccgcatcaatgaaagcctgcaggagctgcggctgctgctggccggggctgaggtgcaggccaagctggagaatgctgaggtgctggagctgactgtgcggcgggtgcagggcgtgctgcggggccgggcccggggggagtggaggagaggaggccggggcagaagaccccgggcccctgtgaccccagcccggcggaggaccagcctgcctgcccccctgagctgcagaagaagaggcctgcccccagagcagggcgccccaccccggctgctgggggagccccggccccggggccctgggggcctgggccatgctgtggccgcccaccgggccggccggggcagcctgccccccaccctgggcccccgggcccgggctgctgctgggggcagcgagcgggccctgcgctgccgcctgcaccctgtgcacgcccggggggcccacgtgcgggtgcacgtgcccggccaccggcgctaccgccgctgccgggcccctgagcccagcgcccgggtgcacgccgccgcctag

SEQ ID NO: 154846 - DNA, 669 bp, synthetic construct
  misc_feature 1..669: note = Description of Artificial Sequence: Synthetic coding sequence
  source 1..669: mol_type = other DNA
atggcccctcctgctgcccctggccgggacagagtgggcagagaagatgaagatggctgggagaccaggggggacaggaaggccaggaagcccctggtggagaagaagagaagagcccgcatcaatgaaagcctgcaggagctgcggctgctgctggccggggctgaggccaagctggagaatgctgaggtgctggagctgactgtgcggcgggtgcagggcgtgctgcggggccgggcccgggagcgggagcagctgcaggccgaggccagcgagagatttgctgctggctacatccagtgcatgcatgaggtgcacacctttgtgtccacctgccaggccattgatgccaccgtggccgctgagctgctgaaccacctgctggagagcatgcccctgcgggagggcagcagcttccaggacctgctgggagatgccctggccggccccccccgggcccctggccgcagcggctggccagctggaggagcccctggcagccccatccccagccccccaggccctggagatgacctgtgcagcgacctggaggaggcccctgaggccgagctgagccaggccccagctgagggccctgacctggtgcctgctgccctgggcagcctgaccacagcccagatcgcccggtctgtgtggaggccctggtag

SEQ ID NO: 154847 - DNA, 678 bp, synthetic construct
  misc_feature 1..678: note = Description of Artificial Sequence: Synthetic coding sequence
  source 1..678: mol_type = other DNA
atggtgacccgggacagagctgagaacagagatggccccaagatgctgaagcccctggtggagaagagaagaagagaccgcatcaacagaagcctggaggagctgcggctgctgctgctggagaggacccgggaccagaacctgaggaaccccaagctggagaaggccgagatcctggagtttgctgtgggctacctgcgggagaggagccgggtggagcccccaggagtgcccaggagccctgtgcaggatgctgaggccctggccagctgctacctgagcggcttccgggagtgcctgctgcggctggccgcctttgcccatgatgccagccctgctgcccgggcccagctgttcagcgccctgcacggctacctgcggcccaagccaccccggcccaagcctgtggacccccggcccccagccccccggcccagcctggaccctgctgccccagccctgggccctgccctgcaccagaggcctcctgtgcaccagggccaccccagcccccgctgtgcctggagccccagcctgtgcagcccccgggccggggacagcggggccccagcccccctgaccggcctgctgcccccacctcctccaccccaccggcaggatggagcccccaaggcccccctgcccccacctccagccttctggaggccctggccctag

SEQ ID NO: 154848 - DNA, 693 bp, synthetic construct
  misc_feature 1..693: note = Description of Artificial Sequence: Synthetic coding sequence
  source 1..693: mol_type = other DNA
atggtgacccgggacagagctgagaacagagatggccccaagatgctgaagcccctggtggagaagagaagaagagaccgcatcaacagaagcctggaggagctgcggctgctgctgctggagaggacccgggaccagaacctgaggaaccccaagctggagaaggccgagatcctggagtttgctgtgggctacctgcgggagaggagccgggtggagcccccagctgctgctgcccctggggtgcccaggagccctgtgcaggatgctgaggccctggccagctgctacctgagcggcttcagagaatgtctgctgcggctggccgcctttgcccatgatgccagccctgctgcccgggcccagctgttcagcgccctgcacggctacctgcggcccaagccaccccggcccaagcctgtggacccccggcccccagccccccggcccagcctggaccctgctgccccagccctgggccctgccctgcaccagaggcctcctgtgcaccagggccaccccagcccccgctgtgcctggagccccagcctgtgcagccccagggctggggacagcggggccccagcccccctgaccggcctgctgcccccacctcctccaccccaccggcaggatggagcccccaaggcccccctgcccccacctccagccttctggaggccctggccctag

SEQ ID NO: 154849 - DNA, 1014 bp, synthetic construct
  misc_feature 1..1014: note = Description of Artificial Sequence: Synthetic coding sequence
  source 1..1014: mol_type = other DNA
atgaagaggccctgtgaggagaccaccagcgagagtgacatggatgagaccattgatgtgggcagcgagaacaactacagcggccagagcaccagcagcgtcatccggctgaacagccccaccaccaccagccagatcatggccaggaagaagaggcggggcatcatcgagaagagaagaagagaccgcatcaacaacagcctgtctgagctgcggcggctggtgcccacagcctttgagaagcagggcagcgccaagctggagaaggccgagatcctgcagatgacagtggaccacctgaagatgctgcaggccaccggcggcaagggctactttgatgcccacgccctggccatggacttcatgagcatcggcttccgggagtgcctgacagaggtggcccgctacctgagctctgtggagggcctggacagcagtgaccccctgcgggtgcggctggtgagccacctgagcacctgtgccacccagcgggaggccgccgccatgaccagctccatggcccaccaccaccaccccctgcacccccaccactgggccgccgccttccaccacctgcctgctgccctgctgcagcccaacggcctgcacgccagcgagagcaccccctgccgcctgagcaccaccagcgaggtgcccccagcccacggcagcgccctgctgacagccacctttgcccacgccgacagcgccctgaggatgcccagcactggatctgtggccccctgtgtgccccccctgagcaccagcctgctgagcctgagcgccaccgtgcacgccgctgctgctgctgccacagctgctgcccacagcttccccctgagctttgctggggccttccccatgctgcccccaaatgctgctgctgctgtggccgccgccacagccatcagcccccccctgtctgtgtctgccaccagcagcccccagcagaccagcagcggcaccaacaacaagccctaccggccctggggcacagaggtgggcgccttctag

SEQ ID NO: 154850 - DNA, 876 bp, synthetic construct
  misc_feature 1..876: note = Description of Artificial Sequence: Synthetic coding sequence
  source 1..876: mol_type = other DNA
atggccaggaagaagaggcggggcatcatcgagaagagaagaagagaccgcatcaacaacagcctgtctgagctgcggcggctggtgcccacagcctttgagaagcagggcagcgccaagctggagaaggccgagatcctgcagatgacagtggaccacctgaagatgctgcaggccaccggcggcaagggctactttgatgcccacgccctggccatggacttcatgagcatcggcttccgggagtgcctgacagaggtggcccgctacctgagctctgtggagggcctggacagcagtgaccccctgcgggtgcggctggtgagccacctgagcacctgtgccacccagcgggaggccgccgccatgaccagctccatggcccaccaccaccaccccctgcacccccaccactgggccgccgccttccaccacctgcctgctgccctgctgcagcccaacggcctgcacgccagcgagagcaccccctgccgcctgagcaccaccagcgaggtgcccccagcccacggcagcgccctgctgacagccacctttgcccacgccgacagcgccctgaggatgcccagcactggatctgtggccccctgtgtgccccccctgagcaccagcctgctgagcctgagcgccaccgtgcacgccgctgctgctgctgccacagctgctgcccacagcttccccctgagctttgctggggccttccccatgctgcccccaaatgctgctgctgctgtggccgccgccacagccatcagcccccccctgtctgtgtctgccaccagcagcccccagcagaccagcagcggcaccaacaacaagccctaccggccctggggcacagaggtgggcgccttctag

SEQ ID NO: 154851 - DNA, 1221 bp, synthetic construct
  misc_feature 1..1221: note = Description of Artificial Sequence: Synthetic coding sequence
  source 1..1221: mol_type = other DNA
atgtctgccctgggcgccgtcatcgccctgctgctgtggggccagctgtttgctgtggacagcggaaatgatgtgacagacattgctgatgatggctgccccaagcccccagaaattgcccacggctacgtggagcacagcgtgcgctaccagtgcaagaactactacaagctgaggacagaaggagatggagtgtacaccctgaatgacaagaagcagtggatcaacaaggctgtgggggacaagctgcctgaatgtgaggctgatgatggctgccccaagcccccagagatcgcccacggctacgtggagcacagcgtgcgctaccagtgcaagaactactacaagctgaggacagaaggagatggagtgtacaccctgaacaatgagaagcagtggatcaacaaggctgtgggggacaagctgcctgaatgtgaggccgtgtgtgggaagcccaagaacccagccaaccctgtgcagaggatcctgggcggccacctggatgccaagggcagcttcccctggcaggccaagatggtgagccaccacaacctgaccactggagccaccctcatcaatgagcagtggctgctgaccacagccaagaacctcttcctgaaccacagtgaaaatgccacagccaaggacatcgcccccaccctgaccctgtatgtgggcaagaagcagctggtggagattgagaaggtggtgctgcaccccaactacagccaggtggacatcggcctcatcaagctgaagcagaaggtgtctgtgaatgaaagagtgatgcccatctgcctgcccagcaaggactatgcagaggtgggccgggtgggctacgtgtctggctggggcagaaatgccaacttcaagttcacagaccacctgaagtatgtgatgctgcctgtggccgaccaggaccagtgcatccgccactatgagggcagcacagtgcctgagaagaagacccccaagagccctgtgggcgtgcagcccatcctgaatgagcacaccttctgtgccggcatgagcaagtaccaggaggacacctgctatggagatgctggcagcgcctttgctgtgcatgacctggaggaggacacctggtacgccaccggcatcctgagctttgacaagagctgtgctgtggccgagtatggagtgtatgtgaaggtgaccagcatccaggactgggtgcagaagaccatcgcagaaaattag

SEQ ID NO: 154852 - DNA, 1149 bp, synthetic construct
  misc_feature 1..1149: note = Description of Artificial Sequence: Synthetic coding sequence
  source 1..1149: mol_type = other DNA
gtgtatgcctgtgtgtgtgtgtgtgtgtacatgcacgtgtgtgtggatgcctgcatgtgctgtgaggccggccgcctggccttccacagcagcctgagcagcctgtgcagcgccctgggcgctgtgattgccctgctgctgtggggccagctgtttgctgtggacagcggaaatgatgtgacagacattgctgatgatggctgccccaagcccccagagatcgcccacggctacgtggagcacagcgtgcgctaccagtgcaagaactactacaagctgaggacagaaggagatggagtgtacaccctgaatgacaagaagcagtggatcaacaaggctgtgggggacaagctgcctgaatgtgaggccgtgtgtgggaagcccaagaacccagccaaccctgtgcagaggatcctgggcggccacctggatgccaagggcagcttcccctggcaggccaagatggtgagccaccacaacctgaccactggagccaccctcatcaatgagcagtggctgctgaccacagccaagaacctcttcctgaaccacagtgaaaatgccacagccaaggacatcgcccccaccctgaccctgtatgtgggcaagaagcagctggtggagattgagaaggtggtgctgcaccccaactacagccaggtggacatcggcctcatcaagctgaagcagaaggtgtctgtgaatgaaagagtgatgcccatctgcctgcccagcaaggactatgcagaggtgggccgggtgggctacgtgtctggctggggcagaaatgccaacttcaagttcacagaccacctgaagtatgtgatgctgcctgtggccgaccaggaccagtgcatccgccactatgagggcagcacagtgcctgagaagaagacccccaagagccctgtgggcgtgcagcccatcctgaatgagcacaccttctgtgccggcatgagcaagtaccaggaggacacctgctatggagatgctggcagcgcctttgctgtgcatgacctggaggaggacacctggtacgccaccggcatcctgagctttgacaagagctgtgctgtggccgagtatggagtgtatgtgaaggtgaccagcatccaggactgggtgcagaagaccatcgcagaaaattag

SEQ ID NO: 154853 - DNA, 1044 bp, synthetic construct
  misc_feature 1..1044: note = Description of Artificial Sequence: Synthetic coding sequence
  source 1..1044: mol_type = other DNA
atgtctgccctgggcgccgtcatcgccctgctgctgtggggccagctgtttgctgtggacagcggaaatgatgtgacagacattgctgatgatggctgccccaagcccccagaaattgcccacggctacgtggagcacagcgtgcgctaccagtgcaagaactactacaagctgaggacagaaggagatggagtgtacaccctgaacaatgagaagcagtggatcaacaaggctgtgggggacaagctgcctgaatgtgaggccgtgtgtgggaagcccaagaacccagccaaccctgtgcagaggatcctgggcggccacctggatgccaagggcagcttcccctggcaggccaagatggtgagccaccacaacctgaccaccggggccaccctcatcaatgagcagtggctgctgaccacagccaagaacctcttcctgaaccacagtgaaaatgccacagccaaggacatcgcccccaccctgaccctgtatgtgggcaagaagcagctggtggagattgagaaggtggtgctgcaccccaactacagccaggtggacatcggcctcatcaagctgaagcagaaggtgtctgtgaatgaaagagtgatgcccatctgcctgcccagcaaggactatgcagaggtgggccgggtgggctacgtgtctggctggggcagaaatgccaacttcaagttcacagaccacctgaagtatgtgatgctgcctgtggccgaccaggaccagtgcatccgccactatgagggcagcacagtgcctgagaagaagacccccaagagccctgtgggcgtgcagcccatcctgaatgagcacaccttctgtgccggcatgagcaagtaccaggaggacacctgctatggagatgctggcagcgcctttgctgtgcatgacctggaggaggacacctggtacgccaccggcatcctgagctttgacaagagctgtgctgtggccgagtatggagtgtatgtgaaggtgaccagcatccaggactgggtgcagaagaccatcgccgagaactag

SEQ ID NO: 154854 - DNA, 846 bp, synthetic construct
  misc_feature 1..846: note = Description of Artificial Sequence: Synthetic coding sequence
  source 1..846: mol_type = other DNA
atgagccgcatcagccagatgacagctgcccggagccccccccggctgcacatggccatgtggagcaccaggtttgccacctctgtgaggaccaaccctgtgcagaggatcctgggcggccacctggatgccaagggcagcttcccctggcaggccaagatggtgagccaccacaacctgaccaccggggccaccctcatcaatgagcagtggctgctgaccacagccaagaacctcttcctgaaccacagtgaaaatgccacagccaaggacatcgcccccaccctgaccctgtatgtgggcaagaagcagctggtggagattgagaaggtggtgctgcaccccaactacagccaggtggacatcggcctcatcaagctgaagcagaaggtgtctgtgaatgaaagagtgatgcccatctgcctgcccagcaaggactatgcagaggtgggccgggtgggctacgtgtctggctggggcagaaatgccaacttcaagttcacagaccacctgaagtatgtgatgctgcctgtggccgaccaggaccagtgcatccgccactatgagggcagcacagtgcctgagaagaagacccccaagagccctgtgggcgtgcagcccatcctgaatgagcacaccttctgtgccggcatgagcaagtaccaggaggacacctgctatggagatgctggcagcgcctttgctgtgcatgacctggaggaggacacctggtacgccaccggcatcctgagctttgacaagagctgtgctgtggccgagtatggagtgtatgtgaaggtgaccagcatccaggactgggtgcagaagaccatcgccgagaactag

SEQ ID NO: 154855 - DNA, 552 bp, synthetic construct
  misc_feature 1..552: note = Description of Artificial Sequence: Synthetic coding sequence
  source 1..552: mol_type = other DNA
atgtctgctgcccgggagagccacccccacggcgtgaagaggtctgccagcccagatgatgacctgggcagcagcaactgggaggccgctgacctgggcaatgaggagaggaagcagaagttcctgcggctgatgggcgccggcaagaaggagcacacaggccgcctggtgattggagaccacaagagcaccagccacttcagaactggagaggaggacaagaagatcaatgaggagctggagagccagtaccagcagagcatggacagcaagctgagcggccgctacagaagacactgcggcctgggcttcagcgaggtggaggaccatgatggagaaggagatgtggccggagatgatgatgatgatgatgatgacagcccagaccctgagagcccagatgacagcgagagtgacagcgagagcgagaaggaggagagcgctgaggagctgcaggccgctgagcacccagatgaggtggaggaccccaagaacaagaaggatgccaagagcaactacaagatgatgtttgtgaagagcagcggcagctag

SEQ ID NO: 154856 - DNA, 1047 bp, synthetic construct
  misc_feature 1..1047: note = Description of Artificial Sequence: Synthetic coding sequence
  source 1..1047: mol_type = other DNA
atgtctgacctgggcgccgtcatcagcctgctgctgtggggccggcagctgtttgccctgtacagcggaaatgatgtgacagacatcagtgatgaccgcttccccaagcccccagagatcgccaacggctacgtggagcacctgttccgctaccagtgcaagaactactaccgcctgaggacagaaggagatggagtgtacaccctgaatgacaagaagcagtggatcaacaaggctgtgggggacaagctgcctgaatgtgaggccgtgtgtgggaagcccaagaacccagccaaccctgtgcagaggatcctgggcggccacctggatgccaagggcagcttcccctggcaggccaagatggtgagccaccacaacctgaccactggagccaccctcatcaatgagcagtggctgctgaccacagccaagaacctcttcctgaaccacagtgaaaatgccacagccaaggacatcgcccccaccctgaccctgtatgtgggcaagaagcagctggtggagattgagaaggtggtgctgcaccccaactaccaccaggtggacatcggcctcatcaagctgaagcagaaggtgctggtgaatgaaagagtgatgcccatctgcctgcccagcaagaactatgcagaggtgggccgggtgggctacgtgtctggctggggccagagcgacaacttcaagctgacagaccacctgaagtatgtgatgctgcctgtggccgaccagtatgactgcatcacccactatgagggcagcacctgccccaagtggaaggcccccaagagccctgtgggcgtgcagcccatcctgaatgagcacaccttctgtgtgggcatgagcaagtaccaggaggacacctgctatggagatgctggcagcgcctttgctgtgcatgacctggaggaggacacctggtatgctgctggcatcctgagctttgacaagagctgtgctgtggccgagtatggagtgtatgtgaaggtgaccagcatccagcactgggtgcagaagaccatcgcagaaaattag

SEQ ID NO: 154857 - DNA, 1047 bp, synthetic construct; identical to SEQ ID NO: 154856
  misc_feature 1..1047: note = Description of Artificial Sequence: Synthetic coding sequence
  source 1..1047: mol_type = other DNA

SEQ ID NO: 154858 - DNA, 615 bp, synthetic construct
  misc_feature 1..615: note = Description of Artificial Sequence: Synthetic coding sequence
  source 1..615: mol_type = other DNA
atggctgctgccaacccctgggaccctgccagcgcccccaacggggccggcctggtgctgggccacttcatcgccagcggcatggtgaaccagaagaacctggagattgagctgctgaagctggagaaggacacagcagatgtggtgcaccccttcttcctggcccagaagtgccacaccctgcagagcatgaacaaccacctggaggccgtgctgaaggagaagaggagcctgcggcagaggctgctgaagcccatgtgccaggagaacctgcccattgaagctgtgtaccaccgctacatggtgcacctgctggagctggccgtgaccttcatcgagcggctggagacccacctggagaccatccggaacatcccccacctggccgccaacctgaagaagatgaaccaggccctggccaagatggacatcctggtgacagaaacagaggagctggccgagaacatcctgaagtggaggaagcagcagaatgaggtgagcagctgcatccccaagatcctggccgaggagagctacctgtacaagcatgacatcatcatgccacccctgcccttcaccagcaaggtgcacgtgcagaccatcaatgccaagtag

SEQ ID NO: 154859 - DNA, 837 bp, synthetic construct
  misc_feature 1..837: note = Description of Artificial Sequence: Synthetic coding sequence
  source 1..837: mol_type = other DNA
atggagccccaggaggagcgggagacccaggtggccgcctggctgaagaagatctttggagaccaccccatcccccagtatgaggtgaaccccaggaccacagagatcctgcaccacctgtctgaaagaaacagagtgcgggacagagatgtgtacctggtgattgaggacctgaagcagaaggcctctgaatatgaaagtgaggccaagtacctgcaggacctgctgatggagagcgtgaacttcagccctgccaacctgagcagcacaggcagccgctacctgaatgccctggtggacagcgctgtggccctggagaccaaggacaccagcctggccagcttcatcccagctgtgaatgacctgaccagtgacctcttccgcaccaagagcaagtctgaggagatcaagattgagctggagaagctggagaagaacctgacagccaccctggtgctggagaagtgcctgcaggaggatgtgaagaaggccgagctgcacctgagcacagagcgggccaaggtggacaacagacggcagaacatggacttcctgaaggccaagtctgaggagttccgcttcggcatcaaggctgctgaggagcagctgagcgcccggggcatggatgccagcctgagccaccagagcctggtggccctgtctgagaagctggcccggctgaagcagcagaccatccccctgaagaagaagctggagagctacctggacctgatgcccaaccccagcctggcccaggtgaagattgaggaggccaagcgggagctggacagcattgaagctgagctgaccaggagagtggacatgatggagctgtag

SEQ ID NO: 154860 - DNA, 708 bp, synthetic construct
  misc_feature 1..708: note = Description of Artificial Sequence: Synthetic coding sequence
  source 1..708: mol_type = other DNA
atggctgctgccaacccctgggaccctgccagcgcccccaacggggccggcctggtgctgggccacttcatcgccagcggcatggtgaaccaggagatgctgaacatgagcaagaagacagtgtcctgctttgtgaacttcacccggctgcagcagatcaccaacatccaggccgagatctaccagaagaacctggagattgagctgctgaagctggagaaggacacagcagatgtggtgcaccccttcttcctggcccagaagtgccacaccctgcagagcatgaacaaccacctggaggccgtgctgaaggagaagaggagcctgcggcagaggctgctgaagcccatgtgccaggagaacctgcccatcgaggccgtgtaccaccgctacatggtgcacctgctggagctggccgtgaccttcatcgagcggctggagacccacctggagaccatccggaacatcccccacctggccgccaacctgaagaagatgaaccaggccctggccaagatggacatcctggtgacagaaacagaggagctggccgagaacatcctgaagtggaggaagcagcagaatgaggtgagcagctgcatccccaagatcctggccgaggagagctacctgtacaagcatgacatcatcatgccacccctgcccttcaccagcaaggtgcacgtgcagaccatcaatgccaagtag

SEQ ID NO: 154861 - DNA, 615 bp, synthetic construct; identical to SEQ ID NO: 154858
  misc_feature 1..615: note = Description of Artificial Sequence: Synthetic coding sequence
  source 1..615: mol_type = other DNA

SEQ ID NO: 154862 - DNA, 1812 bp, synthetic construct
  misc_feature 1..1812: note = Description of Artificial Sequence: Synthetic coding sequence
  source 1..1812: mol_type = other DNA
atgagctgtggaaatgaatttgtggagaccctgaagaagattggctaccccaaggctgacaacctgaatggagaagattttgactggctgtttgaaggagtggaggatgagagcttcctgaagtggttctgtggaaatgtgaatgagcagaatgtgctgtctgagcgggagctggaggccttcagcatcctgcagaagagcggcaagcccatcctggagggcgccgccctggatgaggccctgaagacctgcaagaccagtgacctgaagaccccccggctggatgacaaggagctggagaagctggaggatgaggtgcagaccctgctgaagctgaagaacctgaagatccagaggaggaacaagtgccagctgatggcctctgtgaccagccacaagagcctgcggctgaatgccaaggaggaggaggccaccaagaagctgaagcagagccagggcatcctgaatgccatgatcaccaagatcagcaatgagctgcaggccctgacagatgaggtgacccagctgatgatgttcttccgccacagcaacctgggccagggcaccaaccccctggtgttcctgagccagttcagcctggagaagtacctgagccaggaggagcagagcacagctgccctgaccctgtacaccaagaagcagttcttccagggcatccacgaggtggtggagagcagcaatgaagacaacttccagctgctggacatccagacccccagcatctgtgacaaccaggagatcctggaggagcggcggctggagatggcccggctgcagctggcctacatctgtgcccagcaccagctgatccacctgaaggccagcaacagctccatgaagagcagcatcaagtgggccgaggagagcctgcacagcctgaccagcaaggctgtggacaaggagaacctggatgccaagatcagcagcctgaccagcgagatcatgaagctggagaaggaggtgacccagatcaaggacaggagcctgcctgctgtggtgcgggagaatgcccagctgctgaacatgcctgtggtgaagggggactttgacctgcagatcgccaagcaggactactacacagcccggcaggagctggtgctgaaccagctgatcaagcagaaggccagctttgagctgctgcagctgtcctatgaaattgagctgaggaagcaccgggacatctaccggcagctggagaacctggtgcaggagctgagccagagcaacatgatgctgtacaagcagctggagatgctgacagaccccagcgtgtcccagcagatcaaccccaggaacaccatcgacaccaaggactacagcacccaccggctgtaccaggtgctggagggggagaacaagaagaaggagctgttcctgacccacggcaacctggaggaggtggccgagaagctgaagcagaacatcagcctggtgcaggaccagctggccgtgtctgcccaggagcacagcttcttcctgagcaagaggaacaaggatgtggacatgctgtgtgacaccctgtaccagggcggcaaccagctgctgctgagtgaccaggagctgacagagcagttccacaaggtggagagccagctgaacaagctgaaccacctgctgacagacatcctggctgatgtgaagaccaagaggaagaccctggccaacaacaagctgcaccagatggagcgggagttctacgtgtacttcctgaaggatgaggactacctgaaggacatcgtggagaacctggagacccagagcaagatcaaggctgtgtccctggaggactag

SEQ ID NO: 154863 - DNA, 1812 bp, synthetic construct; identical to SEQ ID NO: 154862
  misc_feature 1..1812: note = Description of Artificial Sequence: Synthetic coding sequence
  source 1..1812: mol_type = other DNA

SEQ ID NO: 154864 - DNA, 33 bp, synthetic construct
  misc_feature 1..33: note = Description of Artificial Sequence: Synthetic coding sequence
  source 1..33: mol_type = other DNA
atgagctgtggaaatgaatttgtggagacctag

SEQ ID NO: 154865 - DNA, 102 bp, synthetic construct
  misc_feature 1..102: note = Description of Artificial Sequence: Synthetic coding sequence
  source 1..102: mol_type = other DNA
atgagctgtggaaatgaatttgtggagaccctgaagaagattggctaccccaaggctgacaacctgaatggagaagattttgactggctgtttgagggctag

SEQ ID NO: 154866 - DNA, 456 bp, synthetic construct
  misc_feature 1..456: note = Description of Artificial Sequence: Synthetic coding sequence
  source 1..456: mol_type = other DNA
atgggcaagaggcccaacctgctggccctgcagctgagtgacagcaccctggccgacatcatcgcccggctgcaggccggccagaagctgagcggcagcagccccttcagcagcgccttcaacagcctgagcctggacaaggagagcggcctgctgatgtttaaaggagacaagaagccccgggtgtgggtggtgcccacccagctgcggcgggacctgatcttctctgtgcatgacatccccctgggcgcccaccagaggcctgaggagacctacaagaagctgcggctgctgggctggtggccaggcatgcaggagcacgtgaaggactactgccgcagctgcctcttctgcatccccaggaacctgattggcagcgagctgaaggtgattgagagccccccagcctctgtgctgcggggccagggcgtgtgcaacagaagtggcaccaggtag

SEQ ID NO: 154867 - DNA, 957 bp, synthetic construct
  misc_feature 1..957: note = Description of Artificial Sequence: Synthetic coding sequence
  source 1..957: mol_type = other DNA
atggccagcggggacttctgcagccctggagagggcatggagatcctgcagcaggtgtgcagcaagcagctgcccccctgcaacctgagcaaggaggacctgctgcagaacccctacttcagcaagctgctgctgaacctgagccagcacgtggatgagagcggcctgagcctgaccctggccaaggagcaggcccaggcctggaaggaggtgcggctgcacaagaccacctggctgcggtctgagatcctgcacagggtcatccaggagctgctggtggactactacgtgaagatccaggacaccaacgtgaccagcgaggacaagaaggactttgtgtggatgagggcccggctgcagcaggaggtggaggagcagctgaagaagaagtgcttcaccctgctgtgctactatgaccccaacagtgatgctgacagcgagaccgtgaaggccgccaaggtgtggaagctggccgaggtgctggtgggggagcagcagcagtgccaggatgccaagagccagcagaaggagcagatgctgctgctggagaagaagtctgctgcctacagccaggtgctgctgcgctgcctgaccctgctgcagaggctgctgcaggagcaccggctgaagacccagagcgagctggaccgcatcaatgcccagtacctggaggtgaagtgtggggccatgatcctgaagctgaggatggaggagctgaagatcctgagtgacacctacacagtggagaaggtggaggtgcacaggctcatccgggaccggctggagggcgccatccacctgcaggagcaggacatggagaacagccggcaggtgctgaacagctatgaggtgctgggggaggagtttgaccggctggtgaaggagtacacagtgctgaagcaggccacagagaacaagcgctgggccctgcaggagttcagcaaggtgtacagatag

SEQ ID NO: 154868 - DNA, 714 bp, synthetic construct
  misc_feature 1..714: note = Description of Artificial Sequence: Synthetic coding sequence
  source 1..714: mol_type = other DNA
atggccagcggggacttctgcagccctggagagggcatggagatcctgcagcaggtgtgcagcaagcagctgcccccctgcaacctgagcaaggaggacctgctgcagaacccctacttcagcaagctgctgctgaacctgagccagcacgtggatgagagcggcctgagcctgaccctggccaaggagcaggcccaggcctggaaggaggtgcggctgcacaagaccacctggctgcggtctgagatcctgcacagggtcatccaggagctgctggtggactactacgtgaagatccaggacaccaacgtgaccagcgaggacaagaaggtgctgctgcgctgcctgaccctgctgcagaggctgctgcaggagcaccggctgaagacccagagcgagctggaccgcatcaatgcccagtacctggaggtgaagtgtggggccatgatcctgaagctgaggatggaggagctgaagatcctgagtgacacctacacagtggagaaggtggaggtgcacaggctcatccgggaccggctggagggcgccatccacctgcaggagcaggacatggagaacagccggcaggtgctgaacagctatgaggtgctgggggaggagtttgaccggctggtgaaggagtacacagtgctgaagcaggccacagagaacaagcgctgggccctgcaggagttcagcaaggtgtacagatag

SEQ ID NO: 154869 - DNA, 714 bp, synthetic construct; identical to SEQ ID NO: 154868
  misc_feature 1..714: note = Description of Artificial Sequence: Synthetic coding sequence
  source 1..714: mol_type = other DNA

SEQ ID NO: 154870 - DNA, 720 bp, synthetic construct
  misc_feature 1..720: note = Description of Artificial Sequence: Synthetic coding sequence
  source 1..720: mol_type = other DNA
atgaggctgctgggccccagccaggagcgggagatcccccccctgctgggcctggagaaggctgacctgctggagctgatgcccctgtctgaagattttgtgtggatgagggcccggctgcagcaggaggtggaggagcagctgaagaagaagtgcttcaccctgctgtgctactatgaccccaacagtgatgctgacagcgagaccgtgaaggccgccaaggtgtggaagctggccgaggtgctggtgggggagcagcagcagtgccaggatgccaagagccagcagaaggagcagatgctgctgctggagaagaagtctgctgcctacagccaggtgctgctgcgctgcctgaccctgctgcagaggctgctgcaggagcaccggctgaagacccagagcgagctggaccgcatcaatgcccagtacctggaggtgaagtgtggggccatgatcctgaagctgaggatggaggagctgaagatcctgagtgacacctacacagtggagaaggtggaggtgcacaggctcatccgggaccggctggagggcgccatccacctgcaggagcaggacatggagaacagccggcaggtgctgaacagctatgaggtgctgggggaggagtttgaccggctggtgaaggagtacacagtgctgaagcaggccacagagaacaagcgctgggccctgcaggagttcagcaaggtgtacagatag

SEQ ID NO: 154871 - DNA, 1092 bp, synthetic construct; identical to SEQ ID NO: 146563
  misc_feature 1..1092: note = Description of Artificial Sequence: Synthetic coding sequence
  source 1..1092: mol_type = other DNA

SEQ ID NO: 154872 - DNA, 54 bp, synthetic construct
  misc_feature 1..54: note = Description of Artificial Sequence: Synthetic coding sequence
  source 1..54: mol_type = other DNA
atgaggctgctgggccccagccaggagcgggagatcccccccctgctgggctag

SEQ ID NO: 154873 - DNA, 564 bp, synthetic construct
  misc_feature 1..564: note = Description of Artificial Sequence: Synthetic coding sequence
  source 1..564: mol_type = other DNA
atggccagcggggacttctgcagccctggagagggcatggagatcctgcagcaggtgtgcagcaagcagctgcccccctgcaacctgagcaaggaggacctgctgcagaacccctacttcagcaagctgctgctgaacctgagccagcacgtggatgagagcggcctgagcctgaccctggccaaggagcaggcccaggcctggaaggaggtgcggctgcacaagaccacctggctgcggtctgagatcctgcacagggtcatccaggagctgctggtggactactacgtgaagatccaggacaccaacgtgaccagcgaggacaagaagttccacgagaccctggagcagaggctgctggtgacagagctgatgaggctgctgggccccagccaggagcgggagatcccccccctgctgggcctggagaaggctgacctgctggagctgatgcccctgtctgaagattttgtgtggatgagggcccggctgcagcaggaggtggaggagcagctgaagaagaagtgcttcaccctgctgtgctactatgaccccaacagctag

SEQ ID NO: 154874 - DNA, 840 bp, synthetic construct
  misc_feature 1..840: note = Description of Artificial Sequence: Synthetic coding sequence
  source 1..840: mol_type = other DNA
atggccagcggggacttctgcagccctggagagggcatggagatcctgcagcaggtgtgcagcaagcagctgcccccctgcaacctgagcaaggaggacctgctgcagaacccctacttcagcaagctgctgctgaacctgagccagcacgtggatgagagcggcctgagcctgaccctggccaaggagcaggcccaggcctggaaggaggtgcggctgcacaagaccacctggctgcggtctgagatcctgcacagggtcatccaggagctgctggtggactactacgtgaagatccaggacaccaacgtgaccagcgaggacaagaagttccacgagaccctggagcagaggctgctggtgacagagctgatgaggctgctgggccccagccaggagcgggagatcccccccctgctgggcctggagaaggctgacctgctggagctgatgcccctgtctgaagattttgtgtggatgagggcccggctgcagcaggaggtggaggagcagctgaagaagaagtgcttcaccctgctgtgctactatgaccccaacagtgatgctgacagcgagaccgtgaaggccgccaaggtgtggaagctggccgaggtgctggtgggggagcagcagcagtgccaggatgccaagagccagcagaaggagcagatgctgctgctggagaagaagtctgctgcctacagccaggtgctgctgcgctgcctgaccctgctgcagaggctgctgcaggagcaccggctgaagacccagagcgagctggaccgcatcaatgcccagtacctggaggtgaagtgtggggccatgatcctgaagctgtag

SEQ ID NO: 154875 - DNA, 957 bp, synthetic construct; identical to SEQ ID NO: 154867
  misc_feature 1..957: note = Description of Artificial Sequence: Synthetic coding sequence
  source 1..957: mol_type = other DNA

SEQ ID NO: 154876 - DNA, 957 bp, synthetic construct; identical to SEQ ID NO: 154867
  misc_feature 1..957: note = Description of Artificial Sequence: Synthetic coding sequence
  source 1..957: mol_type = other DNA

SEQ ID NO: 154877 - DNA, 483 bp, synthetic construct
  misc_feature 1..483: note = Description of Artificial Sequence: Synthetic coding sequence
  source 1..483: mol_type = other DNA
atggccagcggggacttctgcagccctggagagggcatggagatcctgcagcaggtgtgcagcaagcagctgcccccctgcaacctgagcaaggaggacctgctgcagaacccctacttcagcaagctgctgctgaacctgagccagcacgtggatgagagcggcctgagcctgaccctggccaaggagcaggcccaggcctggaaggaggtgcggctgcacaagaccacctggctgcggtctgagatcctgcacagggtcatccaggagctgctggtggactactacgtgaagatccaggacaccaacgtgaccagcgaggacaagaagttccacgagaccctggagcagaggctgctggtgacagagctgatgaggctgctgggccccagccaggagcgggagatcccccccctgctgggcctggagaaggctgacctgctggagctgatgcccctgtctgaagattttgtgtggatgtag

SEQ ID NO: 154878 - DNA, 1902 bp, synthetic construct
  misc_feature 1..1902: note = Description of Artificial Sequence: Synthetic coding sequence
  source 1..1902: mol_type = other DNA
atggagctggcccaggaggcccgggagctgggctgctgggccgtggaggagatgggcgtgcctgtggccgcccgggcccctgagagcaccctgcggcggctgtgcctgggccagggcgctgacatctgggcctacatcctgcagcacgtgcacagccagaggacagtgaagaagatccggggcaacctgctgtggtacggccaccaggacagcccccaggtgcggaggaagctggagctggaggccgctgtgacccggctgcgggcagagatccaggagctggaccagagcctggagctgatggagcgggacacagaggcccaggacacagccatggagcaggcccggcagcacacccaggacacccagaggcgggccctgctgctgcgggcccaggccggggccatgaggcggcagcagcacaccctgcgggaccccatgcagaggctgcagaaccagctgcggcggctgcaggacatggagaggaaggccaaggtggatgtgaccttcggcagcctgaccagcgctgccctgggcctggagcctgtggtgctgagagatgtgaggacagcctgcaccctgcgggcccagttcctgcagaacctgctgctgccccaggccaagaggggcagcctgcccacccctcatgatgaccacttcggcaccagctaccagcagtggctgagctctgtggagaccctgctgaccaaccaccccccaggccacgtgctggccgccctggagcacctggccgctgagcgggaggccgagatccgcagcctgtgcagcggagatggcctgggggacacagagatcagccggccccaggccccagaccagagcgacagcagccagaccctgcccagcatggtgcacctgatccaggagggctggaggacagtgggcgtgctggtgtcccagaggagcaccctgctgaaggagcggcaggtgctgacccagaggctgcagggcctggtggaggaggtggagaggagagtgctgggcagcagcgagcggcaggtgctgatcctgggcctgcggcgctgctgcctgtggacagagctgaaggccctgcatgaccagagccaggagctgcaggatgctgctggccaccggcagctgctgctgcgggagctgcaggccaagcagcagaggatcctgcactggaggcagctggtggaggagacccaggagcaggtgcggctgctgatcaagggcaacagcgccagcaagacccggctgtgccgcagccctggagaggtgctggccctggtgcagaggaaggtggtgcccacctttgaagctgtggccccccagagccgggagctgctgcgctgcctggaggaggaggtgcgccacctgccccacatcctgctgggcaccctgctgcggcacaggcctggagagctgaagcccctgcccaccgtgctgcccagcatccaccagctgcacccagccagcccccggggcagcagcttcatcgccctgagccacaagctgggcctgcccccaggcaaggccagcgagctgctgctgcctgctgctgccagcctgcggcaggacctgctgctgctgcaggaccagaggagcctgtggtgctgggacctgctgcacatgaagaccagcctgcccccaggcctgcccacccaggagctgctgcagatccaggccagccaggagaagcagcagaaggagaacctgggccaggccctgaagaggctggagaagctgctgaagcaggccctggagcgcatccctgagctgcagggcatcgtgggggactggtgggagcagcccggccaggccgccctgtctgaggagctgtgccagggcctgagcctgccccagtggaggctgcgctgggtgcaggcccagggcgccctgcagaagctgtgcagctag

SEQ ID NO: 154879 - DNA, 873 bp, synthetic construct
  misc_feature 1..873: note = Description of Artificial Sequence: Synthetic coding sequence
  source 1..873: mol_type = other DNA
atggagctggcccaggaggcccgggagctgggctgctgggccgtggaggagatgggcgtgcctgtggccgcccgggcccctgagagcaccctgcggcggctgtgcctgggccagggcgctgacatctgggcctacatcctgcagcacgtgcacagccagaggacagtgaagaagatccggggcaacctgctgtggtacggccaccaggacagcccccaggtgcggaggaagctggagctggaggccgctgtgacccggctgcgggcagagatccaggagctggaccagagcctggagctgatggagcgggacacagaggcccaggacacagccatggagcaggcccggcagcacacccaggacacccagaggcgggccctgctgctgcgggcccaggccggggccatgaggcggcagcagcacaccctgcgggaccccatgcagaggctgcagaaccagctgcggcggctgcaggacatggagaggaaggccaaggtggatgtgaccttcggcagcctgaccagcgctgccctgggcctggagcctgtggtgctgagagatgtgaggacagcctgcaccctgcgggcccagttcctgcagaacctgctgctgccccaggccaagaggggcagcctgcccacccctcatgatgaccacttcggcaccagctaccagcagtggctgagctctgtggagaccctgctgaccaaccaccccccaggccacgtgctggccgccctggagcacctggccgctgagcgggaggccgagatccgcagcctgtgcagcggagatggcctgggggacacagagatcagccggcgggccggcggcctgtgggtgtgctggagccccagcggggcccccagctag

SEQ ID NO: 154880 - DNA, 2409 bp, synthetic construct
  misc_feature 1..2409: note = Description of Artificial Sequence: Synthetic coding sequence
  source 1..2409: mol_type = other DNA
atgaagtacatcaagagcaacagcaagaacagcagccaccactttgtggagaccttcaacatcaagccccaggacctgcacaagtgcatcgcccgctgccactttgcccggagccgcttcctgcagatcctgcagaggcaggactgtgtgacccagaagtaccaggagaatgcccagctgtctgtgaagcaggtgaggaacctgcggagtgaatgtattggcctggagaaccagatcaagaagatggagccctatgatgaccacagcaacatggaggagaagatccagaaggtgcgcagcctgtgggcctctgtgaatgagaccctgatgttcctggagaaggagcgggaggtggtgtcctctgtgctgagcctggtgaaccagtatgccctggatggcaccaacgtggccatcaacatcccccggctgctgctggacaagattgagaagcagatgttccagctgcacatcggaaatgtgtatgaagctgggaagctgaacctgctgaccgtcatccagctgctgaatgaggtgctgaaggtgatgaagtatgagcgctgccaggccgaccaggcccggctgactgtggacctgcactacctggagaaggagaccaagttccagaaggagcggctgagtgacctgaagcacatgagataccgcatcaaggatgacctgaccaccatccgccacagcgtggtggagaagcagggcgagtggcacaagaagtggaaggagttcctgggcctgagccccttcagcctcatcaagggctggacccccagcgtggacctgctgccccccatgagccccctgagctttgatcctgccagcgaggaggtgtatgccaagagcatcctgtgccagtacccagccagcctgcctgatgcccacaagcagcacaaccaggagaatggctgccgcggggacagcgacaccctgggcgccctgcatgacctggccaacagccctgccagcttcctgagccagagcgtgagcagcagtgacagaaattctgtgacagtgctggagaaggacaccaagatgggcacccccaaggagaagaatgaggccatcagcaagaagatccctgagtttgaggtggagaacagccccctgagtgatgtggccaagaacacagagagcagcgcctttggaggcagcctgcctgccaagaagagtgaccccttccagaaggagcaggaccacctggtggaggaggtggcccgggctgtgctgagtgacagcccccagctgtctgagggcaaggagatcaagctggaggagctgattgacagcctgggcagcaaccccttcctgaccaggaaccagatccccaggaccccagagaacctgatcacagagatccgcagctcctggaggaaggccatcgagatggaggagaacagaaccaaggagcccatccagatggatgctgagcaccgggaggtgctgcctgagagcctgcctgtgctgcacaaccagcgggagttctccatggctgacttcctgctggagaccaccgtgtctgactttggccagagccacctgacagaggagaaggtgatcagtgactgtgaatgtgtgccccagaagcacgtgctgaccagccacattgatgagccccccacccagaaccagagcgacctgctgaacaagaaggtgatctgcaagcaggacctggagtgcctggccttcaccaagctgtctgagaccagcaggatggagaccttcagccctgctgtgggcaacagaattgatgtgatgggcggcagcgaggaggagttcatgaagatcctggaccacctggaggtgtcctgcaacaagcccagcaccaacaagaccatgctgtggaacagcttccagatcagcagcggcatcagcagcaagagcttcaaggacaatgactttggcatcctgcacgagaccctgcctgaggaggtgggccacctgtccttcaacagcagcagcagcagcgaggccaacttcaagctggagcccaacagccccatgcacggcggcaccctgctggaggatgtggtgggcggccggcagaccaccccagagagtgacttcaacctgcaggccctgcggagccgctatgaggccctgaagaagagcctgagcaagaagcgggaggagagctacctgagcaacagccagaccccagagcggcacaagccagagctgagccccaccccccagaatgtgcagacagatgacaccctgaacttcctggacacctgtgacctgcacacagagcacatcaagcccagcctgcggaccagcatcggggagaggaagaggagcctgagccccctcatcaagttcagccctgtggagcagaggctgcggaccaccatcgcctgcagcctgggggagctgcccaacctgaagggcaaggtgtag

SEQ ID NO: 154881 - DNA, 2868 bp, synthetic construct
  misc_feature 1..2868: note = Description of Artificial Sequence: Synthetic coding sequence
  source 1..2868: mol_type = other DNA
atgagcagcgcctctgtgacagcctttgagaaggagcacctgtggatgtacctgcaggccctgggctttgagcccggccctgccaccatcgcctgtgggaagatcgtgagccacacccacctgggcgtgaacatgtttgacaagctgaacagagatgccttccacatcatctcctacttcctgttccaggtgctggaccagagcctgaccaaggaggtgttcaagttctgctggcccccatttgaccagaagagtgacacagagttcaggaagcactgctgtgagtggatcaagaggatctctggagaatgtggcagcagcttcccccaggtggtgggcagcctcttcctgagccctgggggccccaagttcatccacctgatgtaccactttgccaggtttgtggccatgaagtacatcaagagcaacagcaagaacagcagccaccactttgtggagaccttcaacatcaagccccaggacctgcacaagtgcatcgcccgctgccactttgcccggagccgcttcctgcagatcctgcagaggcaggactgtgtgacccagaagtaccaggagaatgcccagctgtctgtgaagcaggtgaggaacctgcggagtgaatgtattggcctggagaaccagatcaagaagatggagccctatgatgaccacagcaacatggaggagaagatccagaaggtgcgcagcctgtgggcctctgtgaatgagaccctgatgttcctggagaaggagcgggaggtggtgtcctctgtgctgagcctggtgaaccagtatgccctggatggcaccaacgtggccatcaacatcccccggctgctgctggacaagattgagaagcagatgttccagctgcacatcggaaatgtgtatgaagctgggaagctgaacctgctgaccgtcatccagctgctgaatgaggtgctgaaggtgatgaagtatgagcgctgccaggccgaccaggcccggctgactgtggacctgcactacctggagaaggagaccaagttccagaaggagcggctgagtgacctgaagcacatgagataccgcatcaaggatgacctgaccaccatccgccacagcgtggtggagaagcagggcgagtggcacaagaagtggaaggagttcctgggcctgagccccttcagcctcatcaagggctggacccccagcgtggacctgctgccccccatgagccccctgagctttgatcctgccagcgaggaggtgtatgccaagagcatcctgtgccagtacccagccagcctgcctgatgcccacaagcagcacaaccaggagaatggctgccgcggggacagcgacaccctgggcgccctgcatgacctggccaacagccctgccagcttcctgagccagagcgtgagcagcagtgacagaaattctgtgacagtgctggagaaggacaccaagatgggcacccccaaggagaagaatgaggccatcagcaagaagatccctgagtttgaggtggagaacagccccctgagtgatgtggccaagaacacagagagcagcgcctttggaggcagcctgcctgccaagaagagtgaccccttccagaaggagcaggaccacctggtggaggaggtggcccgggctgtgctgagtgacagcccccagctgtctgagggcaaggagatcaagctggaggagctgattgacagcctgggcagcaaccccttcctgaccaggaaccagatccccaggaccccagagaacctgatcacagagatccgcagctcctggaggaaggccatcgagatggaggagaacagaaccaaggagcccatccagatggatgctgagcaccgggaggtgctgcctgagagcctgcctgtgctgcacaaccagcgggagttctccatggctgacttcctgctggagaccaccgtgtctgactttggccagagccacctgacagaggagaaggtgatcagtgactgtgaatgtgtgccccagaagcacgtgctgaccagccacattgatgagccccccacccagaaccagagcgacctgctgaacaagaaggtgatctgcaagcaggacctggagtgcctggccttcaccaagctgtctgagaccagcaggatggagaccttcagccctgctgtgggcaacagaattgatgtgatgggcggcagcgaggaggagttcatgaagatcctggaccacctggaggtgtcctgcaacaagcccagcaccaacaagaccatgctgtggaacagcttccagatcagcagcggcatcagcagcaagagcttcaaggacaatgactttggcatcctgcacgagaccctgcctgaggaggtgggccacctgtccttcaacagcagcagcagcagcgaggccaacttcaagctggagcccaacagccccatgcacggcggcaccctgctggaggatgtggtgggcggccggcagaccaccccagagagtgacttcaacctgcaggccctgcggagccgctatgaggccctgaagaagagcctgagcaagaagcgggaggagagctacctgagcaacagccagaccccagagcggcacaagccagagctgagccccaccccccagaatgtgcagacagatgacaccctgaacttcctggacacctgtgacctgcacacagagcacatcaagcccagcctgcggaccagcatcggggagaggaagaggagcctgagccccctcatcaagttcagccctgtggagcagaggctgcggaccaccatcgcctgcagcctgggggagctgcccaacctgaaggaggaggacatcctgaacaagagcctggatgccaaggagcccccaagtgacctgaccaggtag

SEQ ID NO: 154882 - DNA, 552 bp, synthetic construct
  misc_feature 1..552: note = Description of Artificial Sequence: Synthetic coding sequence
  source 1..552: mol_type = other DNA
atgggcacccccaaggagaagaatgaggccatcagcaagaagatccctgagtttgaggtggagaacagccccctgagtgatgtggccaagaacacagagagcagcgcctttggaggcagcctgcctgccaagaagagtgaccccttccagaaggagcaggaccacctggtggaggaggtggcccgggctgtgctgagtgacagcccccagctgtctgagggcaaggagatcaagctggaggagctgattgacagcctgggcagcaaccccttcctgaccaggaaccagatccccaggaccccagagaacctgatcacagagatccgcagctcctggaggaaggccatcgagatggaggagaacagaaccaaggagcccatccagatggatgctgagcaccgggaggtgctgcctgagagcctgcctgtgctgcacaaccagcgggagttctccatggctgacttcctgctggagaccaccgtgtctgactttggccagagccacctgacagaggagaaggtgatcagtgactgtgaatgtgtgccccagtag

SEQ ID NO: 154883 - DNA, 1077 bp, synthetic construct
  misc_feature 1..1077: note = Description of Artificial Sequence: Synthetic coding sequence
  source 1..1077: mol_type = other DNA
atggccggccaggatgctggctgcggcagaggaggagatgactacagtgaagatgaaggagacagctctgtgtccagagctgctgtggaggtgtttgggaagctgaaggacctgaactgccccttcctggagggcctgtacatcacagagcccaagaccatccaggagctgctgtgcagccccagcgagtaccgcctggagatcctggagtggatgtgcaccagggtgtggcccagcctgcaggaccgcttcagcagcctgaagggcgtgcccacagaggtgaagatccaggagatgaccaagctgggccacgagctgatgctgtgtgccccagatgaccaggagctgctgaagggctgtgcctgtgcccagaagcagctgcacttcatggaccagctgctggacaccatccgcagcctgaccatcggctgcagcagctgcagcagcctgatggagcactttgaggacacccgggagaagaatgaggccctgctgggggagctgttcagcagcccccacctgcagatgctgctgaacccagaatgtgacccctggcccctggacatgcagcccctgctgaacaagcagagtgatgactggcagtgggccagcgccagcgccaagtctgaggaggaggagaagctggccgagctggcccggcagctgcaggagagcgctgccaagctgcacgccctgaggacagagtactttgcccagcacgagcagggcgctgctgctggagctgctgacatcagcaccctggaccagaagctgcggctggtgaccagtgacttccaccagctgatcctggccttcctgcaggtgtatgatgatgagctgggggagtgctgccagaggcctggccctgacctgcacccctgtggccccatcatccaggccacccaccagaacctgaccagctacagccagctgctgcaggtggtgatggctgtggccgacaccagcgccaaggctgtggagaccgtgaagaagcagcagggcgagcagatctgctggggcggcagcagctctgtgatgagcctggccaccaagatgaatgagctgatggagaagtag

SEQ ID NO: 154884 - DNA, 1284 bp, synthetic construct
  misc_feature 1..1284: note = Description of Artificial Sequence: Synthetic coding sequence
  source 1..1284: mol_type = other DNA
atgggcggggcccggctgggcgccaggaacatggccggccaggatgctggctgcggcagaggaggagatgactacagtgaagatgaaggagacagctctgtgtccagagctgctgtggaggtgtttgggaagctgaaggacctgaactgccccttcctggagggcctgtacatcacagagcccaagaccatccaggagctgctgtgcagccccagcgagtaccgcctggagatcctggagtggatgtgcaccagggtgtggcccagcctgcaggaccgcttcagcagcctgaagggcgtgcccacagaggtgaagatccaggagatgaccaagctgggccacgagctgatgctgtgtgccccagatgaccaggagctgctgaagggctgtgcctgtgcccagaagcagctgcacttcatggaccagctgctggacaccatccgcagcctgaccatcggctgcagcagctgcagcagcctgatggagcactttgaggacacccgggagaagaatgaggccctgctgggggagctgttcagcagcccccacctgcagatgctgctgaacccagaatgtgacccctggcccctggacatgcagcccctgctgaacaagcagagtgatgactggcagtgggccagcgccagcgccaagtctgaggaggaggagaagctggccgagctggcccggcagctgcaggagagcgctgccaagctgcacgccctgaggacagagtactttgcccagcacgagcagggcgctgctgctggagctgctgacatcagcaccctggaccagaagctgcggctggtgaccagtgacttccaccagctgatcctggccttcctgcaggtgtatgatgatgagctgggggagtgctgccagaggcctggccctgacctgcacccctgtggccccatcatccaggccacccaccagaacctgaccagctacagccagatcccccggggccagcccaagaagccagccctggtgaccatgaccaccgtgcccacctgtgccaccctgcccctggcccagggcttcagagatgtgcacttcggcttcctgtctgagcggctgcgggccttccagcccctgaccggctggagctgtgagacccccaggagcggcatgctgctgcaggtggtgatggctgtggccgacaccagcgccaaggctgtggagaccgtgaagaagcagcagggcgagcagatctgctggggcggcagcagctctgtgatgagcctggccaccaagatgaatgagctgatggagaagtag

SEQ ID NO: 154885 - DNA, 1107 bp, synthetic construct
  misc_feature 1..1107: note = Description of Artificial Sequence: Synthetic coding sequence
  source 1..1107: mol_type = other DNA
atgggcggggcccggctgggcgccaggaacatggccggccaggatgctggctgcggcagaggaggagatgactacagtgaagatgaaggagacagctctgtgtccagagctgctgtggaggtgtttgggaagctgaaggacctgaactgccccttcctggagggcctgtacatcacagagcccaagaccatccaggagctgctgtgcagccccagcgagtaccgcctggagatcctggagtggatgtgcaccagggtgtggcccagcctgcaggaccgcttcagcagcctgaagggcgtgcccacagaggtgaagatccaggagatgaccaagctgggccacgagctgatgctgtgtgccccagatgaccaggagctgctgaagggctgtgcctgtgcccagaagcagctgcacttcatggaccagctgctggacaccatccgcagcctgaccatcggctgcagcagctgcagcagcctgatggagcactttgaggacacccgggagaagaatgaggccctgctgggggagctgttcagcagcccccacctgcagatgctgctgaacccagaatgtgacccctggcccctggacatgcagcccctgctgaacaagcagagtgatgactggcagtgggccagcgccagcgccaagtctgaggaggaggagaagctggccgagctggcccggcagctgcaggagagcgctgccaagctgcacgccctgaggacagagtactttgcccagcacgagcagggcgctgctgctggagctgctgacatcagcaccctggaccagaagctgcggctggtgaccagtgacttccaccagctgatcctggccttcctgcaggtgtatgatgatgagctgggggagtgctgccagaggcctggccctgacctgcacccctgtggccccatcatccaggccacccaccagaacctgaccagctacagccagctgctgcaggtggtgatggctgtggccgacaccagcgccaaggctgtggagaccgtgaagaagcagcagggcgagcagatctgctggggcggcagcagctctgtgatgagcctggccaccaagatgaatgagctgatggagaagtag

SEQ ID NO: 154886 - DNA, 411 bp, synthetic construct
  misc_feature 1..411: note = Description of Artificial Sequence: Synthetic coding sequence
  source 1..411: mol_type = other DNA
atggaccagctgctggacaccatccgcagcctgaccatcggctgcagcagctgcagcagcctgatggagcactttgaggacacccgggagaagaatgaggccctgctgggggagctgttcagcagcccccacctgcagatgctgctgaacccagaatgtgacccctggcccctggacatgcagcccctgctgaacaagcagagtgatgactggcagtgggccagcgccagcgccaagtctgaggaggaggagaagctggccgagctggcccggcagctgcaggagagcgctgccaagctgcacgccctgaggacagagagcaccaccacctcctgggccagcgctgccagcgcccaggccctgaccagcacccgggccgcccccagcagccggcccaggacccgcatctag

SEQ ID NO: 154887 - DNA, 516 bp, synthetic construct
  misc_feature 1..516: note = Description of Artificial Sequence: Synthetic coding sequence
  source 1..516: mol_type = other DNA
atggtgaagagaagaagaagccctgccctgggggaggagcgcttcagccccagcagcatcctgcacccccggctgcccctggtgctgctgggcaccagggtgcccctgagcggcggcggccctggagagccagaccagggccgcagcgcccccagctggaagagcctggccagcacccaccaccacagcaggcctgctgctggggccaccccagcccggcctgccacccagagccagctgggcccctttgccccacccctgcccggggtgcggcctgcccccttccctgctgtggaggtgtttgggaagctgaaggacctgaactgccccttcctggagggcctgtacatcacagagcccaagaccatccaggagctgctgtgcagccccagcgagtaccgcctggagatcctggagtggatgtgcaccagggtgtggcccagcctgcaggaccgcttcagcagcctgaagggcgtgcccacagaggtgaagatccagggcctgctggccggctag

SEQ ID NO: 154888 - DNA, 1233 bp, synthetic construct
  misc_feature 1..1233: note = Description of Artificial Sequence: Synthetic coding sequence
  source 1..1233: mol_type = other DNA
atggctgacagcagcggcagaggagctgggaagccagccaccggccccaccaacagcagcagcgccaagaagaaggacaagagggtgcagggcggccgggtgattgagagccgctacctgcagtatgagaagaagaccacccagaaggccccagctggagatggcagccagacccggggcaagatgtctgagggcggcaggaagagcagcctgctgcagaagagcaaggctgacagcagcggcgtgggcaagggggacctgcagagcaccctgctggagggccatggaacagcccccccagacctggacctgagcgccatcaatgacaagagcatcgtgaagaagaccccccagctggccaagaccatcagcaagaagccagagagcaccagcttcagcgcccccaggaagaagagcccagacctgtctgaggccatggagatgatggagagccagaccctgctgctgaccctgctgtctgtgaagatggagaacaacctggccgagtttgagcggcgggcagagaagaacctgctgatcatgtgcaaggagaaggagaagctgcagaagaaggcccacgagctgaagaggcggctgctgctgagccagaggaagcgggagctggctgatgtgctggatgcccagatcgagatgctgagcccctttgaggccgtggccacccgcttcaaggagcagtaccgcacctttgccacagccctggacaccaccaggcatgagctgcctgtgcgcagcatccacctggagggagatggccagcagctgctggatgccctgcagcacgagctggtgaccacccagaggctgctgggggagctggatgtgggggacagcgaggagaatgtgcaggtgctggacctgctgtctgagctgaaggatgtgacagccaagaaggacctggagctgcggcgcagctttgcccaggtgctggagctgtctgctgaggccagcaaggaggccgccctggccaaccaggaggtgtgggaggagacccagggcatggccccacccagccgctggtacttcaaccaggacagcgcctgccgggagagcggcggggcccccaagaacacccccctgtctgaagatgacaaccctggggccagcagcgccccagcccaggccaccttcatcagccccagcgaggacttcagcagcagcagccaggccgaggtgccccccagcctgagccgcagcggccgggacctgtcctag

SEQ ID NO: 154889 - DNA, 1230 bp, synthetic construct
  misc_feature 1..1230: note = Description of Artificial Sequence: Synthetic coding sequence
  source 1..1230: mol_type = other DNA
atggctgacagcagcggcagaggagctgggaagccagccaccggccccaccaacagcagcagcgccaagaagaaggacaagagggtgcagggcggccgggtgattgagagccgctacctgcagtatgagaagaagaccacccagaaggccccagctggagatggcagccagacccggggcaagatgtctgagggcggcaggaagagcagcctgctgcagaagagcaaggacagcagtggagtgggcaaaggagacctgcagagcaccctgctggagggccacggcacagcccccccagacctggacctgagcgccatcaatgacaagagcatcgtgaagaagaccccccagctggccaagaccatcagcaagaagccagagagcaccagcttcagcgcccccaggaagaagagcccagacctgtctgaggccatggagatgatggagagccagaccctgctgctgaccctgctgtctgtgaagatggagaacaacctggccgagtttgaaagaagagctgagaagaacctgctgatcatgtgcaaggagaaggagaagctgcagaagaaggcccacgagctgaagaggcggctgctgctgagccagaggaagcgggagctggctgatgtgctggatgcccagatcgagatgctgagcccctttgaagctgtggccacccgcttcaaggagcagtaccgcacctttgccacagccctggacaccaccaggcatgagctgcctgtgcgcagcatccacctggagggagatggccagcagctgctggatgccctgcagcacgagctggtgaccacccagaggctgctgggggagctggatgtgggggacagtgaagaaaatgtgcaggtgctggacctgctgtctgagctgaaggatgtgacagccaagaaggacctggagctgcggcgcagctttgcccaggtgctggagctgtctgctgaggccagcaaggaggccgccctggccaaccaggaggtgtgggaggagacccagggcatggccccacccagccgctggtacttcaaccaggacagcgcctgccgggagagcggcggggcccccaagaacacccccctgtctgaagatgacaaccctggggccagcagcgccccagcccaggccaccttcatcagccccagcgaggacttcagcagcagcagccaggccgaggtgccccccagcctgagccgcagcggccgggacctgtcctag

SEQ ID NO: 154890 - DNA, 1899 bp, synthetic construct
  misc_feature 1..1899: note = Description of Artificial Sequence: Synthetic coding sequence
  source 1..1899: mol_type = other DNA
atggcccggcacagaaatgtgcggggctacaactatgatgaggactttgaagatgatgacctgtatggccagagcgtggaggatgactactgcatcagccccagcacagctgcccagttcatctacagccggcgggacaagcccagcgtggagcctgtggaggagtatgactatgaggacctgaaggagagcagcaacagcgtgagcaaccaccagctgagcggctttgaccaggcccggctgtacagctgcctggaccacatgagggaggtgctgggagatgctgtgcctgatgagatcctgattgaggccgtgctgaagaacaagtttgatgtgcagaaggccctgtctggagtgctggagcaggacagagtgcagagcctgaaggacaagaatgaggccaccgtgtccacaggcaagatcgccaagggcgtgctcttcagcagcagcgaggtgtctgctgacaacgtgcagagcagctacccccagagcgccaaccacctggactacagcagcaagccctttgattttgccagctctgtgggcaagtatggcctgagccacaacagctctgtgcccacccactgcctgctgcacaggaagaagaagctggacaccaggaagtctgagaagaagctggagagctgcaagctgaccaaggagctgagcctggccaacctgattcatgacatgagccgggacagctgtgagagccagcccagcgtgcggctgagcagcacagacagcctggagagcctgctgagcaagaacctggatgctgacctgctgcggccccacgccagcgagtgcatcagcaaggatgacagcgccttcaaggagatcccagacctgaagaccatcatcatcaagggcaccacccccaacaacagcctgtacatccagaacaacagcctgagtgacttccagaacatccctgtgcaggacagcctgggcagcagcaacaaccccctgtacctgaccagcagcctggagaacatgacagtggacaacctgaatgccagcaaggagacagaggtgggcaatgtgtccctggtggagcagagcgccaagaaccacaccttcaagaatgacaacctgcagttcagccagtgtgagagccccagcctgacagagctgttccaggagcacaaggagaacaacatcagccagtgcttcaccctgagtgacctgtgcaaccagagcagcgccagcttcacagacctgagcctgggcagcttccccctgagccagctggccaaccgctgccagagcagccctggcatcagcgagctgaccggcagcctgagcagcctggccttccacaaggccagccccacccgggacctggagaacctgagcctgtctgagctgattgctgagaccattgatgtggacaacagccagatcaagaaggagagctttgaggtgtccctgtctgaggtgcgcagccctggcatcgacagcaacatcgacctgtctgtgctgatcaagaacccagactttgtgcccaagcctgtggtggaccccagcatcgcccccagcagcaggaccaaggtgctgagcagcaagctgggcaagaacagcaactttgccaaggacaacaagaagaacaacaagggcagcctgaccaggaagccacccttcagcctgtcctggaccaaggccctggccgcccggcccagcgcctttgccagcaccctgtgcctgcgctaccccctgaagagctgcaagaggaggaccctggacctgtacaagaccttcctgtacagccggcaggtgcaggatgtgaaggacaaggagatcagccccctggtggccatcaccccatttgacttcaagagcgccagcccagatgacatcgtgaaggccaaccagaagaaggccttcacccgggagtag

SEQ ID NO: 154891 - DNA, 1563 bp, synthetic construct
  misc_feature 1..1563: note = Description of Artificial Sequence: Synthetic coding sequence
  source 1..1563: mol_type = other DNA
atgacagtgtctgggaagaagcagaccatgggctttgaggtgcctggggtgtccagtgaagaaaatggccacagcttccacaccccccagaagggcccccccattgaagatgccatcgccagcagtgatgtgctggagacagccagcaagagcgccaaccccccccacaccatccaggccagcgaggagcagagcagcaccccagcccctgtgaagaagagcggcaagctgcggcagcagattgatgtgaaggccgagctggagaagaggcagggcggcaagcagctgctgaacctggtggtgattggccacgtggatgctgggaagagcaccctgatgggccacatgctgtacctgctgggcaacatcaacaagaggaccatgcacaagtatgagcaggagagcaagaaggccggcaaggccagctttgcctatgcctgggtgctggatgagaccggggaggagcgggagcggggcgtgaccatggatgtgggcatgaccaagtttgagaccaccaccaaggtgatcaccctgatggatgcccctggccacaaggacttcatccccaacatgatcactggagctgcccaggctgatgtggccgtgctggtggtggatgccagcagaggagaatttgaggccggctttgagaccggcggccagacccgggagcacggcctgctggtgcgcagcctgggcgtgacccagctggccgtggccgtgaacaagatggaccaggtgaactggcagcaggagcgcttccaggagatcaccgggaagctgggccacttcctgaagcaggccggcttcaaggagagtgatgtgggcttcatccccaccagcggcctgagcggggagaacctgatcaccaggagccagagcagcgagctgaccaagtggtacaagggcctgtgcctgctggagcagattgacagcttcaagccaccccagaggagcattgacaagcccttccggctgtgtgtgtctgatgtgttcaaggaccagggcagcggcttctgcatcaccgggaagattgaagctggctacatccagacaggagaccggctgctggccatgcccccaaatgagacctgcaccgtgaagggcatcaccctgcatgatgagcctgtggactgggccgccgccggggaccacgtgtccctgaccctggtgggcatggacatcatcaagatcaacgtgggctgcatcttctgtggccccaaggtgcccatcaaggcctgcacccgcttccgggcccgcatcctgatcttcaacatcgagatccccatcaccaagggcttccctgtgctgctgcactaccagacagtgtctgagcctgctgtgatcaagaggctcatctctgtgctgaacaagagcactggagaggtgaccaagaagaagcccaagttcctgaccaagggccagaatgccctggtggagctgcagacccagaggcccatcgccctggagctgtacaaggacttcaaggagctgggccgcttcatgctgcgctatggaggcagcaccatcgccgccggcgtggtgacagagatcaaggagtag

SEQ ID NO: 154892 - DNA, 1929 bp, synthetic construct
  misc_feature 1..1929: note = Description of Artificial Sequence: Synthetic coding sequence
  source 1..1929: mol_type = other DNA
atggcccggcacagaaatgtgcggggctacaactatgatgaggactttgaagatgatgacctgtatggccagagcgtggaggatgactactgcatcagccccagcacagcccggctgtacagctgcctggaccacatgagggaggtgctgggagatgctgtgcctgatgagatcctgattgaggccgtgctgaagaacaagtttgatgtgcagaaggccctgtctggagtgctggagcaggacagagtgcagagcctgaaggacaagaatgaggccaccgtgtccacaggcaagatcgccaagggcaagcctgtggacagccagaccagccgctctgagagcgagatcgtgcccaaggtggccaagatgacagtgtctgggaagaagcagaccatgggctttgaggtgcctggggtgtccagtgaagaaaatggccacagcttccacaccccccagaagggcccccccattgaagatgccatcgccagcagtgatgtgctggagacagccagcaagagcgccaaccccccccacaccatccaggccagcgaggagcagagcagcaccccagcccctgtgaagaagagcggcaagctgcggcagcagattgatgtgaaggccgagctggagaagaggcagggcggcaagcagctgctgaacctggtggtgattggccacgtggatgctgggaagagcaccctgatgggccacatgctgtacctgctgggcaacatcaacaagaggaccatgcacaagtatgagcaggagagcaagaaggccggcaaggccagctttgcctatgcctgggtgctggatgagaccggggaggagcgggagcggggcgtgaccatggatgtgggcatgaccaagtttgagaccaccaccaaggtgatcaccctgatggatgcccctggccacaaggacttcatccccaacatgatcactggagctgcccaggctgatgtggccgtgctggtggtggatgccagcagaggagaatttgaggccggctttgagaccggcggccagacccgggagcacggcctgctggtgcgcagcctgggcgtgacccagctggccgtggccgtgaacaagatggaccaggtgaactggcagcaggagcgcttccaggagatcaccgggaagctgggccacttcctgaagcaggccggcttcaaggagagtgatgtgggcttcatccccaccagcggcctgagcggggagaacctgatcaccaggagccagagcagcgagctgaccaagtggtacaagggcctgtgcctgctggagcagattgacagcttcaagccaccccagaggagcattgacaagcccttccggctgtgtgtgtctgatgtgttcaaggaccagggcagcggcttctgcatcaccgggaagattgaagctggctacatccagacaggagaccggctgctggccatgcccccaaatgagacctgcaccgtgaagggcatcaccctgcatgatgagcctgtggactgggccgccgccggggaccacgtgtccctgaccctggtgggcatggacatcatcaagatcaacgtgggctgcatcttctgtggccccaaggtgcccatcaaggcctgcacccgcttccgggcccgcatcctgatcttcaacatcgagatccccatcaccaagggcttccctgtgctgctgcactaccagacagtgtctgagcctgctgtgatcaagaggctcatctctgtgctgaacaagagcactggagaggtgaccaagaagaagcccaagttcctgaccaagggccagaatgccctggtggagctgcagacccagaggcccatcgccctggagctgtacaaggacttcaaggagctgggccgcttcatgctgcgctatggaggcagcaccatcgccgccggcgtggtgacagagatcaaggagtag

SEQ ID NO: 154893 - DNA, 2055 bp, synthetic construct
  misc_feature 1..2055: note = Description of Artificial Sequence: Synthetic coding sequence
  source 1..2055: mol_type = other DNA
atggcccggcacagaaatgtgcggggctacaactatgatgaggactttgaagatgatgacctgtatggccagagcgtggaggatgactactgcatcagccccagcacagctgcccagttcatctacagccggcgggacaagcccagcgtggagcctgtggaggagtatgactatgaggacctgaaggagagcagcaacagcgtgagcaaccaccagctgagcggctttgaccaggcccggctgtacagctgcctggaccacatgagggaggtgctgggagatgctgtgcctgatgagatcctgattgaggccgtgctgaagaacaagtttgatgtgcagaaggccctgtctggagtgctggagcaggacagagtgcagagcctgaaggacaagaatgaggccaccgtgtccacaggcaagatcgccaagggcaagcctgtggacagccagaccagccgctctgagagcgagatcgtgcccaaggtggccaagatgacagtgtctgggaagaagcagaccatgggctttgaggtgcctggggtgtccagtgaagaaaatggccacagcttccacaccccccagaagggcccccccattgaagatgccatcgccagcagtgatgtgctggagacagccagcaagagcgccaaccccccccacaccatccaggccagcgaggagcagagcagcaccccagcccctgtgaagaagagcggcaagctgcggcagcagattgatgtgaaggccgagctggagaagaggcagggcggcaagcagctgctgaacctggtggtgattggccacgtggatgctgggaagagcaccctgatgggccacatgctgtacctgctgggcaacatcaacaagaggaccatgcacaagtatgagcaggagagcaagaaggccggcaaggccagctttgcctatgcctgggtgctggatgagaccggggaggagcgggagcggggcgtgaccatggatgtgggcatgaccaagtttgagaccaccaccaaggtgatcaccctgatggatgcccctggccacaaggacttcatccccaacatgatcactggagctgcccaggctgatgtggccgtgctggtggtggatgccagcagaggagaatttgaggccggctttgagaccggcggccagacccgggagcacggcctgctggtgcgcagcctgggcgtgacccagctggccgtggccgtgaacaagatggaccaggtgaactggcagcaggagcgcttccaggagatcaccgggaagctgggccacttcctgaagcaggccggcttcaaggagagtgatgtgggcttcatccccaccagcggcctgagcggggagaacctgatcaccaggagccagagcagcgagctgaccaagtggtacaagggcctgtgcctgctggagcagattgacagcttcaagccaccccagaggagcattgacaagcccttccggctgtgtgtgtctgatgtgttcaaggaccagggcagcggcttctgcatcaccgggaagattgaagctggctacatccagacaggagaccggctgctggccatgcccccaaatgagacctgcaccgtgaagggcatcaccctgcatgatgagcctgtggactgggccgccgccggggaccacgtgtccctgaccctggtgggcatggacatcatcaagatcaacgtgggctgcatcttctgtggccccaaggtgcccatcaaggcctgcacccgcttccgggcccgcatcctgatcttcaacatcgagatccccatcaccaagggcttccctgtgctgctgcactaccagacagtgtctgagcctgctgtgatcaagaggctcatctctgtgctgaacaagagcactggagaggtgaccaagaagaagcccaagttcctgaccaagggccagaatgccctggtggagctgcagacccagaggcccatcgccctggagctgtacaaggacttcaaggagctgggccgcttcatgctgcgctatggaggcagcaccatcgccgccggcgtggtgacagagatcaaggagtag

SEQ ID NO: 154894 - DNA, 1227 bp, synthetic construct
  misc_feature 1..1227: note = Description of Artificial Sequence: Synthetic coding sequence
  source 1..1227: mol_type = other DNA
atgggccacatgctgtacctgctgggcaacatcaacaagaggaccatgcacaagtatgagcaggagagcaagaaggccggcaaggccagctttgcctatgcctgggtgctggatgagaccggggaggagcgggagcggggcgtgaccatggatgtgggcatgaccaagtttgagaccaccaccaaggtgatcaccctgatggatgcccctggccacaaggacttcatccccaacatgatcactggagctgcccaggctgatgtggccgtgctggtggtggatgccagcagaggagaatttgaggccggctttgagaccggcggccagacccgggagcacggcctgctggtgcgcagcctgggcgtgacccagctggccgtggccgtgaacaagatggaccaggtgaactggcagcaggagcgcttccaggagatcaccgggaagctgggccacttcctgaagcaggccggcttcaaggagagtgatgtgggcttcatccccaccagcggcctgagcggggagaacctgatcaccaggagccagagcagcgagctgaccaagtggtacaagggcctgtgcctgctggagcagattgacagcttcaagccaccccagaggagcattgacaagcccttccggctgtgtgtgtctgatgtgttcaaggaccagggcagcggcttctgcatcaccgggaagattgaagctggctacatccagacaggagaccggctgctggccatgcccccaaatgagacctgcaccgtgaagggcatcaccctgcatgatgagcctgtggactgggccgccgccggggaccacgtgtccctgaccctggtgggcatggacatcatcaagatcaacgtgggctgcatcttctgtggccccaaggtgcccatcaaggcctgcacccgcttccgggcccgcatcctgatcttcaacatcgagatccccatcaccaagggcttccctgtgctgctgcactaccagacagtgtctgagcctgctgtgatcaagaggctcatctctgtgctgaacaagagcactggagaggtgaccaagaagaagcccaagttcctgaccaagggccagaatgccctggtggagctgcagacccagaggcccatcgccctggagctgtacaaggacttcaaggagctgggccgcttcatgctgcgctatggaggcagcaccatcgccgccggcgtggtgacagagatcaaggagtag

SEQ ID NO: 154895 - DNA, 840 bp, synthetic construct
  misc_feature 1..840: note = Description of Artificial Sequence: Synthetic coding sequence
  source 1..840: mol_type = other DNA
atgagcctgtttgacctcttccggggcttcttcggcttccctggccccaggagccaccgggaccccttcttcggcggcatgaccagagatgaagatgatgatgaggaggaggaggaggagggcggctcctggggccggggcaacccccgcttccacagcccccagcaccccccagaggagtttggatttggcttctccttcagccctgggggcggcatccgcttccatgacaactttggatttgatgacctggtgcgggacttcaacagcatcttcagtgacatgggcgcctggaccctgcccagccaccccccagagctgcccggccctgagagcgagaccccaggagagcggctgcgggagggccagaccctgcgggacagcatgctgaagtacccagacagccaccagccccgcatctttggaggagtgctggagagtgatgcccggtctgagagcccccagcctgccccagactggggcagccagaggcccttccacagatttgatgatgtgtggcccatggacccccaccccaggaccagagaagataatgacctggacagccaggtgtcccaggagggcctgggccctgtgctgcagccccagcccaagagctacttcaagagcatctctgtgaccaagatcaccaagccagatggcatcgtggaggagaggagaacagtggtggacagcgagggccgcacagagaccaccgtgaccaggcatgaagctgacagcagccccaggggggaccctgagagcccccggcccccagccctggatgatgccttcagcatcctggacctcttcctgggccgctggttccgcagcaggtag

SEQ ID NO: 154896 - DNA, 696 bp, synthetic construct
  misc_feature 1..696: note = Description of Artificial Sequence: Synthetic coding sequence
  source 1..696: mol_type = other DNA
atgagcctgtttgacctcttccggggcttcttcggcttccctggccccaggagcttcagccctgggggcggcatccgcttccatgacaactttggatttgatgacctggtgcgggacttcaacagcatcttcagtgacatgggcgcctggaccctgcccagccaccccccagagctgcccggccctgagagcgagaccccaggagagcggctgcgggagggccagaccctgcgggacagcatgctgaagtacccagacagccaccagccccgcatctttggaggagtgctggagagtgatgcccggtctgagagcccccagcctgccccagactggggcagccagaggcccttccacagatttgatgatgtgtggcccatggacccccaccccaggaccagagaagataatgacctggacagccaggtgtcccaggagggcctgggccctgtgctgcagccccagcccaagagctacttcaagagcatctctgtgaccaagatcaccaagccagatggcatcgtggaggagaggagaacagtggtggacagcgagggccgcacagagaccaccgtgaccaggcatgaagctgacagcagccccaggggggaccctgagagcccccggcccccagccctggatgatgccttcagcatcctggacctcttcctgggccgctggttccgcagcaggtag

SEQ ID NO: 154897 - DNA, 864 bp, synthetic construct
  misc_feature 1..864: note = Description of Artificial Sequence: Synthetic coding sequence
  source 1..864: mol_type = other DNA
atgagcctgtttgacctcttccggggcttcttcggcttccctggccccaggagccaccgggaccccttcttcggcggcatgaccagagatgaagatgatgatgaggaggaggaggaggagggcggctcctggggccggggcaacccccgcttccacagcccccagcaccccccagaggagtttggatttggcttctccttcagccctgggggcggcatccgcttccatgacaactttggatttgatgacctggtgcgggacttcaacagcatcttcagtgacatgggcgcctggaccctgcccagccaccccccagccaacacctgccacctgtctgctgagctgcccggccctgagagcgagaccccaggagagcggctgcgggagggccagaccctgcgggacagcatgctgaagtacccagacagccaccagccccgcatctttggaggagtgctggagagtgatgcccggtctgagagcccccagcctgccccagactggggcagccagaggcccttccacagatttgatgatgtgtggcccatggacccccaccccaggaccagagaagataatgacctggacagccaggtgtcccaggagggcctgggccctgtgctgcagccccagcccaagagctacttcaagagcatctctgtgaccaagatcaccaagccagatggcatcgtggaggagaggagaacagtggtggacagcgagggccgcacagagaccaccgtgaccaggcatgaagctgacagcagccccaggggggaccctgagagcccccggcccccagccctggatgatgccttcagcatcctggacctcttcctgggccgctggttccgcagcaggtag

SEQ ID NO: 154898 - DNA, 1179 bp, synthetic construct
  misc_feature 1..1179: note = Description of Artificial Sequence: Synthetic coding sequence
  source 1..1179: mol_type = other DNA
atgcagagccctgctgtgctggtgaccagccggcggctgcagaatgcccacacaggcctggacctgactgtgccccagcaccaggaggtgcggggcaagatgatgagcggccacgtggagtaccagatcctggtggtgacccggctggccgccttcaagagcgccaagcacaggccagaagatgtggtgcagttcctggtgtccaagaagtacagcgagattgaggagttctaccagaagctgagcagccgctatgctgctgccagcctgccccccctgcccaggaaggtgctgtttgtgggggagagtgacatccgggagcggcgggctgtgttcaatgagatcctgcgctgtgtgtccaaggatgctgagctggccggcagccctgagctgctggagttcctgggcaccaggagccctggagctgctggcctgaccagccgggacagctctgtgctggatggaacagacagccagacaggaaatgatgaggaggcctttgacttctttgaggagcaggaccaggtggccgaggagggcccccctgtgcagagcctgaagggagaagatgctgaggagagcctggaggaggaggaggccctggaccccctgggcatcatgaggagcaagaagcccaagaagcaccccaaggtggccgtgaaggccaagcccagcccccggctgaccatctttgatgaggaggtggaccctgatgagggcctgtttggacctggcaggaagctgagcccccaggaccccagtgaagatgtgtcctctgtggaccccctgaagctgtttgatgatcctgacctgggcggggccatccccctgggggacagcctgctgctgcctgctgcctgtgagagcggcggccccacccccagcctgagccacagagatgccagcaaggagctgttccgggtggaggaggacctggaccagatcctgaacctgggcgctgagcccaagcccaagccccagctgaagcccaagccccctgtggccgccaagcctgtgatccccaggaagccagctgtgccccccaaggccggccctgctgaggccgtggccggccagcagaagccccaggagcagatccaggccatggatgagatggacatcctgcagtacatccaggaccatgacaccccagcccaggccgcccccagcctcttctag

SEQ ID NO: 154899 - DNA, 654 bp, synthetic construct
  misc_feature 1..654: note = Description of Artificial Sequence: Synthetic coding sequence
  source 1..654: mol_type = other DNA
atgagcctggtgggcggcttcccccaccaccctgtggtgcaccacgagggctacccctttgctgctgctgctgctgctgctgctgctgctgctgccagccgctgcagccatgaggagaacccctacttccacggctggctgattggccaccctgagatgagccccccagactacagcatggccctgagctacagcccagaatatgccagcggggctgctggcctggaccacagccactacggcggcgtgcccccaggagctggccccccaggcctgggcggccccaggcctgtgaagaggcggggcacagccaacaggaaggagaggaggaggacccagagcatcaacagcgcctttgctgagctgcgggagtgcatccccaacgtgcctgctgacaccaagctgagcaagatcaagaccctgcggctggccaccagctacatcgcctacctgatggacctgctggccaaggatgaccagaatggagaggccgaggccttcaaggccgagatcaagaagacagatgtgaaggaggagaagaggaagaaggagctgaatgagatcctgaagagcacagtgagcagcaatgacaagaagaccaagggccgcacaggctggccccagcacgtgtgggccctggagctgaagcagtag

SEQ ID NO: 154900 - DNA, 561 bp, synthetic construct
  misc_feature 1..561: note = Description of Artificial Sequence: Synthetic coding sequence
  source 1..561: mol_type = other DNA
atgagcctggtgggcggcttcccccaccaccctgtggtgcaccacgagggctacccctttgctgctgctgctgctgctgctgctgctgctgctgccagccgctgcagccatgaggagaacccctacttccacggctggctgattggccaccctgagatgagccccccagactacagcatggccctgagctacagcccagaatatgccagcggcacagccaacaggaaggagaggaggaggacccagagcatcaacagcgcctttgctgagctgcgggagtgcatccccaacgtgcctgctgacaccaagctgagcaagatcaagaccctgcggctggccaccagctacatcgcctacctgatggacctgctggccaaggatgaccagaatggagaggccgaggccttcaaggccgagatcaagaagacagatgtgaaggaggagaagaggaagaaggagctgaatgagatcctgaagagcacagtgagcagcaatgacaagaagaccaagggccgcacaggctggccccagcacgtgtgggccctggagctgaagcagtag

SEQ ID NO: 154901 - DNA, 498 bp, synthetic construct
  misc_feature 1..498: note = Description of Artificial Sequence: Synthetic coding sequence
  source 1..498: mol_type = other DNA
atgagccccccagactacagcatggccctgagctacagcccagaatatgccagcggggctgctggcctggaccacagccactacggcggcgtgcccccaggagctggccccccaggcctgggcggccccaggcctgtgaagaggcggggcacagccaacaggaaggagaggaggaggacccagagcatcaacagcgcctttgctgagctgcgggagtgcatccccaacgtgcctgctgacaccaagctgagcaagatcaagaccctgcggctggccaccagctacatcgcctacctgatggacctgctggccaaggatgaccagaatggagaggccgaggccttcaaggccgagatcaagaagacagatgtgaaggaggagaagaggaagaaggagctgaatgagatcctgaagagcacagtgagcagcaatgacaagaagaccaagggccgcacaggctggccccagcacgtgtgggccctggagctgaagcagtag

SEQ ID NO: 154902 - DNA, 2577 bp, synthetic construct
  misc_feature 1..2577: note = Description of Artificial Sequence: Synthetic coding sequence
  source 1..2577: mol_type = other DNA
atgtctgtggtgggcctggatgtgggcagccagagctgctacatcgctgtggcccgggccggcggcatcgagaccatcgccaatgagttcagtgaccgctgcaccccatctgtcatcagctttggcagcaagaacagaaccatcggcgtggccgccaagaaccagcagatcacccacgccaacaacacagtgagcaacttcaagcgcttccacggccgggccttcaatgaccccttcatccagaaggagaaggagaacctgtcctatgacctggtgcccctgaagaatggaggagtgggcatcaaggtgatgtacatgggagaggagcacctgttctctgtggagcagatcacagccatgctgctgaccaagctgaaggagacagctgagaacagcctgaagaagcctgtgacagactgtgtgatctctgtgcccagcttcttcacagatgctgagaggagatctgtgctggatgctgcccagatcgtgggcctgaactgcctgcggctgatgaatgacatgacagctgtggccctgaactacggcatctacaagcaggacctgcccagcctggatgagaagcccagaattgtggtgtttgtggacatgggccacagcgccttccaggtgtctgcctgtgccttcaacaagggcaagctgaaggtgctgggcacagcctttgaccccttcctgggcggcaagaactttgatgagaagctggtggagcacttctgtgccgagttcaagaccaagtacaagctggatgccaagagcaagatccgggccctgctgcggctgtaccaggagtgtgagaagctgaagaagctgatgagcagcaacagcacagacctgcccctgaacatcgagtgcttcatgaatgacaaggatgtgtctgggaagatgaacagaagccagtttgaggagctgtgtgccgagctgctgcagaagattgaggtgcccctgtacagcctgctggagcagacccacctgaaggtggaggatgtgtctgctgtggagatcgtgggcggggccacccgcatcccagctgtgaaggagcgcatcgccaagttcttcggcaaggacatcagcaccaccctgaatgctgatgaagctgtggcccggggctgtgccctgcagtgtgccatcctgagccctgccttcaaggtgcgggagttctctgtgacagatgctgtgcccttccccatcagcctcatctggaaccacgacagcgaggacacagaaggagtgcatgaggtgttcagcaggaaccacgccgcccccttcagcaaggtgctgaccttcctgcggcggggcccctttgagctggaggccttctacagcgacccccagggcgtgccctacccagaggccaagattggccgctttgtggtgcagaatgtgtctgcccagaaggatggagagaagagccgggtgaaggtgaaggtgcgggtgaacacccacggcatcttcaccatcagcacagcctccatggtggagaaggtgcccacagaagaaaatgagatgagcagcgaggccgacatggagtgcctgaaccagaggcccccagaaaatccagacacagacaagaatgtgcagcaggacaacagcgaggccggcacccagccccaggtgcagacagatgcccagcagaccagccagagcccccccagccctgagctgaccagcgaggagaacaagatcccagatgctgacaaggccaatgagaagaaggtggaccagcccccagaggccaagaagcccaagatcaaggtggtgaatgtggagctgcccatcgaggccaacctggtgtggcagctgggcaaggacctgctgaacatgtacattgaaacagagggcaagatgatcatgcaggacaagctggagaaggagagaaatgatgccaagaatgctgtggaggagtatgtgtatgagttccgggacaagctgtgtggcccctatgagaagttcatctgtgagcaggaccaccagaacttcctgcggctgctgacagaaacagaggactggctgtatgaggagggggaggaccaggccaagcaggcctacgtggacaagctggaggagctgatgaagattggcacccctgtgaaggtgcgcttccaggaggccgaggagcggcccaagatgtttgaggagctgggccagaggctgcagcactacgccaagattgctgctgacttcaggaacaaggatgagaagtacaaccacattgatgagagcgagatgaagaaggtggagaagtctgtgaatgaggtgatggagtggatgaacaacgtgatgaatgcccaggccaagaagagcctggaccaggaccctgtggtgcgggcccaggagatcaagaccaagatcaaggagctgaacaacacctgtgagcctgtggtgacccagcccaagcccaagattgagagccccaagctggagaggaccccaaatggccccaacatcgacaagaaggaggaggacctggaggacaagaacaactttggagctgagcccccccaccagaatggagagtgctacccaaatgagaagaacagcgtgaacatggacctggactag

SEQ ID NO: 154903 - DNA, 414 bp, synthetic construct
  misc_feature 1..414: note = Description of Artificial Sequence: Synthetic coding sequence
  source 1..414: mol_type = other DNA
atgtttgaggagctgggccagaggctgcagcactacgccaagattgctgctgacttcaggaacaaggatgagaagtacaaccacattgatgagagcgagatgaagaaggtggagaagtctgtgaatgaggtgatggagtggatgaacaacgtgatgaatgcccaggccaagaagagcctggaccaggaccctgtggtgcgggcccaggagatcaagaccaagatcaaggagctgaacaacacctgtgagcctgtggtgacccagcccaagcccaagattgagagccccaagctggagaggaccccaaatggccccaacatcgacaagaaggaggaggacctggaggacaagaacaactttggagctgagcccccccaccagaatgacagctgtggcatcgtgaacagctactag

SEQ ID NO: 154904 - DNA, 2034 bp, synthetic construct
  misc_feature 1..2034: note = Description of Artificial Sequence: Synthetic coding sequence
  source 1..2034: mol_type = other DNA
atgtacatgggagaggagcacctgttctctgtggagcagatcacagccatgctgctgaccaagctgaaggagacagctgagaacagcctgaagaagcctgtgacagactgtgtgatctctgtgctgggcacagcctttgaccccttcctgggcggcaagaactttgatgagaagctggtggagcacttctgtgccgagttcaagaccaagtacaagctggatgccaagagcaagatccgggccctgctgcggctgtaccaggagtgtgagaagctgaagaagctgatgagcagcaacagcacagacctgcccctgaacatcgagtgcttcatgaatgacaaggatgtgtctgggaagatgaacagaagccagtttgaggagctgtgtgccgagctgctgcagaagattgaggtgcccctgtacagcctgctggagcagacccacctgaaggtggaggatgtgtctgctgtggagatcgtgggcggggccacccgcatcccagctgtgaaggagagaattgccaagttcttcggcaaggacatcagcaccaccctgaatgctgatgaggccgtggcccggggctgtgccctgcagtgtgccatcctgagccctgccttcaaggtgcgggagttctctgtgacagatgctgtgcccttccccatcagcctcatctggaaccatgattctgaggacacagagggcgtgcatgaggtgttcagcagaaatcatgctgcccccttcagcaaggtgctgaccttcctgcggcggggcccctttgagctggaggccttctacagcgacccccagggcgtgccctacccagaggccaagattggccgctttgtggtgcagaatgtgtctgcccagaaggatggagagaagagccgggtgaaggtgaaggtgcgggtgaacacccacggcatcttcaccatcagcacagcctccatggtggagaaggtgcccacagaggagaatgagatgagcagcgaggccgacatggagtgcctgaaccagaggcctcctgagaacccagacacagacaagaatgtgcagcaggacaacagcgaggccggcacccagccccaggtgcagacagatgcccagcagaccagccagagcccccccagccctgagctgaccagcgaggagaacaagatcccagatgctgacaaggccaatgagaagaaggtggaccagcccccagaggccaagaagcccaagatcaaggtggtgaatgtggagctgcccatcgaggccaacctggtgtggcagctgggcaaggacctgctgaacatgtacatcgagacagagggcaagatgatcatgcaggacaagctggagaaggagagaaatgatgccaagaatgctgtggaggagtatgtgtatgagttccgggacaagctgtgtggcccctatgagaagttcatctgtgagcaggaccaccagaacttcctgcggctgctgacagaaacagaggactggctgtatgaggagggggaggaccaggccaagcaggcctacgtggacaagctggaggagctgatgaagattggcacccctgtgaaggtgcgcttccaggaggccgaggagcggcccaagatgtttgaggagctgggccagaggctgcagcactacgccaagattgctgctgacttcaggaacaaggatgagaagtacaaccacattgatgaaagtgagatgaagaaggtggagaagtctgtgaatgaggtgatggagtggatgaacaacgtgatgaatgcccaggccaagaagagcctggaccaggaccctgtggtgcgggcccaggagatcaagaccaagatcaaggagctgaacaacacctgtgagcctgtggtgacccagcccaagcccaagattgagagccccaagctggagaggacccccaacggccccaacatcgacaagaaggaggaggacctggaggacaagaacaactttggagctgagcccccccaccagaatggagagtgctacccaaatgagaagaacagcgtgaacatggacctggactag

SEQ ID NO: 154905 - DNA, 1920 bp, synthetic construct
  misc_feature 1..1920: note = Description of Artificial Sequence: Synthetic coding sequence
  source 1..1920: mol_type = other DNA
atggcccgggagcggccctgccgctgccacggcaatggaggccgcagccctggcaccggctgccccctgggccgcatcttccctgagggcagcagaagaaggaagaggaagtggcacgtggagggccctgtggaggcccccagaaatggccagacccccagggctggagctgagcggggccagggcaggaagaggcggcaggagaagcaggccggcggcatcgagaccatcgccaatgagttcagtgaccgctgcacccccagcgtcatcagctttggcagcaagaacagaaccatcggcgtggccgccaagaaccagcagatcacccacgccaacaacacagtgagcaacttcaagcgcttccacggccgggccttcaatgaccccttcatccagaaggagaaggagaacctgtcctatgacctggtgcccctgaagaatggaggagtgggcatcaaggtgatgtacatgggagaggagcacctgttctctgtggagcagatcacagccatgctgctgaccaagctgaaggagacagctgagaacagcctgaagaagcctgtgacagactgtgtgatctctgtgcccagcttcttcacagatgctgagcggcgctctgtgctggatgctgcccagatcgtgggcctgaactgcctgcggctgatgaatgacatgacagctgtggccctgaactacggcatctacaagcaggacctgcccagcctggatgagaagccccgcatcgtggtgtttgtggacatgggccacagcgccttccaggtgtctgcctgtgccttcaacaagggcaagctgaaggtgctgggcacagcctttgaccccttcctgggcggcaagaactttgatgagaagctggtggagcacttctgtgccgagttcaagaccaagtacaagctggatgccaagagcaagatccgggccctgctgcggctgtaccaggagtgtgagaagctgaagaagctgatgagcagcaacagcacagacctgcccctgaacatcgagtgcttcatgaatgacaaggatgtgtctgggaagatgaacagaagccagtttgaggagctgtgtgccgagctgctgcagaagattgaggtgcccctgtacagcctgctggagcagacccacctgaaggtggaggatgtgtctgctgtggagatcgtgggcggggccacccgcatcccagctgtgaaggagagaattgccaagttcttcggcaaggacatcagcaccaccctgaatgctgatgaggccgtggcccggggctgtgccctgcagtgtgccatcctgagccctgccttcaaggtgcgggagttctctgtgacagatgctgtgcccttccccatcagcctcatctggaaccatgattctgaggacacagagggcgtgcatgaggtgttcagcagaaatcatgctgcccccttcagcaaggtgctgaccttcctgcggcggggcccctttgagctggaggccttctacagcgacccccagggcgtgccctacccagaggccaagattggccgctttgtggtgcagaatgtgtctgcccagaaggatggagagaagagccgggtgaaggtgaaggtgcgggtgaacacccacggcatcttcaccatcagcacagcctccatggtggagaaggtgcccacagaggagaatgagatgagcagcgaggccgacatggagtgcctgaaccagaggcctcctgagaacccagacacagacaagaatgtgcagcaggacaacagcgaggccggcacccagccccaggtgcagacagatgcccagcagaccagccagagcccccccagccctgagctgaccagcgaggagaacaagatcccagatgctgacaagcagatgaagaagaagctgaccagcctgcagaagctgaagagccccaagtag

SEQ ID NO: 154906 - DNA, 2583 bp, synthetic construct
  misc_feature 1..2583: note = Description of Artificial Sequence: Synthetic coding sequence
  source 1..2583: mol_type = other DNA
atggccacagctgctgtgctgcggggccctgctgcccactgggtggagagcttccagaaggcccgggaggagggcagcggcagcggcacctggaggggccgctggaggagaagaagtgtcatcagctttggcagcaagaacagaaccatcggcgtggccgccaagaaccagcagatcacccacgccaacaacacagtgagcaacttcaagcgcttccacggccgggccttcaatgaccccttcatccagaaggagaaggagaacctgtcctatgacctggtgcccctgaagaatggaggagtgggcatcaaggtgatgtacatgggagaggagcacctgttctctgtggagcagatcacagccatgctgctgaccaagctgaaggagacagctgagaacagcctgaagaagcctgtgacagactgtgtgatctctgtgcccagcttcttcacagatgctgagaggagatctgtgctggatgctgcccagatcgtgggcctgaactgcctgcggctgatgaatgacatgacagctgtggccctgaactacggcatctacaagcaggacctgcccagcctggatgagaagcccagaattgtggtgtttgtggacatgggccacagcgccttccaggtgtctgcctgtgccttcaacaagggcaagctgaaggtgctgggcacagcctttgaccccttcctgggcggcaagaactttgatgagaagctggtggagcacttctgtgccgagttcaagaccaagtacaagctggatgccaagagcaagatccgggccctgctgcggctgtaccaggagtgtgagaagctgaagaagctgatgagcagcaacagcacagacctgcccctgaacatcgagtgcttcatgaatgacaaggatgtgtctgggaagatgaacagaagccagtttgaggagctgtgtgccgagctgctgcagaagattgaggtgcccctgtacagcctgctggagcagacccacctgaaggtggaggatgtgtctgctgtggagatcgtgggcggggccacccgcatcccagctgtgaaggagcgcatcgccaagttcttcggcaaggacatcagcaccaccctgaatgctgatgaagctgtggcccggggctgtgccctgcagtgtgccatcctgagccctgccttcaaggtgcgggagttctctgtgacagatgctgtgcccttccccatcagcctcatctggaaccacgacagcgaggacacagaaggagtgcatgaggtgttcagcaggaaccacgccgcccccttcagcaaggtgctgaccttcctgcggcggggcccctttgagctggaggccttctacagcgacccccagggcgtgccctacccagaggccaagattggccgctttgtggtgcagaatgtgtctgcccagaaggatggagagaagagccgggtgaaggtgaaggtgcgggtgaacacccacggcatcttcaccatcagcacagcctccatggtggagaaggtgcccacagaagaaaatgagatgagcagcgaggccgacatggagtgcctgaaccagaggcccccagaaaatccagacacagacaagaatgtgcagcaggacaacagcgaggccggcacccagccccaggtgcagacagatgcccagcagaccagccagagcccccccagccctgagctgaccagcgaggagaacaagatcccagatgctgacaaggccaatgagaagaaggtggaccagcccccagaggccaagaagcccaagatcaaggtggtgaatgtggagctgcccatcgaggccaacctggtgtggcagctgggcaaggacctgctgaacatgtacattgaaacagagggcaagatgatcatgcaggacaagctggagaaggagagaaatgatgccaagaatgctgtggaggagtatgtgtatgagttccgggacaagctgtgtggcccctatgagaagttcatctgtgagcaggaccaccagaacttcctgcggctgctgacagaaacagaggactggctgtatgaggagggggaggaccaggccaagcaggcctacgtggacaagctggaggagctgatgaagattggcacccctgtgaaggtgcgcttccaggaggccgaggagcggcccaagatgtttgaggagctgggccagaggctgcagcactacgccaagattgctgctgacttcaggaacaaggatgagaagtacaaccacattgatgagagcgagatgaagaaggtggagaagtctgtgaatgaggtgatggagtggatgaacaacgtgatgaatgcccaggccaagaagagcctggaccaggaccctgtggtgcgggcccaggagatcaagaccaagatcaaggagctgaacaacacctgtgagcctgtggtgacccagcccaagcccaagattgagagccccaagctggagaggaccccaaatggccccaacatcgacaagaaggaggaggacctggaggacaagaacaactttggagctgagcccccccaccagaatggagagtgctacccaaatgagaagaacagcgtgaacatggacctggactag

SEQ ID NO: 154907 - DNA, 582 bp, synthetic construct
  misc_feature 1..582: note = Description of Artificial Sequence: Synthetic coding sequence
  source 1..582: mol_type = other DNA
atggacagcaccctggccgtgcagcagtacatccagcagaacatccgggctgactgcagcaacatcgacaagatcctggagcccccagagggccaggatgaaggagtgtggaagtatgagcacctgcggcagttctgcctggagctgaatggcctggccgtgaagctgcagagcgagtgccacccagacacctgcacccagatgacagccacagagcagtggatcttcctgtgtgccgcccacaagacccccaaggagtgcccagccatcgactacaccaggcacaccctggatggagctgcctgcctgctgaacagcaacaagtacttccccagccgggtgtccatcaaggagagctctgtggccaagctgggctctgtgtgccgccgcatctaccgcatcttcagccacgcctacttccaccaccggcagatctttgatgaatatgaaaatgagaccttcctgtgccaccgcttcaccaagtttgtgatgaagtacaacctgatgagcaaggacaacctgattgtgcccatcctggaggaggaggtgcagaacagcgtgtctggagagagcgaggcctag

SEQ ID NO: 154908 - DNA, 306 bp, synthetic construct
  misc_feature 1..306: note = Description of Artificial Sequence: Synthetic coding sequence
  source 1..306: mol_type = other DNA
atggccggccaggccttcaggaagttcctgcccctgtttgacagagtgctggtggagaggtctgctgctgagaccgtgaccaagggcggcatcatgctgcctgagaagagccagggcaaggtgctgcaggccaccgtggtggccgtgggcagcggcagcaagggcaagggcggggagatccagcctgtgtctgtgaaggtgggggacaaggtgctgctgcctgaatatggaggcaccaaggtggtgctggatgacaaggtgtgcaagctgaacaacagcaagaagaagagtgacatctgcaactag

SEQ ID NO: 154909 - DNA, 144 bp, synthetic construct
  misc_feature 1..144: note = Description of Artificial Sequence: Synthetic coding sequence
  source 1..144: mol_type = other DNA
atgggcggggagatccagcctgtgtctgtgaaggtgggggacaaggtgctgctgcctgaatatggaggcaccaaggtggtgctggatgacaaggactacttcctgttcagagatggagacatcctgggcaagtatgtggactag

SEQ ID NO: 154910 - DNA, 591 bp, synthetic construct
  misc_feature 1..591: note = Description of Artificial Sequence: Synthetic coding sequence
  source 1..591: mol_type = other DNA
atggctgatggccagatgcccttcagctgccactaccccagccggctgcggcgggaccccttccgggacagccccctgagcagccggctgctggatgatggcttcggcatggaccccttcccagatgacctgacagcctcctggccagactgggccctgccccggctgagcagcgcctggccaggcaccctgcggagcggcatggtgccccggggccccacagccacagccaggtttggagtgcctgctgagggccgcaccccaccacccttccctggagagccctggaaggtgtgtgtgaatgtgcacagcttcaagccagaggagctgatggtgaagaccaaggatggctacgtggaggtgtctgggaagcatgaggagaagcagcaggagggcggcatcgtgtccaagaacttcaccaagaagatccagctgcctgctgaggtggaccctgtgacagtgtttgccagcctgagccctgagggcctgctgatcatcgaggccccccaggtgcccccctacagcacctttggagagagcagcttcaacaatgagctgccccaggacagccaggaggtgacctgcacctag

SEQ ID NO: 154911 - DNA, 453 bp, synthetic construct
  misc_feature 1..453: note = Description of Artificial Sequence: Synthetic coding sequence
  source 1..453: mol_type = other DNA
atggccaagatcatcctgcggcacctgattgagatccctgtgcgctaccaggaggagtttgaggcccggggcctggaggactgccgcctggaccacgccctgtatgccctgcccggccccaccatcgtggacctgaggaagacccgggccgcccagagcccccctgtggacagcgctgctgagaccccaccccgggagggcaagagccacttccagatcctgctggatgtggtgcagttcctgcctgaggacatcatcatccagacctttgagggctggctgctgatcaaggcccagcacggcaccaggatggatgaacatggcttcatcagccgctccttcacccggcagtacaagctgcctgatggagtggagatcaaggacctgtctgctgtgctgtgccatgatggcatcctggtggtggaggtgaaggaccctgtgggcaccaagtag

SEQ ID NO: 154912 - DNA, 513 bp, synthetic construct
  misc_feature 1..513: note = Description of Artificial Sequence: Synthetic coding sequence
  source 1..513: mol_type = other DNA
atgagccacaggaccagcagcaccttccgggcagagaggagcttccacagcagcagcagcagcagcagcagcagcaccagcagcagcgccagccgggccctgcctgcccaggacccccccatggagaaggccctgtccatgttcagtgatgactttggcagcttcatgaggccccacagcgagcccctggccttccctgcccggcctggaggagctggcaacatcaagaccctgggagatgcctatgaatttgctgtggatgtgcgggacttcagccctgaggacatcatcgtgaccaccagcaacaaccacatcgaggtgcgggcagagaagctggccgcagatggcaccgtgatgaacacctttgcccacaagtgccagctgcctgaagatgtggaccccacctctgtgaccagcgccctgagagaagatggcagcctgaccatccgggcccggcggcacccccacacagaacatgtgcagcagaccttcagaacagagatcaagatctag

SEQ ID NO: 154913 - DNA, 792 bp, synthetic construct
  misc_feature 1..792: note = Description of Artificial Sequence: Synthetic coding sequence
  source 1..792: mol_type = other DNA
atgagcggctgtgagctgagccccctgggcctgcgggtgggcctgtctgctggccctgcccatggaagacgcttccctgcccccagcggcccctggaggggcctgaacctggccagccggcagggcgccggccccaagccccgggacagccggccctacaaggctgctgctgtgggcgcctggcacgcccggcctgaggcctgtgcccacaccctgagctgcccagccctggcccggctgggccgggccaggagaagaccctggatgagccacaggaccagcagcaccttccgggcagagaggagcttccacagcagcagcagcagcagcagcagcagcaccagcagcagcgccagccgggccctgcctgcccaggacccccccatggagaaggccctgtccatgttcagtgatgactttggcagcttcatgaggccccacagcgagcccctggccttccctgctgcccaccccacagcccggcctgggggcgccggcaacatcaagaccctgggagatgcctatgaatttgctgtggatgtgcgggacttctccccagaggacatcatcgtgaccaccagcaacaaccacatcgaggtgcgggcagagaagctggccgcagatggcaccgtgatgaacacctttgcccacaagtgccagctgcctgaagatgtggaccccacctctgtgaccagcgccctgcgggaggatggcagcctgaccatccgggcccggcggcacccccacacagagcacgtgcagcagaccttcagaacagagatcaagatctag

SEQ ID NO: 154914 - DNA, 528 bp, synthetic construct
  misc_feature 1..528: note = Description of Artificial Sequence: Synthetic coding sequence
  source 1..528: mol_type = other DNA
atgagccacaggaccagcagcaccttccgggcagagaggagcttccacagcagcagcagcagcagcagcagcagcaccagcagcagcgccagccgggccctgcctgcccaggacccccccatggagaaggccctgtccatgttcagtgatgactttggcagcttcatgaggccccacagcgagcccctggccttccctgctgcccaccccacagcccggcctgggggcgccggcaacatcaagaccctgggagatgcctatgaatttgctgtggatgtgcgggacttctccccagaggacatcatcgtgaccaccagcaacaaccacatcgaggtgcgggcagagaagctggccgcagatggcaccgtgatgaacacctttgcccacaagtgccagctgcctgaagatgtggaccccacctctgtgaccagcgccctgcgggaggatggcagcctgaccatccgggcccggcggcacccccacacagagcacgtgcagcagaccttcagaacagagatcaagatctag

SEQ ID NO: 154915 - DNA, 207 bp, synthetic construct
  misc_feature 1..207: note = Description of Artificial Sequence: Synthetic coding sequence
  source 1..207: mol_type = other DNA
atgagccacaggaccagcagcaccttccgggcagagaggagcttccacagcagcagcagcagcagcagcagcagcaccagcagcagcgccagccgggccctgcctgcccaggacccccccatggagaaggccctgtccatgttcagtgatgactttggcagcttcatgaggccccacagcgagcccctggccttccctgggaagtag

SEQ ID NO: 154916 - DNA, 1722 bp, synthetic construct
  misc_feature 1..1722: note = Description of Artificial Sequence: Synthetic coding sequence
  source 1..1722: mol_type = other DNA
atgctgcggctgcccaccgtcttccggcagatgaggcctgtgtcccgggtgctggccccccacctgacccgggcctatgccaaggatgtgaagtttggagcagatgcccgggccctgatgctgcagggcgtggacctgctggctgatgctgtggccgtgaccatgggccccaagggccgcaccgtcatcatcgagcagagctggggcagccccaaggtgaccaaggatggagtgacagtggccaagagcattgacctgaaggacaagtacaagaacattggagccaagctggtgcaggatgtggccaacaacaccaatgaggaggccggagatggcaccaccacagccaccgtgctggcccggagcatcgccaaggagggctttgagaagatcagcaaaggagccaaccctgtggagatcagaagaggagtgatgctggccgtggatgctgtgattgctgagctgaagaagcagagcaagcctgtgaccaccccagaggagatcgcccaggtggccaccatcagcgccaatggagacaaggagatcggcaacatcatcagtgatgccatgaagaaggtgggcaggaagggcgtcatcaccgtgaaggatggcaagaccctgaatgatgagctggagatcatcgagggcatgaagtttgaccggggctacatcagcccctacttcatcaacaccagcaagggccagaagtgtgagttccaggatgcctacgtgctgctgtctgagaagaagatcagcagcatccagagcatcgtgcctgccctggagatcgccaatgcccacaggaagcccctggtgatcatcgccgaggatgtggatggagaggccctgagcaccctggtgctgaaccggctgaaggtgggcctgcaggtggtggccgtgaaggcccctggctttggagacaacaggaagaaccagctgaaggacatggccatcgccaccggcggcgctgtgtttggagaggagggcctgaccctgaacctggaggatgtgcagccccatgacctgggcaaggtgggggaggtgattgtgaccaaggatgatgccatgctgctgaagggcaaaggagacaaggcccagatcgagaagaggatccaggagatcatcgagcagctggatgtgaccaccagtgaatatgagaaggagaagctgaatgaaaggctggccaagctgagtgatggagtggccgtgctgaaggtgggcggcaccagtgatgtggaggtgaatgagaagaaggacagagtgacagatgccctgaatgccaccagggctgctgtggaggagggcatcgtgctgggcggcggctgtgccctgctgcgctgcatcccagccctggacagcctgaccccagccaatgaagaccagaagattggaattgagatcatcaagaggaccctgaagatcccagccatgaccatcgccaagaatgccggcgtggagggcagcctcatcgtggagaagatcatgcagagcagcagcgaggtgggctatgatgccatggccggggactttgtgaacatggtggagaagggcatcatcgaccccaccaaggtggtgaggacagccctgctggatgctgctggggtggccagcctgctgaccacagctgaggtggtggtgacagagatccccaaggaggagaaggaccccggcatgggcgccatgggcggcatgggcggcggcatgggcggcggcatgttttag

SEQ ID NO: 154917 - DNA, 1722 bp, synthetic construct; identical to SEQ ID NO: 154916
  misc_feature 1..1722: note = Description of Artificial Sequence: Synthetic coding sequence
  source 1..1722: mol_type = other DNA

SEQ ID NO: 154918 - DNA, 177 bp, synthetic construct
  misc_feature 1..177: note = Description of Artificial Sequence: Synthetic coding sequence
  source 1..177: mol_type = other DNA
atgctgcggctgcccaccgtcttccggcagatgaggcctgtgtcccgggtgctggccccccacctgacccgggcctatgccaaggatgtgaagtttggagcagatgcccgggccctgatgctgcagggcgtggacctgctggctgatgctgtggccgtgaccatgggccccaagtag

SEQ ID NO: 154919 - DNA, 285 bp, synthetic construct
  misc_feature 1..285: note = Description of Artificial Sequence: Synthetic coding sequence
  source 1..285: mol_type = other DNA
atgctgcggctgcccaccgtcttccggcagatgaggcctgtgtcccgggtgctggccccccacctgacccgggcctatgccaaggatgtgaagtttggagcagatgcccgggccctgatgctgcagggcgtggacctgctggctgatgctgtggccgtgaccatgggccccaagggccgcaccgtcatcatcgagcagagctggggcagccccaaggtgaccaaggatggagtgacagtggccaagagcattgacctgaaggacaagtacaagaacattggatag

SEQ ID NO: 154920 - DNA, 705 bp, synthetic construct
  misc_feature 1..705: note = Description of Artificial Sequence: Synthetic coding sequence
  source 1..705: mol_type = other DNA
atgctgcggctgcccaccgtcttccggcagatgaggcctgtgtcccgggtgctggccccccacctgacccgggcctatgccaaggatgtgaagtttggagcagatgcccgggccctgatgctgcagggcgtggacctgctggctgatgctgtggccgtgaccatgggccccaagggccgcaccgtcatcatcgagcagagctggggcagccccaaggtgaccaaggatggagtgacagtggccaagagcattgacctgaaggacaagtacaagaacattggagccaagctggtgcaggatgtggccaacaacaccaatgaggaggccggagatggcaccaccacagccaccgtgctggcccggagcatcgccaaggagggctttgagaagatcagcaaaggagccaaccctgtggagatcagaagaggagtgatgctggccgtggatgctgtgattgctgagctgaagaagcagagcaagcctgtgaccaccccagaggagatcgcccaggtggccaccatcagcgccaatggagacaaggagatcggcaacatcatcagtgatgccatgaagaaggtgggcaggaagggcgtcatcacagatggcaagaccctgaatgatgagctggagatcatcgagggcatgaagtttgaccggggctacatcagcccctacttcatcaacaccagcaagggcaagaactag

SEQ ID NO: 154921 - DNA, 252 bp, synthetic construct
  misc_feature 1..252: note = Description of Artificial Sequence: Synthetic coding sequence
  source 1..252: mol_type = other DNA
atgctgcggctgcccaccgtcttccggcagatgaggcctgtgtcccgggtgctggccccccacctgacccgggcctatgccaaggatgtgaagtttggagcagatgcccgggccctgatgctgcagggcgtggacctgctggctgatgctgtggccgtgaccatgggccccaagggccgcaccgtcatcatcgagcagagctggggcagccccaaggtgaccaaggatggagtgacagtggccaagagctag

SEQ ID NO: 154922 - DNA, 666 bp, synthetic construct
  misc_feature 1..666: note = Description of Artificial Sequence: Synthetic coding sequence
  source 1..666: mol_type = other DNA
atgctgcggctgcccaccgtcttccggcagatgaggcctgtgtcccgggtgctggccccccacctgacccgggcctatgccaaggatgtgaagtttggagcagatgcccgggccctgatgctgcagggcgtggacctgctggctgatgctgtggccgtgaccatgggccccaagggccgcaccgtcatcatcgagcagagctggggcagccccaaggtgaccaaggatggagtgacagtggccaagagcattgacctgaaggacaagtacaagaacattggagccaagctggtgcaggatgtggccaacaacaccaatgaggaggccggagatggcaccaccacagccaccgtgctggcccggagcatcgccaaggagggctttgagaagatcagcaaaggagccaaccctgtggagatcagaagaggagtgatgctggccgtggatgctgtgattgctgagctgaagaagcagagcaagcctgtgaccaccccagaggagatcgcccaggtggccaccatcagcgccaatggagacaaggagatcggcaacatcatcagtgatgccatgaagaaggtgggcaggaagggcgtcatcaccgtgaaggatggcaagaccctgaatgatgagctggagatcatcgagggcatgaagtttgacagatag

SEQ ID NO: 154923 - DNA, 738 bp, synthetic construct
  misc_feature 1..738: note = Description of Artificial Sequence: Synthetic coding sequence
  source 1..738: mol_type = other DNA
atgctggccgtggatgctgtgattgctgagctgaagaagcagagcaagcctgtgaccaccccagaggagatcgcccaggtggccaccatcagcgccaatggagacaaggagatcggcaacatcatcagtgatgccatgaagaaggtgggcaggaagggcgtcatcaccgtgaaggatggcaagaccctgaatgatgagctggagatcatcgagggcatgaagtttgaccggggctacatcagcccctacttcatcaacaccagcaagggccagaagtgtgagttccaggatgcctacgtgctgctgtctgagaagaagatcagcagcatccagagcatcgtgcctgccctggagatcgccaatgcccacaggaagcccctggtgatcatcgccgaggatgtggatggagaggccctgagcaccctggtgctgaaccggctgaaggtgggcctgcaggtggtggccgtgaaggcccctggctttggagacaacaggaagaaccagctgaaggacatggccatcgccaccggcggcgctgtgtttggagaggagggcctgaccctgaacctggaggatgtgcagccccatgacctgggcaaggtgggggaggtgattgtgaccaaggatgatgccatgctgctgaagggcaaaggagacaaggcccagatcgagaagaggatccaggagatcatcgagcagctggatgtgaccaccagtgaatatgagaaggagaactag

SEQ ID NO: 154924 - DNA, 477 bp, synthetic construct
  misc_feature 1..477: note = Description of Artificial Sequence: Synthetic coding sequence
  source 1..477: mol_type = other DNA
atgctgcggctgcccaccgtcttccggcagatgaggcctgtgtcccgggtgctggccccccacctgacccgggcctatgccaaggatgtgaagtttggagcagatgcccgggccctgatgctgcagggcgtggacctgctggctgatgctgtggccgtgaccatgggccccaagggccgcaccgtcatcatcgagcagagctggggcagccccaaggtgaccaaggatggagtgacagtggccaagagcattgacctgaaggacaagtacaagaacattggagccaagctggtgcaggatgtggccaacaacaccaatgaggaggccggagatggcaccaccacagccaccgtgctggcccggagcatcgccaaggagggctttgagaagatcagcaaaggagccaaccctgtggagatcagaagaggaagaaatgtgtgctgccaccacagcgtgctgaacttctctgtgctgtag

SEQ ID NO: 154925 - DNA, 2061 bp, synthetic construct
  misc_feature 1..2061: note = Description of Artificial Sequence: Synthetic coding sequence
  source 1..2061: mol_type = other DNA
atgctggccgtgcctgagatgggcctgcagggcctgtacatcggcagcagccctgagaggagccctgtgcccagccccccaggcagccccaggacccaggagagctgtggcatcgcccccctgacccccagccagagccccaagccagaggtgcgggccccccagcaggccagcttctctgtggtggtggccatcgactttggcaccaccagcagcggctacgccttctcctttgccagtgaccctgaggccatccacatgatgaggaagtgggagggcggggaccccggggtggcccaccagaagacccccacctgcctgctgctgaccccagagggcgccttccacagctttggctacacagcccgggactactaccatgacctggaccctgaggaggcccgggactggctgtactttgagaagttcaagatgaagatccacagcgccacagacctgaccctgaagacccagctggaggccgtgaatggcaagaccatgcctgccctggaggtgtttgcccacgccctgcgcttcttccgggagcacgccctgcaggagctgcgggagcagagccccagcctgcctgagaaggacacagtgcgctgggtgctgactgtgcctgccatctggaagcagcctgccaagcagttcatgagggaggccgcctacctggccggcctggtgtcccgggagaatgctgagcagctgctgattgccctggagcctgaggccgcctctgtgtactgcaggaagctgcggctgcaccagctgctggacctgagcggccgggcccctgggggcggccgcctgggggagcggcgcagcattgacagcagcttccggcaggcccgggagcagctgcggcgcagccgccacagcaggaccttcctggtggagagcggcgtgggggagctgtgggccgagatgcaggccggggaccgctacgtggtggccgactgtggcggcggcaccgtggacctgactgtgcaccagctggagcagccccacggcaccctgaaggagctgtacaaggccagcggcggcccctatggagctgtgggcgtggacctggcctttgagcagctgctgtgccgcatctttggagaggacttcatcgccaccttcaagaggcagaggcctgctgcctgggtggacctgaccatcgcctttgaggccaggaagaggacagctggcccccacagagctggggccctgaacatcagcctgcccttctccttcatcgacttctacaggaagcagaggggccacaacgtggagacagccctgcggcgcagctctgtgaactttgtgaagtggagcagccagggcatgctgaggatgagctgtgaggccatgaatgagctgttccagcccaccgtgtctggcatcatccagcacatcgaggccctgctggcccggcctgaggtgcagggcgtgaagctgctcttcctggtgggcggctttgctgagagcgctgtgctgcagcacgctgtgcaggccgccctgggcgcccggggcctgcgggtggtggtgccccatgatgtgggcctgaccatcctgaagggagctgtgctgtttggccaggcccctggggtggtgcgggtgagaagaagccccctgacctatggagtgggcgtgctgaacagatttgtgcccggccgccaccccccagagaagctgctggtgagagatggaagacgctggtgcacagatgtgtttgaaagatttgtggccgctgagcagagcgtggccctgggggaggaggtgagaagaagctactgcccagcccggcccggccagaggagagtgctgatcaacctgtactgctgtgccgcagaagatgcccgcttcatcacagaccccggggtgaggaaatgtggggccctgagcctggagctggagcctgctgactgtggccaggacacagctggggcccctcctggccggcgggagatccgggccgccatgcagtttggagacacagagatcaaggtgacagctgtggatgtgtccaccaacagatctgtgcgggccagcattgacttcctgagcaactag

SEQ ID NO: 154926 - DNA, 1803 bp, synthetic construct
  misc_feature 1..1803: note = Description of Artificial Sequence: Synthetic coding sequence
  source 1..1803: mol_type = other DNA
atgatgaggaagtgggagggcggggaccccggggtggcccaccagaagacccccacctgcctgctgctgaccccagagggcgccttccacagctttggctacacagcccgggactactaccatgacctggaccctgaggaggcccgggactggctgtactttgagaagttcaagatgaagatccacagcgccacagacctgaccctgaagacccagctggaggccgtgaatggcaagaccatgcctgccctggaggtgtttgcccacgccctgcgcttcttccgggagcacgccctgcaggagctgcgggagcagagccccagcctgcctgagaaggacacagtgcgctgggtgctgactgtgcctgccatctggaagcagcctgccaagcagttcatgagggaggccgcctacctggccggcctggtgtcccgggagaatgctgagcagctgctgattgccctggagcctgaggccgcctctgtgtactgcaggaagctgcggctgcaccagctgctggacctgagcggccgggcccctgggggcggccgcctgggggagcggcgcagcattgacagcagcttccggcaggcccgggagcagctgcggcgcagccgccacagcaggaccttcctggtggagagcggcgtgggggagctgtgggccgagatgcaggccggggaccgctacgtggtggccgactgtggcggcggcaccgtggacctgactgtgcaccagctggagcagccccacggcaccctgaaggagctgtacaaggccagcggcggcccctatggagctgtgggcgtggacctggcctttgagcagctgctgtgccgcatctttggagaggacttcatcgccaccttcaagaggcagaggcctgctgcctgggtggacctgaccatcgcctttgaggccaggaagaggacagctggcccccacagagctggggccctgaacatcagcctgcccttctccttcatcgacttctacaggaagcagaggggccacaacgtggagacagccctgcggcgcagctctgtgaactttgtgaagtggagcagccagggcatgctgaggatgagctgtgaggccatgaatgagctgttccagcccaccgtgtctggcatcatccagcacatcgaggccctgctggcccggcctgaggtgcagggcgtgaagctgctcttcctggtgggcggctttgctgagagcgctgtgctgcagcacgctgtgcaggccgccctgggcgcccggggcctgcgggtggtggtgccccatgatgtgggcctgaccatcctgaagggagctgtgctgtttggccaggcccctggggtggtgcgggtgagaagaagccccctgacctatggagtgggcgtgctgaacagatttgtgcccggccgccaccccccagagaagctgctggtgagagatggaagacgctggtgcacagatgtgtttgaaagatttgtggccgctgagcagagcgtggccctgggggaggaggtgagaagaagctactgcccagcccggcccggccagaggagagtgctgatcaacctgtactgctgtgccgcagaagatgcccgcttcatcacagaccccggggtgaggaaatgtggggccctgagcctggagctggagcctgctgactgtggccaggacacagctggggcccctcctggccggcgggagatccgggccgccatgcagtttggagacacagagatcaaggtgacagctgtggatgtgtccaccaacagatctgtgcgggccagcattgacttcctgagcaactag

SEQ ID NO: 154927 - DNA, 1563 bp, synthetic construct
  misc_feature 1..1563: note = Description of Artificial Sequence: Synthetic coding sequence
  source 1..1563: mol_type = other DNA
atgcctgccctggaggtgtttgcccacgccctgcgcttcttccgggagcacgccctgcaggagctgcgggagcagagccccagcctgcctgagaaggacacagtgcgctgggtgctgactgtgcctgccatctggaagcagcctgccaagcagttcatgagggaggccgcctacctggccggcctggtgtcccgggagaatgctgagcagctgctgattgccctggagcctgaggccgcctctgtgtactgcaggaagctgcggctgcaccagctgctggacctgagcggccgggcccctgggggcggccgcctgggggagcggcgcagcattgacagcagcttccggcaggcccgggagcagctgcggcgcagccgccacagcaggaccttcctggtggagagcggcgtgggggagctgtgggccgagatgcaggccggggaccgctacgtggtggccgactgtggcggcggcaccgtggacctgactgtgcaccagctggagcagccccacggcaccctgaaggagctgtacaaggccagcggcggcccctatggagctgtgggcgtggacctggcctttgagcagctgctgtgccgcatctttggagaggacttcatcgccaccttcaagaggcagaggcctgctgcctgggtggacctgaccatcgcctttgaggccaggaagaggacagctggcccccacagagctggggccctgaacatcagcctgcccttctccttcatcgacttctacaggaagcagaggggccacaacgtggagacagccctgcggcgcagctctgtgaactttgtgaagtggagcagccagggcatgctgaggatgagctgtgaggccatgaatgagctgttccagcccaccgtgtctggcatcatccagcacatcgaggccctgctggcccggcctgaggtgcagggcgtgaagctgctcttcctggtgggcggctttgctgagagcgctgtgctgcagcacgctgtgcaggccgccctgggcgcccggggcctgcgggtggtggtgccccatgatgtgggcctgaccatcctgaagggagctgtgctgtttggccaggcccctggggtggtgcgggtgagaagaagccccctgacctatggagtgggcgtgctgaacagatttgtgcccggccgccaccccccagagaagctgctggtgagagatggaagacgctggtgcacagatgtgtttgaaagatttgtggccgctgagcagagcgtggccctgggggaggaggtgagaagaagctactgcccagcccggcccggccagaggagagtgctgatcaacctgtactgctgtgccgcagaagatgcccgcttcatcacagaccccggggtgaggaaatgtggggccctgagcctggagctggagcctgctgactgtggccaggacacagctggggcccctcctggccggcgggagatccgggccgccatgcagtttggagacacagagatcaaggtgacagctgtggatgtgtccaccaacagatctgtgcgggccagcattgacttcctgagcaactag

SEQ ID NO: 154928 - DNA, 2028 bp, synthetic construct
  misc_feature 1..2028: note = Description of Artificial Sequence: Synthetic coding sequence
  source 1..2028: mol_type = other DNA
atggctgacaaggaggccggcggcagtgatggcccccgggagacagcccccaccagcgcctacagcagccctgcccggagcctgggggacaccggcatcacccccctgagccccagccacatcgtgaatgacacagacagcaatgtgtctgagcagcagagcttcctggtggtggtggccgtggactttggcaccaccagcagcggctacgcctacagcttcaccaaggagcctgagtgcatccacgtgatgaggcgctgggagggcggggaccccggggtgagcaaccagaagacccccaccaccatcctgctgaccccagagaggaagttccacagctttggctatgctgcccgggacttctaccatgacctggaccccaatgaggccaagcagtggctgtacctggagaagttcaagatgaagctgcacaccaccggggacctgaccatggacacagacctgacagctgccaacgggaagaaggtgaaggccctggagatctttgcctatgccctgcagtacttcaaggagcaggccctgaaggagctgagtgaccaggccggcagcgagtttgaaaattctgatgtgcgctgggtgatcaccgtgcctgccatctggaagcagcctgccaagcagttcatgaggcaggccgcctaccaggccggcctggccagccctgagaacagcgagcagctgatcatcgccctggagcctgaggccgccagcatctactgcaggaagctgcggctgcaccagatgattgagctgagcagcaaggctgctgtgaatggctacagcggcagtgacacagtgggcgccggcttcacccaggccaaggagcacatcagaagaaaccggcagagcaggaccttcctggtggagaatgtcatcggggagatctggagcgagctggaggagggggacaagtatgtggtggtggacagcggcggcggcaccgtggacctgactgtgcaccagatccggctgcctgagggccacctgaaggagctgtacaaggccaccggcggcccctacggcagcctgggcgtggactatgaatttgagaagctgctgtacaagatctttggagaggacttcatcgagcagttcaagatcaagaggcctgctgcctgggtggacctgatgattgcctttgagagcaggaagagagctgctgccccagacaggaccaaccccctgaacatcaccctgcccttctccttcatcgactactacaagaagttccggggccacagcgtggagcacgccctgaggaagagcaatgtggactttgtgaagtggagcagccagggcatgctgaggatgagcccagatgccatgaatgccctcttcaagcccaccatcgacagcatcatcgagcacctgcgggacctcttccagaagccagaggtgtccacagtgaagttcctgttcctggtgggcggctttgctgaggcccccctgctgcagcaggccgtgcaggccgccttcggggaccagtgccgcatcatcatcccccaggatgtgggcctgaccatcctgaagggagctgtgctgtttggcctggaccctgctgtgatcaaggtgagaagaagccccctgacctatggagtgggcgtgctgaacagatatgtggagggcaagcaccccccagagaagctgctggtgaaggatggcacccgctggtgcacagatgtgtttgacaagttcatctctgctgaccagagcgtggccctgggggagctggtgaagaggagctacaccccagccaagcccagccagctggtgattgtcatcaacatctacagcagcgagcatgacaacgtgtccttcatcacagaccccggggtgaagaagtgtggcaccctgcggctggacctgaccggcaccagcggcacagctgtgcctgcccggcgggagatccagaccctgatgcagtttggagacacagagatcaaggccacagccatcgacatcgccaccagcaagtctgtgaaggtgggcatcgacttcctgaactactag

SEQ ID NO: 154929 - DNA, 819 bp, synthetic construct
  misc_feature 1..819: note = Description of Artificial Sequence: Synthetic coding sequence
  source 1..819: mol_type = other DNA
atgaggagcctggacctggccagccagctgctgaggaaccagatcgtgacagatcctgacaacctgatggaggatgctgcctgggccaagcactgtgaccagaacctggtggccagtgatgcccctggagaggagggcaccggcatcctgaagagcaagaggacccaggccgctgaccaccagcccatcctgaagacagtgaaggccagtgatgaggactgccagctgcgcatcagtgaccgcatccgggagaccagtgacctggaggacagctgggatgagagcagcggggccggctgcagccagggcacccccagctacagcagcagccacagcctcttcagaggagctgtggccccctgccagagcagccccatggcccggctgggcgtgtctggagagcccagcccctgcaccagcaccaacagaagcaccccaggagtggccagcaccccccagacccctgtgagcagcagcagagctggctttgtgtctggaggagaccggcccctgaccagcgagcccccaccccgctgggccaggagaagaagaagatctgtggcccggaccatcgctgctgagctggctgaaaatagaaggctggcccgggagctgagcaagcgggaggaggagaagctggaccggctgattgccatcggggaggaggccagcgcccagcaggacacagccaatgagctgcggagagatgctgtgattgctgtgcggcggctggccacagctgtggaggaggccaccggggccttccagctgggcctggagaagctgctgcagaggctcatcagcaacaccaagagctag

SEQ ID NO: 154930 - DNA, 1530 bp, synthetic construct
  misc_feature 1..1530: note = Description of Artificial Sequence: Synthetic coding sequence
  source 1..1530: mol_type = other DNA
atggccgccatcggcgtgcacctgggctgcaccagcgcctgtgtggccgtgtacaaggatggccgggccggcgtggtggccaatgatgctggggacagagtgaccccagctgtggtggcctacagtgaaaatgaggagatcgtgggcctggccgccaagcagagccgcatccggaacatcagcaacacagtgatgaaggtgaagcagatcctgggccgcagcagcagtgacccccaggcccagaagtacatcgccgagagcaagtgcctggtgattgagaagaatggcaagctgcgctatgaaattgacaccggggaggagaccaagtttgtgaacccagaagatgtggcccggctcatcttcagcaagatgaaggagacagcccacagcgtgctgggcagtgatgccaatgatgtggtgatcaccgtgccctttgattttggagagaagcagaagaatgccctgggggaggccgcccgggccgccggcttcaacgtgctgcggctcatccacgagcccagcgctgccctgctggcctacggcatcggccaggacagccccaccgggaagagcaacatcctggtgttcaagctgggcggcaccagcctgagcctgtctgtgatggaggtgaacagcggcatctacagagtgctgagcaccaacacagatgacaacatcggcggggcccacttcacagagaccctggcccagtacctggccagcgagttccagaggagcttcaagcatgatgtgagaggaaatgcccgggccatgatgaagctgaccaacagcgctgaggtggccaagcacagcctgagcaccctgggcagcgccaactgcttcctggacagcctgtatgagggccaggactttgactgcaatgtgtcccgggccaggtttgagctgctgtgcagccccctcttcaacaagtgcatcgaggccatccggggcctgctggaccagaatggcttcaccgcagatgacatcaacaaggtggtgctgtgtggcggcagcagccgcatccccaagctgcagcagctgatcaaggacctcttccctgctgtggagctgctgaacagcatccccccagatgaggtgatccccatcggggccgccattgaagctggcatcctgattggcaaggagaacctgctggtggaggacagcctgatgattgaatgttctgcccgggacatcctggtgaagggcgtggatgaaagtggggccagccgcttcaccgtgctcttccccagcggcacccccctgcctgcccggcggcagcacaccctgcaggcccctggcagcatcagctctgtgtgcctggagctgtatgaaagtgatggcaagaacagcgccaaggaggagaccaagtttgcccaggtggtgctgcaggacctggacaagaaggaaaatggcctgcgggacatcctggccgtgctgaccatgaagagagatggcagcctgcacgtgacctgcacagaccaggagactggaaaatgtgaggccatcagcattgaaattgccagctag

SEQ ID NO: 154931 - DNA, 432 bp, synthetic construct
  misc_feature 1..432: note = Description of Artificial Sequence: Synthetic coding sequence
  source 1..432: mol_type = other DNA
atggccgccatcggcgtgcacctgggctgcaccagcgcctgtgtggccgtgtacaaggatggccgggccggcgtggtggccaatgatgctggggacagagtgaccccagctgtggtggcctacagtgaaaatgaggagatcgtgggcctggccgccaagcagagccgcatccggaacatcagcaacacagtgatgaaggtgaagcagatcctgggcagaagagtgctgagccgggacccccagctgcagcagctgccccagcccttccagcgctgcagctgcagcctgtctgagcagccccacggccagacaggctgtgtgcggggggcccagcccctgcaccagcaccagccccagcacagctggggcagcctgcacacagctgacagcagcctgctgtttgagagctggttctgcttctggtggggctag

SEQ ID NO: 154932 - DNA, 387 bp, synthetic construct
  misc_feature 1..387: note = Description of Artificial Sequence: Synthetic coding sequence
  source 1..387: mol_type = other DNA
tgagcctgtgtggccgtgtacaaggatggccgggccggcgtggtggccaatgatgctggggacagagtgaccccagctgtggtggcctacagtgaaaatgaggagatcgtgggcctggccgccaagcagagccgcatccggaacatcagcaacacagtgatgaaggtgaagcagatcctgggccgcagcagcagtgacccccaggcccagaagtacatcgccgagagcaagtgcctggtgattgagaagaatggcaagctgcgctatgaaattgacacaggagaggagaccaagtttgtgaacccagaagatgtggcccggctcatcttcagcaagatgaagggggcctacagcccctggagccagagcaacagtgaagatggatag

SEQ ID NO: 154933 - DNA, 1926 bp, synthetic construct
  misc_feature 1..1926: note = Description of Artificial Sequence: Synthetic coding sequence
  source 1..1926: mol_type = other DNA
atggccaaggctgctgccatcggcatcgacctgggcaccacctacagctgtgtgggcgtcttccagcacggcaaggtggagatcatcgccaatgaccagggcaacagaaccacccccagctatgtggccttcacagacacagagcggctgattggagatgctgccaagaaccaggtggccctgaacccccagaacacagtgtttgatgccaagaggctcatcggcaggaagtttggagaccctgtggtgcagagcgacatgaagcactggcccttccaggtgatcaatgatggagacaagcccaaggtgcaggtgtcctacaagggggagaccaaggccttctacccagaggagatcagctccatggtgctgaccaagatgaaggagattgctgaggcctacctgggctaccctgtgaccaatgctgtgatcaccgtgcctgcctacttcaatgacagccagaggcaggccaccaaggatgctggggtgattgctggcctgaatgtgctgcgcatcatcaatgagcccacagctgctgccatcgcctacggcctggacagaacaggcaagggggagagaaatgtgctgatctttgacctgggcggcggcacctttgatgtgtccatcctgaccattgatgatggcatctttgaggtgaaggccacagctggggacacccacctgggcggagaagattttgacaaccggctggtgaaccactttgtggaggagttcaagaggaagcacaagaaggacatcagccagaacaagagagctgtgcggcggctgaggacagcctgtgagcgggccaagaggaccctgagcagcagcacccaggccagcctggagattgacagcctgtttgagggcatcgacttctacaccagcatcacccgggccaggtttgaggagctgtgcagcgacctcttccgcagcaccctggagcctgtggagaaggccctgagagatgccaagctggacaaggcccagatccatgacctggtgctggtgggcggcagcacccgcatccccaaggtgcagaagctgctgcaggacttcttcaacggccgggacctgaacaagagcatcaacccagatgaggccgtggcctatggagctgctgtgcaggccgccatcctgatgggagacaagtcagaaaatgtgcaggacctgctgctgctggatgtggcccccctgagcctgggcctggagacagctgggggcgtgatgacagccctgatcaagaggaacagcaccatccccaccaagcagacccagatcttcaccacctacagcgacaaccagcccggggtgctgatccaggtgtatgaaggagagcgggccatgaccaaggacaacaacctgctgggccgctttgagctgagcggcatccccccagccccccggggcgtgccccagatcgaggtgacctttgatattgatgccaacggcatcctgaatgtgacagccacagacaagagcacaggcaaggccaacaagatcaccatcaccaatgacaagggccgcctgagcaaggaggagattgaaagaatggtgcaggaggccgagaagtacaaggccgaggatgaggtgcagcgggagcgggtgtctgccaagaatgccctggagagctatgccttcaacatgaagtctgctgtggaggatgagggcctgaagggcaagatcagcgaggccgacaagaagaaggtgctggacaagtgccaggaggtgatctcctggctggatgccaacaccctggccgagaaggatgaatttgagcacaagaggaaggagctggagcaggtgtgcaaccccatcatcagcggcctgtaccagggcgctgggggccctggccctgggggctttggagcccagggccccaagggcggcagcggcagcggccccaccatcgaggaggtggactag

SEQ ID NO: 154934 - DNA, 1431 bp, synthetic construct
  misc_feature 1..1431: note = Description of Artificial Sequence: Synthetic coding sequence
  source 1..1431: mol_type = other DNA
atggccaaggctgctgccatcggcatcgacctgggcaccacctacagctgtgtgggcgtcttccagcacggcaaaggagagagaaatgtgctgatctttgacctgggcggcggcacctttgatgtgtccatcctgaccattgatgatggcatctttgaggtgaaggccacagctggggacacccacctgggcggggaggactttgacaaccggctggtgaaccactttgtggaggagttcaagaggaagcacaagaaggacatcagccagaacaagagagctgtgcggcggctgaggacagcctgtgagcgggccaagaggaccctgagcagcagcacccaggccagcctggagattgacagcctgtttgagggcatcgacttctacaccagcatcacccgggccaggtttgaggagctgtgcagcgacctcttccgcagcaccctggagcctgtggagaaggccctgagagatgccaagctggacaaggcccagatccatgacctggtgctggtgggcggcagcacccgcatccccaaggtgcagaagctgctgcaggacttcttcaacggccgggacctgaacaagagcatcaacccagatgaagctgtggcctacggggctgctgtgcaggccgccatcctgatgggagacaagtcagaaaatgtgcaggacctgctgctgctggatgtggcccccctgagcctgggcctggagacagctggaggagtgatgacagccctgatcaagaggaacagcaccatccccaccaagcagacccagatcttcaccacctacagcgacaaccagcccggggtgctgatccaggtgtatgaaggagagcgggccatgaccaaggacaacaacctgctgggccgctttgagctgagcggcatccccccagccccccggggcgtgccccagatcgaggtgacctttgatattgatgccaacggcatcctgaatgtgacagccacagacaagagcacaggcaaggccaacaagatcaccatcaccaatgacaagggccgcctgagcaaggaggagattgaaagaatggtgcaggaggccgagaagtacaaggcagaagatgaggtgcagcgggagcgggtgtctgccaagaatgccctggagagctatgccttcaacatgaagtctgctgtggaggatgagggcctgaagggcaagatcagcgaggccgacaagaagaaggtgctggacaagtgccaggaggtgatctcctggctggatgccaacaccctggccgagaaggatgaatttgagcacaagaggaaggagctggagcaggtgtgcaaccccatcatcagcggcctgtaccagggcgccggcggccctggccctgggggctttggagcccagggccccaagggcggcagcggcagcggccccaccatcgaggaggtggactag

SEQ ID NO: 154935 - DNA, 1431 bp, synthetic construct; identical to SEQ ID NO: 154934
  misc_feature 1..1431: note = Description of Artificial Sequence: Synthetic coding sequence
  source 1..1431: mol_type = other DNA

SEQ ID NO: 154936 - DNA, 1926 bp, synthetic construct
  misc_feature 1..1926: note = Description of Artificial Sequence: Synthetic coding sequence
  source 1..1926: mol_type = other DNA
atggccaaggctgctgccatcggcatcgacctgggcaccacctacagctgtgtgggcgtcttccagcacggcaaggtggagatcatcgccaatgaccagggcaacagaaccacccccagctatgtggccttcacagacacagagcggctgattggagatgctgccaagaaccaggtggccctgaacccccagaacacagtgtttgatgccaagaggctcatcggcaggaagtttggagaccctgtggtgcagagcgacatgaagcactggcccttccaggtgatcaatgatggagacaagcccaaggtgcaggtgtcctacaagggggacaccaaggccttctacccagaggagatcagctccatggtgctgaccaagatgaaggagattgctgaggcctacctgggctaccctgtgaccaatgctgtgatcaccgtgcctgcctacttcaatgacagccagaggcaggccaccaaggatgctggggtgattgctggcctgaatgtgctgcgcatcatcaatgagcccacagctgctgccatcgcctacggcctggacagaacaggcaagggggagagaaatgtgctgatctttgacctgggcggcggcacctttgatgtgtccatcctgaccattgatgatggcatctttgaggtgaaggccacagctggggacacccacctgggcggagaagattttgacaaccggctggtgaaccactttgtggaggagttcaagaggaagcacaagaaggacatcagccagaacaagagagctgtgcggcggctgaggacagcctgtgagcgggccaagaggaccctgagcagcagcacccaggccagcctggagattgacagcctgtttgagggcatcgacttctacaccagcatcacccgggccaggtttgaggagctgtgcagcgacctcttccgcagcaccctggagcctgtggagaaggccctgagagatgccaagctggacaaggcccagatccatgacctggtgctggtgggcggcagcacccgcatccccaaggtgcagaagctgctgcaggacttcttcaacggccgggacctgaacaagagcatcaacccagatgaggccgtggcctatggagctgctgtgcaggccgccatcctgatgggagacaagtcagaaaatgtgcaggacctgctgctgctggatgtggcccccctgagcctgggcctggagacagctgggggcgtgatgacagccctgatcaagaggaacagcaccatccccaccaagcagacccagatcttcaccacctacagcgacaaccagcccggggtgctgatccaggtgtatgaaggagagcgggccatgaccaaggacaacaacctgctgggccgctttgagctgagcggcatccccccagccccccggggcgtgccccagatcgaggtgacctttgatattgatgccaacggcatcctgaatgtgacagccacagacaagagcacaggcaaggccaacaagatcaccatcaccaatgacaagggccgcctgagcaaggaggagattgaaagaatggtgcaggaggccgagaagtacaaggccgaggatgaggtgcagcgggagcgggtgtctgccaagaatgccctggagagctatgccttcaacatgaagtctgctgtggaggatgagggcctgaagggcaagatcagcgaggccgacaagaagaaggtgctggacaagtgccaggaggtgatctcctggctggatgccaacaccctggccgagaaggatgaatttgagcacaagaggaaggagctggagcaggtgtgcaaccccatcatcagcggcctgtaccagggcgctgggggccctggccctgggggctttggagcccagggccccaagggcggcagcggcagcggccccaccatcgaggaggtggactag

SEQ ID NO: 154937 - DNA, 1431 bp, synthetic construct; identical to SEQ ID NO: 154934
  misc_feature 1..1431: note = Description of Artificial Sequence: Synthetic coding sequence
  source 1..1431: mol_type = other DNA

SEQ ID NO: 154938 - DNA, 1926 bp, synthetic construct; identical to SEQ ID NO: 154933
  misc_feature 1..1926: note = Description of Artificial Sequence: Synthetic coding sequence
  source 1..1926: mol_type = other DNA

SEQ ID NO: 154939 - DNA, 1926 bp, synthetic construct; identical to SEQ ID NO: 154933
  misc_feature 1..1926: note = Description of Artificial Sequence: Synthetic coding sequence
  source 1..1926: mol_type = other DNA

SEQ ID NO: 154940 - DNA, 699 bp, synthetic construct
  misc_feature 1..699: note = Description of Artificial Sequence: Synthetic coding sequence
  source 1..699: mol_type = other DNA
atggccaaggctgctgccatcggcatcgacctgggcaccacctacagctgtgtgggcgtcttccagcacggcaaggtggagatcatcgccaatgaccagggcaacagaaccacccccagctatgtggccttcacagacacagagcggctgattggagatgctggggtgattgctggcctgaatgtgctgcgcatcatcaatgagcccacagctgctgccatcgcctacggcctggacagaactggaaaaggagagagaaatgtgctgatctttgacctgggcggcggcacctttgatgtgtccatcctgaccattgatgatggcatctttgaggtgaaggccacagctggggacacccacctgggcggggaggactttgacaaccggctggtgaaccactttgtggaggagttcaagaggaagcacaagaaggacatcagccagaacaagagagctgtgcggcggctgaggacagcctgtgagcgggccaagaggaccctgagcagcagcacccaggccagcctggagattgacagcctgtttgagggcatcgacttctacaccagcatcacccgggccaggtttgaggagctgtgcagcgacctcttccgcagcaccctggagcctgtggagaaggcccccccagccagcccccgctgccgcagctgctgcaggaccagcagcactggagccacctag

SEQ ID NO: 154941 - DNA, 1926 bp, synthetic construct; identical to SEQ ID NO: 154933
  misc_feature 1..1926: note = Description of Artificial Sequence: Synthetic coding sequence
  source 1..1926: mol_type = other DNA

SEQ ID NO: 154942 - DNA, 1431 bp, synthetic construct; identical to SEQ ID NO: 154934
  misc_feature 1..1431: note = Description of Artificial Sequence: Synthetic coding sequence
  source 1..1431: mol_type = other DNA

SEQ ID NO: 154943 - DNA, 1431 bp, synthetic construct; identical to SEQ ID NO: 154934
  misc_feature 1..1431: note = Description of Artificial Sequence: Synthetic coding sequence
  source 1..1431: mol_type = other DNA

SEQ ID NO: 154944 - DNA, 1653 bp, synthetic construct
  misc_feature 1..1653: note = Description of Artificial Sequence: Synthetic coding sequence
  source 1..1653: mol_type = other DNA
atggccaaggctgctgccatcggcatcgacctgggcaccacctacagctgtgtgggcgtcttccagcacggcaaggtgcagatcagctccatggtgctgaccaagatgaaggagattgctgaggcctacctgggctaccctgtgaccaatgctgtgatcaccgtgcctgcctacttcaatgacagccagaggcaggccaccaaggatgctggggtgattgctggcctgaatgtgctgcgcatcatcaatgagcccacagctgctgccatcgcctacggcctggacagaactggaaaaggagagagaaatgtgctgatctttgacctgggcggcggcacctttgatgtgtccatcctgaccattgatgatggcatctttgaggtgaaggccacagctggggacacccacctgggcggggaggactttgacaaccggctggtgaaccactttgtggaggagttcaagaggaagcacaagaaggacatcagccagaacaagagagctgtgcggcggctgaggacagcctgtgagcgggccaagaggaccctgagcagcagcacccaggccagcctggagattgacagcctgtttgagggcatcgacttctacaccagcatcacccgggccaggtttgaggagctgtgcagcgacctcttccgcagcaccctggagcctgtggagaaggccctgagagatgccaagctggacaaggcccagatccatgacctggtgctggtgggcggcagcacccgcatccccaaggtgcagaagctgctgcaggacttcttcaacggccgggacctgaacaagagcatcaacccagatgaagctgtggcctacggggctgctgtgcaggccgccatcctgatgggagacaagtcagaaaatgtgcaggacctgctgctgctggatgtggcccccctgagcctgggcctggagacagctggaggagtgatgacagccctgatcaagaggaacagcaccatccccaccaagcagacccagatcttcaccacctacagcgacaaccagcccggggtgctgatccaggtgtatgaaggagagcgggccatgaccaaggacaacaacctgctgggccgctttgagctgagcggcatccccccagccccccggggcgtgccccagatcgaggtgacctttgatattgatgccaacggcatcctgaatgtgacagccacagacaagagcacaggcaaggccaacaagatcaccatcaccaatgacaagggccgcctgagcaaggaggagattgaaagaatggtgcaggaggccgagaagtacaaggcagaagatgaggtgcagcgggagcgggtgtctgccaagaatgccctggagagctatgccttcaacatgaagtctgctgtggaggatgagggcctgaagggcaagatcagcgaggccgacaagaagaaggtgctggacaagtgccaggaggtgatctcctggctggatgccaacaccctggccgagaaggatgaatttgagcacaagaggaaggagctggagcaggtgtgcaaccccatcatcagcggcctgtaccagggcgccggcggccctggccctgggggctttggagcccagggccccaagggcggcagcggcagcggccccaccatcgaggaggtggactag

SEQ ID NO: 154945 - DNA, 1872 bp, synthetic construct
  misc_feature 1..1872: note = Description of Artificial Sequence: Synthetic coding sequence
  source 1..1872: mol_type = other DNA
atggccaaggctgctgccatcggcatcgacctgggcaccacctacagctgtgtgggcgtcttccagcacggcaaggtggagatcatcgccaatgaccagggcaacagaaccacccccagctatgtggccttcacagacacagagcggctgattggagatgctgccaagaaccaggtggccctgaaccctgtggtgcagagcgacatgaagcactggcccttccaggtgatcaatgatggagacaagcccaaggtgcaggtgtcctacaagggggagaccaaggccttctacccagaggagatcagctccatggtgctgaccaagatgaaggagattgctgaggcctacctgggctaccctgtgaccaatgctgtgatcaccgtgcctgcctacttcaatgacagccagaggcaggccaccaaggatgctggggtgattgctggcctgaatgtgctgcgcatcatcaatgagcccacagctgctgccatcgcctacggcctggacagaacaggcaagggggagagaaatgtgctgatctttgacctgggcggcggcacctttgatgtgtccatcctgaccattgatgatggcatctttgaggtgaaggccacagctggggacacccacctgggcggagaagattttgacaaccggctggtgaaccactttgtggaggagttcaagaggaagcacaagaaggacatcagccagaacaagagagctgtgcggcggctgaggacagcctgtgagcgggccaagaggaccctgagcagcagcacccaggccagcctggagattgacagcctgtttgagggcatcgacttctacaccagcatcacccgggccaggtttgaggagctgtgcagcgacctcttccgcagcaccctggagcctgtggagaaggccctgagagatgccaagctggacaaggcccagatccatgacctggtgctggtgggcggcagcacccgcatccccaaggtgcagaagctgctgcaggacttcttcaacggccgggacctgaacaagagcatcaacccagatgaggccgtggcctatggagctgctgtgcaggccgccatcctgatgggagacaagtcagaaaatgtgcaggacctgctgctgctggatgtggcccccctgagcctgggcctggagacagctgggggcgtgatgacagccctgatcaagaggaacagcaccatccccaccaagcagacccagatcttcaccacctacagcgacaaccagcccggggtgctgatccaggtgtatgaaggagagcgggccatgaccaaggacaacaacctgctgggccgctttgagctgagcggcatccccccagccccccggggcgtgccccagatcgaggtgacctttgatattgatgccaacggcatcctgaatgtgacagccacagacaagagcacaggcaaggccaacaagatcaccatcaccaatgacaagggccgcctgagcaaggaggagattgaaagaatggtgcaggaggccgagaagtacaaggccgaggatgaggtgcagcgggagcgggtgtctgccaagaatgccctggagagctatgccttcaacatgaagtctgctgtggaggatgagggcctgaagggcaagatcagcgaggccgacaagaagaaggtgctggacaagtgccaggaggtgatctcctggctggatgccaacaccctggccgagaaggatgaatttgagcacaagaggaaggagctggagcaggtgtgcaaccccatcatcagcggcctgtaccagggcgctgggggccctggccctgggggctttggagcccagggccccaagggcggcagcggcagcggccccaccatcgaggaggtggactag

SEQ ID NO: 154946 - DNA, 1653 bp, synthetic construct; identical to SEQ ID NO: 154944
  misc_feature 1..1653: note = Description of Artificial Sequence: Synthetic coding sequence
  source 1..1653: mol_type = other DNA

SEQ ID NO: 154947 - DNA, 1653 bp, synthetic construct; identical to SEQ ID NO: 154944
  misc_feature 1..1653: note = Description of Artificial Sequence: Synthetic coding sequence
  source 1..1653: mol_type = other DNA

SEQ ID NO: 154948 - DNA, 1653 bp, synthetic construct; identical to SEQ ID NO: 154944
  misc_feature 1..1653: note = Description of Artificial Sequence: Synthetic coding sequence
  source 1..1653: mol_type = other DNA

SEQ ID NO: 154949 - DNA, 699 bp, synthetic construct; identical to SEQ ID NO: 154940
  misc_feature 1..699: note = Description of Artificial Sequence: Synthetic coding sequence
  source 1..699: mol_type = other DNA

SEQ ID NO: 154950 - DNA, 1653 bp, synthetic construct; identical to SEQ ID NO: 154944
  misc_feature 1..1653: note = Description of Artificial Sequence: Synthetic coding sequence
  source 1..1653: mol_type = other DNA

SEQ ID NO: 154951 - DNA, 699 bp, synthetic construct; identical to SEQ ID NO: 154940
  misc_feature 1..699: note = Description of Artificial Sequence: Synthetic coding sequence
  source 1..699: mol_type = other DNA

SEQ ID NO: 154952 - DNA, 699 bp, synthetic construct; identical to SEQ ID NO: 154940
  misc_feature 1..699: note = Description of Artificial Sequence: Synthetic coding sequence
  source 1..699: mol_type = other DNA

SEQ ID NO: 154953 - DNA, 699 bp, synthetic construct; identical to SEQ ID NO: 154940
  misc_feature 1..699: note = Description of Artificial Sequence: Synthetic coding sequence
  source 1..699: mol_type = other DNA

SEQ ID NO: 154954 - DNA, 1926 bp, synthetic construct; identical to SEQ ID NO: 154933
  misc_feature 1..1926: note = Description of Artificial Sequence: Synthetic coding sequence
  source 1..1926: mol_type = other DNA

SEQ ID NO: 154955 - DNA, 1926 bp, synthetic construct; identical to SEQ ID NO: 154933
  misc_feature 1..1926: note = Description of Artificial Sequence: Synthetic coding sequence
  source 1..1926: mol_type = other DNA

SEQ ID NO: 154956 - DNA, 1926 bp, synthetic construct; identical to SEQ ID NO: 154933
  misc_feature 1..1926: note = Description of Artificial Sequence: Synthetic coding sequence
  source 1..1926: mol_type = other DNA

SEQ ID NO: 154957 - DNA, 699 bp, synthetic construct; identical to SEQ ID NO: 154940
  misc_feature 1..699: note = Description of Artificial Sequence: Synthetic coding sequence
  source 1..699: mol_type = other DNA

SEQ ID NO: 154958 - DNA, 1926 bp, synthetic construct; identical to SEQ ID NO: 154933
  misc_feature 1..1926: note = Description of Artificial Sequence: Synthetic coding sequence
  source 1..1926: mol_type = other DNA

SEQ ID NO: 154959 - DNA, 1926 bp, synthetic construct; identical to SEQ ID NO: 154933
  misc_feature 1..1926: note = Description of Artificial Sequence: Synthetic coding sequence
  source 1..1926: mol_type = other DNA

SEQ ID NO: 154960 - DNA, 2127 bp, synthetic construct
  misc_feature 1..2127: note = Description of Artificial Sequence: Synthetic coding sequence
  source 1..2127: mol_type = other DNA
ctgcggagctgctgtgagggccccctgcggctgagccgggtgaccccagctgtgccccggctgagccgggccaacctgtgtggctgccgccaccggcgggtggagttccctgccttccggaggacagagctgctgagccgcatccccagcgctgtgagcagcccccagagccagagcggggcccaccggcagggcaccggcatggccaaggccgccgccatcggcatcgacctgggcaccacctacagctgtgtgggcgtcttccagcacggcaaggtggagatcatcgccaatgaccagggcaacagaaccacccccagctatgtggccttcacagacacagagcggctgattggagatgctgccaagaaccaggtggccctgaacccccagaacacagtgtttgatgccaagaggctgattggaaggaagtttggagaccctgtggtgcagagcgacatgaagcactggcccttccaggtgatcaatgatggagacaagcccaaggtgcaggtgtcctacaagggggagaccaaggccttctacccagaggagatcagctccatggtgctgaccaagatgaaggagattgctgaggcctacctgggctaccctgtgaccaatgctgtgatcaccgtgcctgcctacttcaatgacagccagaggcaggccaccaaggatgctggggtgattgctggcctgaatgtgctgcgcatcatcaatgagcccacagctgctgccatcgcctacggcctggacagaactggaaaaggagagagaaatgtgctgatctttgacctgggcggcggcacctttgatgtgtccatcctgaccattgatgatggcatctttgaggtgaaggccacagctggggacacccacctgggcggggaggactttgacaaccggctggtgaaccactttgtggaggagttcaagaggaagcacaagaaggacatcagccagaacaagagagctgtgcggcggctgaggacagcctgtgagcgggccaagaggaccctgagcagcagcacccaggccagcctggagattgacagcctgtttgagggcatcgacttctacaccagcatcacccgggccaggtttgaggagctgtgcagcgacctcttccgcagcaccctggagcctgtggagaaggccctgagagatgccaagctggacaaggcccagatccatgacctggtgctggtgggcggcagcacccgcatccccaaggtgcagaagctgctgcaggacttcttcaacggccgggacctgaacaagagcatcaacccagatgaagctgtggcctacggggctgctgtgcaggccgccatcctgatgggagacaagtcagaaaatgtgcaggacctgctgctgctggatgtggcccccctgagcctgggcctggagacagctggaggagtgatgacagccctgatcaagaggaacagcaccatccccaccaagcagacccagatcttcaccacctacagcgacaaccagcccggggtgctgatccaggtgtatgaaggagagcgggccatgaccaaggacaacaacctgctgggccgctttgagctgagcggcatccccccagccccccggggcgtgccccagatcgaggtgacctttgatattgatgccaacggcatcctgaatgtgacagccacagacaagagcacaggcaaggccaacaagatcaccatcaccaatgacaagggccgcctgagcaaggaggagattgaaagaatggtgcaggaggccgagaagtacaaggcagaagatgaggtgcagcgggagcgggtgtctgccaagaatgccctggagagctatgccttcaacatgaagtctgctgtggaggatgagggcctgaagggcaagatcagcgaggccgacaagaagaaggtgctggacaagtgccaggaggtgatctcctggctggatgccaacaccctggccgagaaggatgaatttgagcacaagaggaaggagctggagcaggtgtgcaaccccatcatcagcggcctgtaccagggcgccggcggccctggccctgggggctttggagcccagggccccaagggcggcagcggcagcggccccaccatcgaggaggtggactag

SEQ ID NO: 154961 - DNA, 1653 bp, synthetic construct; identical to SEQ ID NO: 154944
  misc_feature 1..1653: note = Description of Artificial Sequence: Synthetic coding sequence
  source 1..1653: mol_type = other DNA

SEQ ID NO: 154962 - DNA, 1875 bp, synthetic construct
  misc_feature 1..1875: note = Description of Artificial Sequence: Synthetic coding sequence
  source 1..1875: mol_type = other DNA
atggccaaggctgctgccatcggcatcgacctgggcaccacctacagctgtgtgggcgtcttccagcacggcaaggtggagatcatcgccaatgaccagggcaacagaaccacccccagctatgtggccttcacagacacagagcggctgattggagatgctgccaagaaccaggtggccctgaacccccctgtggtgcagagcgacatgaagcactggcccttccaggtgatcaatgatggagacaagcccaaggtgcaggtgtcctacaagggggagaccaaggccttctacccagaggagatcagctccatggtgctgaccaagatgaaggagattgctgaggcctacctgggctaccctgtgaccaatgctgtgatcaccgtgcctgcctacttcaatgacagccagaggcaggccaccaaggatgctggggtgattgctggcctgaatgtgctgcgcatcatcaatgagcccacagctgctgccatcgcctacggcctggacagaactggaaaaggagagagaaatgtgctgatctttgacctgggcggcggcacctttgatgtgtccatcctgaccattgatgatggcatctttgaggtgaaggccacagctggggacacccacctgggcggggaggactttgacaaccggctggtgaaccactttgtggaggagttcaagaggaagcacaagaaggacatcagccagaacaagagagctgtgcggcggctgaggacagcctgtgagcgggccaagaggaccctgagcagcagcacccaggccagcctggagattgacagcctgtttgagggcatcgacttctacaccagcatcacccgggccaggtttgaggagctgtgcagcgacctcttccgcagcaccctggagcctgtggagaaggccctgagagatgccaagctggacaaggcccagatccatgacctggtgctggtgggcggcagcacccgcatccccaaggtgcagaagctgctgcaggacttcttcaacggccgggacctgaacaagagcatcaacccagatgaagctgtggcctacggggctgctgtgcaggccgccatcctgatgggagacaagtcagaaaatgtgcaggacctgctgctgctggatgtggcccccctgagcctgggcctggagacagctggaggagtgatgacagccctgatcaagaggaacagcaccatccccaccaagcagacccagatcttcaccacctacagcgacaaccagcccggggtgctgatccaggtgtatgaaggagagcgggccatgaccaaggacaacaacctgctgggccgctttgagctgagcggcatccccccagccccccggggcgtgccccagatcgaggtgacctttgatattgatgccaacggcatcctgaatgtgacagccacagacaagagcacaggcaaggccaacaagatcaccatcaccaatgacaagggccgcctgagcaaggaggagattgaaagaatggtgcaggaggccgagaagtacaaggcagaagatgaggtgcagcgggagcgggtgtctgccaagaatgccctggagagctatgccttcaacatgaagtctgctgtggaggatgagggcctgaagggcaagatcagcgaggccgacaagaagaaggtgctggacaagtgccaggaggtgatctcctggctggatgccaacaccctggccgagaaggatgaatttgagcacaagaggaaggagctggagcaggtgtgcaaccccatcatcagcggcctgtaccagggcgccggcggccctggccctgggggctttggagcccagggccccaagggcggcagcggcagcggccccaccatcgaggaggtggactag

SEQ ID NO: 154963 - DNA, 1857 bp, synthetic construct
  misc_feature 1..1857: note = Description of Artificial Sequence: Synthetic coding sequence
  source 1..1857: mol_type = other DNA
atggccaaggctgctgccatcggcatcgacctgggcaccacctacagctgtgtgggcgtcttccagcacggcaaggtggagatcatcgccaatgaccagggcaacagaaccacccccagctatgtggccttcacagacacagagcggctgattggagatgctgccaagaaccaggtggtgcagagcgacatgaagcactggcccttccaggtgatcaatgatggagacaagcccaaggtgcaggtgtcctacaagggggagaccaaggccttctacccagaggagatcagctccatggtgctgaccaagatgaaggagattgctgaggcctacctgggctaccctgtgaccaatgctgtgatcaccgtgcctgcctacttcaatgacagccagaggcaggccaccaaggatgctggggtgattgctggcctgaatgtgctgcgcatcatcaatgagcccacagctgctgccatcgcctacggcctggacagaactggaaaaggagagagaaatgtgctgatctttgacctgggcggcggcacctttgatgtgtccatcctgaccattgatgatggcatctttgaggtgaaggccacagctggggacacccacctgggcggggaggactttgacaaccggctggtgaaccactttgtggaggagttcaagaggaagcacaagaaggacatcagccagaacaagagagctgtgcggcggctgaggacagcctgtgagcgggccaagaggaccctgagcagcagcacccaggccagcctggagattgacagcctgtttgagggcatcgacttctacaccagcatcacccgggccaggtttgaggagctgtgcagcgacctcttccgcagcaccctggagcctgtggagaaggccctgagagatgccaagctggacaaggcccagatccatgacctggtgctggtgggcggcagcacccgcatccccaaggtgcagaagctgctgcaggacttcttcaacggccgggacctgaacaagagcatcaacccagatgaagctgtggcctacggggctgctgtgcaggccgccatcctgatgggagacaagtcagaaaatgtgcaggacctgctgctgctggatgtggcccccctgagcctgggcctggagacagctggaggagtgatgacagccctgatcaagaggaacagcaccatccccaccaagcagacccagatcttcaccacctacagcgacaaccagcccggggtgctgatccaggtgtatgaaggagagcgggccatgaccaaggacaacaacctgctgggccgctttgagctgagcggcatccccccagccccccggggcgtgccccagatcgaggtgacctttgatattgatgccaacggcatcctgaatgtgacagccacagacaagagcacaggcaaggccaacaagatcaccatcaccaatgacaagggccgcctgagcaaggaggagattgaaagaatggtgcaggaggccgagaagtacaaggcagaagatgaggtgcagcgggagcgggtgtctgccaagaatgccctggagagctatgccttcaacatgaagtctgctgtggaggatgagggcctgaagggcaagatcagcgaggccgacaagaagaaggtgctggacaagtgccaggaggtgatctcctggctggatgccaacaccctggccgagaaggatgaatttgagcacaagaggaaggagctggagcaggtgtgcaaccccatcatcagcggcctgtaccagggcgccggcggccctggccctgggggctttggagcccagggccccaagggcggcagcggcagcggccccaccatcgaggaggtggactag

SEQ ID NO: 154964 - DNA, 1857 bp, synthetic construct; identical to SEQ ID NO: 154963
  misc_feature 1..1857: note = Description of Artificial Sequence: Synthetic coding sequence
  source 1..1857: mol_type = other DNA

SEQ ID NO: 154965 - DNA, 1653 bp, synthetic construct; identical to SEQ ID NO: 154944
  misc_feature 1..1653: note = Description of Artificial Sequence: Synthetic coding sequence
  source 1..1653: mol_type = other DNA

SEQ ID NO: 154966 - DNA, 1857 bp, synthetic construct; identical to SEQ ID NO: 154963
  misc_feature 1..1857: note = Description of Artificial Sequence: Synthetic coding sequence
  source 1..1857: mol_type = other DNA

SEQ ID NO: 154967 - DNA, 1653 bp, synthetic construct; identical to SEQ ID NO: 154944
  misc_feature 1..1653: note = Description of Artificial Sequence: Synthetic coding sequence
  source 1..1653: mol_type = other DNA

SEQ ID NO: 154968 - DNA, 1761 bp, synthetic construct
  misc_feature 1..1761: note = Description of Artificial Sequence: Synthetic coding sequence
  source 1..1761: mol_type = other DNA
atggccacagccaagggcatcgccatcggcatcgacctgggcaccacctacagctgtgtgggcgtcttccagcacggcaaggtggagatcatcgccaatgaccagggcaacagaaccacccccagctatgtggccttcacagacacagagcggctgattggagatgctgccaagaaccaggtggccatgaacccccagaacacagtgtttgatgccaagaggctcatcggcaggaagttcaatgaccctgtggtgcaggccgacatgaagctgtggcccttccaggtgatcaatgacagccagaggcaggccaccaaggatgctggggtgattgctggcctgaatgtgctgcgcatcatcaatgagcccacagctgctgccatcgcctacggcctggacaagggcggccagggcgagagacatgtgctgatctttgacctgggcggcggcacctttgatgtgtccatcctgaccattgatgatggcatctttgaggtgaaggccacagctggggacacccacctgggcggggaggactttgacaaccggctggtgagccactttgtggaggagttcaagaggaagcacaagaaggacatcagccagaacaagagagctgtgcggcggctgaggacagcctgtgagcgggccaagaggaccctgagcagcagcacccaggccaacctggagattgacagcctgtatgagggcatcgacttctacaccagcatcacccgggccaggtttgaggagctgtgtgccgacctcttccggggcaccctggagcctgtggagaaggccctgagagatgccaagatggacaaggccaagatccatgacatcgtgctggtgggcggcagcacccgcatccccaaggtgcagaggctgctgcaggactacttcaacggccgggacctgaacaagagcatcaacccagatgaagctgtggcctacggggctgctgtgcaggccgccatcctgatgggagacaagtctgagaaggtgcaggacctgctgctgctggatgtggcccccctgagcctgggcctggagacagctggaggagtgatgacagccctgatcaagaggaacagcaccatccccaccaagcagacccagatcttcaccacctacagcgacaaccagcccggggtgctgatccaggtgtatgaaggagagcgggccatgaccaaggacaacaacctgctgggccgctttgacctgaccggcatccccccagccccccggggcgtgccccagatcgaggtgacctttgatattgatgccaacggcatcctgaatgtgacagccacagacaagagcacaggcaaggtgaacaagatcaccatcaccaatgacaagggccgcctgagcaaggaggagattgaaagaatggtgctggatgctgagaagtacaaggcagaagatgaggtgcagcgggagaagattgctgccaagaatgccctggagagctatgccttcaacatgaagtctgtggtgtctgatgagggcctgaagggcaagatcagcgagagtgacaagaacaagatcctggacaagtgcaatgagctgctgtcctggctggaggtgaaccagctggccgagaaggatgaatttgaccacaagaggaaggagctggagcagatgtgcaaccccatcatcaccaagctgtaccagggcggctgcaccggccctgcctgtggcaccggctacgtgcccggccggcctgccaccggccccaccatcgaggaggtggactag

SEQ ID NO: 154969 - DNA, 1926 bp, synthetic construct
  misc_feature 1..1926: note = Description of Artificial Sequence: Synthetic coding sequence
  source 1..1926: mol_type = other DNA
atggccacagccaagggcatcgccatcggcatcgacctgggcaccacctacagctgtgtgggcgtcttccagcacggcaaggtggagatcatcgccaatgaccagggcaacagaaccacccccagctatgtggccttcacagacacagagcggctgattggagatgctgccaagaaccaggtggccatgaacccccagaacacagtgtttgatgccaagaggctcatcggcaggaagttcaatgaccctgtggtgcaggccgacatgaagctgtggcccttccaggtgatcaatgaaggaggcaagcccaaggtgctggtgtcctacaagggggagaacaaggccttctacccagaggagatcagctccatggtgctgaccaagctgaaggagacagctgaggccttcctgggccaccctgtgaccaatgctgtgatcaccgtgcctgcctacttcaatgacagccagaggcaggccaccaaggatgctggggtgattgctggcctgaatgtgctgcgcatcatcaatgagcccacagctgctgccatcgcctacggcctggacaagggcggccagggcgagcggcacgtgctgatctttgacctgggcggcggcacctttgatgtgtccatcctgaccattgatgatggcatctttgaggtgaaggccacagctggggacacccacctgggcggagaagattttgacaaccggctggtgagccactttgtggaggagttcaagaggaagcacaagaaggacatcagccagaacaagagagctgtgcggcggctgaggacagcctgtgagcgggccaagaggaccctgagcagcagcacccaggccaacctggagattgacagcctgtatgagggcatcgacttctacaccagcatcacccgggccaggtttgaggagctgtgtgccgacctcttccggggcaccctggagcctgtggagaaggccctgagagatgccaagatggacaaggccaagatccatgacatcgtgctggtgggcggcagcacccgcatccccaaggtgcagaggctgctgcaggactacttcaacggccgggacctgaacaagagcatcaacccagatgaggccgtggcctatggagctgctgtgcaggccgccatcctgatgggagacaagtctgagaaggtgcaggacctgctgctgctggatgtggcccccctgagcctgggcctggagacagctgggggcgtgatgacagccctgatcaagaggaacagcaccatccccaccaagcagacccagatcttcaccacctacagcgacaaccagcccggggtgctgatccaggtgtatgaaggagagcgggccatgaccaaggacaacaacctgctgggccgctttgacctgaccggcatccccccagccccccggggcgtgccccagatcgaggtgacctttgatattgatgccaacggcatcctgaatgtgacagccacagacaagagcacaggcaaggtgaacaagatcaccatcaccaatgacaagggccgcctgagcaaggaggagattgaaagaatggtgctggatgctgagaagtacaaggccgaggatgaggtgcagcgggagaagattgctgccaagaatgccctggagagctatgccttcaacatgaagtctgtggtgtctgatgagggcctgaagggcaagatcagcgagagtgacaagaacaagatcctggacaagtgcaatgagctgctgtcctggctggaggtgaaccagctggccgagaaggatgaatttgaccacaagaggaaggagctggagcagatgtgcaaccccatcatcaccaagctgtaccagggcggctgcaccggccctgcctgtggcaccggctacgtgcccggccgcccagccaccggccccaccatcgaggaggtggactag

SEQ ID NO: 154970 - DNA, 1926 bp, synthetic construct
  misc_feature 1..1926: note = Description of Artificial Sequence: Synthetic coding sequence
  source 1..1926: mol_type = other DNA
atggccacagccaagggcatcgccatcggcatcgacctgggcaccacctacagctgtgtgggcgtcttccagcacggcaaggtggagatcatcgccaatgaccagggcaacagaaccacccccagctatgtggccttcacagacacagagcggctgattggagatgctgccaagaaccaggtggccatgaacccccagaacacagtgtttgatgccaagaggctcatcggcaggaagttcaatgaccctgtggtgcaggccgacatgaagctgtggcccttccaggtgatcaatgaaggaggcaagcccaaggtgctggtgtcctacaagggggagaacaaggccttctacccagaggagatcagctccatggtgctgaccaagctgaaggagacagctgaggccttcctgggccaccctgtgaccaatgctgtgatcaccgtgcctgcctacttcaatgacagccagaggcaggccaccaaggatgctggggtgattgctggcctgaatgtgctgcgcatcatcaatgagcccacagctgctgccatcgcctacggcctggacaagggcggccagggcgagcggcacgtgctgatctttgacctgggcggcggcacctttgatgtgtccatcctgaccattgatgatggcatctttgaggtgaaggccacagctggggacacccacctgggcggagaagattttgacaaccggctggtgagccactttgtggaggagttcaagaggaagcacaagaaggacatcagccagaacaagagagctgtgcggcggctgaggacagcctgtgagcgggccaagaggaccctgagcagcagcacccaggccaacctggagattgacagcctgtatgagggcatcgacttctacaccagcatcacccgggccaggtttgaggagctgtgtgccgacctcttccggggcaccctggagcctgtggagaaggccctgagagatgccaagatggacaaggccaagatccatgacatcgtgctggtgggcggcagcacccgcatccccaaggtgcagaggctgctgcaggactacttcaacggccgggacctgaacaagagcatcaacccagatgaggccgtggcctatggagctgctgtgcaggccgccatcctgatgggagacaagtctgagaaggtgcaggacctgctgctgctggatgtggcccccctgagcctgggcctggagacagctgggggcgtgatgacagccctgatcaagaggaacagcaccatccccaccaagcagacccagatcttcaccacctacagcgacaaccagcccggggtgctgatccaggtgtatgaaggagagcgggccatgaccaaggacaacaacctgctgggccgctttgacctgaccggcatccccccagccccccggggcgtgccccagatcgaggtgacctttgatattgatgccaacggcatcctgaatgtgacagccatggacaagagcacaggcaaggtgaacaagatcaccatcaccaatgacaagggccgcctgagcaaggaggagattgaaagaatggtgctggatgctgagaagtacaaggccgaggatgaggtgcagcgggagaagattgctgccaagaatgccctggagagctatgccttcaacatgaagtctgtggtgtctgatgagggcctgaagggcaagatcagcgagagtgacaagaacaagatcctggacaagtgcaatgagctgctgtcctggctggaggtgaaccagctggccgagaaggatgaatttgaccacaagaggaaggagctggagcagatgtgcaaccccatcatcaccaagctgtaccagggcggctgcaccggccctgcctgtggcaccggctacgtgcccggccgcccagccaccggccccaccatcgaggaggtggactag

SEQ ID NO: 154971 - DNA, 1926 bp, synthetic construct; identical to SEQ ID NO: 154969
  misc_feature 1..1926: note = Description of Artificial Sequence: Synthetic coding sequence
  source 1..1926: mol_type = other DNA

SEQ ID NO: 154972 - DNA, 1926 bp, synthetic construct; identical to SEQ ID NO: 154969
  misc_feature 1..1926: note = Description of Artificial Sequence: Synthetic coding sequence
  source 1..1926: mol_type = other DNA

SEQ ID NO: 154973 - DNA, 699 bp, synthetic construct
  misc_feature 1..699: note = Description of Artificial Sequence: Synthetic coding sequence
  source 1..699: mol_type = other DNA
gccaagggcatcgccatcggcatcgacctgggcaccacctacagctgtgtgggcgtcttccagcacggcaaggtggagatcatcgccaatgaccagggcaacagaaccacccccagctatgtggccttcacagacacagagcggctgattggagatgctggggtgattgctggcctgaatgtgctgcgcatcatcaatgagcccacagctgctgccatcgcctacggcctggacaagggcggccagggcgagcggcacgtgctgatctttgacctgggcggcggcacctttgatgtgtccatcctgaccattgatgatggcatctttgaggtgaaggccacagctggggacacccacctgggcggagaagattttgacaaccggctggtgagccactttgtggaggagttcaagaggaagcacaagaaggacatcagccagaacaagagagctgtgcggcggctgaggacagcctgtgagcgggccaagaggaccctgagcagcagcacccaggccaacctggagattgacagcctgtatgagggcatcgacttctacaccagcatcacccgggccaggtttgaggagctgtgtgccgacctcttccggggcaccctggagcctgtggagaagggggcccccccagccagcccccgctgcagcggctgcttccgcaccacctccatggatgtgatctag

SEQ ID NO: 154974 - DNA, 1926 bp, synthetic construct; identical to SEQ ID NO: 154970
  misc_feature 1..1926: note = Description of Artificial Sequence: Synthetic coding sequence
  source 1..1926: mol_type = other DNA

SEQ ID NO: 154975 - DNA, 1599 bp, synthetic construct
  misc_feature 1..1599: note = Description of Artificial Sequence: Synthetic coding sequence
  source 1..1599: mol_type = other DNA
atggccacagccaagggcatcgccatcggcatcgacctgggcaccacctacagctgtgtgggcgtcttccagcacggcaaggtggagatcatcgccaatgaccagggcaacagaaccacccccagctatgtggccttcacagacacagagcggctgattggagatgctgccaagaaccaggtggccatgaacccccagaacacagtgtttgatgccaagaggctcatcggcaggaagttcaatgaccctgtggtgcaggccgacatgaagctgtggcccttccaggtgatcaatgaaggaggcaagcccaaggtgctggtgtcctacaagggggagaacaaggccttctacccagaggagatcagctccatggtgctgaccaagctgaaggagacagctgaggccttcctgggccaccctgtgaccaatgctgtgatcaccgtgcctgcctacttcaatgacagccagaggcaggccaccaaggatgctggggtgattgctggcctgaatgtgctgcgcatcatcaatgagcccacagctgctgccatcgcctacggcctggacaagggcggccagggcgagcggcacgtgctgatctttgacctgggcggcggcacctttgatgtgtccatcctgaccattgatgatggcatctttgaggtgaaggccacagctggggacacccacctgggcggagaagattttgacaaccggctggtgagccactttgtggaggagttcaagaggaagcacaagaaggacatcagccagaacaagagagctgtgcggcggctgaggacagcctgtgagcgggccaagaggaccctgagcagcagcacccaggccaacctggagattgacagcctgtatgagggcatcgacttctacaccagcatcacccgggccaggtttgaggagctgtgtgccgacctcttccggggcaccctggagcctgtggagaaggccctgagagatgccaagatggacaaggccaagatccatgacatcgtgctggtgggcggcagcacccgcatccccaaggtgcagaggctgctgcaggactacttcaacggccgggacctgaacaagagcatcaacccagatgaggccgtggcctatggagctgctgtgcaggccgccatcctgatgggagacaagtctgagaaggtgcaggacctgctgctgctggatgtggcccccctgagcctgggcctggagacagctgggggcgtgatgacagccctgatcaagaggaacagcaccatccccaccaagcagacccagatcttcaccacctacagcgacaaccagcccggggtgctgatccaggtgtatgaaggagagcgggccatgaccaaggacaacaacctgctgggccgctttgacctgaccggcatccccccagccccccggggcgtgccccagatcgaggtgacctttgatattgatgccaacggcatcctgaatgtgacagccatggacaagagcacaggcaaggtgaacaagatcaccatcaccaatgacaagggccgcctgagcaaggaggagattgaaagaatggtgctggatgctgagaagtacaaggccgaggatgtgtag

SEQ ID NO: 154976 - DNA, 699 bp, synthetic construct; identical to SEQ ID NO: 154973
  misc_feature 1..699: note = Description of Artificial Sequence: Synthetic coding sequence
  source 1..699: mol_type = other DNA

SEQ ID NO: 154977 - DNA, 1926 bp, synthetic construct; identical to SEQ ID NO: 154969
  misc_feature 1..1926: note = Description of Artificial Sequence: Synthetic coding sequence
  source 1..1926: mol_type = other DNA

SEQ ID NO: 154978 - DNA, 1599 bp, synthetic construct; identical to SEQ ID NO: 154975
  misc_feature 1..1599: note = Description of Artificial Sequence: Synthetic coding sequence
  source 1..1599: mol_type = other DNA

SEQ ID NO: 154979 - DNA, 1599 bp, synthetic construct
  misc_feature 1..1599: note = Description of Artificial Sequence: Synthetic coding sequence
  source 1..1599: mol_type = other DNA
atggccacagccaagggcatcgccatcggcatcgacctgggcaccacctacagctgtgtgggcgtcttccagcacggcaaggtggagatcatcgccaatgaccagggcaacagaaccacccccagctatgtggccttcacagacacagagcggctgattggagatgctgccaagaaccaggtggccatgaacccccagaacacagtgtttgatgccaagaggctcatcggcaggaagttcaatgaccctgtggtgcaggccgacatgaagctgtggcccttccaggtgatcaatgaaggaggcaagcccaaggtgctggtgtcctacaagggggagaacaaggccttctacccagaggagatcagctccatggtgctgaccaagctgaaggagacagctgaggccttcctgggccaccctgtgaccaatgctgtgatcaccgtgcctgcctacttcaatgacagccagaggcaggccaccaaggatgctggggtgattgctggcctgaatgtgctgcgcatcatcaatgagcccacagctgctgccatcgcctacggcctggacaagggcggccagggcgagcggcacgtgctgatctttgacctgggcggcggcacctttgatgtgtccatcctgaccattgatgatggcatctttgaggtgaaggccacagctggggacacccacctgggcggagaagattttgacaaccggctggtgagccactttgtggaggagttcaagaggaagcacaagaaggacatcagccagaacaagagagctgtgcggcggctgaggacagcctgtgagcgggccaagaggaccctgagcagcagcacccaggccaacctggagattgacagcctgtatgagggcatcgacttctacaccagcatcacccgggccaggtttgaggagctgtgtgccgacctcttccggggcaccctggagcctgtggagaaggccctgagagatgccaagatggacaaggccaagatccatgacatcgtgctggtgggcggcagcacccgcatccccaaggtgcagaggctgctgcaggactacttcaacggccgggacctgaacaagagcatcaacccagatgaggccgtggcctatggagctgctgtgcaggccgccatcctgatgggagacaagtctgagaaggtgcaggacctgctgctgctggatgtggcccccctgagcctgggcctggagacagctgggggcgtgatgacagccctgatcaagaggaacagcaccatccccaccaagcagacccagatcttcaccacctacagcgacaaccagcccggggtgctgatccaggtgtatgaaggagagcgggccatgaccaaggacaacaacctgctgggccgctttgacctgaccggcatccccccagccccccggggcgtgccccagatcgaggtgacctttgatattgatgccaacggcatcctgaatgtgacagccacagacaagagcacaggcaaggtgaacaagatcaccatcaccaatgacaagggccgcctgagcaaggaggagattgaaagaatggtgctggatgctgagaagtacaaggccgaggatgtgtag

SEQ ID NO: 154980 - DNA, 1926 bp, synthetic construct; identical to SEQ ID NO: 154970
  misc_feature 1..1926: note = Description of Artificial Sequence: Synthetic coding sequence
  source 1..1926: mol_type = other DNA

SEQ ID NO: 154981 - DNA, 699 bp, synthetic construct; identical to SEQ ID NO: 154973
  misc_feature 1..699: note = Description of Artificial Sequence: Synthetic coding sequence
  source 1..699: mol_type = other DNA

SEQ ID NO: 154982 - DNA, 699 bp, synthetic construct; identical to SEQ ID NO: 154973
  misc_feature 1..699: note = Description of Artificial Sequence: Synthetic coding sequence
  source 1..699: mol_type = other DNA

SEQ ID NO: 154983 - DNA, 1926 bp, synthetic construct; identical to SEQ ID NO: 154970
  misc_feature 1..1926: note = Description of Artificial Sequence: Synthetic coding sequence
  source 1..1926: mol_type = other DNA

SEQ ID NO: 154984 - DNA, 1920 bp, synthetic construct
  misc_feature 1..1920: note = Description of Artificial Sequence: Synthetic coding sequence
  source 1..1920: mol_type = other DNA
atgtctgcccggggccctgccatcggcatcgacctgggcaccacctacagctgtgtgggcgtcttccagcacggcaaggtggagatcatcgccaatgaccagggcaacagaaccacccccagctatgtggccttcacagacacagagcggctgattggagatgctgccaagaaccaggtggccatgaaccccaccaacaccatctttgatgccaagaggctgattggaaggaagtttgaagatgccaccgtgcagagcgacatgaagcactggcccttccgggtggtgtctgagggcggcaagcccaaggtgcaggtggagtacaagggggagaccaagaccttcttccctgaggagatcagctccatggtgctgaccaagatgaaggagattgctgaggcctacctgggcggcaaggtgcacagcgctgtgatcaccgtgcctgcctacttcaatgacagccagaggcaggccaccaaggatgctggcaccatcaccggcctgaatgtgctgcgcatcatcaatgagcccacagctgctgccatcgcctacggcctggacaagaagggctgtgccggcggggagaagaatgtgctgatctttgacctgggcggcggcacctttgatgtgtccatcctgaccattgaagatggcatctttgaggtgaagagcacagctggggacacccacctgggcggggaggactttgacaacaggatggtgagccacctggccgaggagttcaagaggaagcacaagaaggacatcggccccaacaagagagctgtgcggcggctgaggacagcctgtgagcgggccaagaggaccctgagcagcagcacccaggccagcattgaaattgacagcctgtatgaaggagtggacttctacaccagcatcacccgggccaggtttgaggagctgaatgctgacctcttccggggcaccctggagcctgtggagaaggccctgagagatgccaagctggacaagggccagatccaggagatcgtgctggtgggcggcagcacccgcatccccaagatccagaagctgctgcaggacttcttcaacgggaaggagctgaacaagagcatcaacccagatgaagctgtggcctacggggctgctgtgcaggccgccatcctgattggagacaagtcagaaaatgtgcaggacctgctgctgctggatgtgacccccctgagcctgggcatcgagacagctggaggagtgatgacccccctcatcaagaggaacaccaccatccccaccaagcagacccagaccttcaccacctacagcgacaaccagagctctgtgctggtgcaggtgtatgaaggagagcgggccatgaccaaggacaacaacctgctgggcaagtttgacctgaccggcatccccccagccccccggggcgtgccccagatcgaggtgacctttgatattgatgccaacggcatcctgaatgtgacagctgctgacaagagcacaggcaaggagaacaagatcaccatcaccaatgacaagggccgcctgagcaaggatgacatcgacaggatggtgcaggaggccgagcgctacaagtcagaagatgaggccaacagagacagagtggccgccaagaatgccctggagagctacacctacaacatcaagcagacagtggaggatgagaagctgcggggcaagatcagcgagcaggacaagaacaagatcctggacaagtgccaggaggtgatcaactggctggacaggaaccagatggccgagaaggatgaatatgagcacaagcagaaggagctggagcgggtgtgcaaccccatcatcagcaagctgtaccagggcggccctgggggcggcagcggcggcggcggcagcggggccagcggcggccccaccatcgaggaggtggactag

SEQ ID NO: 154985 - DNA, 1920 bp, synthetic construct; identical to SEQ ID NO: 154984
  misc_feature 1..1920: note = Description of Artificial Sequence: Synthetic coding sequence
  source 1..1920: mol_type = other DNA

SEQ ID NO: 154986 - DNA, 1242 bp, synthetic construct
  misc_feature 1..1242: note = Description of Artificial Sequence: Synthetic coding sequence
  source 1..1242: mol_type = other DNA
atgtctgcccggggccctgccatcggcatcgacctgggcaccacctacagctgtgtgggcgtcttccagcacggcaaggtggagatcatcgccaatgaccagggcaacagaaccacccccagctatgtggccttcacagacacagagcggctgattggagatgctgccaagaaccaggtggccatgaaccccaccaacaccatctttgatgccaagaggctgattggaaggaagtttgaggagctgaatgctgacctcttccggggcaccctggagcctgtggagaaggccctgagagatgccaagctggacaagggccagatccaggagatcgtgctggtgggcggcagcacccgcatccccaagatccagaagctgctgcaggacttcttcaacgggaaggagctgaacaagagcatcaacccagatgaagctgtggcctacggggctgctgtgcaggccgccatcctgattggagacaagtcagaaaatgtgcaggacctgctgctgctggatgtgacccccctgagcctgggcatcgagacagctggaggagtgatgacccccctcatcaagaggaacaccaccatccccaccaagcagacccagaccttcaccacctacagcgacaaccagagctctgtgctggtgcaggtgtatgaaggagagcgggccatgaccaaggacaacaacctgctgggcaagtttgacctgaccggcatccccccagccccccggggcgtgccccagatcgaggtgacctttgatattgatgccaacggcatcctgaatgtgacagctgctgacaagagcacaggcaaggagaacaagatcaccatcaccaatgacaagggccgcctgagcaaggatgacatcgacaggatggtgcaggaggccgagcgctacaagtcagaagatgaggccaacagagacagagtggccgccaagaatgccctggagagctacacctacaacatcaagcagacagtggaggatgagaagctgcggggcaagatcagcgagcaggacaagaacaagatcctggacaagtgccaggaggtgatcaactggctggacaggaaccagatggccgagaaggatgaatatgagcacaagcagaaggagctggagcgggtgtgcaaccccatcatcagcaagctgtaccagggcggccctgggggcggcagcggcggcggcggcagcggggccagcggcggccccaccatcgaggaggtggactag

SEQ ID NO: 154987 - DNA, 2523 bp, synthetic construct
  misc_feature 1..2523: note = Description of Artificial Sequence: Synthetic coding sequence
  source 1..2523: mol_type = other DNA
atgtctgtggtgggcatcgacctgggcttccagagctgctacgtggccgtggcccgggccggcggcatcgagaccatcgccaatgagtacagcgaccgctgcaccccagcctgcatcagctttggccccaagaacagaagcatcggggctgctgccaagagccaggtgatcagcaatgccaagaacacagtgcagggcttcaagcgcttccacggccgggccttcagtgacccctttgtggaggccgagaagagcaacctggcctatgacatcgtgcagctgcccaccggcctgaccggcatcaaggtgacctacatggaggaggagaggaacttcaccacagagcaggtgacagccatgctgctgagcaagctgaaggagacagctgagagcgtgctgaagaagcctgtggtggactgtgtggtgtctgtgccctgcttctacacagatgctgagaggagatctgtgatggatgccacccagattgctggcctgaactgcctgcggctgatgaatgagaccacagctgtggccctggcctacggcatctacaagcaggacctgcctgccctggaggagaagcccagaaatgtggtgtttgtggacatgggccacagcgcctaccaggtgtctgtgtgtgccttcaacagaggcaagctgaaggtgctggccacagcctttgacaccaccctgggcggcaggaagtttgatgaggtgctggtgaaccacttctgtgaggagtttgggaagaagtacaagctggacatcaagagcaagatccgggccctgctgcggctgagccaggagtgtgagaagctgaagaagctgatgtctgccaatgccagtgacctgcccctgagcattgagtgcttcatgaatgatgtggatgtgtctggcaccatgaacagaggcaagttcctggagatgtgcaatgacctgctggcccgggtggagccccccctgcggtctgtgctggagcagaccaagctgaagaaggaggacatctatgctgtggagatcgtgggcggggccacccgcatcccagctgtgaaggagaagatcagcaagttcttcggcaaggagctgagcaccaccctgaatgctgatgaagctgtgacccggggctgtgccctgcagtgtgccatcctgagccctgccttcaaggtgcgggagttcagcatcacagatgtggtgccctaccccatcagcctgcgctggaacagccctgctgaggagggcagcagtgactgtgaggtgttcagcaagaaccacgccgcccccttcagcaaggtgctgaccttctacaggaaggagcccttcaccctggaggcctactacagcagcccccaggacctgccctacccagaccctgccatcgcccagttctctgtgcagaaggtgaccccccagagtgatggcagcagcagcaaggtgaaggtgaaggtgcgggtgaatgtgcacggcatcttctctgtgagcagcgccagcctggtggaggtgcacaagtcagaagaaaatgaggagcccatggagacagaccagaatgccaaggaggaggagaagatgcaggtggaccaggaggagccccacgtggaggagcagcagcagcagaccccagctgagaacaaggccgagagcgaggagatggagaccagccaggccggcagcaaggacaagaagatggaccagcccccccaggccaagaaggccaaggtgaagaccagcacagtggacctgcccatcgagaaccagctgctgtggcagattgaccgggagatgctgaacctgtacattgaaaatgaaggcaagatgatcatgcaggacaagctggagaaggagagaaatgatgccaagaatgctgtggaggagtatgtgtatgagatgagggacaagctgtctggagaatatgagaagtttgtgtctgaagatgacagaaattccttcaccctgaagctggaggacacagagaactggctgtatgaagatggagaggaccagcccaagcaggtgtatgtggacaagctggccgagctgaagaacctgggccagcccatcaagatccgcttccaggagagcgaggagcggcccaagctgtttgaggagctgggcaagcagatccagcagtacatgaagatcatcagcagcttcaagaacaaggaggaccagtatgaccacctggatgctgctgacatgaccaaggtggagaagagcaccaatgaggccatggagtggatgaacaacaagctgaacctgcagaacaagcagagcctgaccatggaccctgtggtgaagagcaaggagattgaggccaagatcaaggagctgaccagcacctgcagccccatcatcagcaagcccaagcccaaggtggagccccccaaggaggagcagaagaatgctgagcagaatggacctgtggatggccagggcgacaaccctggcccccaggccgctgagcagggcacagacacagctgtgcccagcgacagcgacaagaagctgcctgagatggacattgattag

SEQ ID NO: 154988 - DNA, 447 bp, synthetic construct
  misc_feature 1..447: note = Description of Artificial Sequence: Synthetic coding sequence
  source 1..447: mol_type = other DNA
atgtctgtggtgggcatcgacctgggcttccagagctgctacgtggccgtggcccgggccggcggcatcgagaccatcgccaatgagtacagcgaccgctgcaccccagcctgcatcagctttggccccaagaacagaagcatcggggctgctgccaagagccaggtgatcagcaatgccaagaacacagtgcagggcttcaagcgcttccacggccgggccttcagtgacccctttgtggaggccgagaagagcaacctggcctatgacatcgtgcagctgcccaccggcctgaccggcatcaaggtgacctacatggaggaggagcagaatggacctgtggatggccagggcgacaaccctggcccccaggccgctgagcagggcacagacacagctgtgcccagcgacagcgacaagaagctgcctgagatggacattgattag

SEQ ID NO: 154989 - DNA, 1422 bp, synthetic construct
  misc_feature 1..1422: note = Description of Artificial Sequence: Synthetic coding sequence
  source 1..1422: mol_type = other DNA
atgtctgtggtgggcatcgacctgggcttccagagctgctacgtggccgtggcccgggccggcggcatcgagaccatcgccaatgagtacagcgaccgctgcaccccagcctgcatcagctttggccccaagaacagaagcatcggggctgctgccaagagccaggtgatcagcaatgccaagaacacagtgcagggcttcaagcgcttccacggccgggccttcagtgacccctttgtggaggccgagaagagcaacctggcctatgacatcgtgcagctgcccaccggcctgaccggcatcaaggtgacctacatggaggaggagaggaacttcaccacagagcaggtgacagccatgctgctgagcaagctgaaggagacagctgagagcgtgctgaagaagcctgtggtggactgtgtggtgtctgtgccctgcttctacacagatgctgagaggagatctgtgatggatgccacccagattgctggcctgaactgcctgcggctgatgaatgagaccacagctgtggccctggcctacggcatctacaagcaggacctgcctgccctggaggagaagcccagaaatgtggtgtttgtggacatgggccacagcgcctaccaggtgtctgtgtgtgccttcaacagaggcaagctgaaggtgctggccacagcctttgacaccaccctgggcggcaggaagtttgatgaggtgctggtgaaccacttctgtgaggagtttgggaagaagtacaagctggacatcaagagcaagatccgggccctgctgcggctgagccaggagtgtgagaagctgaagaagctgatgtctgccaatgccagtgacctgcccctgagcattgagtgcttcatgaatgatgtggatgtgtctggcaccatgaacagaggcaagttcctggagatgtgcaatgacctgctggcccgggtggagccccccctgcggtctgtgctggagcagaccaagctgaagaaggaggacatctatgctgtggagatcgtgggcggggccacccgcatcccagctgtgaaggagaagatcagcaagttcttcggcaaggagctgagcaccaccctgaatgctgatgaagctgtgacccggggctgtgccctgcagtgtgccatcctgagccctgccttcaaggtgcgggagttcagcatcacagatgtggtgccctaccccatcagcctgcgctggaacagccctgctgaggagggcagcagtgactgtgaggtgttcagcaagaaccacgccgcccccttcagcaaggtgctgaccttctacaggaaggagcccttcaccctggaggcctactacagcagccctggctttgccctgagccgcagctgctacagcatcatcaagagcctgctgagcctgatggcccctgtgcagaagtag

SEQ ID NO: 154990 - DNA, 1965 bp, synthetic construct
  misc_feature 1..1965: note = Description of Artificial Sequence: Synthetic coding sequence
  source 1..1965: mol_type = other DNA
atgaagctgagcctggtggccgccatgctgctgctgctgtctgctgcccgggcagaggaggaggacaagaaggaggatgtgggcaccgtggtgggcatcgacctgggcaccacctacagctgtgtgggcgtcttcaagaatggccgggtggagatcatcgccaatgaccagggcaaccgcatcacccccagctatgtggccttcaccccagagggggagcggctgattggagatgctgccaagaaccagctgaccagcaacccagaaaatacagtgtttgatgccaagaggctgattggaagaacctggaatgaccccagcgtgcagcaggacatcaagttcctgcccttcaaggtggtggagaagaagaccaagccctacatccaggtggacatcggcggcggccagaccaagacctttgcccctgaggagatcagcgccatggtgctgaccaagatgaaggagacagctgaggcctacctgggcaagaaggtgacccatgctgtggtgacagtgcctgcctacttcaatgatgcccagaggcaggccaccaaggatgctggcaccatcgccggcctgaatgtgatgaggatcatcaatgagcccacagctgctgccatcgcctacggcctggacaagcgggagggggagaagaacatcctggtgtttgacctgggcggcggcacctttgatgtgtccctgctgaccatcgacaatggagtgtttgaggtggtggccaccaacggggacacccacctgggcggggaggactttgaccagagggtgatggagcacttcatcaagctgtacaagaagaagacaggcaaggatgtgaggaaggacaacagagctgtgcagaagctgcggcgggaggtggagaaggccaagagggccctgagcagccagcaccaggccagaattgaaattgagagcttctatgaaggagaggacttcagcgagaccctgacccgggccaagtttgaggagctgaacatggacctcttccgcagcaccatgaagcctgtgcagaaggtgctggaggacagcgacctgaagaagagtgacattgatgaaattgtgctggtgggcggcagcacccgcatccccaagatccagcagctggtgaaggagttcttcaacgggaaggagcccagccggggcatcaacccagatgaagctgtggcctacggggctgctgtgcaggccggcgtgctgagcggggaccaggacacaggagacctggtgctgctggatgtgtgccccctgaccctgggcatcgagaccgtgggcggcgtgatgaccaagctgatccccaggaacacagtggtgcccaccaagaagagccagatcttcagcacagccagtgacaaccagcccaccgtgaccatcaaggtgtatgaaggagagcggcccctgaccaaggacaaccacctgctgggcacctttgacctgaccggcatccccccagccccccggggcgtgccccagatcgaggtgacctttgaaattgatgtgaatggcatcctgcgggtgacagctgaggacaagggcaccggcaacaagaacaagatcaccatcaccaatgaccagaaccggctgaccccagaggagattgaaagaatggtgaatgatgctgagaagtttgctgaggaggacaagaagctgaaggagagaattgacaccagaaatgagctggagagctatgcctacagcctgaagaaccagatcggggacaaggagaagctgggcggcaagctgagcagcgaggacaaggagaccatggagaaggctgtggaggagaagattgagtggctggagagccaccaggatgctgacatcgaggacttcaaggccaagaagaaggagctggaggagatcgtgcagcccatcatcagcaagctgtatggcagcgctggccccccacccactggagaggaggacacagctgagaaggatgagctgtag

SEQ ID NO: 154991 - DNA, 837 bp, synthetic construct
  misc_feature 1..837: note = Description of Artificial Sequence: Synthetic coding sequence
  source 1..837: mol_type = other DNA
atgaagctgagcctggtggccgccatgctgctgctgctgtctgctgcccgggcagaggaggaggacaagaaggaggatgtgggcaccgtggtgggcatcgacctgggcaccacctacagctgtgtgggcgtcttcaagaatggccgggtggagatcatcgccaatgaccagggcaaccgcatcacccccagctatgtggccttcaccccagagggggagcggctgattggagatgctgccaagaaccagctgaccagcaacccagaaaatacagtgtttgatgccaagaggctgattggaagaacctggaatgaccccagcgtgcagcaggacatcaagttcctgcccttcaaggtggtggagaagaagaccaagccctacatccaggtggacatcggcggcggccagaccaagacctttgcccctgaggagatcagcgccatggtgctgaccaagatgaaggagacagctgaggcctacctgggcaagaaggtgacccatgctgtggtgacagtgcctgcctacttcaatgatgcccagaggcaggccaccaaggatgctggcaccatcgccggcctgaatgtgatgaggatcatcaatgagcccacagctgctgccatcgcctacggcctggacaagcgggagggggagaagaacatcctggtgtttgacctgggcggcggcacctttgatgtgtccctgctgaccatcgacaatggagtgtttgaggtggtggccaccaacggggacacccacctgggcggggaggactttgaccagagggtgatggagcacttcatcaagctgtacaagaagaagaccttcctgcggccctag

SEQ ID NO: 154992 - DNA, 1932 bp, synthetic construct
  misc_feature 1..1932: note = Description of Artificial Sequence: Synthetic coding sequence
  source 1..1932: mol_type = other DNA
atgcaggccccccgggagctggccgtgggcatcgacctgggcaccacctacagctgtgtgggcgtcttccagcagggccgggtggagatcctggccaatgaccagggcaacagaaccacccccagctatgtggccttcacagacacagagcggctggtgggagatgctgccaagagccaggccgccctgaacccccacaacacagtgtttgatgccaagaggctcatcggcaggaagtttgctgacaccaccgtgcagagcgacatgaagcactggcccttccgggtggtgtctgagggcggcaagcccaaggtgcgggtgtgctacagaggagaggacaagaccttctacccagaggagatcagctccatggtgctgagcaagatgaaggagacagctgaggcctacctgggccagcctgtgaagcacgccgtcatcaccgtgcctgcctacttcaatgacagccagaggcaggccaccaaggatgctggggccatcgccggcctgaatgtgctgcgcatcatcaatgagcccacagctgctgccatcgcctacggcctggacagaagaggagctggggagagaaatgtgctgatctttgacctgggcggcggcacctttgatgtgtctgtgctgagcattgatgctggggtgtttgaggtgaaggccacagctggggacacccacctgggcggagaagattttgacaaccggctggtgaaccacttcatggaggagttccggaggaagcacggcaaggacctgagcggcaacaagagggccctgcggcggctgaggacagcctgtgagcgggccaagaggaccctgagcagcagcacccaggccaccctggagattgacagcctgtttgagggcgtggacttctacaccagcatcacccgggccaggtttgaggagctgtgcagcgacctcttccgcagcaccctggagcctgtggagaaggccctgagagatgccaagctggacaaggcccagatccatgatgtggtgctggtgggcggcagcacccgcatccccaaggtgcagaagctgctgcaggacttcttcaacgggaaggagctgaacaagagcatcaacccagatgaggccgtggcctatggagctgctgtgcaggccgctgtgctgatgggagacaagtgtgagaaggtgcaggacctgctgctgctggatgtggcccccctgagcctgggcctggagacagctgggggcgtgatgaccaccctcatccagagaaatgccaccatccccaccaagcagacccagaccttcaccacctacagcgacaaccagcccggggtcttcatccaggtgtatgaaggagagcgggccatgaccaaggacaacaacctgctgggccgctttgagctgagcggcatccccccagccccccggggcgtgccccagatcgaggtgacctttgatattgatgccaacggcatcctgtctgtgacagccacagacaggagcacaggcaaggccaacaagatcaccatcaccaatgacaagggccgcctgagcaaggaggaggtggagaggatggtgcatgaggccgagcagtacaaggccgaggatgaggcccagagggacagagtggccgccaagaacagcctggaggcccacgtgttccacgtgaagggcagcctgcaggaggagagcctgcgggacaagatcccagaagaagatagaaggaagatgcaggacaagtgccgggaggtgctggcctggctggagcacaaccagctggccgagaaggaggagtatgagcaccagaagcgggagctggagcagatctgccggcccatcttcagccggctgtatggaggccctggggtgcctgggggcagcagctgtggcacccaggcccggcagggcgaccccagcacaggccccatcatcgaggaggtggactag

SEQ ID NO: 154993 - DNA, 1860 bp, synthetic construct
  misc_feature 1..1860: note = Description of Artificial Sequence: Synthetic coding sequence
  source 1..1860: mol_type = other DNA
atgcaggccccccgggagctggccgtgggcatcgacctgggcaccacctacagctgtgtggccttcacagacacagagcggctggtgggagatgctgccaagagccaggccgccctgaacccccacaacacagtgtttgatgccaagaggctcatcggcaggaagtttgctgacaccaccgtgcagagcgacatgaagcactggcccttccgggtggtgtctgagggcggcaagcccaaggtgcgggtgtgctacagaggagaggacaagaccttctacccagaggagatcagctccatggtgctgagcaagatgaaggagacagctgaggcctacctgggccagcctgtgaagcacgccgtcatcaccgtgcctgcctacttcaatgacagccagaggcaggccaccaaggatgctggggccatcgccggcctgaatgtgctgcgcatcatcaatgagcccacagctgctgccatcgcctacggcctggacagaagaggagctggggagagaaatgtgctgatctttgacctgggcggcggcacctttgatgtgtctgtgctgagcattgatgctggggtgtttgaggtgaaggccacagctggggacacccacctgggcggagaagattttgacaaccggctggtgaaccacttcatggaggagttccggaggaagcacggcaaggacctgagcggcaacaagagggccctgcggcggctgaggacagcctgtgagcgggccaagaggaccctgagcagcagcacccaggccaccctggagattgacagcctgtttgagggcgtggacttctacaccagcatcacccgggccaggtttgaggagctgtgcagcgacctcttccgcagcaccctggagcctgtggagaaggccctgagagatgccaagctggacaaggcccagatccatgatgtggtgctggtgggcggcagcacccgcatccccaaggtgcagaagctgctgcaggacttcttcaacgggaaggagctgaacaagagcatcaacccagatgaggccgtggcctatggagctgctgtgcaggccgctgtgctgatgggagacaagtgtgagaaggtgcaggacctgctgctgctggatgtggcccccctgagcctgggcctggagacagctgggggcgtgatgaccaccctcatccagagaaatgccaccatccccaccaagcagacccagaccttcaccacctacagcgacaaccagcccggggtcttcatccaggtgtatgaaggagagcgggccatgaccaaggacaacaacctgctgggccgctttgagctgagcggcatccccccagccccccggggcgtgccccagatcgaggtgacctttgatattgatgccaacggcatcctgtctgtgacagccacagacaggagcacaggcaaggccaacaagatcaccatcaccaatgacaagggccgcctgagcaaggaggaggtggagaggatggtgcatgaggccgagcagtacaaggccgaggatgaggcccagagggacagagtggccgccaagaacagcctggaggcccacgtgttccacgtgaagggcagcctgcaggaggagagcctgcgggacaagatcccagaagaagatagaaggaagatgcaggacaagtgccgggaggtgctggcctggctggagcacaaccagctggccgagaaggaggagtatgagcaccagaagcgggagctggagcagatctgccggcccatcttcagccggctgtatggaggccctggggtgcctgggggcagcagctgtggcacccaggcccggcagggcgaccccagcacaggccccatcatcgaggaggtggactag

SEQ ID NO: 154994 - DNA, 2337 bp, synthetic construct
  misc_feature 1..2337: note = Description of Artificial Sequence: Synthetic coding sequence
  source 1..2337: mol_type = other DNA
atgagcaagaggaagctgatccccaagctgagcatccagagccctgtgctgcacaccaacctgaatgtgcagagcacccacccccccctgaagaaggaggacctgcaccgcatcagcaaggacagcctggagagtgacagcgagagcctgacccaggagatcatgtgccacagcgagtttgatgaccgcatcagaggaaatggcatggagccagacagcctggatgaggaggagagcccccgctggggcagcctgcacgagatggaggaggaggccagcggcaaggccgcccagatggcccgggagcagaaccaccacacctgggaccagggcgccaacaaccggcagcagcccatcgaggacaagtacagcgacctgcgctatgaccccaactggaagagcaagaaggaggagggccagctgctgtctgtggaggccctgcctgagagcacagacagcagcctggagaacctgcccctggcccccctgtaccccagccaggagacctccatggagctgagcggcggcaaaggagagcagaaggagagcccccagagcgctgccagcctgctgggcagcgagttcctgagccccaactatgagcacggggcccggcgcagcaagcccttcagcgagctgagtgacagcgacctggaggagaagagcagcagcctgagcccctacgtgaagagcagcagcagccacaatgaggtgttcctgcccggcagccggggccccaggaggaggaagagcaagcagcactttgtggagaagaacaagctgaccctgggcctgcccacccccaagacagacagctacctgcagctgcacaacaagaagagaggagagagccaccctgagcagatctcctaccctgtgcgggtgacagacaagaccagcatccagaatgccaaggagatggagaatgctgccatcgaccctgaggacaagtggcaccagagggcccagcagctgaagaactaccaggagcactggagccagtatgagagcaccaagagcagcaatgtgccccggggccagcccagcgacatggtgaatgaccaccagcccagcagaagacctgccaagctgaagatcaggaagcagtgcaagcaccagaatggcctgaagagcagcaccacagaggaggtgacagccagccagggcaaccagaacaaccccccccggcagcagcagaaccagaacaagcccctggacaccagcaccaagccagagagcatcgtcatcatgcacgccagcaacaatgatgtgcaggccagccgggccctgcggagccacaacctgaaggagaccagcaacacctttgccccacccaagcaggcctttgacaaggtgctgagcaagaacagcacaggctgtgacagcggcctgaatgtgaacaaggagcggggccacaaggaccaggaggagaagcgcttctcctaccagcagctgcacaccctgagtgacatggacctgaacaacctgaatgagctgagcaagagacatgtgctgctgagccagaagggcagccagtttgtgtaccacatcaacacccacggcagcaccaagaacaagaagcagctgaagcagccctacacagagaccaagtacagaaacctggagatgctgtggaagttccacagcagcagtgacagccagacagtgcgggccagcccagacagctggctgacccagatcatggagcagcaccagcaggccctggtgcagctgacagatgtgcagcccagcgagggcgccctgagctctgtgaccctgccccccatcctgagccgggtggagagcgagagccagctgagcagcgagaggagccagaggaaccaggtgaagatcagccgcagcaacagcgagggctacctgttccagctggagaagggcaagaagcacaagaagaggagcagcagcaagaacaccaagctgaagggctaccagaagagagatgtgaagctgggcggcctgggccctgactttgagagcatccgggacaagacccagaagctgatccagcagaaggagtatgccaagcaggtgaaggagtacaacatgaagaccctgagcatcctgagcaagccccagacagagaagacccagaagaagagcgccatcccccggcagaaggccctggagtatgccaagaccatccccaagcccaagcccagcaacctgacccaccaggccagcaaggagcagaagaaccccacctacgccggcaaggaggagagcctgcctgagatcagcctgctggagatcctgcagaacagacatgagcgggagaagcaggccgtggccgccttcaaggtgctgcacatcgtgtag

SEQ ID NO: 154995 - DNA, 1482 bp, synthetic construct
  misc_feature 1..1482: note = Description of Artificial Sequence: Synthetic coding sequence
  source 1..1482: mol_type = other DNA
atgagcaaaggacctgctgtgggcatcgacctgggcaccacctacagctgtgtgggcgtcttccagcacggcaaggtggagatcatcgccaatgaccagggcaacagaaccacccccagctatgtggccttcacagacacagagcggctgattggagatgctgccaagaaccaggtggccatgaaccccaccaacacagtgtttgatgccaagaggctcatcggccgccgctttgatgatgctgtggtgcagagcgacatgaagcactggcccttcatggtggtgaatgatgctggccggcccaaggtgcaggtggagtacaagggggagaccaagagcttctacccagaggaggtgtcctccatggtgctgaccaagatgaaggagattgctgaggcctacctgggcaagacagtgaccaatgctgtggtgacagtgcctgcctacttcaatgacagccagaggcaggccaccaaggatgctggcaccatcgccggcctgaatgtgctgcgcatcatcaatgagcccacagctgctgccatcgcctacggcctggacaagaaggtgggcgctgagagaaatgtgctgatctttgacctgggcggcggcacctttgatgtgtccatcctgaccattgaagatggcatctttgaggtgaagagcacagctggggacacccacctgggcggagaagattttgacaacaggatggtgaaccacttcatcgccgagttcaagaggaagcacaagaaggacatcagcgagaacaagagagctgtgcggcggctgaggacagcctgtgagcgggccaagaggaccctgagcagcagcacccaggccagcattgaaattgacagcctgtatgagggcatcgacttctacaccagcatcacccgggccaggtttgaggagctgaatgctgacctcttccggggcaccctggaccctgtggagaaggccctgagagatgccaagctggacaagagccagatccatgacatcgtgctggtgggcggcagcacccgcatccccaagatccagaagctgctgcaggacttcttcaacgggaaggagctgaacaagagcatcaacccagatgaggccgtggcctatggagctgctgtgcaggccgccatcctgagcggggacaagtcagaaaatgtgcaggacctgctgctgctggatgtgacccccctgagcctgggcattgaaacagctgggggcgtgatgacagtgctgatcaagaggaacaccaccatccccaccaagcagacccagaccttcaccacctacagcgacaaccagcccggggtgctgatccaggtgtatgaaggagagcgggccatgaccaaggacaacaacctgctgggcaagtttgagctgaccggcatgcctgggggcatgcctgggggcttccctgggggcggggccccacccagcggcggggccagcagcggccccaccatcgaggaggtggactag

SEQ ID NO: 154996 - DNA, 1884 bp, synthetic construct
  misc_feature 1..1884: note = Description of Artificial Sequence: Synthetic coding sequence
  source 1..1884: mol_type = other DNA
atgagcaaaggacctgctgtgggcatcgacctgggcaccacctacagctgtgtgggcgtcttccagcacggcaaggtggagatcatcgccaatgaccagggcaacagaaccacccccagctatgtggccttcacagacacagagcggctgattggagatgctgccaagaaccaggtggccatgaaccccaccaacacagtgtttgatgccaagaggctcatcggccgccgctttgatgatgctgtggtgcagagcgacatgaagcactggcccttcatggtggtgaatgatgctggccggcccaaggtgcaggtggagtacaagggggagaccaagagcttctacccagaggaggtgtcctccatggtgctgaccaagatgaaggagattgctgaggcctacctgggcaaggccaccaaggatgctggcaccatcgccggcctgaatgtgctgcgcatcatcaatgagcccacagctgctgccatcgcctacggcctggacaagaaggtgggcgctgagagaaatgtgctgatctttgacctgggcggcggcacctttgatgtgtccatcctgaccattgaagatggcatctttgaggtgaagagcacagctggggacacccacctgggcggggaggactttgacaacaggatggtgaaccacttcatcgccgagttcaagaggaagcacaagaaggacatcagcgagaacaagagagctgtgcggcggctgaggacagcctgtgagcgggccaagaggaccctgagcagcagcacccaggccagcattgaaattgacagcctgtatgagggcatcgacttctacaccagcatcacccgggccaggtttgaggagctgaatgctgacctcttccggggcaccctggaccctgtggagaaggccctgagagatgccaagctggacaagagccagatccatgacatcgtgctggtgggcggcagcacccgcatccccaagatccagaagctgctgcaggacttcttcaacgggaaggagctgaacaagagcatcaacccagatgaagctgtggcctacggggctgctgtgcaggccgccatcctgagcggggacaagtcagaaaatgtgcaggacctgctgctgctggatgtgacccccctgagcctgggcatcgagacagctggaggagtgatgacagtgctgatcaagaggaacaccaccatccccaccaagcagacccagaccttcaccacctacagcgacaaccagcccggggtgctgatccaggtgtatgaaggagagcgggccatgaccaaggacaacaacctgctgggcaagtttgagctgaccggcatccccccagccccccggggcgtgccccagatcgaggtgacctttgatattgatgccaacggcatcctgaatgtgtctgctgtggacaagagcacaggcaaggagaacaagatcaccatcaccaatgacaagggccgcctgagcaaggaggacatcgagaggatggtgcaggaggccgagaagtacaaggcagaagatgagaagcagagggacaaggtgagcagcaagaacagcctggagagctatgccttcaacatgaaggccaccgtggaggatgagaagctgcagggcaagatcaatgatgaggacaagcagaagatcctggacaagtgcaatgagatcatcaactggctggacaagaaccagacagctgagaaggaggagtttgagcaccagcagaaggagctggagaaggtgtgcaaccccatcatcaccaagctgtaccagagcgctgggggcatgcctgggggcatgcctgggggcttccctgggggcggggccccacccagcggcggggccagcagcggccccaccatcgaggaggtggactag

SEQ ID NO: 154997 - DNA, 1941 bp, synthetic construct
  misc_feature 1..1941: note = Description of Artificial Sequence: Synthetic coding sequence
  source 1..1941: mol_type = other DNA
atgagcaaaggacctgctgtgggcatcgacctgggcaccacctacagctgtgtgggcgtcttccagcacggcaaggtggagatcatcgccaatgaccagggcaacagaaccacccccagctatgtggccttcacagacacagagcggctgattggagatgctgccaagaaccaggtggccatgaaccccaccaacacagtgtttgatgccaagaggctcatcggccgccgctttgatgatgctgtggtgcagagcgacatgaagcactggcccttcatggtggtgaatgatgctggccggcccaaggtgcaggtggagtacaagggggagaccaagagcttctacccagaggaggtgtcctccatggtgctgaccaagatgaaggagattgctgaggcctacctgggcaagacagtgaccaatgctgtggtgacagtgcctgcctacttcaatgacagccagaggcaggccaccaaggatgctggcaccatcgccggcctgaatgtgctgcgcatcatcaatgagcccacagctgctgccatcgcctacggcctggacaagaaggtgggcgctgagagaaatgtgctgatctttgacctgggcggcggcacctttgatgtgtccatcctgaccattgaagatggcatctttgaggtgaagagcacagctggggacacccacctgggcggagaagattttgacaacaggatggtgaaccacttcatcgccgagttcaagaggaagcacaagaaggacatcagcgagaacaagagagctgtgcggcggctgaggacagcctgtgagcgggccaagaggaccctgagcagcagcacccaggccagcattgaaattgacagcctgtatgagggcatcgacttctacaccagcatcacccgggccaggtttgaggagctgaatgctgacctcttccggggcaccctggaccctgtggagaaggccctgagagatgccaagctggacaagagccagatccatgacatcgtgctggtgggcggcagcacccgcatccccaagatccagaagctgctgcaggacttcttcaacgggaaggagctgaacaagagcatcaacccagatgaggccgtggcctatggagctgctgtgcaggccgccatcctgagcggggacaagtcagaaaatgtgcaggacctgctgctgctggatgtgacccccctgagcctgggcattgaaacagctgggggcgtgatgacagtgctgatcaagaggaacaccaccatccccaccaagcagacccagaccttcaccacctacagcgacaaccagcccggggtgctgatccaggtgtatgaaggagagcgggccatgaccaaggacaacaacctgctgggcaagtttgagctgaccggcatccccccagccccccggggcgtgccccagatcgaggtgacctttgatattgatgccaacggcatcctgaatgtgtctgctgtggacaagagcacaggcaaggagaacaagatcaccatcaccaatgacaagggccgcctgagcaaagaagatattgaaagaatggtgcaggaggccgagaagtacaaggccgaggatgagaagcagagggacaaggtgagcagcaagaacagcctggagagctatgccttcaacatgaaggccaccgtggaggatgagaagctgcagggcaagatcaatgatgaggacaagcagaagatcctggacaagtgcaatgagatcatcaactggctggacaagaaccagacagctgagaaggaggagtttgagcaccagcagaaggagctggagaaggtgtgcaaccccatcatcaccaagctgtaccagagcgctgggggcatgcctgggggcatgcctgggggcttccctgggggcggggcccctccttctggaggagccagcagcggccccaccatcgaggaggtggactag

SEQ ID NO: 154998 - DNA, 1503 bp, synthetic construct
  misc_feature 1..1503: note = Description of Artificial Sequence: Synthetic coding sequence
  source 1..1503: mol_type = other DNA
atgagcaaaggacctgctgtgggcatcgacctgggcaccacctacagctgtgtgggcgtcttccagcacggcaaggtggagatcatcgccaatgaccagggcaacagaaccacccccagctatgtggccttcacagacacagagcggctgattggagatgctgccaagaaccaggtggccatgaaccccaccaacacagtgtttgatgccaagaggctcatcggccgccgctttgatgatgctgtggtgcagagcgacatgaagcactggcccttcatggtggtgaatgatgctggccggcccaagcacaagaaggacatcagcgagaacaagagagctgtgcggcggctgaggacagcctgtgagcgggccaagaggaccctgagcagcagcacccaggccagcattgaaattgacagcctgtatgagggcatcgacttctacaccagcatcacccgggccaggtttgaggagctgaatgctgacctcttccggggcaccctggaccctgtggagaaggccctgagagatgccaagctggacaagagccagatccatgacatcgtgctggtgggcggcagcacccgcatccccaagatccagaagctgctgcaggacttcttcaacgggaaggagctgaacaagagcatcaacccagatgaggccgtggcctatggagctgctgtgcaggccgccatcctgagcggggacaagtcagaaaatgtgcaggacctgctgctgctggatgtgacccccctgagcctgggcattgaaacagctgggggcgtgatgacagtgctgatcaagaggaacaccaccatccccaccaagcagacccagaccttcaccacctacagcgacaaccagcccggggtgctgatccaggtgtatgaaggagagcgggccatgaccaaggacaacaacctgctgggcaagtttgagctgaccggcatccccccagccccccggggcgtgccccagatcgaggtgacctttgatattgatgccaacggcatcctgaatgtgtctgctgtggacaagagcacaggcaaggagaacaagatcaccatcaccaatgacaagggccgcctgagcaaagaagatattgaaagaatggtgcaggaggccgagaagtacaaggccgaggatgagaagcagagggacaaggtgagcagcaagaacagcctggagagctatgccttcaacatgaaggccaccgtggaggatgagaagctgcagggcaagatcaatgatgaggacaagcagaagatcctggacaagtgcaatgagatcatcaactggctggacaagaaccagacagctgagaaggaggagtttgagcaccagcagaaggagctggagaaggtgtgcaaccccatcatcaccaagctgtaccagagcgctgggggcatgcctgggggcatgcctgggggcttccctgggggcggggcccctccttctggaggagccagcagcggccccaccatcgaggaggtggactag

SEQ ID NO: 154999 - DNA, 1233 bp, synthetic construct
  misc_feature 1..1233: note = Description of Artificial Sequence: Synthetic coding sequence
  source 1..1233: mol_type = other DNA
atggtgaaccacttcatcgccgagttcaagaggaagcacaagaaggacatcagcgagaacaagagagctgtgcggcggctgaggacagcctgtgagcgggccaagaggaccctgagcagcagcacccaggccagcattgaaattgacagcctgtatgagggcatcgacttctacaccagcatcacccgggccaggtttgaggagctgaatgctgacctcttccggggcaccctggaccctgtggagaaggccctgagagatgccaagctggacaagagccagatccatgacatcgtgctggtgggcggcagcacccgcatccccaagatccagaagctgctgcaggacttcttcaacgggaaggagctgaacaagagcatcaacccagatgaggccgtggcctatggagctgctgtgcaggccgccatcctgagcggggacaagtcagaaaatgtgcaggacctgctgctgctggatgtgacccccctgagcctgggcattgaaacagctgggggcgtgatgacagtgctgatcaagaggaacaccaccatccccaccaagcagacccagaccttcaccacctacagcgacaaccagcccggggtgctgatccaggtgtatgaaggagagcgggccatgaccaaggacaacaacctgctgggcaagtttgagctgaccggcatccccccagccccccggggcgtgccccagatcgaggtgacctttgatattgatgccaacggcatcctgaatgtgtctgctgtggacaagagcacaggcaaggagaacaagatcaccatcaccaatgacaagggccgcctgagcaaagaagatattgaaagaatggtgcaggaggccgagaagtacaaggccgaggatgagaagcagagggacaaggtgagcagcaagaacagcctggagagctatgccttcaacatgaaggccaccgtggaggatgagaagctgcagggcaagatcaatgatgaggacaagcagaagatcctggacaagtgcaatgagatcatcaactggctggacaagaaccagacagctgagaaggaggagtttgagcaccagcagaaggagctggagaaggtgtgcaaccccatcatcaccaagctgtaccagagcgctgggggcatgcctgggggcatgcctgggggcttccctgggggcggggcccctccttctggaggagccagcagcggccccaccatcgaggaggtggactag

SEQ ID NO: 155000 - DNA, 1941 bp, synthetic construct; identical to SEQ ID NO: 154997
  misc_feature 1..1941: note = Description of Artificial Sequence: Synthetic coding sequence
  source 1..1941: mol_type = other DNA

SEQ ID NO: 155001 - DNA, 2040 bp, synthetic construct
  misc_feature 1..2040: note = Description of Artificial Sequence: Synthetic coding sequence
  source 1..2040: mol_type = other DNA
atgatcagcgccagcagagctgctgctgcccggctggtgggcgccgccgccagccggggccccacagctgcccggcaccaggacagctggaatggcctgagccatgaggccttccggctggtgtccagaagagattatgccagcgaggccatcaagggagctgtggtgggcatcgacctgggcaccaccaacagctgtgtggccgtgatggagggcaagcaggccaaggtgctggagaatgctgagggcgcccggaccaccccatctgtggtggccttcaccgcagatggagagcggctggtgggcatgcctgccaagaggcaggccgtgaccaaccccaacaacaccttctacgccaccaagaggctcatcggccgccgctatgatgatcctgaggtgcagaaggacatcaagaatgtgcccttcaagatcgtgcgggccagcaatggagatgcctgggtggaggcccacggcaagctgtacagccccagccagatcggggcctttgtgctgatgaagatgaaggagacagctgagaactacctgggccacacagccaagaatgctgtgatcaccgtgcctgcctacttcaatgacagccagaggcaggccaccaaggatgctggccagatcagcggcctgaatgtgctgcgggtcatcaatgagcccacagctgctgccctggcctacggcctggacaagtctgaggacaaggtgattgctgtgtatgacctgggcggcggcacctttgacatcagcatcctggagatccagaagggcgtgtttgaggtgaagagcaccaacggggacaccttcctgggcggggaggactttgaccaggccctgctgcggcacatcgtgaaggagttcaagcgggagaccggggtggacctgaccaaggacaacatggccctgcagagggtgcgggaggccgctgagaaggccaagtgtgagctgagcagctctgtgcagacagacatcaacctgccctacctgaccatggacagcagcggccccaagcacctgaacatgaagctgacccgggcccagtttgagggcatcgtgacagacctgatccggaggaccatcgccccctgccagaaggccatgcaggatgctgaggtgtccaagagtgacatcggggaggtgatcctggtgggcggcatgaccaggatgcccaaggtgcagcagacagtgcaggacctgtttggccgggcccccagcaaggctgtgaacccagatgaggccgtggccatcggggccgccatccagggcggcgtgctggccggagatgtgacagatgtgctgctgctggatgtgacccccctgagcctgggcatcgagaccctgggcggcgtcttcaccaagctgatcaacagaaacaccaccatccccaccaagaagagccaggtgttcagcacagctgctgatggccagacccaggtggagatcaaggtgtgccagggcgagcgggagatggccggggacaacaagctgctgggccagttcaccctcatcggcatccccccagccccccggggcgtgccccagatcgaggtgacctttgatattgatgccaatggaattgtgcacgtgtctgccaaggacaagggcaccggccgggagcagcagatcgtcatccagagcagcggcggcctgagcaaggatgacatcgagaacatggtgaagaatgctgagaagtatgcagaagaagatagaaggaagaaggagcgggtggaggccgtgaacatggccgagggcatcatccatgacacagagaccaagatggaggagttcaaggaccagctgcctgcagatgagtgcaacaagctgaaggaggagatcagcaagatgagggagctgctggccaggaaggacagcgagactggagagaacatccggcaggccgccagcagcctgcagcaggccagcctgaagctgtttgagatggcctacaagaagatggccagcgagcgggagggcagcggcagcagcggcactggagagcagaaggaggaccagaaggaggagaagcagtag

SEQ ID NO: 155002 - DNA, 1998 bp, synthetic construct
  misc_feature 1..1998: note = Description of Artificial Sequence: Synthetic coding sequence
  source 1..1998: mol_type = other DNA
atgatcagcgccagcagagctgctgctgcccggcaccaggacagctggaatggcctgagccatgaggccttccggctggtgtccagaagagattatgccagcgaggccatcaagggagctgtggtgggcatcgacctgggcaccaccaacagctgtgtggccgtgatggagggcaagcaggccaaggtgctggagaatgctgagggcgcccggaccaccccatctgtggtggccttcaccgcagatggagagcggctggtgggcatgcctgccaagaggcaggccgtgaccaaccccaacaacaccttctacgccaccaagaggctcatcggccgccgctatgatgatcctgaggtgcagaaggacatcaagaatgtgcccttcaagatcgtgcgggccagcaatggagatgcctgggtggaggcccacggcaagctgtacagccccagccagatcggggcctttgtgctgatgaagatgaaggagacagctgagaactacctgggccacacagccaagaatgctgtgatcaccgtgcctgcctacttcaatgacagccagaggcaggccaccaaggatgctggccagatcagcggcctgaatgtgctgcgggtcatcaatgagcccacagctgctgccctggcctacggcctggacaagtctgaggacaaggtgattgctgtgtatgacctgggcggcggcacctttgacatcagcatcctggagatccagaagggcgtgtttgaggtgaagagcaccaacggggacaccttcctgggcggggaggactttgaccaggccctgctgcggcacatcgtgaaggagttcaagcgggagaccggggtggacctgaccaaggacaacatggccctgcagagggtgcgggaggccgctgagaaggccaagtgtgagctgagcagctctgtgcagacagacatcaacctgccctacctgaccatggacagcagcggccccaagcacctgaacatgaagctgacccgggcccagtttgagggcatcgtgacagacctgatccggaggaccatcgccccctgccagaaggccatgcaggatgctgaggtgtccaagagtgacatcggggaggtgatcctggtgggcggcatgaccaggatgcccaaggtgcagcagacagtgcaggacctgtttggccgggcccccagcaaggctgtgaacccagatgaggccgtggccatcggggccgccatccagggcggcgtgctggccggagatgtgacagatgtgctgctgctggatgtgacccccctgagcctgggcatcgagaccctgggcggcgtcttcaccaagctgatcaacagaaacaccaccatccccaccaagaagagccaggtgttcagcacagctgctgatggccagacccaggtggagatcaaggtgtgccagggcgagcgggagatggccggggacaacaagctgctgggccagttcaccctcatcggcatccccccagccccccggggcgtgccccagatcgaggtgacctttgatattgatgccaatggaattgtgcacgtgtctgccaaggacaagggcaccggccgggagcagcagatcgtcatccagagcagcggcggcctgagcaaggatgacatcgagaacatggtgaagaatgctgagaagtatgcagaagaagatagaaggaagaaggagcgggtggaggccgtgaacatggccgagggcatcatccatgacacagagaccaagatggaggagttcaaggaccagctgcctgcagatgagtgcaacaagctgaaggaggagatcagcaagatgagggagctgctggccaggaaggacagcgagactggagagaacatccggcaggccgccagcagcctgcagcaggccagcctgaagctgtttgagatggcctacaagaagatggccagcgagcgggagggcagcggcagcagcggcactggagagcagaaggaggaccagaaggaggagaagcagtag

SEQ ID NO: 155003 - DNA, 1899 bp, synthetic construct
  misc_feature 1..1899: note = Description of Artificial Sequence: Synthetic coding sequence
  source 1..1899: mol_type = other DNA
atggccctggtgatgaggctgctggacctcttccagggcggcatcatgcaccagaagcagagccgggagcagctgctggtgctgatctgggtgctgcccaccccagcctggcagctgtggaaggtgaacaagcagcgctgctggaggatgcccaaggtgcctgagccccccctgcagctgtggcccctgcagcagatggtgtctgacctgctggagtgccggcccagcgaccggctgagccccacccagaccatccacttcatgctgcccagcgtgtccctggccggggacatgatgatcctgaagtacaggaagaccctgaagatgttccccctgaagctgtctgtgccccccatggtgatgcctgtgctgatgaagatgaaggagacagctgagaactacctgggccacacagccaagaatgctgtgatcaccgtgcctgcctacttcaatgacagccagaggcaggccaccaaggatgctggccagatcagcggcctgaatgtgctgcgggtcatcaatgagcccacagctgctgccctggcctacggcctggacaagtctgaggacaaggtgattgctgtgtatgacctgggcggcggcacctttgacatcagcatcctggagatccagaagggcgtgtttgaggtgaagagcaccaatggagacaccttcctgggcggagaagattttgaccaggccctgctgcggcacatcgtgaaggagttcaagcgggagactggagtggacctgaccaaggacaacatggccctgcagagggtgcgggaggccgctgagaaggccaagtgtgagctgagcagctctgtgcagacagacatcaacctgccctacctgaccatggacagcagcggccccaagcacctgaacatgaagctgacccgggcccagtttgagggcatcgtgacagacctgatccggaggaccatcgccccctgccagaaggccatgcaggatgctgaggtgtccaagagtgacattggagaggtgatcctggtgggcggcatgaccaggatgcccaaggtgcagcagacagtgcaggacctgtttggccgggcccccagcaaggctgtgaacccagatgaagctgtggccatcggggccgccatccagggcggcgtgctggccggagatgtgacagatgtgctgctgctggatgtgacccccctgagcctgggcatcgagaccctgggcggcgtcttcaccaagctgatcaacagaaacaccaccatccccaccaagaagagccaggtgttcagcacagctgctgatggccagacccaggtggagatcaaggtgtgccagggcgagcgggagatggccggggacaacaagctgctgggccagttcaccctgattggcatccccccagccccccggggcgtgccccagatcgaggtgacctttgatattgatgccaacggcatcgtgcacgtgtctgccaaggacaagggcaccggccgggagcagcagatcgtcatccagagcagcggcggcctgagcaaggatgacatcgagaacatggtgaagaatgctgagaagtatgcagaggaggacaggaggaagaaggagcgggtggaggccgtgaacatggccgagggcatcatccatgacacagagaccaagatggaggagttcaaggaccagctgcctgcagatgagtgcaacaagctgaaggaggagatcagcaagatgagggagctgctggccaggaaggacagcgagaccggggagaacatccggcaggccgccagcagcctgcagcaggccagcctgaagctgtttgagatggcctacaagaagatggccagcgagcgggagggcagcggcagcagcggcaccggggagcagaaggaggaccagaaggaggagaagcagtag

SEQ ID NO: 155004 - DNA, 2175 bp, synthetic construct
  misc_feature 1..2175: note = Description of Artificial Sequence: Synthetic coding sequence
  source 1..2175: mol_type = other DNA
atgcctgaggaggtgcaccacggggaggaggaggtggagacctttgccttccaggccgagatcgcccagctgatgagcctcatcatcaacaccttctacagcaacaaggagatcttcctgcgggagctgatcagcaatgccagtgatgccctggacaagatccgctatgagagcctgacagaccccagcaagctggacagcggcaaggagctgaagattgacatcatccccaacccccaggagaggaccctgaccctggtggacacaggaattggcatgaccaaggctgacctgatcaacaacctgggcaccatcgccaagagcggcaccaaggccttcatggaggccctgcaggccggggctgacatctccatgattggccagtttggagtgggcttctacagcgcctacctggtggccgagaaggtggtggtgatcaccaagcacaatgatgatgagcagtatgcctgggagagcagcgctgggggcagcttcaccgtgcgggctgaccatggagagcccatcggccggggcaccaaggtgatcctgcacctgaaggaggaccagacagagtacctggaggagcggcgggtgaaggaggtggtgaagaagcacagccagttcatcggctaccccatcaccctgtacctggagaaggagcgggagaaggagatcagtgatgatgaggccgaggaggagaagggggagaaggaggaggaggacaaggatgatgaggagaagcccaagattgaagatgtgggcagtgatgaggaggatgattctgggaaggacaagaagaagaagaccaagaagatcaaggagaagtacatcgaccaggaggagctgaacaagaccaagcccatctggaccagaaatccagatgacatcacccaggaggagtatggagagttctacaagagcctgaccaatgactgggaggaccacctggccgtgaagcacttctctgtggagggccagctggagttccgggccctgctcttcatcccccggcgggccccctttgacctgtttgagaacaagaagaagaagaacaacatcaagctgtatgtgcggcgggtcttcatcatggacagctgtgatgagctgatccctgagtacctgaacttcatccggggcgtggtggacagcgaggacctgcccctgaacatcagccgggagatgctgcagcagagcaagatcctgaaggtgatcaggaagaacatcgtgaagaagtgcctggagctgttcagcgagctggccgaggacaaggagaactacaagaagttctatgaggccttcagcaagaacctgaagctgggcatccacgaggacagcaccaacagaagaaggctgtctgagctgctgcgctaccacaccagccagagcggagatgagatgaccagcctgtctgaatatgtgtccaggatgaaggagacccagaagagcatctactacatcactggagagagcaaggagcaggtggccaacagcgcctttgtggagcgggtgaggaagaggggctttgaggtggtgtacatgacagagcccattgatgagtactgtgtgcagcagctgaaggagtttgatggcaagagcctggtgtctgtgaccaaggagggcctggagctgcctgaagatgaggaggagaagaagaagatggaggagagcaaggccaagtttgagaacctgtgcaagctgatgaaggagatcctggacaagaaggtggagaaggtgaccatcagcaaccggctggtgagcagcccctgctgcatcgtgaccagcacctacggctggacagccaacatggagcgcatcatgaaggcccaggccctgcgggacaacagcaccatgggctacatgatggccaagaagcacctggagatcaacccagaccaccccatcgtggagaccctgcggcagaaggccgaggccgacaagaatgacaaggctgtgaaggacctggtggtgctgctgtttgaaacagccctgctgagcagcggcttcagcctggaggacccccagacccacagcaaccgcatctacaggatgatcaagctgggcctgggcattgatgaagatgaggtggccgctgaggagcccaatgctgctgtgcctgatgagatcccccccctggagggagatgaagatgccagcaggatggaggaggtggactag

SEQ ID NO: 155005 - DNA, 2175 bp, synthetic construct; identical to SEQ ID NO: 155004
  misc_feature 1..2175: note = Description of Artificial Sequence: Synthetic coding sequence
  source 1..2175: mol_type = other DNA

SEQ ID NO: 155006 - DNA, 465 bp, synthetic construct
  misc_feature 1..465: note = Description of Artificial Sequence: Synthetic coding sequence
  source 1..465: mol_type = other DNA
atggacagctgtgatgagctgatccctgagtacctgaacttcatccggggcgtggtggacagcgaggacctgcccctgaacatcagccgggagatgctgcagcagagcaagatcctgaaggtgatcaggaagaacatcgtgaagaagtgcctggagctgttcagcgagctggccgaggacaaggagaactacaagaagttctatgaggccttcagcaagaacctgaagctgggcatccacgaggacagcaccaacagaagaaggctgtctgagctgctgcgctaccacaccagccagagcggagatgagatgaccagcctgtctgaatatgtgtccaggatgaaggagacccagaagagcatctactacatcactggagagagcaaggagcaggtgtgcccctgccccacctggctgcccctgctggtgtcctctgtgttcttccccctgctgagcctgtgctag

SEQ ID NO: 155007 - DNA, 489 bp, synthetic construct
  misc_feature 1..489: note = Description of Artificial Sequence: Synthetic coding sequence
  source 1..489: mol_type = other DNA
atggacagctgtgatgagctgatccctgagtacctgaacttcatccggggcgtggtggacagcgaggacctgcccctgaacatcagccgggagatgctgcagcagagcaagatcctgaaggtgatcaggaagaacatcgtgaagaagtgcctggagctgttcagcgagctggccgaggacaaggagaactacaagaagttctatgaggccttcagcaagaacctgaagctgggcatccacgaggacagcaccaacagaagaaggctgtctgagctgctgcgctaccacaccagccagagcggagatgagatgaccagcctgtctgaatatgtgtccaggatgaaggagacccagaagagcatctactacatcactggagagagcaaggagcaggtggccaacagcgcctttgtggagcgctgcccctgccccacctggctgcccctgctggtgtcctctgtgttcttccccctgctgagcctgtgctag

SEQ ID NO: 155008 - DNA, 552 bp, synthetic construct
  misc_feature 1..552: note = Description of Artificial Sequence: Synthetic coding sequence
  source 1..552: mol_type = other DNA
atggacagctgtgatgagctgatccctgagtacctgaacttcatccggggcgtggtggacagcgaggacctgcccctgaacatcagccgggagatgctgcagcagagcaagatcctgaaggtgatcaggaagaacatcgtgaagaagtgcctggagctgttcagcgagctggccgaggacaaggagaactacaagaagttctatgaggccttcagcaagaacctgaagctgggcatccacgaggacagcaccaacagaagaaggctgtctgagctgctgcgctaccacaccagccagagcggagatgagatgaccagcctgtctgaatatgtgtccaggatgaaggagacccagaagagcatctactacatcaccggcagcccctgctggtgcctggtgttcttcagcctgagctgcccctgtgtggagggcagcaagctgcgggtgagcagccccatccccagcctgctgctgacagctggcctggatgtggtgtactgcggcctcttctacttcctgcactttgtgctgaagctgaagtatgccaagtag

SEQ ID NO: 155009 - DNA, 2175 bp, synthetic construct; identical to SEQ ID NO: 155004
  misc_feature 1..2175: note = Description of Artificial Sequence: Synthetic coding sequence
  source 1..2175: mol_type = other DNA

SEQ ID NO: 155010 - DNA, 429 bp, synthetic construct
  misc_feature 1..429: note = Description of Artificial Sequence: Synthetic coding sequence
  source 1..429: mol_type = other DNA
tgattcatccggggcgtggtggacagcgaggacctgcccctgaacatcagccgggagatgctgcagcagagcaagatcctgaaggtgatcaggaagaacatcgtgaagaagtgcctggagctgttcagcgagctggccgaggacaaggagaactacaagaagttctatgaggccttcagcaagaacctgaagctgggcatccacgaggacagcaccaacagaagaaggctgtctgagctgctgcgctaccacaccagccagagcggagatgagatgaccagcctgtctgaatatgtgtccaggatgaaggagacccagaagagcatctactacatcactggagagagcaaggagcaggtgtgcccctgccccacctggctgcccctgctggtgtcctctgtgttcttccccctgctgagcctgtgctag

SEQ ID NO: 155011 - DNA, 453 bp, synthetic construct
  misc_feature 1..453: note = Description of Artificial Sequence: Synthetic coding sequence
  source 1..453: mol_type = other DNA
tgattcatccggggcgtggtggacagcgaggacctgcccctgaacatcagccgggagatgctgcagcagagcaagatcctgaaggtgatcaggaagaacatcgtgaagaagtgcctggagctgttcagcgagctggccgaggacaaggagaactacaagaagttctatgaggccttcagcaagaacctgaagctgggcatccacgaggacagcaccaacagaagaaggctgtctgagctgctgcgctaccacaccagccagagcggagatgagatgaccagcctgtctgaatatgtgtccaggatgaaggagacccagaagagcatctactacatcactggagagagcaaggagcaggtggccaacagcgcctttgtggagcgctgcccctgccccacctggctgcccctgctggtgtcctctgtgttcttccccctgctgagcctgtgctag

SEQ ID NO: 155012 - DNA, 516 bp, synthetic construct
  misc_feature 1..516: note = Description of Artificial Sequence: Synthetic coding sequence
  source 1..516: mol_type = other DNA
tgattcatccggggcgtggtggacagcgaggacctgcccctgaacatcagccgggagatgctgcagcagagcaagatcctgaaggtgatcaggaagaacatcgtgaagaagtgcctggagctgttcagcgagctggccgaggacaaggagaactacaagaagttctatgaggccttcagcaagaacctgaagctgggcatccacgaggacagcaccaacagaagaaggctgtctgagctgctgcgctaccacaccagccagagcggagatgagatgaccagcctgtctgaatatgtgtccaggatgaaggagacccagaagagcatctactacatcaccggcagcccctgctggtgcctggtgttcttcagcctgagctgcccctgtgtggagggcagcaagctgcgggtgagcagccccatccccagcctgctgctgacagctggcctggatgtggtgtactgcggcctcttctacttcctgcactttgtgctgaagctgaagtatgccaagtag

SEQ ID NO: 155013 - DNA, 507 bp, synthetic construct
  misc_feature 1..507: note = Description of Artificial Sequence: Synthetic coding sequence
  source 1..507: mol_type = other DNA
atgcctgaggaggtgcaccacggggaggaggaggtggagacctttgccttccaggccgagatcgcccagctgatgagcctcatcatcaacaccttctacagcaacaaggagatcttcctgcgggagctgatcagcaatgccagtgatgccctggacaagatccgctatgagagcctgacagaccccagcaagctggacagcggcaaggagctgaagattgacatctccatgattggccagtttggagtgggcttctacagcgcctacctggtggccgagaaggtggtggtgatcaccaagcacaatgatgatgagcagtatgcctgggagagcagcgctgggggcagcttcaccgtgcgggctgaccatggagagcccatcggccggggcaccaaggtgatcctgcacctgaaggaggaccagacagagtacctggaggagcggcgggtgaaggaggtggtgaagaagcacagccagttcatcggctaccccatcaccctgtactag

SEQ ID NO: 155014 - DNA, 483 bp, synthetic construct
  misc_feature 1..483: note = Description of Artificial Sequence: Synthetic coding sequence
  source 1..483: mol_type = other DNA
atggagatccctgtgcctgtgcagcccagctggctgcggcgggccagcgcccccctgcccggcctgagcgcccctggccgcctgtttgaccagagatttggagagggcctgctggaggccgagctggccgccctgtgccccaccaccctggccccctactacctgcgggcccccagcgtggccctgcctgtggcccaggtgcccacagatcctggccacttctctgtgctgctggatgtgaagcacttcagccctgaggagattgctgtgaaggtggtgggggagcacgtggaggtgcacgcccggcatgaggagaggccagatgagcacggctttgtggcccgggagttccaccggcgctaccgcctgcccccaggagtggaccctgctgctgtgaccagcgccctgagccctgagggcgtgctgagcatccaggccgccccagccagcgcccaggcccctcctcctgctgctgccaagtag

SEQ ID NO: 155015 - DNA, 483 bp, synthetic construct; identical to SEQ ID NO: 155014
  misc_feature 1..483: note = Description of Artificial Sequence: Synthetic coding sequence
  source 1..483: mol_type = other DNA

SEQ ID NO: 155016 - DNA, 591 bp, synthetic construct
  misc_feature 1..591: note = Description of Artificial Sequence: Synthetic coding sequence
  source 1..591: mol_type = other DNA
atggagatccctgtgcctgtgcagcccagctggctgcggcgggccagcgcccccctgcccggcctgagcgcccctggccgcctgtttgaccagagatttggagagggcctgctggaggccgagctggccgccctgtgccccaccaccctggccccctactacctgcgggcccccagcgtggccctgcctgtggcccaggtgcccacagatcctggccacttctctgtgctgctggatgtgaagcacttcagccctgaggagattgctgtgaaggtggtgggggagcacgtggaggtgcacgcccggcatgaggagaggccagatgagcacggctttgtggcccgggagttccaccggcgctaccgcctgcccccaggagtggaccctgctgctgtgaccagcgccctgagccctgagggcgtgctgagcatccaggccgccccagccccccgggagcccccccaggcccccagcatcaaggctgacctgaccccacccagccagatgagccgggtgcggcagggcctgagcagccaccccctgctggacagcgccctgaccagcatcctggacacagccctgatcacctag

SEQ ID NO: 155017 - DNA, 1590 bp, synthetic construct
  misc_feature 1..1590: note = Description of Artificial Sequence: Synthetic coding sequence
  source 1..1590: mol_type = other DNA
atggacctgcctgtgggccctggagctgctggccccagcaatgtgcctgccttcctgaccaagctgtggaccctggtgtctgaccctgacacagatgccctgatctgctggagccccagcggcaacagcttccacgtgtttgaccagggccagtttgccaaggaggtgctgcccaagtacttcaagcacaacaacatggccagctttgtgcggcagctgaacatgtatggcttcaggaaggtggtgcacatcgagcagggcggcctggtgaagccagagagagatgacacagagttccagcacccctgcttcctgcggggccaggagcagctgctggagaacatcaagaggaaggtgacctctgtgtccaccctgaagtctgaggacatcaagatccggcaggacagcgtgaccaagctgctgacagatgtgcagctgatgaagggcaagcaggagtgcatggacagcaagctgctggccatgaagcatgaaaatgaggccctgtggagggaggtggccagcctgcggcagaagcacgcccagcagcagaaggtggtgaacaagctgatccagttcctgatcagcctggtgcagagcaaccgcatcctgggcgtgaagaggaagatccccctgatgctgaatgacagcggcagcgcccacagcatgcccaagtacagccggcagttcagcctggagcacgtgcacggcagcggcccctacagcgcccccagccctgcctacagcagcagcagcctgtatgccccagatgctgtggccagcagcggccccatcatcagtgacatcacagagctggccccagccagccccatggccagccctgggggcagcattgatgagcggcccctgagcagcagccccctggtgcgggtgaaggaggagccccccagccccccccagagcccccgggtggaggaggccagccctggccggcccagctctgtggacaccctgctgagccccacagccctgattgacagcatcctgcgggagagcgagcccgccccagcctctgtgacagccctgacagatgcccggggccacacagacacagagggccggccccccagccccccacccaccagcaccccagagaagtgcctgtctgtggcctgcctggacaagaatgagctgagtgaccacctggatgccatggacagcaacctggacaacctgcagaccatgctgagcagccacggcttctctgtggacaccagcgccctgctggacctcttcagccccagcgtgacagtgcctgacatgagcctgcctgacctggacagcagcctggccagcatccaggagctgctgagcccccaggagccccccaggcctcctgaggccgagaacagcagcccagattctgggaagcagctggtgcactacacagcccagcccctcttcctgctggaccccggctctgtggacaccggcagcaatgacctgcctgtgctgtttgagctgggggagggcagctacttctctgaaggagatggctttgctgaggaccccaccatcagcctgctgaccggcagcgagccccccaaggccaaggaccccaccgtgtcctag

SEQ ID NO: 155018 - DNA, 1611 bp, synthetic construct
  misc_feature 1..1611: note = Description of Artificial Sequence: Synthetic coding sequence
  source 1..1611: mol_type = other DNA
atgaagcagagcagcaatgtgcctgccttcctgagcaagctgtggaccctggtggaggagacccacaccaatgagttcatcacctggagccagaatggccagagcttcctggtgctggatgagcagagatttgccaaggagatcctgcccaagtacttcaagcacaacaacatggccagctttgtgcggcagctgaacatgtatggcttcaggaaggtggtgcacatcgacagcggcatcgtgaagcaggagagagatggccctgtggagttccagcacccctacttcaagcagggccaggatgacctgctggagaacatcaagaggaaggtgagcagcagcaagccagaggagaacaagatccggcaggaggacctgaccaagatcatcagcagcgcccagaaggtgcagatcaagcaggagaccatcgagagccggctgtctgagctgaagtcagaaaatgaaagcctgtggaaggaggtgtctgagctgcgggccaagcacgcccagcagcagcaggtgatcaggaagatcgtgcagttcatcgtgaccctggtgcagaacaaccagctggtgtccctgaagaggaagaggcccctgctgctgaacaccaatggagcccagaagaagaacctcttccagcacatcgtgaaggagcccacagacaaccaccaccacaaggtgccccacagcaggacagagggcctgaagccccgggagcgcatcagtgatgacatcatcatctatgatgtgacagatgacaatgctgatgaggagaacatccctgtgattcctgagaccaatgaagatgtgatcagtgaccccagcaactgcagccagtacccagacatcgtcatcgtggaggatgacaatgaagatgaatatgcccctgtgatccagagcggggagcagaatgaaccagcccgggagagcctgagcagcggcagtgatggcagcagccccctgatgagcagcgctgtgcagctgaatggcagcagcagcctgaccagcgaggaccctgtgaccatgatggacagcatcctgaatgacaacatcaacctgctgggcaaggtggagctgctggactacctggacagcattgactgcagcctggaggacttccaggccatgctgagcggccggcagttcagcattgatcctgacctgctggtggacctcttcaccagctctgtgcagatgaaccccacagactacatcaacaacaccaagtctgagaacaagggcctggagaccaccaagaacaacgtggtgcagcctgtgtctgaggagggcaggaagagcaagagcaagccagacaagcagctgatccagtacacagccttccccctgctggccttcctggatggcaacccagccagctctgtggagcaggccagcaccacagccagcagcgaggtgctgagctctgtggacaagcccatcgaggtggatgagctgctggacagcagcctggaccctgagcccacccagagcaagctggtgcggctggagcccctgacagaagctgaggccagcgaggccaccctcttctacctgtgtgagctggccccagcccccctggacagcgacatgcccctgctggacagctag

SEQ ID NO: 155019 - DNA, 1557 bp, synthetic construct
  misc_feature 1..1557: note = Description of Artificial Sequence: Synthetic coding sequence
  source 1..1557: mol_type = other DNA
atgaagcagagcagcaatgtgcctgccttcctgagcaagctgtggaccctggtggaggagacccacaccaatgagttcatcacctggagccagaatggccagagcttcctggtgctggatgagcagagatttgccaaggagatcctgcccaagtacttcaagcacaacaacatggccagctttgtgcggcagctgaacatgtatggcttcaggaaggtggtgcacatcgacagcggcatcgtgaagcaggagagagatggccctgtggagttccagcacccctacttcaagcagggccaggatgacctgctggagaacatcaagaggaaggtgagcagcagcaagccagaggagaacaagatccggcaggaggacctgaccaagatcatcagcagcgcccagaaggtgcagatcaagcaggagaccatcgagagccggctgtctgagctgaagtcagaaaatgaaagcctgtggaaggaggtgtctgagctgcgggccaagcacgcccagcagcagcaggtgatcaggaagatcgtgcagttcatcgtgaccctggtgcagaacaaccagctggtgtccctgaagaggaagaggcccctgctgctgaacaccaatggagcccagaagaagaacctcttccagcacatcgtgaaggagcccacagacaaccaccaccacaaggtgccccacagcaggacagagggcctgaagccccgggagcgcatcagtgatgacatcatcatctatgatgtgacagatgacaatgctgatgaggagaacatccctgtgattcctgagaccaatgaagatgtgatcagtgaccccagcaactgcagccagtacccagacatcgtcatcgtggaggatgacaatgaagatgaatatgcccctgtgatccagagcggggagcagaatgaaccagcccgggagagcctgagcagcggcagtgatggcagcagccccctgatgagcagcgctgtgcagctgaatggcagcagcagcctgaccagcgaggaccctgtgaccatgatggacagcatcctgaatgacaacatcaacctgctgggcaaggtggagctgctggactacctggacagcattgactgcagcctggaggacttccaggccatgctgagcggccggcagttcagcattgatcctgacctgctggtggacagcgagaacaagggcctggagaccaccaagaacaacgtggtgcagcctgtgtctgaggagggcaggaagagcaagagcaagccagacaagcagctgatccagtacacagccttccccctgctggccttcctggatggcaacccagccagctctgtggagcaggccagcaccacagccagcagcgaggtgctgagctctgtggacaagcccatcgaggtggatgagctgctggacagcagcctggaccctgagcccacccagagcaagctggtgcggctggagcccctgacagaagctgaggccagcgaggccaccctcttctacctgtgtgagctggccccagcccccctggacagcgacatgcccctgctggacagctag

SEQ ID NO: 155020 - DNA, 1005 bp, synthetic construct
  misc_feature 1..1005: note = Description of Artificial Sequence: Synthetic coding sequence
  source 1..1005: mol_type = other DNA
atgggagaggccggggctgctgaggaggcctgccgccacatgggcaccaaggaggagtttgtgaaggtgaggaagaaggacctggagcggctgaccacagaggtgatgcagatccgggacttcctgccccgcatcctgaatggagaggtgctggagagcttccagaagctgaagatcgtggagaagaacctggagaggaaggagcaggagctggagcagctgaagatggactgtgagcacttcaaggcccggctggagaccgtgcaggccgacaacatccgggagaagaaggagaagctggccctgcggcagcagctgaatgaggccaagcagcagctgctgcagcaggccgagtactgcacagagatgggcgccgccgcctgcaccctgctgtggggcgtgagcagcagcgaggaggtggtgaaggccatcctgggcggggacaaggccctgaagttcttcagcatcaccggccagaccatggagagctttgtgaagagcctggatggagatgtgcaggagctggacagtgatgagagccagtttgtgtttgccctggccggcatcgtgaccaacgtggccgccatcgcctgtggccgggagttcctggtgaacagcagccgggtgctgctggacaccatcctgcagctgctgggggacctgaagccaggccagtgcaccaagctgaaggtgctgatgctgatgagcctgtacaacgtgtccatcaacctgaagggcctgaagtacatcagcgagagccctggcttcatccccctgctgtggtggctgctgagtgaccctgatgctgaggtgtgcctgcacgtgctgcggctggtgcagagcgtggtgctggagcctgaggtgttcagcaagagcgccagcgagttccgcagcagcctgcccctgcagaggatcctggccatgagcaagagcaggaacccccggctgcagacagctgcccaggagctgctggaggacctgcggaccctggagcacaacgtgtag

SEQ ID NO: 155021 - DNA, 780 bp, synthetic construct
  misc_feature 1..780: note = Description of Artificial Sequence: Synthetic coding sequence
  source 1..780: mol_type = other DNA
atggactgtgagcacttcaaggcccggctggagaccgtgcaggccgacaacatccgggagaagaaggagaagctggccctgcggcagcagctgaatgaggccaagcagcagctgctgcagcaggccgagtactgcacagagatgggcgctgctgcctgcaccctgctgtggggcgtgagcagcagcgaggaggtggtgaaggccatcctgggcggggacaaggccctgaagttcttcagcatcaccggccagaccatggagagctttgtgaagagcctggatggagatgtgcaggagctggacagtgatgagagccagtttgtgtttgccctggccggcatcgtgaccaacgtggccgccatcgcctgtggccgggagttcctggtgaacagcagccgggtgctgctggacaccatcctgcagctgctgggggacctgaagccaggccagtgcaccaagctgaaggtgctgatgctgatgagcctgtacaacgtgtccatcaacctgaagggcctgaagtacatcagcgagagccctggcttcatccccctgctgtggtggctgctgagtgaccctgatgctgaggtgtgcctgcacgtgctgcggctggtgcagagcgtggtgctggagcctgaggtgttcagcaagagcgccagcgagttccgcagcagcctgcccctgcagaggatcctggccatgagcaagagcaggaacccccggctgcagacagctgcccaggagctgctggaggacctgcggaccctggagcacaacgtgtag

SEQ ID NO: 155022 - DNA, 1479 bp, synthetic construct
  misc_feature 1..1479: note = Description of Artificial Sequence: Synthetic coding sequence
  source 1..1479: mol_type = other DNA
atgcaggaggccccagctgccctgcccacagagcccggccccagccctgtgcctgccttcctgggcaagctgtgggccctggtgggggaccctggaacagaccacctgatccgctggagccccagcggcaccagcttcctggtgtctgaccagagcagatttgccaaggaggtgctgccccagtacttcaagcacagcaacatggccagctttgtgcggcagctgaacatgtatggcttcaggaaggtggtgtccattgagcagggcggcctgctgcggcctgagcgggaccacgtggagttccagcaccccagctttgtgcggggccgggagcagctgctggagcgggtgcggaggaaggtgcctgccctgcggggagatgatggccgctggaggcctgaggacctgggccgcctgctgggggaggtgcaggccctgcggggcgtgcaggagagcacagaggcccggctgcgggagctgcggcagcagaatgagatcctgtggagggaggtggtgaccctgcggcagagccacggccagcagcaccgggtgattggcaagctgatccagtgcctgtttggccccctgcaggccggccccagcaatgccggcggcaagaggaagctgagcctgatgctggatgagggcagcagctgccccaccccagccaagttcaacacctgccccctgcccggggccctgctgcaggacccctacttcatccagagccccctgcctgagaccaacctgggcctgagcccccaccgggcccggggccccatcatcagtgacatccctgaggacagccccagccctgagggcacccggctgagccccagcagtgatggccggcgggagaagggcctggccctgctgaaggaggagcccgccagccctggaggagatggagaggccggcctggccctggccccaaatgaatgtgacttctgtgtgacagcccccccacccctgcctgtggccgtggtgcaggccatcctggagggcaagggcagcttcagccctgagggccccagaaatgcccagcagcctgagcccggggacccccgggagatcccagaccggggccccctgggcctggagagcggggacaggagccctgagagcctgctgccccccatgctgctgcagcccccccaggagagcgtggagcccgccggccccctggatgtgctgggccccagcctgcagggccgggagtggaccctgatggacctggacatggagctgagcctgatgcagcccctggtgcctgagcggggggagcctgagctggccgtgaagggcctgaacagccccagccctgggaaggaccccaccctgggcgcccccctgctgctggatgtgcaggccgccctgggcggccctgccctgggcctgcccggggccctgaccatctacagcaccccagagagcaggacagccagctacctgggccctgaggccagccccagcccctag

SEQ ID NO: 155023 - DNA, 1389 bp, synthetic construct
  misc_feature 1..1389: note = Description of Artificial Sequence: Synthetic coding sequence
  source 1..1389: mol_type = other DNA
atgcaggaggccccagctgccctgcccacagagcccggccccagccctgtgcctgccttcctgggcaagctgtgggccctggtgggggaccctggaacagaccacctgatccgctggagccccagcggcaccagcttcctggtgtctgaccagagcagatttgccaaggaggtgctgccccagtacttcaagcacagcaacatggccagctttgtgcggcagctgaacatgtatggcttcaggaaggtggtgtccattgagcagggcggcctgctgcggcctgagcgggaccacgtggagttccagcaccccagctttgtgcggggccgggagcagctgctggagcgggtgcggaggaaggtgcctgccctgcggggagatgatggccgctggaggcctgaggacctgggccgcctgctgggggaggtgcaggccctgcggggcgtgcaggagagcacagaggcccggctgcgggagctgcggcagcagaatgagatcctgtggagggaggtggtgaccctgcggcagagccacggccagcagcaccgggtgattggcaagctgatccagtgcctgtttggccccctgcaggccggccccagcaatgccggcggcaagaggaagctgagcctgatgctggatgagggcagcagctgccccaccccagccaagttcaacacctgccccctgcccggggccctgctgcaggacccctacttcatccagagccccagcacctacagcctgagccagaggcagatctgggccctggccctgaccggccctggggcccccagcagcctgaccagccagaagaccctgcaccccctgcggggccctggcttcctgccccctgtgatggccggggcccccccacccctgcctgtggccgtggtgcaggccatcctggagggcaagggcagcttcagccctgagggccccagaaatgcccagcagcctgagcccggggacccccgggagatcccagaccggggccccctgggcctggagagcggggacaggagccctgagagcctgctgccccccatgctgctgcagcccccccaggagagcgtggagcccgccggccccctggatgtgctgggccccagcctgcagggccgggagtggaccctgatggacctggacatggagctgagcctgatgcagcccctggtgcctgagcggggggagcctgagctggccgtgaagggcctgaacagccccagccctgggaaggaccccaccctgggcgcccccctgctgctggatgtgcaggccgccctgggcggccctgccctgggcctgcccggggccctgaccatctacagcaccccagagagcaggacagccagctacctgggccctgaggccagccccagcccctag

SEQ ID NO: 155024 - DNA, 1251 bp, synthetic construct
  misc_feature 1..1251: note = Description of Artificial Sequence: Synthetic coding sequence
  source 1..1251: mol_type = other DNA
atgcaggaggccccagctgccctgcccacagagcccggccccagccctgtgcctgccttcctgggcaagctgtgggccctggtgggggaccctggaacagaccacctgatccgctggagccccagcggcaccagcttcctggtgtctgaccagagcagatttgccaaggaggtgctgccccagtacttcaagcacagcaacatggccagctttgtgcggcagctgaacatgtatggcttcaggaaggtggtgtccattgagcagggcggcctgctgcggcctgagcgggaccacgtggagttccagcaccccagctttgtgcggggccgggagcagctgctggagcgggtgcggaggaaggtgcctgccctgcggggagatgatggccgctggaggcctgaggacctgggccgcctgctgggggaggtgcaggccctgcggggcgtgcaggagagcacagaggcccggctgcgggagctgcggcagcagaatgagatcctgtggagggaggtggtgaccctgcggcagagccacggccagcagcaccgggtgattggcaagctgatccagtgcctgtttggccccctgcaggccggccccagcaatgccggcggcaagaggaagctgagcctgatgctggatgagggcagcagctgccccaccccagccaagttcaacacctgccccctgcccggggccctgctgcaggacccctacttcatccagagccccctgcctgagaccaacctgggcctgagcccccaccgggcccggggccccatcatcagtgacatccctgaggacagccccagccctgagggcacccggctgagccccagcagtgatggccggcggggccccctgggcctggagagcggggacaggagccctgagagcctgctgccccccatgctgctgcagcccccccaggagagcgtggagcccgccggccccctggatgtgctgggccccagcctgcagggccgggagtggaccctgatggacctggacatggagctgagcctgatgcagcccctggtgcctgagcggggggagcctgagctggccgtgaagggcctgaacagccccagccctgggaaggaccccaccctgggcgcccccctgctgctggatgtgcaggccgccctgggcggccctgccctgggcctgcccggggccctgaccatctacagcaccccagagagcaggacagccagctacctgggccctgaggccagccccagcccctag

SEQ ID NO: 155025 - DNA, 1479 bp, synthetic construct; identical to SEQ ID NO: 155022
  misc_feature 1..1479: note = Description of Artificial Sequence: Synthetic coding sequence
  source 1..1479: mol_type = other DNA

SEQ ID NO: 155026 - skipped

SEQ ID NO: 155027 - DNA, 414 bp, synthetic construct
  misc_feature 1..414: note = Description of Artificial Sequence: Synthetic coding sequence
  source 1..414: mol_type = other DNA
atgagcagcctcatccggcgggtcatcagcacagccaaggcccctggggccatcggcccctacagccaggccgtgctggtggacaggaccatctacatcagcggccagatcggcatggaccccagcagcggccagctggtgtctgggggcgtggccgaggaggccaagcaggccctgaagaacatgggagagatcctgaaggctgctggctgtgacttcaccaacgtggtgaagaccaccgtgctgctggccgacatcaatgacttcaacacagtgaatgagatctacaagcagtacttcaagagcaacttccctgcccgggccgcctaccaggtggccgccctgcccaagggcagcagaattgaaattgaagctgtggccatccagggccccctgaccacagccagcctgtag

SEQ ID NO: 155028 - DNA, 14505 bp, synthetic construct
  misc_feature 1..14505: note = Description of Artificial Sequence: Synthetic coding sequence
  source 1..14505: mol_type = other DNA
atgcccagcgagagcttctgcctggccgcccaggcccggctggacagcaagtggctgaagacagacatccagctggccttcaccagagatggcctgtgtggcctgtggaatgagatggtgaaggatggagaaattgtgtacacaggaacagagagcacccagaatggagagctgccccccaggaaggatgattctgtggagcccagcggcaccaagaaggaggacctgaatgacaaggagaagaaggatgaggaggagaccccagcccccatctaccgggccaagagcatcctggacagctgggtgtggggcaagcagccagatgtgaatgagctgaaggagtgcctgtctgtgctggtgaaggagcagcaggccctggccgtgcagagcgccaccaccaccctgagcgccctgcggctgaagcagaggctggtgatcctggagcgctacttcatcgccctgaacagaacagtgttccaggagaatgtgaaggtgaagtggaagagcagcggcatcagcctgccccctgtggacaagaagagcagcaggcctgctggaaaaggagtggagggcctggcccgggtgggcagcagagctgccctgagctttgcctttgccttcctgcggcgggcctggaggtctggagaagatgctgacctgtgcagcgagctgctgcaggagagcctggatgccctgcgggccctgcctgaggccagcctgtttgatgagagcacagtgtcctctgtgtggctggaggtggtggagcgggccacccgcttcctgcggtctgtggtgactggagatgtgcacggcaccccagccaccaagggccctggcagcatccccctgcaggaccagcacctggccctggccatcctgctggagctggccgtgcagaggggcaccctgagccagatgctgagcgccatcctgctgctgctgcagctgtgggacagcggggcccaggagacagacaatgaaagaagtgcccagggcaccagcgcccccctgctgcccctgctgcagcgcttccagagcatcatctgcaggaaggatgccccccacagcgagggggacatgcacctgctgagcggccccctgagccccaatgaaagcttcctgcgctacctgaccctgccccaggacaatgagctggccatcgacctgcggcagacagctgtggtggtgatggcccacctggaccggctggccaccccctgcatgccacccctgtgcagcagccccaccagccacaagggcagcctgcaggaggtgattggctggggcctgattggctggaagtactatgccaacgtcatcggccccatccagtgtgagggcctggccaacctgggcgtgacccagatcgcctgtgccgagaagcgcttcctgatcctgagcagaaatggccgggtgtacacccaggcctacaacagcgacaccctggccccccagctggtgcagggcctggccagcagaaatattgtgaagattgctgcccacagtgatggccaccactacctggccctggccgccactggagaggtgtacagctggggctgtggagatggcggccgcctgggccatggagacacagtgcccctggaggagcccaaggtgatcagcgccttcagcggcaagcaggccggcaagcacgtggtgcacatcgcctgtggcagcacctacagcgctgccatcacagctgagggggagctgtacacctggggccggggcaactacggccgcctgggccacggcagcagtgaagatgaggccatccccatgctggtggccggcctgaagggcctgaaggtgattgatgtggcctgtggcagcggagatgcccagaccctggccgtgacagaaaatggccaggtgtggagctggggagatggagactatggcaagctgggccggggcggcagtgatggctgcaagacccccaagctgattgagaagctgcaggacctggatgtggtgaaggtgcgctgtggcagccagttcagcatcgccctgaccaaggatggccaggtgtacagctggggcaaaggagacaaccagaggctgggccatggaacagaggagcacgtgcgctaccccaagctgctggagggcctgcagggcaagaaggtgattgatgtggccgccggcagcacccactgcctggccctgacagaggacagcgaggtgcacagctggggcagcaatgaccagtgccagcactttgacaccctgcgggtgaccaagccagagcctgctgccctgcccggcctggacaccaagcacatcgtgggcatcgcctgtggccctgcccagagctttgcctggagcagctgcagcgagtggagcatcggcctgcgggtgccctttgtggtggacatctgcagcatgacctttgagcagctggacctgctgctgcggcaggtgtctgagggcatggatggcagcgctgactggcccccaccccaggagaaggaatgtgtggccgtggccaccctgaacctgctgcggctgcagctgcacgccgccatcagccaccaggtggaccctgagttcctgggcctgggcctgggcagcatcctgctgaacagcctgaagcagacagtggtgaccctggccagcagcgctggggtgctgagcacagtgcagagcgctgcccaggccgtgctgcagagcggctggagcgtgctgctgcccacagctgaggagcgggcccgggccctgagcgccctgctgccctgtgctgtgtctggaaatgaggtgaacatcagccctggaagacgcttcatgattgacctgctggtgggcagcctgatggctgatggcggcctggagagcgccctgcacgccgccatcacagctgagatccaggacatcgaggccaagaaggaggcccagaaggagaaggagattgatgagcaggaggccaatgccagcaccttccacaggagcaggacccccctggacaaggacctgatcaacacaggcatctgtgagagcagcggcaagcagtgcctgcccctggtgcagctgatccagcagctgctgagaaatattgccagccagacagtggcccggctgaaggatgtggcccggcgcatcagcagctgcctggactttgagcagcacagccgggagaggtctgccagcctggacctgctgctgcgcttccagaggctgctgatcagcaagctgtacccaggagagagcatcggccagaccagtgacatcagcagccctgagctgatgggcgtgggcagcctgctgaagaagtacacagccctgctgtgcacccacatcggggacatcctgcctgtggccgccagcatcgccagcacctcctggaggcactttgctgaggtggcctacatcgtggagggggacttcaccggggtgctgctgcctgagctggtggtgtccatcgtgctgctgctgagcaagaatgccggcctgatgcaggaggccggggctgtgcccctgctgggcggcctgctggagcacctggaccgcttcaaccacctggcccctgggaaggagagagatgaccacgaggagctggcctggccaggcatcatggagagcttcttcaccggccagaactgcaggaacaatgaggaggtgaccctcatcaggaaggctgacctggagaaccacaacaaggatggcggcttctggacagtgattgatggcaaggtgtatgacatcaaggacttccagacccagagcctgaccggcaacagcatcctggcccagtttgctggagaagatcctgtggtggccctggaggccgccctgcagtttgaggacacccgggagagcatgcacgccttctgtgtgggccagtacctggagccagaccaggagatcgtgaccatcccagacctgggcagcctgagcagccccctgattgacacagaaagaaacctgggcctgctgctgggcctgcacgccagctacctggccatgagcacccccctgagccctgtggagattgaatgtgccaagtggctgcagagcagcatcttcagcggcggcctgcagaccagccagatccactacagctacaatgaggagaaggatgaggaccactgcagcagccctgggggcaccccagccagcaagagccggctgtgcagccacagaagagccctgggggaccacagccaggccttcctgcaggccatcgctgacaacaacatccaggaccacaacgtgaaggacttcctgtgccagatcgagcgctactgccggcagtgccacctgaccacccccatcatgttccccccagagcaccctgtggaggaggtgggccgcctgctgctgtgctgcctgctgaagcatgaggacctgggccacgtggccctgagcctggtgcacgccggggccctgggcatcgagcaggtgaagcacaggaccctgcccaagtctgtggtggatgtgtgccgggtggtgtaccaggccaagtgcagcctcatcaagacccaccaggagcagggccgcagctacaaggaggtgtgtgcccctgtgattgaaaggctgcgcttcctgttcaatgagctgcggcctgctgtgtgcaatgacctgagcatcatgagcaagttcaagctgctgagcagcctgccccgctggaggcgcatcgcccagaagatcatccgggagaggaggaagaagagggtgcccaagaagccagagagcacagatgatgaggagaagattggaaatgaggagagtgacctggaggaggcctgcatcctgccccacagccccatcaacgtggacaagaggcccatcgccatcaagagccccaaggacaagtggcagcccctgctgagcacagtgactggagtgcacaagtacaagtggctgaagcagaatgtgcagggcctgtacccccagagccccctgctgagcaccatcgccgagtttgccctgaaggaggagcctgtggatgtggagaagatgaggaagtgcctgctgaagcagctggagagagctgaggtgcggctggagggcatcgacaccatcctgaagctggccagcaagaacttcctgctgcccagcgtgcagtatgccatgttctgtggctggcagaggctcatccctgagggcatcgacatcggggagcccctgacagactgcctgaaggatgtggacctgatcccccccttcaacaggatgctgctggaggtgaccttcggcaagctgtatgcctgggccgtgcagaacatcagaaatgtgctgatggatgccagcgccaagttcaaggagctgggcatccagcctgtgcccctgcagaccatcaccaatgaaaaccccagcggccccagcctgggcaccatcccccaggcccgcttcctgctggtgatgctgtccatgctgaccctgcagcacggggccaacaacctggacctgctgctgaacagcggcatgctggccctgacccagacagccctgcggctgattggccccagctgtgacaacgtggaggaggacatgaatgccagcgcccagggcgccagcgccaccgtgctggaggagaccaggaaggagacagcccctgtgcagctgcctgtgtctggccctgagctggccgccatgatgaagattggcaccagggtgatgaggggcgtggactggaagtggggagaccaggacggccccccacctggcctgggccgggtgattggagagctgggggaggatggctggatccgggtgcagtgggacaccggcagcaccaacagctacaggatgggcaaggagggcaagtatgacctgaagctggccgagctgcctgctgctgcccagcccagcgctgaggacagcgacacagaagatgacagcgaggccgagcagacagaaagaaacatccaccccacagccatgatgttcaccagcaccatcaacctgctgcagaccctgtgcctgtctgctggggtgcacgccgagatcatgcagagcgaggccaccaagaccctgtgtggcctgctgaggatgctggtggagagcggcaccacagacaagaccagcagccccaaccggctggtgtaccgggagcagcaccgctcctggtgcaccctgggctttgtgcgcagcatcgccctgaccccccaggtgtgtggggccctgagcagcccccagtggatcaccctgctgatgaaggtggtggagggccacgcccccttcaccgccaccagcctgcagaggcagatcctggccgtgcacctgctgcaggccgtgctgcccagctgggacaagacagagcgggcccgggacatgaagtgcctggtggagaagctgtttgacttcctgggcagcctgctgaccacctgcagcagtgatgtgcccctgctgcgggagagcaccctgcggcggcggcgggtgcggccccaggccagcctgacagccacccacagcagcaccctggccgaggaggtggtggccctgctgcggaccctgcacagcctgacccagtggaatggcctcatcaacaagtacatcaacagccagctgcggagcatcacccacagctttgtgggccggcccagcgagggcgcccagctggaggactacttcccagattctgagaaccctgaggtgggcggcctgatggctgtgctggccgtcatcggcggcattgatggccgcctgcggctgggcggccaggtgatgcatgatgaatttggagagggcaccgtgacccgcatcacccccaagggcaagatcaccgtgcagttcagtgacatgaggacctgccgggtgtgccccctgaaccagctgaagcccctgcctgctgtggccttcaacgtgaacaacctgcccttcacagagcccatgctgtctgtgtgggcccagctggtgaacctggccggcagcaagctggagaagcacaagatcaagaagagcaccaagcaggcctttgctggccaggtggacctggacctgctgcgctgccagcagctgaagctgtacatcctgaaggccggccgggccctgctgagccaccaggacaagctgcggcagatcctgagccagcctgctgtgcaggagactggaacagtgcacacagatgatggagctgtggtgtccccagacctgggggacatgagccctgagggcccccagccccccatgatcctgctgcagcagctgctggccagcgccacccagcccagccctgtgaaggccatctttgacaagcaggagctggaggccgccgccctggccgtgtgccagtgcctggccgtggagagcacccaccccagcagccctggctttgaggactgcagcagcagcgaggccaccacccctgtggccgtgcagcacatccggcctgcccgggtgaagaggaggaagcagagccctgtgcctgccctgcccatcgtggtgcagctgatggagatgggcttcagcagaagaaatattgaatttgccctgaagagcctgactggagccagcggaaatgccagcagcctgcccggggtggaggccctggtgggctggctgctggaccacagcgacatccaggtgacagagctgagtgatgctgacacagtgtctgatgagtacagtgatgaggaggtggtggaggatgtggatgatgctgcctacagcatgagcactggagctgtggtgacagagagccagacctacaagaagagagctgacttcctgagcaatgatgattatgctgtgtatgtgcgggagaacatccaggtgggcatgatggtgcgctgctgccgggcctatgaggaggtgtgtgaaggagatgtgggcaaggtgatcaagctggacagagatggcctgcatgacctgaatgtgcagtgtgactggcagcagaagggcggcacctactgggtgcgctacatccacgtggagctgattggctaccccccacccagcagcagcagccacatcaagattggagacaaggtgcgggtgaaggcctctgtgaccacccccaagtacaagtggggctctgtgacccaccagagcgtgggcgtggtgaaggccttcagcgccaacgggaaggacatcatcgtggacttcccccagcagagccactggacaggcctgctgtctgagatggagctggtgcccagcatccaccctggggtgacctgtgatggctgccagatgttccccatcaatggcagccgcttcaagtgcaggaactgtgatgactttgacttctgtgagacctgcttcaagaccaagaagcacaacaccaggcacaccttcggccgcatcaatgaacctggccagagcgctgtgttctgtggccgcagcggcaagcagctgaagcgctgccacagcagccagcccggcatgctgctggacagctggagcaggatggtgaagagcctgaatgtgagcagctctgtgaaccaggccagccggctgattgatggcagcgagccctgctggcagagcagcggcagccagggcaagcactggatccggctggagatcttcccagatgtgctggtgcaccggctgaagatgattgtggaccctgctgacagcagctacatgcccagcctggtggtggtgtctgggggcaacagcctgaacaacctgattgagctgaagaccatcaacatcaaccccagcgacaccaccgtgcccctgctgaatgactgcacagagtaccaccgctacatcgagatcgccatcaagcagtgccgcagcagcggcatcgactgcaagatccacggcctcatcctgctgggccgcatccgggcagaggaggaggacctggccgctgtgcccttcctggccagtgacaatgaggaggaggaggatgagaagggcaacagcggcagcctcatcaggaagaaggctgctggcctggagagcgctgccaccatccgcaccaaggtgtttgtgtggggcctgaatgacaaggaccagctgggcggcctgaagggcagcaagatcaaggtgcccagcttcagcgagaccctgagcgccctgaatgtggtgcaggtggccggcggcagcaagagcctgtttgctgtgacagtggagggcaaggtgtatgcctgtggggaggccaccaacggccgcctgggcctgggcatcagcagcggcaccgtgcccatcccccggcagatcacagccctgagcagctatgtggtgaagaaggtggccgtgcacagcggcggcagacatgccacagccctgactgtggatggcaaggtgttctcctggggcgagggagatgatggcaagctgggccacttcagcaggatgaactgtgacaagccccggctgattgaggccctgaagaccaagaggatccgggacatcgcctgtggcagcagccacagcgctgccctgaccagcagtggagagctgtacacctggggcctgggggagtatggccgcctgggccatggagacaacaccacccagctgaagcccaagatggtgaaggtgctgctgggccacagggtcatccaggtggcctgtggcagcagagatgcccagaccctggccctgacagatgagggcctggtgttctcctggggagatggagactttgggaagctgggccggggcggcagcgagggctgcaacatcccccagaacatcgagcggctgaatggccagggcgtgtgccagattgaatgtggggcccagttcagcctggccctgaccaagtctggagtggtgtggacctggggcaaaggagactacttccggctgggccacggcagtgatgtgcacgtgaggaagccccaggtggtggagggcctgcggggcaagaagatcgtgcacgtggccgtgggcgccctgcactgcctggccgtgacagattctggccaggtgtatgcctggggagacaatgaccacggccagcagggcaatggcaccaccaccgtgaacaggaagcccaccctggtgcagggcctggagggccagaagatcaccagggtggcctgtggcagcagccacagcgtggcctggaccaccgtggatgtggccaccccatctgtgcatgagcctgtgctcttccagacagcccgggaccccctgggcgccagctacctgggcgtgcccagtgatgctgacagcagcgctgccagcaacaagatcagcggggccagcaacagcaagcccaaccggcccagcctggccaagatcctgctgagcctggatggcaacctggccaagcagcaggccctgagccacatcctgacagccctgcagatcatgtatgccagagatgctgtggtgggcgccctgatgcctgctgccatgattgcccctgtggagtgccccagcttcagcagcgctgcccccagtgatgccagcgccatggccagccccatgaatggagaggagtgcatgctggccgtggacatcgaggaccggctgagccccaacccctggcaggagaagcgggagatcgtgtccagtgaagatgctgtgacccccagcgctgtgaccccatctgcccccagcgccagcgcccggcccttcatccctgtgacagatgacctgggcgccgccagcatcatcgccgagaccatgaccaagaccaaggaggatgtggagagccagaacaaggctgctggccctgagccccaggccctggatgagttcaccagcctgctgattgctgatgacaccagggtggtggtggacctgctgaagctgtctgtgtgcagcagagctggggaccggggcagagatgtgctgtctgctgtgctgagcggcatgggcacagcctacccccaggtggccgacatgctgctggagctgtgtgtgacagagctggaggatgtggccacagacagccagagcggccgcctgagcagccagcctgtggtggtggagagcagccacccctacacagatgacaccagcaccagcggcaccgtgaagatccctggagctgagggcctgcgggtggagtttgaccggcagtgcagcacagagaggagacatgaccccctgactgtgatggatggagtgaaccgcatcgtgtctgtgcgcagcggccgggagtggagcgactggagcagcgagctgcgcatccctggagatgagctgaagtggaagttcatcagtgatggctctgtgaatggctggggctggaggttcaccgtgtaccccatcatgcctgctgctggccccaaggagctgctgagtgacagatgtgtgctgagctgccccagcatggacctggtgacctgcctgctggacttccggctgaacctggccagcaacagaagcatcgtgccccggctggccgccagcctggccgcctgtgcccagctgagcgccctggccgccagccacaggatgtgggccctgcagaggctgaggaagctgctgaccacagaatttggccagagcatcaacatcaaccggctgctgggggagaatgatggagagacccgggccctgtccttcaccggcagcgccctggccgccctggtgaagggcctgcctgaggccctgcagaggcagtttgaatatgaggaccccatcgtgcggggcggcaagcagctgctgcacagccccttcttcaaggtgctggtggccctggcctgtgacctggagctggacaccctgccctgctgtgccgagacccacaagtgggcctggttccgccgctactgcatggccagccgggtggccgtggccctggacaagaggacccccctgcccaggctcttcctggatgaggtggccaagaagatccgggagctgatggctgacagcgagaacatggatgtgctgcacgagagccatgacatcttcaagcgggagcaggatgagcagctggtgcagtggatgaacagaagaccagatgactggaccctgtctgctgggggcagcggcaccatctacggctggggccacaaccaccggggccagctgggcggcatcgagggcgccaaggtgaaggtgcccaccccctgtgaggccctggccaccctgcggcctgtgcagctgattggaggagagcagaccctgtttgctgtgacagcagatggcaagctgtatgccaccggctatggagctgggggccgcctgggcattggaggaacagagagcgtgtccacccccaccctgctggagagcatccagcacgtgttcatcaagaaggtggccgtgaacagcggcggcaagcactgcctggccctgagcagcgagggggaggtgtacagctggggcgaggctgaagatggcaagctgggccacggcaacagaagcccctgtgaccggccccgggtgattgagagcctgcggggcatcgaggtggtggatgtggccgccggcggggcccacagcgcctgtgtgacagctgctggggacctgtacacctggggcaagggccgctatggccgcctgggccacagcgacagcgaggaccagctgaagcccaagctggtggaggccctgcagggccaccgggtggtggacatcgcctgtggcagcggagatgcccagaccctgtgcctgacagatgatgacacagtgtggagctggggagatggagactatggcaagctgggccggggcggcagtgatggctgcaaggtgcccatgaagattgacagcctgaccggcctgggcgtggtgaaggtggagtgtggcagccagttctctgtggccctgaccaagtctggagctgtgtacacctggggcaaaggagactaccaccggctgggccacggcagtgatgaccacgtgcggcggccccggcaggtgcagggcctgcagggcaagaaggtgattgccatcgccaccggcagcctgcactgtgtgtgctgcacagaagatggagaggtgtacacctggggagacaatgatgagggccagctgggagatggcaccaccaatgccatccagaggccccggctggtggccgccctgcagggcaagaaggtgaacagagtggcctgtggcagcgcccacaccctggcctggagcaccagcaagccagccagcgctgggaagctgcctgcccaggtgcccatggagtacaaccacctgcaggagatccccatcatcgccctgaggaaccggctgctgctgctgcaccacctgtctgagctgttctgcccctgcatccccatgtttgacctggagggcagcctggatgagaccggcctgggccccagcgtgggctttgacaccctgcggggcatcctgatcagccagggcaaggaggccgccttcaggaaggtggtgcaggccaccatggtgcgggaccggcagcacggccctgtggtggagctgaaccgcatccaggtgaagaggagccgcagcaaaggaggcctggccggcccagatggcaccaagtctgtgtttggccagatgtgtgccaagatgagcagctttggaccagacagcctgctgctgccccaccgggtgtggaaggtgaagtttgtgggggagagcgtggatgactgtggcggcggctacagcgagagcattgctgagatctgtgaggagctgcagaatggcctgacccccctgctgattgtgacccccaacggcagagatgaaagtggggccaacagagactgctacctgctgagccctgctgcccgggcccctgtgcacagctccatgttccgcttcctgggcgtgctgctgggcatcgccatcagaacaggcagccccctgagcctgaacctggccgagcctgtgtggaagcagctggccggcatgagcctgaccatcgctgacctgtctgaggtggacaaggacttcatccctggcctgatgtacatccgggacaatgaggccaccagcgaggagtttgaggccatgagcctgcccttcaccgtgcccagcgccagcggccaggacatccagctgagcagcaagcacacccacatcaccctggacaacagagcagaatatgtgcggctggccatcaactaccgcctgcacgagtttgatgagcaggtggccgctgtgcgggagggcatggcccgggtggtgcctgtgcccctgctgagcctcttcaccggctatgagctggagaccatggtgtgtggcagcccagacatccccctgcacctgctgaagtctgtggccacctacaagggcatcgagcccagcgccagcctcatccagtggttctgggaggtgatggagagcttcagcaacacagagaggagcctcttcctgcgctttgtgtggggccgcacccggctgcccaggaccatcgctgacttccggggccgggactttgtgatccaggtgctggacaagtacaaccccccagaccacttcctgcctgagagctacacctgcttcttcctgctgaagctgccccgctacagctgcaagcaggtgctggaggagaagctgaagtatgccatccacttctgcaagagcattgacacagatgattatgccagaattgccctgaccggggagcctgctgctgatgacagcagtgatgacagcgacaatgaagatgtggacagctttgccagtgacagcacccaggactacctgaccggccactag

SEQ ID NO: 155029 - DNA, 3075 bp, synthetic construct
  misc_feature 1..3075: note = Description of Artificial Sequence: Synthetic coding sequence
  source 1..3075: mol_type = other DNA
atggagaggaggagcaggaggaagagcagaagaaatggccgcagcacagctgggaaggctgctgccacccagcctgccaagagccctggggcccagctgtggctgttccccagcgctgctggcctgcaccgggccctgctgcggcgggtggaggtgacccggcagctgtgctgcagccctggccgcctggccgtgctggagcggggcggggccggcgtgcaggtgcaccagctgctggccggcagcggcggggcccggacccccaagtgcatcaagctgggcaagaacatgaagatccacagcgtggaccagggcgctgagcacatgctgatcctgagcagtgatggcaagccctttgaatatgacaactacagcatgaagcacctgcgctttgagagcatcctgcaggagaagaagatcatccagatcacctgtggggactaccacagcctggccctgagcaaaggaggagagctgtttgcctggggccagaacctgcacggccagctgggcgtgggcaggaagttccccagcaccaccaccccccagatcgtggagcacctggccggcgtgcccctggcccagatctctgctggggaggcccacagcatggccctgtccatgagcggcaacatctacagctggggcaagaatgaatgtggccagctgggcctgggccacacagagagcaaggatgaccccagcctgattgagggcctggacaaccagaaggtggagtttgtggcctgtggcggcagccacagcgccctgctgacccaggacggcctgctcttcacctttggagctgggaagcacggccagctgggccacaacagcacccagaatgagctgcggccctgcctggtggccgagctggtgggctacagagtgacccagatcgcctgtggccgctggcacaccctggcctacgtgtctgacctgggcaaggtgttctcctttggcagcggcaaggatggccagctgggcaatggaggcacccgggaccagctgatgcccctgcctgtgaaggtgagcagcagcgaggagctgaagctggagagccacaccagcgagaaggagctgatcatgattgctgggggcaaccagagcatcctgctgtggatcaagaaggagaacagctatgtgaacctgaagaggaccatccccaccctgaatgaaggaacagtgaagcgctggattgctgatgtggagaccaagcgctggcagagcaccaagcgggagatccaggagatcttcagcagccctgcctgcctgaccggcagcttcctgaggaagaggaggaccacagagatgatgcctgtgtacctggacctgaacaaggccaggaacatcttcaaggagctgacccagaaggactggatcaccaacatgatcaccacctgcctgaaggacaacctgctgaagaggctgcccttccacagccccccccaggaggccctggagatcttcttcctgctgcctgaatgtcccatgatgcacatcagcaacaactgggagagcctggtggtgccctttgccaaggtggtgtgcaagatgtctgaccagagcagcctggtgctggaggagtactgggccaccctgcaggagagcaccttcagcaagctggtgcagatgttcaagacagctgtgatctgccagctggactactgggatgagagcgcagaagaaaatggaaatgtgcaggccctgctggagatgctgaagaagctgcaccgggtgaaccaggtgaagtgccagctgcctgagagcatcttccaggtggatgagctgctgcaccggctgaacttctttgtggaggtgtgccgccgctacctgtggaagatgacagtggatgcctctgaaaatgtgcagtgctgcgtcatcttcagccacttccccttcatcttcaacaacctgagcaagatcaagctgctgcacacagacaccctgctgaagattgagagcaagaagcacaaggcctacctgcggtctgctgccatcgaggaggagcgggagagcgagtttgccctgcggcccacctttgacctgactgtgagaagaaaccacctgattgaagatgtgctgaaccagctgagccagtttgaaaatgaagacctgaggaaggagctgtgggtgtccttctctggagagatcggctatgacctgggcggcgtgaagaaggagttcttctactgcctgtttgctgagatgatccagccagaatatggcatgttcatgtacccagagggcgccagctgcatgtggttccctgtgaagcccaagtttgagaagaagcgctacttcttcttcggcgtgctgtgtggcctgagcctcttcaactgcaatgtggccaacctgcccttccccctggccctcttcaagaagctgctggaccagatgcccagcctggaggacctgaaggagctgagcccagacctgggcaagaacctgcagaccctgctggatgatgaaggagacaactttgaggaggtgttctacatccacttcaacgtgcactgggacagaaatgacaccaacctgatccccaacggcagcagcatcaccgtgaaccagaccaacaagagggactatgtgtccaagtacatcaactacatcttcaatgacagcgtgaaggctgtgtatgaggagttcagaagaggcttctacaagatgtgtgatgaggacatcatcaagctgttccaccctgaggagctgaaggatgtgattgtgggcaacacagattatgactggaagacctttgagaagaatgcccgctatgagcccggctacaacagcagccaccccaccatcgtgatgttctggaaggccttccacaagctgaccctggaggagaagaagaagttcctggtgttcctgaccggcacagaccggctgcagatgaaggacctgaacaacatgaagatcaccttctgctgcccagagagctggaatgaaagagaccccatccgggccctgacctgcttctctgtgctcttcctgcccaagtacagcaccatggagaccgtggaggaggccctgcaggaggccatcaacaacaacagaggatttggatag

SEQ ID NO: 155030 - DNA, 1854 bp, synthetic construct
  misc_feature 1..1854: note = Description of Artificial Sequence: Synthetic coding sequence
  source 1..1854: mol_type = other DNA
atgggccccaccctggccgtgcccaccccctacggctgcatcggctgcaagctgccccagcctgagtaccccccagccctgatcatcttcatgttctgtgccatggtgatcaccatcgtggtggacctgattggcaacagcatggtgatcctggccgtgaccaagaacaagaagctgaggaacagcggcaacatctttgtggtgtccctgtctgtggccgacatgctggtggccatctacccctaccccctgatgctgcacgccatgagcattggaggctgggacctgagccagctgcagtgccagatggtgggcttcatcaccggcctgtctgtggtgggcagcatcttcaacatcgtggccatcgccatcaaccgctactgctacatctgccacagcctgcagtatgaaagaatcttctctgtgaggaacacctgcatctacctggtgatcacctggatcatgacagtgctggccgtgctgcccaacatgtacatcggcaccattgaatatgaccccaggacctacacctgcatcttcaactacctgaacaaccctgtgttcaccgtgaccatcgtgtgcatccactttgtgctgcccctgctgattgtgggcttctgctacgtgcgcatctggaccaaggtgctggccgcccgggaccctgctggccagaacccagacaaccagctggccgaggtgaggaacttcctgaccatgtttgtgatcttcctgctgtttgctgtgtgctggtgccccatcaacgtgctgactgtgctggtggccgtgagccccaaggagatggccggcaagatccccaactggctgtacctggccgcctacttcatcgcctacttcaacagctgcctgaatgctgtgatctacggcctgctgaatgaaaacttccggcgggagtactggaccatcttccacgccatgaggcaccccatcatcttcttcagcggcctcatcagtgacatccgggagatgcaggaggcccggaccctggcccgggcccgggcccacgcccgggaccaggcccgggagcaggaccgggcccacgcctgcccagctgtggaggagacccccatgaatgtgagaaatgtgcccctgcctggagatgctgctgctggccacccagaccgggccagcggccaccccaagccccacagccgcagcagcagcgcctacaggaagagcgccagcacccaccacaagagcgtcttcagccacagcaaggccgccagcggccacctgaagcctgtgtctggccacagcaagccagccagcggccaccccaagagcgccaccgtgtaccccaagccagcctctgtgcacttcaaggctgacagcgtgcacttcaagggggacagcgtgcacttcaagccagacagcgtgcacttcaagccagccagcagcaaccccaagcccatcaccggccaccacgtgtctgctggcagccacagcaagagcgccttctctgctgccaccagccaccccaagcccaccaccggccacatcaagccagccaccagccatgctgagcccaccacagctgactaccccaagccagccaccaccagccaccccaagcccacagctgctgacaaccctgagctgagcgccagccactgcccagagatcccagccatcgcccaccctgtgtctgatgacagcgacctgcctgagagcgccagcagccctgctgctggccccaccaagccagctgccagccagctggagagtgacaccatcgctgacctgcctgaccccaccgtggtgaccaccagcaccaatgactaccatgatgtggtggtgattgatgtggaggatgatcctgatgagatggctgtgtag

SEQ ID NO: 155031 - DNA, 13125 bp, synthetic construct
  misc_feature 1..13125: note = Description of Artificial Sequence: Synthetic coding sequence
  source 1..13125: mol_type = other DNA
atgaaggtggacaggaccaagctgaagaagacccccacagaggccccagctgactgccgggccctgattgacaagctgaaggtgtgcaatgatgagcagctgctgctggagctgcagcagatcaagacctggaacatcggcaaatgtgagctgtaccactgggtggacctgctggacagatttgatggcatcctggctgatgctggccagacagtggagaacatgtcctggatgctggtgtgtgacaggcctgagcgggagcagctgaagatgctgctgctggccgtgctgaacttcaccgccctgctgattgagtacagcttcagccgccacctgtacagcagcattgagcacctgaccaccctgctggccagcagtgacatgcaggtggtgctggccgtgctgaacctgctgtatgtgttcagcaagaggagcaactacatcacccggctgggcagtgacaagaggacccccctgctgacccggctgcagcacctggccgagagctggggcggcaaggaaaatggatttggcctggccgagtgctgccgggacctgcacatgatgaagtacccacccagcgccaccaccctgcactttgagttctacgccgaccccggggctgaggtgaagattgagaagaggaccaccagcaacaccctgcactacatccacatcgagcagctggacaagatcagcgagagccccagcgagatcatggagagcctgaccaagatgtacagcatccccaaggacaagcagatgctgctcttcacccacatccggctggcccacggcttcagcaaccacaggaagaggctgcaggccgtgcaggcccggctgcacgccatcagcatcctggtgtacagcaatgccctgcaggagagcgccaacagcatcctgtacaacggcctcatcgaggagctggtggatgtgctgcagatcacagacaagcagctgatggagatcaaggccgccagcctgcggaccctgaccagcatcgtgcacctggagaggacccccaagctgagcagcatcatcgactgcaccggcacagccagctaccacggcttcctgcctgtgctggtgaggaactgcatccaggccatgattgaccccagcatggacccctacccccaccagtttgccacagccctcttctccttcctgtaccacctggccagctatgatgctggaggagaggccctggtgtcctgtggcatgatggaggccctgctgaaggtgatcaagttcctgggagatgagcaggaccagatcacctttgtgaccagggctgtgcgggtggtggacctgatcaccaacctggacatggccgccttccagagccacagcggcctgagcatcttcatctaccgcctggagcacgaggtggacctgtgcaggaaggagtgcccctttgtgatcaagcccaagatccagaggcccaacaccacccaggagggggaggagatggagacagacatggatggagtgcagtgcatcccccagagagctgccctgctgaagtccatgctgaacttcctgaagaaggccatccaggaccctgccttcagtgatggcatccgccacgtgatggatggcagcctgcccaccagcctgaagcacatcatcagcaatgctgagtactacggccccagcctcttcctgctggccacagaggtggtgacagtgtttgtgttccaggagcccagcctgctgagcagcctgcaggacaatggcctgacagatgtgatgctgcacgccctgctgatcaaggatgtgcctgccacccgggaggtgctgggcagcctgcccaacgtgttttctgccctgtgcctgaatgcccggggcctgcagagctttgtgcagtgccagccctttgagcggctcttcaaggtgctgctgagcccagactacctgcctgccatgagaagaagaagaagcagtgaccccctgggggacacagccagcaacctgggcagcgctgtggatgagctgatgaggcaccagcccaccctgaagacagatgccaccacagccatcatcaagctgctggaggagatctgcaacctgggccgggaccccaagtacatctgccagaagcccagcatccagaaggcagatggaacagccacagcccccccacccaggagcaaccacgccgctgaggaggccagcagtgaagatgaggaggaggaggaggtgcaggccatgcagagcttcaacagcacccagcagaatgaaacagagcccaaccagcaggtggtgggcacagaggagcgcatccccatccccctgatggactacatcctgaatgtgatgaagtttgtggagagcatcctgagcaacaacaccacagatgaccactgccaggagtttgtgaaccagaagggcctgctgcccctggtgaccatcctgggcctgcccaacctgcccatcgacttccccaccagcgctgcctgccaggccgtggccggcgtgtgcaagagcatcctgaccctgagccatgagcccaaggtgctgcaggagggcctgctgcagctggacagcatcctgagcagcctggagcccctgcaccggcccatcgagagccctgggggctctgtgctgctgcgggagctggcctgtgctggaaatgtggctgatgccaccctgagcgcccaggccacccccctgctgcacgccctgacagctgcccacgcctacatcatgatgtttgtgcacacctgccgggtgggccagagcgagatccgcagcatctctgtgaaccagtggggcagccagctgggcctgtctgtgctgagcaagctgagccagctgtactgcagcctggtgtgggagagcacagtgctgctgagcctgtgcacccccaacagcctgcccagcggctgtgaatttggccaggccgacatgcagaagctggtgcccaaggatgagaaggccggcaccacccagggcggcaagagaagtgatggagagcaggatggagctgctggctccatggatgccagcacccagggcctgctggagggcatcggcctggatggagacaccctggcccccatggagacagatgagcccacagccagtgacagcaagggcaagagcaagatcaccccagccatggccgcccgcatcaagcagatcaagcccctgctgagcgccagcagccggctgggccgggccctggccgagctgtttggcctgctggtgaagctgtgtgtgggcagccctgtgcggcagaggaggagccaccacgccgccagcaccaccacagcccccaccccagctgcccggagcacagccagcgccctgaccaagctgctgaccaagggcctgtcctggcagcccccaccctacacccccaccccccgcttccggctgaccttcttcatctgcagcgtgggcttcaccagccccatgctgtttgatgagaggaagtacccctaccacctgatgctgcagaagttcctgtgcagcggcggccacaatgccctgtttgagaccttcaactgggccctgtccatgggcggcaaggtgcctgtgtctgagggcctggagcacagcgacctgcctgatggcactggagagttcctggatgcctggctgatgctggtggagaagatggtgaaccccaccaccgtgctggagagcccccacagcctgcctgccaagctgcctggaggagtgcagaacttcccccagttcagcgccctgcgcttcctggtggtgacccagaaggccgccttcacctgcatcaagaacctgtggaacaggaagcccctgaaggtgtatggaggccgcatggccgagagcatgctggccatcctgtgccacatcctgcggggggagcctgtgatccgggagcggctgagcaaggagaaggagggcagcagaggagaggaggacaccggccaggaggagggcggcagccggcgggagccccaggtgaaccagcagcagctgcagcagctgatggacatgggcttcacccgggagcacgccatggaggccctgctgaacaccagcaccatggagcaggccacagagtacctgctgacccaccccccacccatcatgggcggcgtggtgcgggacctgtccatgtctgaggaggaccagatgatgagggccatcgccatgagcctgggccaggacatccccatggaccagagagctgagagccctgaggaggtggcctgcaggaaggaggaggaggagaggaaggcccgggagaagcaggaggaggaggaggccaagtgcctggagaagttccaggatgctgaccccctggagcaggatgagctgcacaccttcacagacaccatgctgcccggctgcttccacctgctggatgagctgcctgacacagtgtacagagtgtgtgacctgatcatgacagccatcaagagaaatggagctgactacagagacatgatcctgaagcaggtggtgaaccaggtgtgggaggccgcagatgtgctgatcaaggccgccctgcccctgaccaccagtgacaccaagacagtgtctgagtggatcagccagatggccaccctgccccaggccagcaacctggccacccgcatcctgctgctgaccctgctgtttgaggagctgaagctgccctgtgcctgggtggtggagagcagcggcatcctgaatgtgctgatcaagctgctggaggtggtgcagccctgcctgcaggccgccaaggagcagaaggaggtgcagacccccaagtggatcacccctgtgctgctgctgattgacttctatgagaagacagccatcagcagcaagaggcgggcccagatgaccaagtacctgcagagcaacagcaacaactggcgctggtttgatgacaggagcggccgctggtgcagctacagcgccagcaacaacagcaccatcgacagcgcctggaagagcggggagacctctgtgcgcttcaccgctggaagaagacgctacacagtgcagttcaccaccatggtgcaggtgaatgaggagaccggcaacagaagacctgtgatgctgaccctgctgcgggtgccccggctgaacaagaacagcaagaacagcaatggccaggagctggagaagaccctggaggagagcaaggagatggacatcaagaggaaggagaacaagggaaatgacacccccctggccctggagagcaccaacacagagaaggagaccagcctggaggagaccaagatcggggagatcctgatccagggcctgacagaggacatggtgacagtgctgatccgggcctgtgtgtccatgctgggcgtgcctgtggaccctgacaccctgcacgccaccctgcggctgtgcctgcggctgacccgggaccacaagtatgccatgatgtttgctgagctgaagagcaccaggatgatcctgaacctgacccagagcagcggcttcaacggcttcacccccctggtgaccctgctgctgcggcacatcatcgaggacccctgcaccctgcggcacaccatggagaaggtggtgcgctctgctgccaccagcggggccggcagcaccaccagcggcgtggtgtctggcagcctgggcagccgggagatcaactacatcctgcgggtgctgggccctgctgcctgcaggaacccagacatcttcacagaggtggccaactgctgcatcagaattgccctgcctgccccccggggcagcggcacagccagtgatgatgaatttgagaacctgcgcatcaagggccccaatgctgtgcagctggtgaagaccacccccctgaagcccagccccctgcccgtcatcccagacaccatcaaggaggtgatctatgacatgctgaatgccctggccgcctaccacgcccctgaggaggccgacaagagtgaccccaagccaggagtgatgacccaggaggtgggccagctgctgcaggacatgggagatgatgtgtaccagcagtaccgcagcctgacccggcagagcagtgactttgacacccagagcggcttcagcatcaacagccaggtgtttgctgctgatggagccagcacagagaccagcgccagcggcaccagccagggcgaggccagcaccccagaggagagcagagatggcaagaaggacaaggagggggaccgggccagcgaggagggcaagcagaagggcaagggcagcaagcccctgatgcccaccagcaccatcctgcggctgctggccgagctggtgcgctcctatgtgggcatcgccaccctgattgccaactacagctacacagtgggccagagcgagctgatcaaggaggactgcagcgtgctggcctttgtgctggaccacctgctgccccacacccagaatgctgaggacaaggacaccccagccctggcccggctcttcctggccagcctggccgccgccggcagcggcacagatgcccaggtggccctggtgaatgaggtgaaggccgccctgggccgggccctggccatggccgagagcacagagaagcacgcccggctgcaggccgtgatgtgcatcatcagcaccatcatggagagctgccccagcaccagcagcttctacagcagcgccacagccaagacccagcacaacggcatgaacaacatcatccgcctcttcctgaagaagggcctggtgaatgacctggcccgggtgccccacagcctggacctgagcagccccaacatggccaacacagtgaatgctgccctgaagcccctggagaccctgagccgcatcgtgaaccagcccagcagcctgtttggcagcaagagcgccagcagcaagaacaagtctgagcaggatgcccagggcgccagccaggacagcagcagcaaccagcaggaccctggagagcccggggaggccgaggtgcaggaggaggaccatgatgtgacccagacagaggtggctgatggagacatcatggatggagaggccgagacagattctgtggtgattgctggccagcctgaggtgctgagcagccaggagatgcaggtggagaatgagctggaggacctgattgatgagctgctggagagagatggcggcagcggcaacagcaccatcatcgtgagccgcagcggggaggatgagagccaggaggatgtgctgatggatgaggcccccagcaacctgagccaggccagcaccctgcaggccaacagagaagattccatgaacatcctggaccctgaagatgaggaggagcacacccaggaggaggacagcagcggcagcaatgaagatgaagatgacagccaggatgaggaggaggaggaggaggaggatgaagaagatgaccaggaggatgatgaaggagaggagggagatgaagatgatgatgatgatggcagcgagatggagctggatgaggactacccagacatgaatgccagccccctggtgcgctttgaaagatttgaccgggaggatgacctgatcattgaatttgacaacatgttcagcagcgccacagacatcccccccagccctggcaacatccccaccacccaccccctgatggtgagacatgctgaccacagcagcctgaccctgggcagcggcagcagcaccacccggctgacccagggcatcggccgcagccagaggaccctgcggcagctgacagccaacacaggccacaccatccacgtgcactacccaggcaaccggcagcccaaccccccactcatcctgcagaggctgctgggccccagcgctgctgctgacatcctgcagctgagcagcagcctgcccctgcagagccggggccgggcccggctgctggtgggcaatgatgatgtgcacatcatcgcccggagtgatgatgagctgctggatgacttcttccatgaccagagcacagccaccagccaggccggcaccctgagcagcatccccacagccctgacccgctggacagaggagtgcaaggtgctggatgctgagagcatgcatgactgtgtgtctgtggtgaaggtgtccatcgtgaaccacctggagttcctgagagatgaggagctggaggagcggcgggagaagaggaggaagcagctggccgaggaggagaccaagatcacagacaagggcaaggaggacaaggaaaatagagaccagagcgcccagtgcacagccagcaagagcaatgacagcacagagcagaacctgagtgatggcacccccatgccagacagctaccccaccacccccagcagcacagatgctgccaccagcgagagcaaggagaccctgggcaccctgcagagcagccagcagcagcccaccctgcccaccccaccagccctgggggaggtgccccaggagctgcagagccctgctggggagggcggcagcagcacccagctgctgatgcctgtggagcctgaggagctgggccccacccggcccagcggggaggccgagaccacccagatggagctgagccctgcccccaccatcaccagcctgagccctgagagagctgaggacagtgatgccctgacagctgtgagcagccagctggagggcagccccatggacaccagcagcctggccagctgcaccctggaggaggccgtgggggacaccagcgctgctggcagcagcgagcagcccagggctggcagcagcaccccaggagatgcccccccagctgtggccgaggtgcagggccgcagtgatggcagcggggagagcgcccagcccccagaggacagcagccccccagccagcagcgagagcagcagcacccgggacagcgctgtggccatcagcggggctgacagccggggcatcctggaggagcccctgcccagcaccagcagcgaggaggaggaccccctggccggcatcagcctgcctgagggcgtggaccccagcttcctggccgccctgcctgatgacatcagaagagaggtgctgcagaaccagctgggcatccggccccccaccaggacagcccccagcaccaacagcagcgccccagctgtggtgggcaaccctggggtgacagaggtgtccccagagttcctggccgccctgcccccagccatccaggaggaggtgctggcccagcagagagctgagcagcagaggcgggagctggcccagaatgccagcagtgacacccccatggaccctgtgaccttcatccagaccctgcccagcgacctgcggcgctctgtgctggaggacatggaggacagcgtgctggccgtgatgcccccagacattgctgctgaggcccaggccctgcggcgggagcaggaggcccggcagaggcagctgatgcatgagcggctgtttggccacagcagcaccagcgccctgagcgccatcctgcggagccctgccttcaccagccggctgagcggcaacagaggagtgcagtacacccggctggccgtgcagaggggcggcaccttccagatgggcggcagcagcagccacaaccggcccagcggcagcaatgtggacaccctgctgcggctgcggggccgcctgctgctggaccacgaggccctgagctgcctgctggtgctgctgtttgtggatgagcccaagctgaacaccagccggctgcaccgggtgctgaggaacctgtgctaccacgcccagaccaggcactgggtgatccgcagcctgctgagcatcctgcagaggagcagcgagagcgagctgtgcatcgagacccccaagctgaccaccagcgaggagaagggcaagaagagcagcaagagctgtggcagcagcagccatgaaaatcggcccctggacctgctgcacaagatggagagcaagagcagcaaccagctgtcctggctgtctgtgtccatggatgctgccctgggctgcaggaccaacatcttccagatccagaggtctgggggcaggaagcacacagagaagcacgccagcggcggcagcacagtgcacatccacccccaggccgcccctgtggtgtgcagacatgtgctggacaccctcatccagctggccaaggtgttccccagccacttcacccagcagaggaccaaggagaccaactgtgagagtgaccgggagcggggcaacaaggcctgcagcccctgcagcagccagagcagcagcagcggcatctgcacagacttctgggacctgctggtgaagctggacaacatgaatgtgtccaggaagggcaagaacagcgtgaagtctgtgcctgtgtctgctggaggagagggggagaccagcccctacagcctggaggccagccccctgggccagctgatgaacatgctgagccaccctgtgatccgccgcagcagcctgctgacagagaagctgctgcggctgctgagcctcatcagcatcgccctgcctgagaacaaggtgtctgaggcccaggccaacagcggcagcggggccagcagcaccaccacagccaccagcaccaccagcaccaccaccaccacagctgccagcaccacccccaccccacccacagcccccacccctgtgaccagcgccccagccctggtggccgccacagccatcagcaccatcgtggtggccgccagcaccaccgtgaccacccccaccacagccaccaccaccgtgtccatcagccccaccaccaagggcagcaagagccctgccaaggtgtctgatggcggcagcagcagcacagacttcaagatggtgagcagcggcctgacagagaaccagctgcagctgtctgtggaggtgctgaccagccacagctgcagcgaggagggcctggaggatgctgccaacgtgctgctgcagctgagcagaggagacagcggcacccgggacacagtgctgaagctgctgctgaatggagcccggcacctgggctacaccctgtgcaagcagatcggcaccctgctggccgagctgcgggagtacaacctggagcagcagaggcgggcccagtgtgagaccctgagcccagatggcctgcctgaggagcagccccagaccaccaagctgaagggcaagatgcagagcagatttgacatggccgagaatgtggtgattgtggccagccagaagaggcccctgggcggccgggagctgcagctgcccagcatgtccatgctgaccagcaagaccagcacccagaagttcttcctgcgggtgctgcaggtgatcatccagctgagagatgacacccggcgggccaacaagaaggccaagcagacaggccgcctgggcagcagcggcctgggcagcgccagcagcatccaggccgctgtgcggcagctggaggccgaggctgatgccatcatccagatggtgcgggagggccagagggcccggcggcagcagcaggccgccaccagcgagagcagccagagcgaggcctctgtgcggcgggaggagagccccatggatgtggaccagcccagccccagcgcccaggacacccagagcatcgccagtgatggcaccccccagggcgagaaggagaaggaggagaggcctcctgagctgcccctgctgtctgagcagctgagcctggatgagctgtgggacatgctgggggagtgcctgaaggagctggaggagagccatgaccagcacgctgtgctggtgctgcagcctgctgtggaggccttcttcctggtgcacgccacagagcgggagagcaagccccctgtgcgggacacccgggagagccagctggcccacatcaaggatgagcccccacccctgagccctgcccccctgaccccagccacccccagcagcctggaccccttcttcagccgggagcccagctccatgcacatcagcagcagcctgcccccagacacccagaagttcctgcgctttgctgagacccacaggacagtgctgaaccagatcctgcggcagagcaccacccacctggctgatggcccctttgctgtgctggtggactacatccgggtgctggactttgatgtgaagaggaagtacttccggcaggagctggagcggctggatgagggcctgaggaaagaagacatggctgtgcacgtgcggcgggaccacgtgtttgaggacagctaccgggagctgcacaggaagagccctgaggagatgaagaaccggctgtacatcgtgtttgaaggagaggagggccaggatgctgggggcctgctgcgggagtggtacatgatcatcagccgggagatgttcaaccccatgtatgccctcttccgcaccagccctggggacagagtgacctacaccatcaaccccagcagccactgcaaccccaaccacctgagctacttcaagtttgtgggcagaattgtggccaaggctgtgtatgacaaccggctgctggagtgctacttcaccaggagcttctacaagcacatcctgggcaagtctgtgcgctacacagacatggagagcgaggactaccacttctaccagggcctggtgtacctgctggagaatgatgtgtccaccctgggctatgacctgaccttcagcacagaggtgcaggagtttggagtgtgtgaggtgcgggacctgaagcccaacggggccaacatcctggtgacagaggagaacaagaaggagtatgtgcacctggtgtgccagatgaggatgaccggggccatcaggaagcagctggccgccttcctggagggcttctatgagatcatccccaagaggctcatcagcatcttcacagagcaggagctggagctgctgatcagcggcctgcccaccattgatattgatgacctgaagagcaacacagagtaccacaagtaccagagcaacagcatccagatccagtggttctggagggccctgcggagctttgaccaggccgaccgggccaagttcctgcagtttgtgacaggcaccagcaaggtgcccctgcagggctttgctgccctggagggcatgaatggcatccagaagttccagatccacagagatgacaggagcacagaccggctgcccagcgcccacacctgcttcaaccagctggacctgcctgcctatgagagctttgagaagctgcggcacatgctgctgctggccatccaggagtgcagcgagggcttcggcctggcctag

SEQ ID NO: 155032 - DNA, 13125 bp, synthetic construct; identical to SEQ ID NO: 155031
  misc_feature 1..13125: note = Description of Artificial Sequence: Synthetic coding sequence
  source 1..13125: mol_type = other DNA

SEQ ID NO: 155033 - DNA, 771 bp, synthetic construct
  misc_feature 1..771: note = Description of Artificial Sequence: Synthetic coding sequence
  source 1..771: mol_type = other DNA
atggacccctacccccaccagtttgccacagccctcttctccttcctgtaccacctggccagctatgatgctggaggagaggccctggtgtcctgtggcatgatggaggccctgctgaaggtgatcaagttcctgggagatgagcaggaccagatcacctttgtgaccagggctgtgcgggtggtggacctgatcaccaacctggacatggccgccttccagagccacagcggcctgagcatcttcatctaccgcctggagcacgaggtggacctgtgcaggaaggagtgcccctttgtgatcaagcccaagatccagaggcccaacaccacccaggagggggaggagatggagacagacatggatgtggctgatgtggccatggagagcagccctggcagcagcatctccatggagcaccggctggatgtggagctgcgggccagcggcagcagcagcagcaccaacatcagcagcggccccagccctggccccagccctggcactggacctggccctggccctggccctggccctggccctggccctggccctggccctggccctggccctggccctggccctggccctggccctggccccaggcctggggtgcagtgcatcccccagagagctgccctgctgaagtccatgctgaacttcctgaagaaggccatccaggaccctgccttcagtgatggcatcagacatgtgatggatggcagcctgcccaccagcctgaagcacatcatcagcaatgctgagtactag

SEQ ID NO: 155034 - DNA, 687 bp, synthetic construct
  misc_feature 1..687: note = Description of Artificial Sequence: Synthetic coding sequence
  source 1..687: mol_type = other DNA
tgagtgtcctgtggcatgatggaggccctgctgaaggtgatcaagttcctgggagatgagcaggaccagatcacctttgtgaccagggctgtgcgggtggtggacctgatcaccaacctggacatggccgccttccagagccacagcggcctgagcatcttcatctaccgcctggagcacgaggtggacctgtgcaggaaggagtgcccctttgtgatcaagcccaagatccagaggcccaacaccacccaggagggggaggagatggagacagacatggatgtggctgatgtggccatggagagcagccctggcagcagcatctccatggagcaccggctggatgtggagctgcgggccagcggcagcagcagcagcaccaacatcagcagcggccccagccctggccccagccctggcactggacctggccctggccctggccctggccctggccctggccctggccctggccctggccctggccctggccctggccctggccctggccctggccccaggcctggggtgcagtgcatcccccagagagctgccctgctgaagtccatgctgaacttcctgaagaaggccatccaggaccctgccttcagtgatggcatcagacatgtgatggatggcagcctgcccaccagcctgaagcacatcatcagcaatgctgagtactag

SEQ ID NO: 155035 - DNA, 3594 bp, synthetic construct
  misc_feature 1..3594: note = Description of Artificial Sequence: Synthetic coding sequence
  source 1..3594: mol_type = other DNA
tgaccatctggcagcaatgtggacaccctgctgcggctgcggggccgcctgctgctggaccacgaggccctgagctgcctgctggtgctgctgtttgtggatgagcccaagctgaacaccagccggctgcaccgggtgctgaggaacctgtgctaccacgcccagaccaggcactgggtgatccgcagcctgctgagcatcctgcagaggagcagcgagagcgagctgtgcatcgagacccccaagctgaccaccagcgaggagaagggcaagaagagcagcaagagctgtggcagcagcagccatgaaaatcggcccctggacctgctgcacaagatggagagcaagagcagcaaccagctgtcctggctgtctgtgtccatggatgctgccctgggctgcaggaccaacatcttccagatccagaggtctgggggcaggaagcacacagagaagcacgccagcggcggcagcacagtgcacatccacccccaggccgcccctgtggtgtgcagacatgtgctggacaccctcatccagctggccaaggtgttccccagccacttcacccagcagaggaccaaggagaccaactgtgagagtgaccgggagcggggcaacaaggcctgcagcccctgcagcagccagagcagcagcagcggcatctgcacagacttctgggacctgctggtgaagctggacaacatgaatgtgtccaggaagggcaagaacagcgtgaagtctgtgcctgtgtctgctggaggagagggggagaccagcccctacagcctggaggccagccccctgggccagctgatgaacatgctgagccaccctgtgatccgccgcagcagcctgctgacagagaagctgctgcggctgctgagcctcatcagcatcgccctgcctgagaacaaggtgtctgaggcccaggccaacagcggcagcggggccagcagcaccaccacagccaccagcaccaccagcaccaccaccaccacagctgccagcaccacccccaccccacccacagcccccacccctgtgaccagcgccccagccctggtggccgccacagccatcagcaccatcgtggtggccgccagcaccaccgtgaccacccccaccacagccaccaccaccgtgtccatcagccccaccaccaagggcagcaagagccctgccaaggtgtctgatggcggcagcagcagcacagacttcaagatggtgagcagcggcctgacagagaaccagctgcagctgtctgtggaggtgctgaccagccacagctgcagcgaggagggcctggaggatgctgccaacgtgctgctgcagctgagcagaggagacagcggcacccgggacacagtgctgaagctgctgctgaatggagcccggcacctgggctacaccctgtgcaagcagatcggcaccctgctggccgagctgcgggagtacaacctggagcagcagaggcgggcccagtgtgagaccctgagcccagatggcctgcctgaggagcagccccagaccaccaagctgaagggcaagatgcagagcagatttgacatggccgagaatgtggtgattgtggccagccagaagaggcccctgggcggccgggagctgcagctgcccagcatgtccatgctgaccagcaagaccagcacccagaagttcttcctgcgggtgctgcaggtgatcatccagctgagagatgacacccggcgggccaacaagaaggccaagcagacaggccgcctgggcagcagcggcctgggcagcgccagcagcatccaggccgctgtgcggcagctggaggccgaggctgatgccatcatccagatgtctgagagcagccagagcgaggcctctgtgagaagagaggagagccccatggatgtggaccagcccagccccagcgcccaggacacccagagcatcgccagtgatggcaccccccagggcgagaaggagaaggaggagcggcccccagagctgcccctgctgtctgagcagctgagcctggatgagctgtgggacatgctgggagaatgtctgaaggagctggaggagagccatgaccagcacgctgtgctggtgctgcagcctgctgtggaggccttcttcctggtgcacgccacagagcgggagagcaagccccctgtgcgggacacccgggagagccagctggcccacatcaaggatgagcccccacccctgagccctgcccccctgaccccagccacccccagcagcctggaccccttcttcagccgggagcccagctccatgcacatcagcagcagcctgcccccagacacccagaagttcctgcgctttgctgagacccacaggacagtgctgaaccagatcctgcggcagagcaccacccacctggctgatggcccctttgctgtgctggtggactacatccgggtgctggactttgatgtgaagaggaagtacttccggcaggagctggagcggctggatgagggcctgaggaaggaggacatggctgtgcacgtgagaagagaccacgtgtttgaagattcctaccgggagctgcacaggaagagccctgaggagatgaagaacagactctacatcgtgtttgaaggagaggagggccaggatgctgggggcctgctgcgggagtggtacatgatcatcagccgggagatgttcaaccccatgtatgccctcttccgcaccagccctggggacagagtgacctacaccatcaaccccagcagccactgcaaccccaaccacctgagctacttcaagtttgtgggccgcatcgtggccaaggctgtgtatgacaaccggctgctggagtgctacttcaccaggagcttctacaagcacatcctgggcaagtctgtgcgctacacagacatggagagcgaggactaccacttctaccagggcctggtgtacctgctggagaatgatgtgtccaccctgggctatgacctgaccttcagcacagaggtgcaggagtttggagtgtgtgaggtgcgggacctgaagcccaatggagccaacatcctggtgacagaggagaacaagaaggagtatgtgcacctggtgtgccagatgaggatgactggagccatcaggaagcagctggccgccttcctggagggcttctatgagatcatccccaagaggctcatcagcatcttcacagagcaggagctggagctgctgatcagcggcctgcccaccatcgacattgatgacctgaagagcaacacagagtaccacaagtaccagagcaacagcatccagatccagtggttctggagggccctgcggagctttgaccaggccgaccgggccaagttcctgcagtttgtgacaggcaccagcaaggtgcccctgcagggctttgctgccctggagggcatgaatggcatccagaagttccagatccacagagatgacaggagcacagaccggctgcccagcgcccacacctgcttcaaccagctggacctgcctgcctatgagagctttgagaagctgcggcacatgctgctgctggccatccaggagtgcagcgagggcttcggcctggcctag

SEQ ID NO: 155036 - DNA, 10227 bp, synthetic construct
  misc_feature 1..10227: note = Description of Artificial Sequence: Synthetic coding sequence
  source 1..10227: mol_type = other DNA
tgaagcctgcccagcggctgtgaatttggccaggccgacatgcagaagctggtgcccaaggatgagaaggcagatggagagcaggatggagctgctggctccatggatgccagcacccagggcctgctggagggcatcggcctggatggagacaccctggcccccatggagacagatgagcccacagccagtgacagcaagggcaagagcaagatcaccccagccatggccgcccgcatcaagcagatcaagcccctgctgagcgccagcagccggctgggccgggccctggccgagctgtttggcctgctggtgaagctgtgtgtgggcagccctgtgcggcagaggaggagccaccacgccgccagcaccaccacagcccccaccccagctgcccggagcacagccagcgccctgaccaagctgctgaccaagggcctgtcctggcagcccccaccctacacccccaccccccgcttccggctgaccttcttcatctgcagcgtgggcttcaccagccccatgctgtttgatgagaggaagtacccctaccacctgatgctgcagaagttcctgtgcagcggcggccacaatgccctgtttgagaccttcaactgggccctgtccatgggcggcaaggtgcctgtgtctgagggcctggagcacagcgacctgcctgatggcactggagagttcctggatgcctggctgatgctggtggagaagatggtgaaccccaccaccgtgctggagagcccccacagcctgcctgccaagctgcctggaggagtgcagaacttcccccagttcagcgccctgcgcttcctggtggtgacccagaaggccgccttcacctgcatcaagaacctgtggaacaggaagcccctgaaggtgtatggaggccgcatggccgagagcatgctggccatcctgtgccacatcctgcggggggagcctgtgatccgggagcggctgagcaaggagaaggagggcagcagaggagaggaggacaccggccaggaggagggcggcagccggcgggagccccaggtgaaccagcagcagctgcagcagctgatggacatgggcttcacccgggagcacgccatggaggccctgctgaacaccagcaccatggagcaggccacagagtacctgctgacccaccccccacccatcatgggcggcgtggtgcgggacctgtccatgtctgaggaggaccagatgatgagggccatcgccatgagcctgggccaggacatccccatggaccagagagctgagagccctgaggaggtggcctgcaggaaggaggaggaggagaggaaggcccgggagaagcaggaggaggaggaggccaagtgcctggagaagttccaggatgctgaccccctggagcaggatgagctgcacaccttcacagacaccatgctgcccggctgcttccacctgctggatgagctgcctgacacagtgtacagagtgtgtgacctgatcatgacagccatcaagagaaatggagctgactacagagacatgatcctgaagcaggtggtgaaccaggtgtgggaggccgcagatgtgctgatcaaggccgccctgcccctgaccaccagtgacaccaagacagtgtctgagtggatcagccagatggccaccctgccccaggccagcaacctggccacccgcatcctgctgctgaccctgctgtttgaggagctgaagctgccctgtgcctgggtggtggagagcagcggcatcctgaatgtgctgatcaagctgctggaggtggtgcagccctgcctgcaggccgccaaggagcagaaggaggtgcagacccccaagtggatcacccctgtgctgctgctgattgacttctatgagaagacagccatcagcagcaagaggcgggcccagatgaccaagtacctgcagagcaacagcaacaactggcgctggtttgatgacaggagcggccgctggtgcagctacagcgccagcaacaacagcaccatcgacagcgcctggaagagcggggagacctctgtgcgcttcaccgctggaagaagacgctacacagtgcagttcaccaccatggtgcaggtgaatgaggagaccggcaacagaagacctgtgatgctgaccctgctgcgggtgccccggctgaacaagaacagcaagaacagcaatggccaggagctggagaagaccctggaggagagcaaggagatggacatcaagaggaaggagaacaagggaaatgacacccccctggccctggagagcaccaacacagagaaggagaccagcctggaggagaccaagatcggggagatcctgatccagggcctgacagaggacatggtgacagtgctgatccgggcctgtgtgtccatgctgggcgtgcctgtggaccctgacaccctgcacgccaccctgcggctgtgcctgcggctgacccgggaccacaagtatgccatgatgtttgctgagctgaagagcaccaggatgatcctgaacctgacccagagcagcggcttcaacggcttcacccccctggtgaccctgctgctgcggcacatcatcgaggacccctgcaccctgcggcacaccatggagaaggtggtgcgctctgctgccaccagcggggccggcagcaccaccagcggcgtggtgtctggcagcctgggcagccgggagatcaactacatcctgcgggtgctgggccctgctgcctgcaggaacccagacatcttcacagaggtggccaactgctgcatcagaattgccctgcctgccccccggggcagcggcacagccagtgatgatgaatttgagaacctgcgcatcaagggccccaatgctgtgcagctggtgaagaccacccccctgaagcccagccccctgcccgtcatcccagacaccatcaaggaggtgatctatgacatgctgaatgccctggccgcctaccacgcccctgaggaggccgacaagagtgaccccaagccaggagtgatgacccaggaggtgggccagctgctgcaggacatgggagatgatgtgtaccagcagtaccgcagcctgacccggcagagcagtgactttgacacccagagcggcttcagcatcaacagccaggtgtttgctgctgatggagccagcacagagaccagcgccagcggcaccagccagggcgaggccagcaccccagaggagagcagagatggcaagaaggacaaggagggggaccgggccagcgaggagggcaagcagaagggcaagggcagcaagcccctgatgcccaccagcaccatcctgcggctgctggccgagctggtgcgctcctatgtgggcatcgccaccctgattgccaactacagctacacagtgggccagagcgagctgatcaaggaggactgcagcgtgctggcctttgtgctggaccacctgctgccccacacccagaatgctgaggacaaggacaccccagccctggcccggctcttcctggccagcctggccgccgccggcagcggcacagatgcccaggtggccctggtgaatgaggtgaaggccgccctgggccgggccctggccatggccgagagcacagagaagcacgcccggctgcaggccgtgatgtgcatcatcagcaccatcatggagagctgccccagcaccagcagcttctacagcagcgccacagccaagacccagcacaacggcatgaacaacatcatccgcctcttcctgaagaagggcctggtgaatgacctggcccgggtgccccacagcctggacctgagcagccccaacatggccaacacagtgaatgctgccctgaagcccctggagaccctgagccgcatcgtgaaccagcccagcagcctgtttggcagcaagagcgccagcagcaagaacaagtctgagcaggatgcccagggcgccagccaggacagcagcagcaaccagcaggaccctggagagcccggggaggccgaggtgcaggaggaggaccatgatgtgacccagacagaggtggctgatggagacatcatggatggagaggccgagacagattctgtggtgattgctggccagcctgaggtgctgagcagccaggagatgcaggtggagaatgagctggaggacctgattgatgagctgctggagagagatggcggcagcggcaacagcaccatcatcgtgagccgcagcggggaggatgagagccaggaggatgtgctgatggatgaggcccccagcaacctgagccaggccagcaccctgcaggccaacagagaagattccatgaacatcctggaccctgaagatgaggaggagcacacccaggaggaggacagcagcggcagcaatgaagatgaagatgacagccaggatgaggaggaggaggaggaggaggatgaagaagatgaccaggaggatgatgaaggagaggagggagatgaagatgatgatgatgatggcagcgagatggagctggatgaggactacccagacatgaatgccagccccctggtgcgctttgaaagatttgaccgggaggatgacctgatcattgaatttgacaacatgttcagcagcgccacagacatcccccccagccctggcaacatccccaccacccaccccctgatggtgagacatgctgaccacagcagcctgaccctgggcagcggcagcagcaccacccggctgacccagggcatcggccgcagccagaggaccctgcggcagctgacagccaacacaggccacaccatccacgtgcactacccaggcaaccggcagcccaaccccccactcatcctgcagaggctgctgggccccagcgctgctgctgacatcctgcagctgagcagcagcctgcccctgcagagccggggccgggcccggctgctggtgggcaatgatgatgtgcacatcatcgcccggagtgatgatgagctgctggatgacttcttccatgaccagagcacagccaccagccaggccggcaccctgagcagcatccccacagccctgacccgctggacagaggagtgcaaggtgctggatgctgagagcatgcatgactgtgtgtctgtggtgaaggtgtccatcgtgaaccacctggagttcctgagagatgaggagctggaggagcggcgggagaagaggaggaagcagctggccgaggaggagaccaagatcacagacaagggcaaggaggacaaggaaaatagagaccagagcgcccagtgcacagccagcaagagcaatgacagcacagagcagaacctgagtgatggcacccccatgccagacagctaccccaccacccccagcagcacagatgctgccaccagcgagagcaaggagaccctgggcaccctgcagagcagccagcagcagcccaccctgcccaccccaccagccctgggggaggtgccccaggagctgcagagccctgctggggagggcggcagcagcacccagctgctgatgcctgtggagcctgaggagctgggccccacccggcccagcggggaggccgagaccacccagatggagctgagccctgcccccaccatcaccagcctgagccctgagagagctgaggacagtgatgccctgacagctgtgagcagccagctggagggcagccccatggacaccagcagcctggccagctgcaccctggaggaggccgtgggggacaccagcgctgctggcagcagcgagcagcccagggctggcagcagcaccccaggagatgcccccccagctgtggccgaggtgcagggccgcagtgatggcagcggggagagcgcccagcccccagaggacagcagccccccagccagcagcgagagcagcagcacccgggacagcgctgtggccatcagcggggctgacagccggggcatcctggaggagcccctgcccagcaccagcagcgaggaggaggaccccctggccggcatcagcctgcctgagggcgtggaccccagcttcctggccgccctgcctgatgacatcagaagagaggtgctgcagaaccagctgggcatccggccccccaccaggacagcccccagcaccaacagcagcgccccagctgtggtgggcaaccctggggtgacagaggtgtccccagagttcctggccgccctgcccccagccatccaggaggaggtgctggcccagcagagagctgagcagcagaggcgggagctggcccagaatgccagcagtgacacccccatggaccctgtgaccttcatccagaccctgcccagcgacctgcggcgctctgtgctggaggacatggaggacagcgtgctggccgtgatgcccccagacattgctgctgaggcccaggccctgcggcgggagcaggaggcccggcagaggcagctgatgcatgagcggctgtttggccacagcagcaccagcgccctgagcgccatcctgcggagccctgccttcaccagccggctgagcggcaacagaggagtgcagtacacccggctggccgtgcagaggggcggcaccttccagatgggcggcagcagcagccacaaccggcccagcggcagcaatgtggacaccctgctgcggctgcggggccgcctgctgctggaccacgaggccctgagctgcctgctggtgctgctgtttgtggatgagcccaagctgaacaccagccggctgcaccgggtgctgaggaacctgtgctaccacgcccagaccaggcactgggtgatccgcagcctgctgagcatcctgcagaggagcagcgagagcgagctgtgcatcgagacccccaagctgaccaccagcgaggagaagggcaagaagagcagcaagagctgtggcagcagcagccatgaaaatcggcccctggacctgctgcacaagatggagagcaagagcagcaaccagctgtcctggctgtctgtgtccatggatgctgccctgggctgcaggaccaacatcttccagatccagaggtctgggggcaggaagcacacagagaagcacgccagcggcggcagcacagtgcacatccacccccaggccgcccctgtggtgtgcagacatgtgctggacaccctcatccagctggccaaggtgttccccagccacttcacccagcagaggaccaaggagaccaactgtgagagtgaccgggagcggggcaacaaggcctgcagcccctgcagcagccagagcagcagcagcggcatctgcacagacttctgggacctgctggtgaagctggacaacatgaatgtgtccaggaagggcaagaacagcgtgaagtctgtgcctgtgtctgctggaggagagggggagaccagcccctacagcctggaggccagccccctgggccagctgatgaacatgctgagccaccctgtgatccgccgcagcagcctgctgacagagaagctgctgcggctgctgagcctcatcagcatcgccctgcctgagaacaaggtgtctgaggcccaggccaacagcggcagcggggccagcagcaccaccacagccaccagcaccaccagcaccaccaccaccacagctgccagcaccacccccaccccacccacagcccccacccctgtgaccagcgccccagccctggtggccgccacagccatcagcaccatcgtggtggccgccagcaccaccgtgaccacccccaccacagccaccaccaccgtgtccatcagccccaccaccaagggcagcaagagccctgccaaggtgtctgatggcggcagcagcagcacagacttcaagatggtgagcagcggcctgacagagaaccagctgcagctgtctgtggaggtgctgaccagccacagctgcagcgaggagggcctggaggatgctgccaacgtgctgctgcagctgagcagaggagacagcggcacccgggacacagtgctgaagctgctgctgaatggagcccggcacctgggctacaccctgtgcaagcagatcggcaccctgctggccgagctgcgggagtacaacctggagcagcagaggcgggcccagtgtgagaccctgagcccagatggcctgcctgaggagcagccccagaccaccaagctgaagggcaagatgcagagcagatttgacatggccgagaatgtggtgattgtggccagccagaagaggcccctgggcggccgggagctgcagctgcccagcatgtccatgctgaccagcaagaccagcacccagaagttcttcctgcgggtgctgcaggtgatcatccagctgagagatgacacccggcgggccaacaagaaggccaagcagacaggccgcctgggcagcagcggcctgggcagcgccagcagcatccaggccgctgtgcggcagctggaggccgaggctgatgccatcatccagatggtgcgggagggccagagggcccggcggcagcagcaggccgccaccagcgagagcagccagagcgaggcctctgtgcggcgggaggagagccccatggatgtggaccagcccagccccagcgcccaggacacccagagcatcgccagtgatggcaccccccagggcgagaaggagaaggaggagaggcctcctgagctgcccctgctgtctgagcagctgagcctggatgagctgtgggacatgctgggggagtgcctgaaggagctggaggagagccatgaccagcacgctgtgctggtgctgcagcctgctgtggaggccttcttcctggtgcacgccacagagcgggagagcaagccccctgtgcgggacacccgggagagccagctggcccacatcaaggatgagcccccacccctgagccctgcccccctgaccccagccacccccagcagcctggaccccttcttcagccgggagcccagctccatgcacatcagcagcagcctgcccccagacacccagaagttcctgcgctttgctgagacccacaggacagtgctgaaccagatcctgcggcagagcaccacccacctggctgatggcccctttgctgtgctggtggactacatccgggtgctggactttgatgtgaagaggaagtacttccggcaggagctggagcggctggatgagggcctgaggaaagaagacatggctgtgcacgtgcggcgggaccacgtgtttgaggacagctaccgggagctgcacaggaagagccctgaggagatgaagaaccggctgtacatcgtgtttgaaggagaggagggccaggatgctgggggcctgctgcgggagtggtacatgatcatcagccgggagatgttcaaccccatgtatgccctcttccgcaccagccctggggacagagtgacctacaccatcaaccccagcagccactgcaaccccaaccacctgagctacttcaagtttgtgggcagaattgtggccaaggctgtgtatgacaaccggctgctggagtgctacttcaccaggagcttctacaagcacatcctgggcaagtctgtgcgctacacagacatggagagcgaggactaccacttctaccagggcctggtgtacctgctggagaatgatgtgtccaccctgggctatgacctgaccttcagcacagaggtgcaggagtttggagtgtgtgaggtgcgggacctgaagcccaacggggccaacatcctggtgacagaggagaacaagaaggagtatgtgcacctggtgtgccagatgaggatgaccggggccatcaggaagcagctggccgccttcctggagggcttctatgagatcatccccaagaggctcatcagcatcttcacagagcaggagctggagctgctgatcagcggcctgcccaccattgatattgatgacctgaagagcaacacagagtaccacaagtaccagagcaacagcatccagatccagtggttctggagggccctgcggagctttgaccaggccgaccgggccaagttcctgcagtttgtgacaggcaccagcaaggtgcccctgcagggctttgctgccctggagggcatgaatggcatccagaagttccagatccacagagatgacaggagcacagaccggctgcccagcgcccacacctgcttcaaccagctggacctgcctgcctatgagagctttgagaagctgcggcacatgctgctgctggccatccaggagtgcagcgagggcttcggcctggcctag

SEQ ID NO: 155037 - DNA, 651 bp, synthetic construct
  misc_feature 1..651: note = Description of Artificial Sequence: Synthetic coding sequence
  source 1..651: mol_type = other DNA
atgaaggtggacaggaccaagctgaagaagacccccacagaggccccagctgactgccgggccctgattgacaagctgaaggtgtgcaatgatgagcagctgctgctggagctgcagcagatcaagacctggaacatcggcaaatgtgagctgtaccactgggtggacctgctggacagatttgatggcatcctggctgatgctggccagacagtggagaacatgtcctggatgctggtgtgtgacaggcctgagcgggagcagctgaagatgctgctgctggccgtgctgaacttcaccgccctgctgattgagtacagcttcagccgccacctgtacagcagcattgagcacctgaccaccctgctggccagcagtgacatgcaggtggtgctggccgtgctgaacctgctgtatgtgttcagcaagaggagcaactacatcacccggctgggcagtgacaagaggacccccctgctgacccggctgcagcacctggccgagagctggggcggcaaggaaaatggatttggcctggccgagtgctgccgggacctgcacatgatgaagtacccacccagcgccaccaccctgcactttgagttctacgccgaccccggggctgaggtgaagattgagaagaggaagtag

SEQ ID NO: 155038 - DNA, 282 bp, synthetic construct
  misc_feature 1..282: note = Description of Artificial Sequence: Synthetic coding sequence
  source 1..282: mol_type = other DNA
atgaaggtggacaggaccaagctgaagaagacccccacagaggccccagctgactgccgggccctgattgacaagctgaaggtgtgcaatgatgagcagctgctgctggagctgcagcagatcaagacctggaacatcggcaaatgtgagctgtaccactgggtggacctgctggacagatttgatggcatcctggctgatgctggccagacagtggagaacatgtcctggatgctggtgtgtgacaggcctgagcgggagcagctgaagatgctgctgtag

SEQ ID NO: 155039 - DNA, 1482 bp, synthetic construct
  misc_feature 1..1482: note = Description of Artificial Sequence: Synthetic coding sequence
  source 1..1482: mol_type = other DNA
atgctgccccgctgggagctggccctgtacctgctggccagcctgggcttccacttctacagcttctatgaggtgtacaaggtgtcccgggagcacgaggaggagctggaccaggagtttgagctggagacagacaccctgtttggaggcctgaagaaggatgccacagactttgagtggagcttctggatggagtggggcaagcagtggctggtgtggctgctgctgggccacatggtggtgtcccagatggccaccctgctggccaggaagcaccggccctggatcctgatgctgtatggcatgtgggcctgctggtgtgtgctgggcaccccaggagtggccatggtgctgctgcacaccaccatctccttctgtgtggcccagttccgcagccagctgctgacctggctgtgcagcctgctgctgctgagcaccctgcggctgcagggcgtggaggaggtgaagaggcgctggtacaagacagaaaatgagtactacctgctgcagttcaccctgactgtgcgctgcctgtactacaccagcttcagcctggagctgtgctggcagcagctgcctgctgccagcaccagctacagcttcccctggatgctggcctacgtgttctactaccctgtgctgcacaacggccccatcctgtccttcagcgagttcatcaagcagatgcagcagcaggagcatgacagcctgaaggccagcctgtgtgtgctggccctgggcctgggccgcctgctgtgctggtggtggctggccgagctgatggcccacctgatgtacatgcacgccatctacagcagcatccccctgctggagaccgtgtcctgctggaccctgggcggcctggccctggcccaggtgctcttcttctacgtgaagtacctggtgctgtttggagtgcctgccctgctgatgaggctggatggcctgaccccaccagccctgccccgctgtgtgtccaccatgttctccttcaccggcatgtggagatactttgatgtgggcctgcacaacttcctgatccgctacgtgtacatccctgtgggcggcagccagcacggcctgctgggcaccctcttcagcacagccatgacctttgcctttgtgtcctactggcatggaggctatgactacctgtggtgctgggccgccctgaactggctgggcgtgacagtggagaatggagtgcggcggctggtggagaccccctgcatccaggacagcctggcccgctacttcagcccccaggcccggcggcgcttccacgccgccctggccagctgcagcacctccatgctgatcctgagcaacctggtgttcctgggcggcaatgaggtgggcaagacctactggaaccgcatcttcatccagggctggccctgggtgaccctgtctgtgctgggcttcctgtactgctacagccacgtgggcatcgcctgggcccagacctacgccacagactag

SEQ ID NO: 155040 - DNA, 1347 bp, synthetic construct
  misc_feature 1..1347: note = Description of Artificial Sequence: Synthetic coding sequence
  source 1..1347: mol_type = other DNA
atgaagttcaccaagagcccagaagatgccacagactttgagtggagcttctggatggagtggggcaagcagtggctggtgtggctgctgctgggccacatggtggtgtcccagatggccaccctgctggccaggaagcaccggccctggatcctgatgctgtatggcatgtgggcctgctggtgtgtgctgggcaccccaggagtggccatggtgctgctgcacaccaccatctccttctgtgtggcccagttccgcagccagctgctgacctggctgtgcagcctgctgctgctgagcaccctgcggctgcagggcgtggaggaggtgaagaggcgctggtacaagacagaaaatgagtactacctgctgcagttcaccctgactgtgcgctgcctgtactacaccagcttcagcctggagctgtgctggcagcagctgcctgctgccagcaccagctacagcttcccctggatgctggcctacgtgttctactaccctgtgctgcacaacggccccatcctgtccttcagcgagttcatcaagcagatgcagcagcaggagcatgacagcctgaaggccagcctgtgtgtgctggccctgggcctgggccgcctgctgtgctggtggtggctggccgagctgatggcccacctgatgtacatgcacgccatctacagcagcatccccctgctggagaccgtgtcctgctggaccctgggcggcctggccctggcccaggtgctcttcttctacgtgaagtacctggtgctgtttggagtgcctgccctgctgatgaggctggatggcctgaccccaccagccctgccccgctgtgtgtccaccatgttctccttcaccggcatgtggagatactttgatgtgggcctgcacaacttcctgatccgctacgtgtacatccctgtgggcggcagccagcacggcctgctgggcaccctcttcagcacagccatgacctttgcctttgtgtcctactggcacggcggctatgactacctgtggtgctgggccgccctgaactggctgggcgtgacagtggagaatggagtgcggcggctggtggagaccccctgcatccaggacagcctggcccgctacttcagcccccaggcccggcggcgcttccacgccgccctggccagctgcagcacctccatgctgatcctgagcaacctggtgttcctgggcggcaatgaggtgggcaagacctactggaaccgcatcttcatccagggctggccctgggtgaccctgtctgtgctgggcttcctgtactgctacagccacgtgggcatcgcctgggcccagacctacgccacagactag

SEQ ID NO: 155041 - DNA, 552 bp, synthetic construct
  misc_feature 1..552: note = Description of Artificial Sequence: Synthetic coding sequence
  source 1..552: mol_type = other DNA
atgaggctggatggcctgaccccaccagccctgccccgctgtgtgtccaccatgttctccttcaccggcatgtggagatactttgatgtgggcctgcacaacttcctgatccgctacgtgtacatccctgtgggcggcagccagcacggcctgctgggcaccctcttcagcacagccatgacctttgcctttgtgtcctactggcatggaggctatgactacctgtggtgctgggccgccctgaactggctgggcgtgacagtggagaatggagtgcggcggctggtggagaccccctgcatccaggacagcctggcccgctacttcagcccccaggcccggcggcgcttccacgccgccctggccagctgcagcacctccatgctgatcctgagcaacctggtgttcctgggcggcaatgaggtgggcaagacctactggaaccgcatcttcatccagggctggccctgggtgaccctgtctgtgctgggcttcctgtactgctacagccacgtgggcatcgcctgggcccagacctacgccacagactag

SEQ ID NO: 155042 - DNA, 1482 bp, synthetic construct; identical to SEQ ID NO: 155039
  misc_feature 1..1482: note = Description of Artificial Sequence: Synthetic coding sequence
  source 1..1482: mol_type = other DNA

SEQ ID NO: 155043 - DNA, 1557 bp, synthetic construct
  misc_feature 1..1557: note = Description of Artificial Sequence: Synthetic coding sequence
  source 1..1557: mol_type = other DNA
atgctgccccgctgggagctggccctgtacctgctggccagcctgggcttccacttctacagcttctatgaggtgtacaaggtgtcccgggagcacgaggaggagctggaccaggagtttgagctggagacagacaccctgtttggaggcctgaagaaggatgccacagactttgagtggagcttctggatggagtggggcaagcagtggctggtgtggctgctgctgggccacatggtggtgtcccagatggccaccctgctggccaggaagcaccggccctggatcctgatgctgtatggcatgtgggcctgctggtgtgtgctgggcaccccaggagtggccatggtgctgctgcacaccaccatctccttctgtgtggcccagttccgcagccagctgctgacctggctgtgcagcctgctgctgctgagcaccctgcggctgcagggcgtggaggaggtgaagaggcgctggtacaagacagaaaatgagtactacctgctgcagttcaccctgactgtgcgctgcctgtactacaccagcttcagcctggagctgtgctggcagcagctgcctgctgccagcaccagctacagcttcccctggatgctggcctacgtgttctactaccctgtgctgcacaacggccccatcctgtccttcagcgagttcatcaagcagatgcagcagcaggagcatgacagcctgaaggccagcctgtgtgtgctggccctgggcctgggccgcctgctgtgctggtggtggctggccgagctgatggcccacctgatgtacatgcacgccatctacagcagcatccccctgctggagaccgtgtcctgctggaccctgggcggcctggccctggcccaggtgctcttcttctacgtgaagtacctggtgctgtttggagtgcctgccctgctgatgaggctggatggcctgaccccaccagccctgccccgctgtgtgtccaccatgttctccttcaccggcatgtggagatactttgatgtgggcctgcacaacttcctgatccgctacgtgtacatccctgtgggcggcagccagcacggcctgctgggcaccctcttcagcacagccatgacctttgcctttgtgtcctactggcatggaggctatgactacctgtggtgctgggccgccctgaactggctgggcgtgacagtggagaatggagtgcggcggctggtggagaccccctgcatccaggacagcctggcccgctacttcagcccccaggcccggcggcgcttccacgccgccctggccagctgcagcacctccatgctgatcctgagcaacctggtgttcctgggcggcaatgaggtgggcaagacctactggaaccgcatcttcatccagggcggcctcttcctgttcttcctgctgaacccctgctgggagacagccttccagggcttccctgtgttcctgcacttcctgcagacagaggtgctggccacctttgtgcccaactacttctcctggaacatctgcatcgagaacaccagcgagctgagcagctactag

SEQ ID NO: 155044 - DNA, 1482 bp, synthetic construct; identical to SEQ ID NO: 155039
  misc_feature 1..1482: note = Description of Artificial Sequence: Synthetic coding sequence
  source 1..1482: mol_type = other DNA

SEQ ID NO: 155045 - DNA, 624 bp, synthetic construct
  misc_feature 1..624: note = Description of Artificial Sequence: Synthetic coding sequence
  source 1..624: mol_type = other DNA
atggagtggggcaagcagtggctggtgtggctgctgctgggccacatggtggtgtcccagatggccaccctgctggccaggaagaggcgctggtacaagacagaaaatgagtactacctgctgcagttcaccctgactgtgcgctgcctgtactacaccagcttcagcctggagctgtgctggcagcagctgcctgctgccagcaccagctacagcttcccctggatgctggcctacgtgttctactaccctgtgctgcacaacggccccatcctgtccttcagcgagttcatcaagcagatgcagcagcaggagcatgacagcctgaaggccagcctgtgtgtgctggccctgggcctgggccgcctgctgtgctggtggtggctggccgagctgatggcccacctgatgtacatgcacgccatctacagcagcatccccctgctggagaccgtgtcctgctggaccctgggcggcctggccctggcccaggtgctcttcttctacgtgaagtacctggtgctgtttggagtgcctgccctgctgatgaggctggatggcctgaccccaccagccctgccccgctgtgtgtccaccatgttctccttcaccggcatgtggtag

SEQ ID NO: 155046 - DNA, 1287 bp, synthetic construct
  misc_feature 1..1287: note = Description of Artificial Sequence: Synthetic coding sequence
  source 1..1287: mol_type = other DNA
atgctgccccgctgggagctggccctgtacctgctggccagcctgggcttccacttctacagcttctatgaggtgtacaaggtgtcccgggagcacgaggaggagctggaccaggagtttgagctggagacagacaccctgtttggaggcctgaagaaggatgccacagactttgagtggagcttctggatggagtggggcaagcagtggctggtgtggctgctgctgggccacatggtggtgtcccagatggccaccctgctggccaggaagaggcgctggtacaagacagaaaatgagtactacctgctgcagttcaccctgactgtgcgctgcctgtactacaccagcttcagcctggagctgtgctggcagcagctgcctgctgccagcaccagctacagcttcccctggatgctggcctacgtgttctactaccctgtgctgcacaacggccccatcctgtccttcagcgagttcatcaagcagatgcagcagcaggagcatgacagcctgaaggccagcctgtgtgtgctggccctgggcctgggccgcctgctgtgctggtggtggctggccgagctgatggcccacctgatgtacatgcacgccatctacagcagcatccccctgctggagaccgtgtcctgctggaccctgggcggcctggccctggcccaggtgctcttcttctacgtgaagtacctggtgctgtttggagtgcctgccctgctgatgaggctggatggcctgaccccaccagccctgccccgctgtgtgtccaccatgttctccttcaccggcatgtggagatactttgatgtgggcctgcacaacttcctgatccgctacgtgtacatccctgtgggcggcagccagcacggcctgctgggcaccctcttcagcacagccatgacctttgcctttgtgtcctactggcacggcggctatgactacctgtggtgctgggccgccctgaactggctgggcgtgacagtggagaatggagtgcggcggctggtggagaccccctgcatccaggacagcctggcccgctacttcagcccccaggcccggcggcgcttccacgccgccctggccagctgcagcacctccatgctgatcctgagcaacctggtgttcctgggcggcaatgaggtgggcaagacctactggaaccgcatcttcatccagggctggccctgggtgaccctgtctgtgctgggcttcctgtactgctacagccacgtgggcatcgcctgggcccagacctacgccacagactag

SEQ ID NO: 155047 - DNA, 1071 bp, synthetic construct
  misc_feature 1..1071: note = Description of Artificial Sequence: Synthetic coding sequence
  source 1..1071: mol_type = other DNA
atgctgccccgctgggagctggccctgtacctgctggccagcctgggcttccacttctacagcttctatgaggtgtacaaggtgtcccgggagcacgaggaggagctggaccaggagtttgagctggagacagacaccctgtttggaggcctgaagaaggatgccacagactttgagtggagcttctggatggagtggggcaagcagtggctggtgtggctgctgctgggccacatggtggtgtcccagatggccaccctgctggccaggaagatgcagcagcaggagcatgacagcctgaaggccagcctgtgtgtgctggccctgggcctgggccgcctgctgtgctggtggtggctggccgagctgatggcccacctgatgtacatgcacgccatctacagcagcatccccctgctggagaccgtgtcctgctggaccctgggcggcctggccctggcccaggtgctcttcttctacgtgaagtacctggtgctgtttggagtgcctgccctgctgatgaggctggatggcctgaccccaccagccctgccccgctgtgtgtccaccatgttctccttcaccggcatgtggagatactttgatgtgggcctgcacaacttcctgatccgctacgtgtacatccctgtgggcggcagccagcacggcctgctgggcaccctcttcagcacagccatgacctttgcctttgtgtcctactggcacggcggctatgactacctgtggtgctgggccgccctgaactggctgggcgtgacagtggagaatggagtgcggcggctggtggagaccccctgcatccaggacagcctggcccgctacttcagcccccaggcccggcggcgcttccacgccgccctggccagctgcagcacctccatgctgatcctgagcaacctggtgttcctgggcggcaatgaggtgggcaagacctactggaaccgcatcttcatccagggctggccctgggtgaccctgtctgtgctgggcttcctgtactgctacagccacgtgggcatcgcctgggcccagacctacgccacagactag

SEQ ID NO: 155048 - DNA, 1485 bp, synthetic construct
  misc_feature 1..1485: note = Description of Artificial Sequence: Synthetic coding sequence
  source 1..1485: mol_type = other DNA
atgagcctgggcctgggcagcgctgagcggggcgtgctgggcaccaggggggcccgggagcgctgcagaagaagaagacctggccagcccggggagcacgaggaggagctggaccaggagtttgagctggagacagacaccctgtttggaggcctgaagaaggatgccacagactttgagtggagcttctggatggagtggggcaagcagtggctggtgtggctgctgctgggccacatggtggtgtcccagatggccaccctgctggccaggaagcaccggccctggatcctgatgctgtatggcatgtgggcctgctggtgtgtgctgggcaccccaggagtggccatggtgctgctgcacaccaccatctccttctgtgtggcccagttccgcagccagctgctgacctggctgtgcagcctgctgctgctgagcaccctgcggctgcagggcgtggaggaggtgaagaggcgctggtacaagacagaaaatgagtactacctgctgcagttcaccctgactgtgcgctgcctgtactacaccagcttcagcctggagctgtgctggcagcagctgcctgctgccagcaccagctacagcttcccctggatgctggcctacgtgttctactaccctgtgctgcacaacggccccatcctgtccttcagcgagttcatcaagcagatgcagcagcaggagcatgacagcctgaaggccagcctgtgtgtgctggccctgggcctgggccgcctgctgtgctggtggtggctggccgagctgatggcccacctgatgtacatgcacgccatctacagcagcatccccctgctggagaccgtgtcctgctggaccctgggcggcctggccctggcccaggtgctcttcttctacgtgaagtacctggtgctgtttggagtgcctgccctgctgatgaggctggatggcctgaccccaccagccctgccccgctgtgtgtccaccatgttctccttcaccggcatgtggagatactttgatgtgggcctgcacaacttcctgatccgctacgtgtacatccctgtgggcggcagccagcacggcctgctgggcaccctcttcagcacagccatgacctttgcctttgtgtcctactggcacggcggctatgactacctgtggtgctgggccgccctgaactggctgggcgtgacagtggagaatggagtgcggcggctggtggagaccccctgcatccaggacagcctggcccgctacttcagcccccaggcccggcggcgcttccacgccgccctggccagctgcagcacctccatgctgatcctgagcaacctggtgttcctgggcggcaatgaggtgggcaagacctactggaaccgcatcttcatccagggctggccctgggtgaccctgtctgtgctgggcttcctgtactgctacagccacgtgggcatcgcctgggcccagacctacgccacagactag

SEQ ID NO: 155049 - DNA, 1293 bp, synthetic construct
  misc_feature 1..1293: note = Description of Artificial Sequence: Synthetic coding sequence
  source 1..1293: mol_type = other DNA
atggagtggggcaagcagtggctggtgtggctgctgctgggccacatggtggtgtcccagatggccaccctgctggccaggaagcaccggccctggatcctgatgctgtatggcatgtgggcctgctggtgtgtgctgggcaccccaggagtggccatggtgctgctgcacaccaccatctccttctgtgtggcccagttccgcagccagctgctgacctggctgtgcagcctgctgctgctgagcaccctgcggctgcagggcgtggaggaggtgaagaggcgctggtacaagacagaaaatgagtactacctgctgcagttcaccctgactgtgcgctgcctgtactacaccagcttcagcctggagctgtgctggcagcagctgcctgctgccagcaccagctacagcttcccctggatgctggcctacgtgttctactaccctgtgctgcacaacggccccatcctgtccttcagcgagttcatcaagcagatgcagcagcaggagcatgacagcctgaaggccagcctgtgtgtgctggccctgggcctgggccgcctgctgtgctggtggtggctggccgagctgatggcccacctgatgtacatgcacgccatctacagcagcatccccctgctggagaccgtgtcctgctggaccctgggcggcctggccctggcccaggtgctcttcttctacgtgaagtacctggtgctgtttggagtgcctgccctgctgatgaggctggatggcctgaccccaccagccctgccccgctgtgtgtccaccatgttctccttcaccggcatgtggagatactttgatgtgggcctgcacaacttcctgatccgctacgtgtacatccctgtgggcggcagccagcacggcctgctgggcaccctcttcagcacagccatgacctttgcctttgtgtcctactggcacggcggctatgactacctgtggtgctgggccgccctgaactggctgggcgtgacagtggagaatggagtgcggcggctggtggagaccccctgcatccaggacagcctggcccgctacttcagcccccaggcccggcggcgcttccacgccgccctggccagctgcagcacctccatgctgatcctgagcaacctggtgttcctgggcggcaatgaggtgggcaagacctactggaaccgcatcttcatccagggctggccctgggtgaccctgtctgtgctgggcttcctgtactgctacagccacgtgggcatcgcctgggcccagacctacgccacagactag

SEQ ID NO: 155050 - DNA, 2103 bp, synthetic construct
  misc_feature 1..2103: note = Description of Artificial Sequence: Synthetic coding sequence
  source 1..2103: mol_type = other DNA
atgctgaagatgctgtccttcaagctgctgctgctggccgtggccctgggcttctttgaaggagatgccaagtttggagagagaaatgaaggcagcggggccaggagaagacgctgcctgaatggaaacccccccaagaggctgaagaggcgggacaggaggatgatgagccagctggagctgctgtctggaggagagatgctgtgtggcggcttctacccccggctgagctgctgcctgcggagtgacagccctggcctgggccgcctggagaacaagatcttctctgtgaccaacaacacagaatgtgggaagctgctggaggagatcaagtgtgccctgtgcagcccccacagccagagcctcttccacagccctgagcgggaggtgctggagcgggacctggtgctgcccctgctgtgcaaggactactgcaaggagttcttctacacctgccggggccacatccctggcttcctgcagaccacagcagatgagttctgcttctactatgccaggaaggatggcggcctgtgcttcccagacttccccaggaagcaggtgcggggccctgccagcaactacctggaccagatggaggagtatgacaaggtggaggagatcagcaggaagcacaagcacaactgcttctgcatccaggaggtggtgtctggcctgcggcagcctgtgggcgccctgcacagcggagatggcagccagaggctcttcatcctggagaaggagggctacgtgaagatcctgaccccagagggggagatcttcaaggagccctacctggacatccacaagctggtgcagagcggcatcaagggaggagatgagcggggcctgctgagcctggccttccaccccaactacaagaagaatggcaagctgtatgtgtcctacaccaccaaccaggagcgctgggccatcggcccccatgaccacatcctgcgggtggtggagtacacagtgtccaggaagaacccccaccaggtggacctgaggacagcccgggtcttcctggaggtggccgagctgcacaggaagcacctgggcggccagctgctgtttggaccagatggcttcctgtacatcatcctgggagatggcatgatcaccctggatgacatggaggagatggatggcctgagtgacttcaccggctctgtgctgcggctggatgtggacacagacatgtgcaatgtgccctacagcatccccaggagcaacccccacttcaacagcaccaaccagcccccagaggtgtttgcccacggcctgcatgaccccggccgctgtgctgtggacagacaccccacagacatcaacatcaacctgaccatcctgtgcagcgacagcaatggcaagaacagaagcagcgcccgcatcctgcagatcatcaagggcaaggactatgagagcgagcccagcctgctggagttcaagcccttcagcaatggccccctggtgggcggctttgtgtaccggggctgccagagcgagcggctgtatggcagctatgtgtttggagacagaaatggaaacttcctgaccctgcagcagagccctgtgaccaagcagtggcaggagaagcccctgtgcctgggcaccagcggcagctgccggggctacttcagcggccacatcctgggctttggagaagatgagctgggggaggtgtacatcctgagcagcagcaagtccatgacccagacccacaacgggaagctgtacaagatcgtggaccccaagaggcccctgatgccagaagaatgtcgggccaccgtgcagcctgcccagaccctgaccagtgaatgttcccggctgtgcagaaatggctactgcacccccaccgggaagtgctgctgcagccctggctgggagggggacttctgcaggacagccaagtgtgagcccgcctgcagacatggaggagtgtgtgtgcggcccaacaagtgcctgtgcaagaagggctacctgggcccccagtgtgagcaggtggacaggaacatccggcgggtgaccagggctggcatcctggaccagatcatcgacatgaccagctacctgctggacctgaccagctacatcgtgtag

SEQ ID NO: 155051 - DNA, 963 bp, synthetic construct
  misc_feature 1..963: note = Description of Artificial Sequence: Synthetic coding sequence
  source 1..963: mol_type = other DNA
atgctgaagatgctgtccttcaagctgctgctgctggccgtggccctgggcttctttgaaggagatgccaagtttggagagagaaatgaaggcagcggggccaggagaagacgctgcctgaatggaaacccccccaagaggctgaagaggcgggacaggaggatgatgagccagctggagctgctgtctggaggagagatgctgtgtggcggcttctacccccggctgagctgctgcctgcggagtgacagccctggcctgggccgcctggagaacaagatcttctctgtgaccaacaacacagaatgtgggaagctgctggaggagatcaagtgtgccctgtgcagcccccacagccagagcctcttccacagccctgagcgggaggtgctggagcgggacctggtgctgcccctgctgtgcaaggactactgcaaggagttcttctacacctgccggggccacatccctggcttcctgcagaccacagcagatgagttctgcttctactatgccaggaaggatggcggcctgtgcttcccagacttccccaggaagcaggtgcggggccctgccagcaactacctggaccagatggaggagtatgacaaggtggaggagatcagcaggaagcacaagcacaactgcttctgcatccaggaggtggtgtctggcctgcggcagcctgtgggcgccctgcacagcggagatggcagccagaggctcttcatcctggagaaggagggctacgtgaagatcctgaccccagagggggagatcttcaaggagccctacctggacatccacaagctggtgcagagcggcatcaaggtgggcttcctgaacttcatctacttctgtgccggctacgtgaacttcatcctggtgctgcccagcagcctgaaggtgttcctgtgcaacaagaggaagaacctggccggagaaaataaaggagccacctag

SEQ ID NO: 155052 - DNA, 4146 bp, synthetic construct
  misc_feature 1..4146: note = Description of Artificial Sequence: Synthetic coding sequence
  source 1..4146: mol_type = other DNA
atggccagcccccgggccagccgctggcccccacccctgctgctgctgctgctgcccctgctgctgctgcccccagctgcccctggcacccgggaccccccacccagccctgcccggcgggccctgagcctggcccccctggccggggccggcctggagctgcagctggagcggcggcctgagcgggagcccccacccaccccaccccgggagcggcggggccctgccaccccaggccccagctaccgggcccctgagcctggagctgccacccagaggggccccagcggccgggccccccggggcggcagcgcagatgctgcctggaagcactggccagagagcaacacagaggcccacgtggagaacatcaccttctaccagaaccaggaggacttcagcacagtgagcagcaaggagggcgtgatggtgcagaccagcggcaagagccacgccgccagtgatgcccctgagaacctgaccctgctggccgagacagcagatgcccggggccgcagcggcagcagcagcaggaccaacttcaccatcctgcctgtgggctacagcctggagatcgccacagccctgaccagccagagcggcaacctggccagcgagagcctgcacctgcccagcagcagcagcgagtttgatgaaagaattgctgccttccagaccaagagcggcacagccagcgagatgggcacagagcgggccatgggcctgtctgaggagtggacagtgcacagccaggaggccaccaccagcgcctggagccccagcttcctgcctgccctggagatgggagagctgaccacccccagcaggaagaggaacagcagcggccctgacctgtcctggctgcacttctacagaacagctgccagcagccccctgctggacctgagcagcagcagcgagagcacagagaagctgaacaacagcacaggcctgcagagcagctctgtgtcccagaccaagaccatgcacgtggccaccgtcttcacagatggcggccccaggaccctgcggagcctgactgtgtccctgggccctgtgtccaagacagagggcttccccaaggacagcagaattgccaccaccagcagctctgtgctgctgagccccagcgctgtggagagcagaagaaacagccgggtgacaggcaaccctggagatgaggagttcatcgagcccagcacagaaaatgaatttggcctgaccagcctgcgctggcagaatgacagccccacctttggagagcaccagctggccagcagcagcgaggtgcagaatggcagccccatgagccagacagaaacagtgagccgctctgtggcccccatgagaggaggagagatcacagcccactggctgctgaccaacagcaccaccagcgcagatgtgacaggcagcagcgccagctacccagagggcgtgaatgcctctgtgctgacccagttcagtgacagcacagtgcagagcggcggcagccacacagccctgggggacaggagctacagcgagagcagcagcaccagcagcagcgagagcctgaacagcagcgcccccagaggagagaggagcattgctggcatctcctatggccaggtgcggggcacagccatcgagcagaggaccagcagtgaccacacagaccacacctacctgagcagcaccttcaccaagggggagcgggccctgctgagcatcacagacaacagcagcagcagtgacatcgtggagagcagcaccagctacatcaagatcagcaacagcagccacagcgagtacagcagcttcttccacgcccagacagagaggagcaacatcagcagctatgatggagaatatgcccagcccagcacagagagccctgtgctgcacaccagcaacctgcccagctacacccccaccatcaacatgcccaacacctctgtggtgctggacacagatgctgagtttgtgtctgacagcagcagcagcagcagcagcagcagcagcagcagcagcagcggcccccccctgcccctgcccagcgtgtcccagagccaccacctgttcagcagcatcctgcccagcacccgggcctctgtgcacctgctgaagagcaccagtgatgccagcaccccctggagcagcagccccagccccctgcctgtgtccctgaccaccagcaccagcgcccccctgtctgtgtcccagaccaccctgccccagagcagcagcacccctgtgctgccccgggcccgggagacccctgtgaccagcttccagaccagcaccatgaccagcttcatgaccatgctgcacagcagccagacagctgacctgaagagccagagcaccccccaccaggagaaggtgatcacagagagcaagagccccagcctggtgtccctgcccacagagagcaccaaggctgtgaccaccaacagccccctgccccccagcctgacagagagcagcacagagcagaccctgcctgccaccagcaccaacctggcccagatgagccccaccttcaccaccaccatcctgaagaccagccagcccctgatgaccaccccaggcaccctgagcagcacagccagcctggtgacaggccccatcgctgtgcagaccacagctgggaagcagctgagcctgacccaccctgagatcctggtgccccagatcagcacagaaggaggcatcagcacagaaagaaacagagtgattgtggatgccaccaccggcctcatccccctgacctctgtgcccaccagcgccaaggagatgaccaccaagctgggcgtgacagctgagtacagccctgccagccgcagcctgggcaccagccccagcccccagaccaccgtggtgtccacagctgaggacctggcccccaagagcgccacctttgctgtgcagagcagcacccagagccccaccaccgtgagcagcagcgcctctgtgaacagctgtgctgtgaacccctgcctgcacaatggagaatgtgtggccgacaacaccagccggggctaccactgccgctgcccccccagctggcagggagatgactgcagcgtggatgtgaatgaatgtctgagcaacccctgccccagcacagccatgtgcaacaacacccagggcagcttcatctgcaagtgccctgtgggctaccagctggagaagggcatctgcaacctggtgaggacctttgtgacagagttcaagctgaagaggaccttcctgaacaccaccgtggagaagcacagcgacctgcaggaggtggagaatgagatcaccaagaccctgaacatgtgcttcagcgccctgcccagctacatccgcagcacagtgcacgccagccgggagagcaatgctgtggtgatcagcctgcagaccaccttcagcctggccagcaatgtgaccctgtttgacctggccgacaggatgcagaagtgtgtgaacagctgcaagagcagcgctgaggtgtgccagctgctgggcagccagaggcgcatcttccgggccggcagcctgtgcaagaggaagagcccagaatgtgacaaggacaccagcatctgcacagacctggatggagtggccctgtgccagtgcaagagcggctacttccagttcaacaagatggaccacagctgccgggcctgtgaagatggctaccgcctggagaatgagacctgcatgagctgccccttcggcctgggcggcctgaactgtggcaacccctaccagctgatcaccgtggtgattgctgctgctgggggcggcctgctgctgatcctgggcatcgccctgattgtgacctgctgcaggaagaacaagaatgacatcagcaagctgatcttcaagagcggggacttccagatgagcccctatgcagagtaccccaagaaccccaggagccaggagtggggccgggaggccatcgagatgcatgaaaatggcagcaccaagaacctgctgcagatgacagatgtgtactacagccccacctctgtgagaaatcctgagctggagagaaatggcctgtacccagcctacacaggcctgcccggcagccgccacagctgcatcttccctggccagtacaaccccagcttcatcagtgatgagagcagaagaagagactacttctag

SEQ ID NO: 155053 - DNA, 5829 bp, synthetic construct
  misc_feature 1..5829: note = Description of Artificial Sequence: Synthetic coding sequence
  source 1..5829: mol_type = other DNA
atggaggaccggcgggcagagaagagctgtgagcaggcctgtgagagcctgaagaggcaggactatgagatggccctgaagcactgcacagaggccctgctgagcctgggccagtacagcatggctgacttcaccggcccctgccccctggagattgaaagaatcaagattgagagcctgctgtaccgcatcgccagcttcctgcagctgaagaactacgtgcaggctgatgaggactgccgccacgtgctgggggagggcctggccaagggggaggatgccttccgggctgtgctgtgctgcatgcagctgaagggcaagctgcagcctgtgtccaccatcctggccaagagcctgaccggggagagcctgaatggcatggtgaccaaggacctgacccggctgaagaccctgctgtctgaaacagaaacagccaccagcaatgccctgagcggctaccacgtggaggacctggatgagggcagctgcaatggctggcacttccggcccccaccccggggcatcaccagcagcgaggagtacaccctgtgcaagcgcttcctggagcagggcatctgccgctatggagcccagtgcaccagcgcccacagccaggaggagctggccgagtggcagaagagatatgccagccgcctcatcaagctgaagcagcagaatgaaaacaagcagctgagcggcagctacatggagaccctcatcgagaagtggatgaacagcctgagccctgagaaggtgctgtctgaatgtattgaaggagtgaaggtggagcacaacccagacctgtctgtgacagtgtccaccaagaagagccaccagacctggacctttgccctgacctgcaagccagccaggatgctgtacagagtggccctgctgtatgatgcccaccggccccacttcagcatcatcgccatctctgctggggacagcaccacccaggtgtcccaggaggtgcctgagaactgccaggagtggattggaggcaagatggcccagaatggcctggaccactacgtgtacaaggtgggcatcgccttcaacacagagatcttcggcaccttccggcagaccatcgtgtttgattttggcctggagcctgtgctgatgcagagggtgatgattgatgctgccagcacagaggacctggagtacctgatgcacgccaagcagcagctggtgaccacagccaagcgctgggacagcagcagcaagaccatcatcgactttgagcccaatgagaccacagacctggagaagagcctgctgatccgctaccagatccccctgtctgctgaccagctgttcacccagagcgtgctggacaagagcctgaccaagagcaactaccagagccggctgcatgacctgctgtacatcgaggagatcgcccagtacaaggagatcagcaagttcaacctgaaggtgcagctgcagatcctggccagcttcatgctgactggagtgtctgggggcgccaagtatgcccagaatggccagctgtttggccgcttcaagctgacagagaccctgtctgaggacaccctggccggccgcctggtgatgaccaaggtgaatgctgtgtacctgctgcctgtgcccaagcagaagctggtgcagacccagggcaccaaggagaaggtgtatgaggccaccatcgaggagaagaccaaggagtacatcttcctgcggctgagccgggagtgctgtgaggagctgaacctgcggccagactgtgacacccaggtggagctgcagttccagctgaaccggctgcccctgtgtgagatgcactacgccctggaccgcatcaaggacaatggagtgctcttcccagacatctccatgacccccaccatcccctggagccccaaccggcagtgggatgagcagctggacccccggctgaatgccaagcagaaggaggccgtgctggccatcaccacccccctggccatccagctgccccctgtgctgatcatcggcccctacggcaccgggaagaccttcaccctggcccaggccgtgaagcacatcctgcagcagcaggagacccgcatcctgatctgcacccacagcaacagcgctgctgacctgtacatcaaggactacctgcacccctacgtggaggccggcaacccccaggcccggcccctgcgggtgtacttcaggaaccgctgggtgaagacagtgcaccctgtggtgcaccagtactgcctgatcagcagcgcccacagcaccttccagatgccccagaaggaggacatcctgaagcaccgggtggtggtggtgaccctgaacaccagccagtacctgtgccagctggacctggagcccggcttcttcacccacatcctgctggatgaggccgcccaggccatggagtgtgagaccatcatgcccctggccctggccacccagaacaccagaattgtgctggccggggaccacatgcagctgagcccctttgtgtacagcgagtttgcccgggagaggaacctgcacgtgtccctgctggaccggctgtatgagcactacccagctgagttcccctgccgcatcctgctgtgtgagaactaccgcagccatgaggccatcatcaactacaccagcgagctgttctatgagggcaagctgatggccagcggcaagcagcctgcccacaaggacttctaccccctgaccttcttcaccgcccggggggaggatgtgcaggagaagaacagcacagccttctacaacaatgctgaggtgtttgaggtggtggagcgggtggaggagctgcggaggaagtggcctgtggcctggggcaagctggatgatggcagcattggagtggtgaccccctatgctgaccaggtgttccgcatccgggcagagctgaggaagaagaggctgagtgatgtgaatgtggagcgggtgctgaatgtgcagggcaagcagttccgggtgctcttcctgagcacagtgaggaccaggcacacctgcaagcacaagcagacccccatcaagaagaaggagcagctgctggaggacagcacagaggacctggactatggcttcctgagcaactacaagctgctgaacacagccatcacccgggcccagagcctggtggccgtggtgggggaccccatcgccctgtgcagcatcggccgctgcaggaagttctgggagcgcttcatcgccctgtgccacgagaacagcagcctgcacggcatcacctttgagcagatcaaggcccagctggaggccctggagctgaagaagacctacgtgctgaaccccctggcccctgagttcatcccccgggccctgcggctgcagcacagcggcagcaccaacaagcagcagcagagcccccccaagggcaagagcctgcaccacacccagaatgaccacttccagaatgatggcatcgtgcagcccaaccccagcgtgctgattggcaaccccatccgggcctacaccccacctccacccctgggcccccaccccaacctgggcaagagccccagccctgtgcagagaattgacccccacacaggcaccagcatcctgtatgtgcctgctgtgtatggaggaaatgtggtgatgtctgtgcccctgcctgtgccctggacaggctaccagggccgctttgctgtggacccccgcatcatcacccaccaggccgccatggcctacaacatgaacctgctgcagacccacggccggggcagccccatcccctacggcctgggccaccacccccctgtgaccatcggccagccccagaaccagcaccaggagaaggaccagcacgagcagaacagaaatggcaagagtgacaccaacaacagcggccctgagatcaacaagatccgcaccccagagaagaagcccacagagcccaagcaggtggacctggagagcaacccccagaacagaagccctgagagccggcccagcgtggtgtaccccagcaccaagttccccaggaaggacaacctgaaccccaggcacatcaacctgcccctgcctgccccccacgcccagtatgccatccccaacagacacttccaccccctgccccagctgcccaggcctcccttccccatcccccagcagcacaccctgctgaaccagcagcagaacaacctgcctgagcagcccaaccagatccccccccagcccaaccaggtggtgcagcagcagagccagctgaaccagcagccccagcagcccccaccccagctgagccctgcctaccaggccggccccaacaatgccttcttcaacagcgctgtggcccaccggccccagagccccccagctgaggccgtcatccctgagcagcagcccccacccatgctgcaggagggccacagccccctgcgggccatcgcccagcccggccccatcctgcccagccacctgaacagcttcattgatgagaaccccagcggcctgcccatcggggaggccctggaccgcatccacggctctgtggccctggagaccctgcggcagcagcaggcccgcttccagcagtggagcgagcaccacgccttcctgagccagggcagcgccccctacccccaccaccaccacccccacctgcagcacctgccccagccccccctgggcctgcaccagccccctgtgcgggctgactggaagctgaccagcagcgcagaagatgaggtggagaccacctacagccgcttccaggacctgatccgggagctgagccaccgggaccagagcgagacccgggagctggccgagatgcccccaccccagagccggctgctgcagtaccggcaggtgcagagccgcagccccccagctgtgcccagcccccccagcagcacagaccacagcagccacttcagcaacttcaatgacaacagccgggacatcgaggtggccagcaacccagccttcccccagaggctgcccccccagatcttcaacagccccttcagcctgcccagcgagcacctggcccccccacccctgaagtacctggccccagatggagcctggacctttgccaacctgcagcagaaccacctgatgggccctggcttcccctacggcctgccccccctgccccacaggcctccccagaacccctttgtgcagatccagaaccaccagcacgccatcggccaggagcccttccaccccctgagcagcaggacagtgagcagcagcagcctgcccagcctggaggagtatgagccccggggccctggccggcccctgtaccagaggcgcatcagcagcagctctgtgcagccctgcagcgaggaggtgtccaccccccaggacagcctggcccagtgcaaggagctgcaggaccacagcaaccagagcagcttcaacttcagcagccctgagagctgggtgaacaccaccagcagcaccccctaccagaacatcccctgcaatggcagcagcaggacagcccagccccgggagctgattgccccacccaagacagtgaagcccccagaggaccagctgaagtctgagaacctggaggtgagcagcagcttcaactacagcgtgctgcagcacctgggccagtttcctcccctgatgcccaacaagcagattgctgagagcgccaacagcagcagcccccagagcagcgctgggggcaagccagccatgtcctatgccagcgccctgcgggccccacccaagccccggcccccacctgagcaggccaagaagagcagtgaccccctgagcctcttccaggagctgagcctgggcagcagcagcggcagcaatggcttctacagctacttcaagtag

SEQ ID NO: 155054 - DNA, 1365 bp, synthetic construct
  misc_feature 1..1365: note = Description of Artificial Sequence: Synthetic coding sequence
  source 1..1365: mol_type = other DNA
atggaggaccggcgggcagagaagagctgtgagcaggcctgtgagagcctgaagaggcaggactatgagatggccctgaagcactgcacagaggccctgctgagcctgggccagtacagcatggctgacttcaccggcccctgccccctggagattgaaagaatcaagattgagagcctgctgtaccgcatcgccagcttcctgcagctgaagaactacgtgcaggctgatgaggactgccgccacgtgctgggggagggcctggccaagggggaggatgccttccgggctgtgctgtgctgcatgcagctgaagggcaagctgcagcctgtgtccaccatcctggccaagagcctgaccggggagagcctgaatggcatggtgaccaaggacctgacccggctgaagaccctgctgtctgaaacagaaacagccaccagcaatgccctgagcggctaccacgtggaggacctggatgagggcagctgcaatggctggcacttccggcccccaccccggggcatcaccagcagcgaggagtacaccctgtgcaagcgcttcctggagcagggcatctgccgctatggagcccagtgcaccagcgcccacagccaggaggagctggccgagtggcagaagagatatgccagccgcctcatcaagctgaagcagcagaatgaaaacaagcagctgagcggcagctacatggagaccctcatcgagaagtggatgaacagcctgagccctgagaaggtgctgtctgaatgtattgaaggagtgaaggtggagcacaacccagacctgtctgtgacagtgtccaccaagaagagccaccagacctggacctttgccctgacctgcaagccagccaggatgctgtacagagtggccctgctgtatgatgcccaccggccccacttcagcatcatcgccatctctgctggggacagcaccacccaggtgtcccaggaggtgcctgagaactgccaggagtggattggaggcaagatggcccagaatggcctggaccactacgtgtacaaggtgggcatcgccttcaacacagagatcttcggcaccttccggcagaccatcgtgtttgattttggcctggagcctgtgctgatgcagagggtgatgattgatgctgccagcacagaggacctggagtacctgatgcacgccaagcagcagctggtgaccacagccaagcgctgggacagcagcagcaagaccatcatcgactttgagcccaatgagaccacagacctggagaagagcctgctgatccgctaccagatccccctgtctgagaagaagaagaagaagaagaagaagaagaagaagaagaagaagaagaagtag

SEQ ID NO: 155055 - DNA, 294 bp, synthetic construct
  misc_feature 1..294: note = Description of Artificial Sequence: Synthetic coding sequence
  source 1..294: mol_type = other DNA
atgcctgctgagaggcctgctggcagcggcggcagcgaggccccagccatggtggagcagctggacacagctgtgatcaccccagccatgctggaggaggaggagcagctggaggccgccggcctggagcgggagaggaagatgctggagaaggccaggatgtcctgggaccgggagagcacagagatccgctaccgccgcctgcagcacctgctggagaagagcaacatctacagcaagttcctgctgaccaagatggagcagcagcagctggagaccgtgatgaagatctag

SEQ ID NO: 155056 - DNA, 2517 bp, synthetic construct
  misc_feature 1..2517: note = Description of Artificial Sequence: Synthetic coding sequence
  source 1..2517: mol_type = other DNA
atgcctgctgagaggcctgctggcagcggcggcagcgaggccccagccatggtggagcagctggacacagctgtgatcaccccagccatgctggaggaggaggagcagctggaggccgccggcctggagcgggagaggaagatgctggagaaggccaggatgtcctgggaccgggagagcacagagatccgctaccgccgcctgcagcacctgctggagaagagcaacatctacagcaagttcctgctgaccaagatggagcagcagcagctggaggagcagaagaagaaggagaagctggagaggaagaaggagagcctgaaggtgaagaagggcaagaacagcattgatgccagcgaggagaagcctgtgatgaggaagaagaggggccgggaggatgagagctacaacatcagcgaggtgatgagcaaggaggagatcctgtctgtggccaagaagaacaagaaggaaaatgaagatgagaacagcagcagcaccaacctgtgtgtggaggacctgcagaagaacaaggacagcaacagcatcatcaaggaccggctgtctgagaccgtgcggcagaacaccaagttcttctttgatcctgtgaggaagtgcaatggccagcctgtgcccttccagcagcccaagcacttcaccggaggagtgatgcgctggtaccaggtggagggcatggagtggctgaggatgctgtgggagaatggcatcaatggcatcctggctgatgagatgggcctgggcaagacagtgcagtgcatcgccaccatcgccctgatgatccagaggggcgtgcccggccccttcctggtgtgtggccccctgagcaccctgcccaactggatggccgagttcaagcgcttcaccccagacatccccaccatgctgtaccacggcacccaggaggagcggcagaagctggtgaggaacatctacaagaggaagggcaccctgcagatccaccctgtggtgatcaccagctttgaaattgccatgagggacagaaatgccctgcagcactgctactggaagtacctgattgtggatgagggccaccgcatcaagaacatgaagtgccgcctcatccgggagctgaagcgcttcaatgctgacaacaagctgctgctgaccggcacccccctgcagaacaacctgtctgagctgtggagcctgctgaacttcctgctgcctgatgtgtttgatgacctgaagagctttgagagctggtttgacatcaccagcctgtctgaaacagctgaggacatcatcgccaaggagcgggagcagaatgtgctgcacatgctgcaccagatcctgacccccttcctgctgcggcggctgaagagtgatgtggccctggaggtgccccccaagcgggaggtggtggtgtatgcccccctgagcaagaagcaggagatcttctacacagccatcgtgaacagaaccatcgccaacatgtttggcagcagcgagaaggagaccatcgagctgagccccaccggccggcccaagaggaggaccaggaagagcatcaactacagcaagattgatgacttccccaatgagctggagaagctgatcagccagatccagcctgaggtggaccgggagagagctgtggtggaggtgaacatccctgtggagagcgaggtgaacctgaagctgcagaacatcatgatgctgctgaggaagtgctgcaaccacccctacctgattgagtaccccattgatcctgtgacccaggagttcaagattgatgaggagctggtgaccaacagcggcaagttcctgatcctggacaggatgctgcctgagctgaagaagaggggccacaaggtgctgctcttcagccagatgacctccatgctggacatcctgatggactactgccacctgcgggacttcaacttcagccggctggatggctccatgagctacagcgagcgggagaagaacatgcacagcttcaacacagatcctgaggtgttcatcttcctggtgtccacccgggccggcggcctgggcatcaacctgacagctgctgacaccgtcatcatctatgacagcgactggaacccccagagcgacctgcaggcccaggaccgctgccacagaattggccagaccaagcctgtggtggtgtaccgcctggtgacagccaacaccatcgaccagaagatcgtggagagagctgctgccaagaggaagctggagaagctgatcatccacaagaaccacttcaagggcggccagagcggcctgaacctgagcaagaacttcctggaccccaaggagctgatggagctgctgaagagccgggactatgaaagagagatcaagggcagccgggagaaggtgatcagtgacaaggacctggagctgctgctggacagaagtgacctgattgaccagatgaatgccagcggccccatcaaggagaagatgggcatcttcaagatcctggagaacagcgaggacagcagcccagaatgtctcttctag

SEQ ID NO: 155057 - DNA, 2655 bp, synthetic construct
  misc_feature 1..2655: note = Description of Artificial Sequence: Synthetic coding sequence
  source 1..2655: mol_type = other DNA
atgcctgctgagaggcctgctggcagcggcggcagcgaggccccagccatggtggagcagctggacacagctgtgatcaccccagccatgctggaggaggaggagcagctggaggccgccggcctggagcgggagaggaagatgctggagaaggccaggatgtcctgggaccgggagagcacagagatccgctaccgccgcctgcagcacctgctggagaagagcaacatctacagcaagttcctgctgaccaagatggagcagcagcagctggaggagcagaagaagaaggagaagctggagaggaagaaggagagcctgaaggtgaagaagggcaagaacagcattgatgccagcgaggagaagcctgtgatgaggaagaagaggggccgggaggatgagagctacaacatcagcgaggtgatgagcaaggaggagatcctgtctgtggccaagaagaacaagaaggaaaatgaagatgagaacagcagcagcaccaacctgtgtgtggaggacctgcagaagaacaaggacagcaacagcatcatcaaggaccggctgtctgagaccgtgcggcagaacaccaagttcttctttgatcctgtgaggaagtgcaatggccagcctgtgcccttccagcagcccaagcacttcaccggaggagtgatgcgctggtaccaggtggagggcatggagtggctgaggatgctgtgggagaatggcatcaatggcatcctggctgatgagatgggcctgggcaagacagtgcagtgcatcgccaccatcgccctgatgatccagaggggcgtgcccggccccttcctggtgtgtggccccctgagcaccctgcccaactggatggccgagttcaagcgcttcaccccagacatccccaccatgctgtaccacggcacccaggaggagcggcagaagctggtgaggaacatctacaagaggaagggcaccctgcagatccaccctgtggtgatcaccagctttgaaattgccatgagggacagaaatgccctgcagcactgctactggaagtacctgattgtggatgagggccaccgcatcaagaacatgaagtgccgcctcatccgggagctgaagcgcttcaatgctgacaacaagctgctgctgaccggcacccccctgcagaacaacctgtctgagctgtggagcctgctgaacttcctgctgcctgatgtgtttgatgacctgaagagctttgagagctggtttgacatcaccagcctgtctgaaacagctgaggacatcatcgccaaggagcgggagcagaatgtgctgcacatgctgcaccaggagcgcatccccaggatgtatgtgtctgagttcacagatgagggcttctttgagggcaagctgcccagcaggaaggacctgtatgacatccggccctatgagaacacctacctgctgaagctgcacaccaactttgagatcctgacccccttcctgctgcggcggctgaagagtgatgtggccctggaggtgccccccaagcgggaggtggtggtgtatgcccccctgagcaagaagcaggagatcttctacacagccatcgtgaacagaaccatcgccaacatgtttggcagcagcgagaaggagaccatcgagctgagccccaccggccggcccaagaggaggaccaggaagagcatcaactacagcaagattgatgacttccccaatgagctggagaagctgatcagccagatccagcctgaggtggaccgggagagagctgtggtggaggtgaacatccctgtggagagcgaggtgaacctgaagctgcagaacatcatgatgctgctgaggaagtgctgcaaccacccctacctgattgagtaccccattgatcctgtgacccaggagttcaagattgatgaggagctggtgaccaacagcggcaagttcctgatcctggacaggatgctgcctgagctgaagaagaggggccacaaggtgctgctcttcagccagatgacctccatgctggacatcctgatggactactgccacctgcgggacttcaacttcagccggctggatggctccatgagctacagcgagcgggagaagaacatgcacagcttcaacacagatcctgaggtgttcatcttcctggtgtccacccgggccggcggcctgggcatcaacctgacagctgctgacaccgtcatcatctatgacagcgactggaacccccagagcgacctgcaggcccaggaccgctgccacagaattggccagaccaagcctgtggtggtgtaccgcctggtgacagccaacaccatcgaccagaagatcgtggagagagctgctgccaagaggaagctggagaagctgatcatccacaagaaccacttcaagggcggccagagcggcctgaacctgagcaagaacttcctggaccccaaggagctgatggagctgctgaagagccgggactatgaaagagagatcaagggcagccgggagaaggtgatcagtgacaaggacctggagctgctgctggacagaagtgacctgattgaccagatgaatgccagcggccccatcaaggagaagatgggcatcttcaagatcctggagaacagcgaggacagcagcccagaatgtctcttctag

SEQ ID NO: 155058 - DNA, 390 bp, synthetic construct
  misc_feature 1..390: note = Description of Artificial Sequence: Synthetic coding sequence
  source 1..390: mol_type = other DNA
atgcctgctgagaggcctgctggcagcggcggcagcgaggccccagccatggtggagcagctggacacagctgtgatcaccccagccatgctggaggaggaggagcagctggaggccgccggcctggagcgggagaggaagatgctggagaaggccaggatgtcctgggaccgggagagcacagagatccgctaccgccgcctgcagcacctgctggagaagagcaacatctacagcaagttcctgctgaccaagatggagcagcagcagctggaggagcagaagaagaaggagaagctggagaggaagaaggagagcctgaaggtgaagaagggcaagaacagcattgatgccagcgaggagaagccaggcaactttgtgtgtggctag

SEQ ID NO: 155059 - DNA, 948 bp, synthetic construct
  misc_feature 1..948: note = Description of Artificial Sequence: Synthetic coding sequence
  source 1..948: mol_type = other DNA
atgcctgctgagaggcctgctggcagcggcggcagcgaggccccagccatggtggagcagctggacacagctgtgatcaccccagccatgctggaggaggaggagcagctggaggccgccggcctggagcgggagaggaagatgctggagaaggccaggatgtcctgggaccgggagagcacagagatccgctaccgccgcctgcagcacctgctggagaagagcaacatctacagcaagttcctgctgaccaagatggagcagcagcagctggaggagcagaagaagaaggagaagctggagaggaagaaggagagcctgaaggtgaagaagggcaagaacagcattgatgccagcgaggagaagcctgtgatgaggaagaagaggggccgggaggatgagagctacaacatcagcgaggtgatgagcaaggaggagatcctgtctgtggccaagaagaacaagaaggaaaatgaagatgagaacagcagcagcaccaacctgtgtgtggaggacctgcagaagaacaaggacagcaacagcatcatcaaggaccggctgtctgagaccgtgcggcagaacaccaagttcttctttgatcctgtgaggaagtgcaatggccagcctgtgcccttccagcagcccaagcacttcaccggaggagtgatgcgctggtaccaggtggagggcatggagtggctgaggatgctgtgggagaatggcatcaatggcatcctggctgatgagatgggcctgggcaagacagtgcagtgcatcgccaccatcgccctgatgatccagaggggcgtgcccggccccttcctggtgtgtggccccctgagcaccctgcccaactggatggccgagttcaagcgcttcaccccagacatccccaccatgctgtaccacggcacccaggaggagcggcagaagctgatctacctgtag

SEQ ID NO: 155060 - DNA, 2223 bp, synthetic construct
  misc_feature 1..2223: note = Description of Artificial Sequence: Synthetic coding sequence
  source 1..2223: mol_type = other DNA
atgcctgctgagaggcctgctggcagcggcggcagcgaggccccagccatggtggagcagctggacacagctgtgatcaccccagccatgctggaggaggaggagcagctggaggccgccggcctggagcgggagaggaagatgctggagaaggccaggatgtcctgggaccgggagagcacagagatccgctaccgccgcctgcagcacctgctggagaagagcaacatctacagcaagttcctgctgaccaagatggagcagcagcagctggaggagcagaagaagaaggagaagctggagaggaagaaggagagcctgaaggtgaagaagggcaagaacagcattgatgccagcgaggagaagcctgtgatgaggaagaagaggggccgggaggatgagagctacaacatcagcgaggtgatgagcaaggaggagatcctgtctgtggccaagaagaacaagaaggaaaatgaagatgagaacagcagcagcaccaacctgtgtgtggaggacctgcagaagaacaaggacagcaacagcatcatcaaggaccggctgtctgagaccgtgcggcagaacaccaagttcttctttgatcctgtgaggaagtgcaatggccagcctgtgcccttccagcagcccaagcacttcaccggaggagtgatgcgctggtaccaggtggagggcatggagtggctgaggatgctgtgggagaatggcatcaatggcatcctggctgatgagatgggcctgggcaagacagtgcagtgcatcgccaccatcgccctgatgatccagaggggcgtgcccggccccttcctggtgtgtggccccctgagcaccctgcccaactggatggccgagttcaagcgcttcaccccagacatccccaccatgctgtaccacggcacccaggaggagcggcagaagctggtgaggaacatctacaagaggaagggcaccctgcagatccaccctgtggtgatcaccagctttgaaattgccatgagggacagaaatgccctgcagatcctgacccccttcctgctgcggcggctgaagagtgatgtggccctggaggtgccccccaagcgggaggtggtggtgtatgcccccctgagcaagaagcaggagatcttctacacagccatcgtgaacagaaccatcgccaacatgtttggcagcagcgagaaggagaccatcgagctgagccccaccggccggcccaagaggaggaccaggaagagcatcaactacagcaagattgatgacttccccaatgagctggagaagctgatcagccagatccagcctgaggtggaccgggagagagctgtggtggaggtgaacatccctgtggagagcgaggtgaacctgaagctgcagaacatcatgatgctgctgaggaagtgctgcaaccacccctacctgattgagtaccccattgatcctgtgacccaggagttcaagattgatgaggagctggtgaccaacagcggcaagttcctgatcctggacaggatgctgcctgagctgaagaagaggggccacaaggtgctgctcttcagccagatgacctccatgctggacatcctgatggactactgccacctgcgggacttcaacttcagccggctggatggctccatgagctacagcgagcgggagaagaacatgcacagcttcaacacagatcctgaggtgttcatcttcctggtgtccacccgggccggcggcctgggcatcaacctgacagctgctgacaccgtcatcatctatgacagcgactggaacccccagagcgacctgcaggcccaggaccgctgccacagaattggccagaccaagcctgtggtggtgtaccgcctggtgacagccaacaccatcgaccagaagatcgtggagagagctgctgccaagaggaagctggagaagctgatcatccacaagaaccacttcaagggcggccagagcggcctgaacctgagcaagaacttcctggaccccaaggagctgatggagctgctgaagagccgggactatgaaagagagatcaagggcagccgggagaaggtgatcagtgacaaggacctggagctgctgctggacagaagtgacctgattgaccagatgaatgccagcggccccatcaaggagaagatgggcatcttcaagatcctggagaacagcgaggacagcagcccagaatgtctcttctag

SEQ ID NO: 155061 - DNA, 579 bp, synthetic construct
  misc_feature 1..579: note = Description of Artificial Sequence: Synthetic coding sequence
  source 1..579: mol_type = other DNA
atggtggagcagctggacacagctgtgatcaccccagccatgctggaggaggaggagcagctggaggccgccggcctggagcgggagaggaagatgctggagaaggccaggatgtcctgggaccgggagagcacagagatccgctaccgccgcctgcagcacctgctggagaagagcaacatctacagcaagttcctgctgaccaagatggagcagcagcagctggaggagcagaagaagaaggagaagctggagaggaagaaggagagcctgaaggtgaagaagggcaagaacagcattgatgccagcgaggagaagcctgtgatgaggaagaagaggggccgggaggatgagagctacaacatcagcgaggtgatgagcaaggaggagatcctgtctgtggccaagaagaacaagaaggaaaatgaagatgagaacagcagcagcaccaacctgtgtgtggaggacctgcagaagaacaaggacagcaacagcatcatcaaggaccggctgtctgagaccgtgcggcagaacaccaagttcttctttgatcctgtgaggaagtgcaatggccagtag

SEQ ID NO: 155062 - DNA, 1461 bp, synthetic construct
  misc_feature 1..1461: note = Description of Artificial Sequence: Synthetic coding sequence
  source 1..1461: mol_type = other DNA
atgtggaagtctgtggtgggccatgatgtgtctgtgtctgtggagacccagggagatgactgggacacagatcctgactttgtgaatgacatcagcgagaaggagcagcgctggggcgccaagaccatcgagggcagcggccgcacagagcacatcaacatccaccagctgaggaacaaggtgtctgaggagcatgatgtgctgaggaagaaggagatggagagcggccccaaggccagccacggctatggaggccgctttggagtggagcgggacaggatggacaagtctgctgtgggccatgaatatgtggccgaggtggagaagcacagcagccagacagatgctgccaagggctttggaggcaagtatggagtggagcgggacagagctgacaagtctgctgtgggctttgactacaagggggaggtggagaagcacaccagccagaaggactacagccggggctttggaggccgctatggagtggagaaggacaagtgggacaaggccgccctgggctatgactacaagggggagacagagaagcatgagagccagagggactatgccaagggctttggaggccagtatggcatccagaaggacagagtggacaagtctgctgtgggcttcaatgagatggaggcccccaccacagcctacaagaagaccacccccatcgaggccgccagcagcggcacccggggcctgaaggccaagtttgagagcatggccgaggagaagaggaagcgggaggaggaggagaaggcccagcaggtggcccggcggcagcaggagaggaaggctgtgaccaagaggagccctgaggccccccagcctgtgattgccatggaggagcctgctgtgcctgcccccctgcccaagaagatcagcagcgaggcctggccccctgtgggcaccccacccagcagcgagagcgagcctgtgaggaccagccgggagcaccctgtgcccctgctgcccatccggcagaccctgcctgaggacaatgaggagcccccagccctgccccccaggaccctggagggcctgcaggtggaggaggagcctgtgtatgaggccgagcctgagcctgagcctgagcctgagcctgagccagaaaatgactatgaagatgtggaggagatggacagacatgagcaggaggatgagcctgagggggactatgaggaggtgctggagcctgaggacagcagcttcagcagcgccctggccggcagcagcggctgcccagctggggccggggccggggctgtggccctgggcatctctgctgtggccgtgtatgactaccagggcgagggcagtgatgagctgagctttgatcctgatgatgtgatcacagacatcgagatggtggatgagggctggtggaggggccgctgccacggccacttcggcctcttccctgccaactacgtgaagctgctggagtag

SEQ ID NO: 155063 - DNA, 600 bp, synthetic construct
  misc_feature 1..600: note = Description of Artificial Sequence: Synthetic coding sequence
  source 1..600: mol_type = other DNA
atgcccaactacaagctgacctacttcaacatgaggggccgggcagagatcatccgctacatctttgcctacctggacatccagtatgaggaccaccgcatcgagcaggccgactggccagagatcaagagcaccctgccctttgggaagatccccatcctggaggtggatggcctgaccctgcaccagagcctggccatcgcccgctacctgaccaagaacacagacctggccggcaacacagagatggagcagtgccacgtggatgccatcgtggacaccctggatgacttcatgagctgcttcccctgggccgagaagaagcaggatgtgaaggagcagatgtttaatgagctgctgacctacaatgccccccacctgatgcaggacctggacacctacctgggcggccgggagtggctgattggcaacagcgtgacctgggccgacttctactgggagatctgcagcaccaccctgctggtgttcaagccagacctgctggacaaccacccccggctggtgaccctgaggaagaaggtgcaggccatcccagctgtggccaactggatcaagagaagaccccagaccaagctgtag

SEQ ID NO: 155064 - DNA, 813 bp, synthetic construct
  misc_feature 1..813: note = Description of Artificial Sequence: Synthetic coding sequence
  source 1..813: mol_type = other DNA
atgcagtacccccaccctggccctgctgctggagctgtgggcgtgcccctgtatgcccccacccccctgctgcagcctgcccaccccacccccttctacatcgaggacatcctgggccggggccctgctgcccccaccccagcccccaccctgcccagccccaacagcagcttcaccagcctggtgagcccctaccgcacccctgtgtatgagcccacccccatccacccagccttcagccaccacagcgctgctgccctggccgccgcctacggccctgggggctttggaggccccctgtaccccttccccaggacagtgaatgactacacccacgccctgctgcggcatgaccccctgggcaagcccctgctgtggagccccttcctgcagaggcccctgcacaagaggaagggcggccaggtgcgcttcagcaatgaccagaccatcgagctggagaagaagtttgagacccagaagtacctgagccccccagagaggaagaggctggccaagatgctgcagctgtctgagcggcaggtgaagacctggttccagaacagaagagccaagtggaggcggctgaagcaggagaacccccagagcaacaagaaggaggagctggagagcctggacagcagctgtgaccagaggcaggacctgcccagcgagcagaacaagggggccagcctggacagcagccagtgcagccccagccctgccagccaggaggacctggagagcgagatcagcgaggacagcgaccaggaggtggacatcgagggggacaagagctacttcaatgccggctag

SEQ ID NO: 155065 - DNA, 570 bp, synthetic construct
  misc_feature 1..570: note = Description of Artificial Sequence: Synthetic coding sequence
  source 1..570: mol_type = other DNA
atgctgggcatgatcaagaacagcctgtttggatctgtggagacctggccctggcaggtgctgagcaaaggagacaaggaggaggtggcctatgaggagcgggcctgtgagggcggcaagtttgccaccgtggaggtgacagacaagcctgtggatgaggccctgcgggaggccatgcccaaggtggccaagtatgctgggggcaccaatgacaagggcatcggcatgggcatgacagtgcccatcagctttgctgtgttccccaatgaagatggcagcctgcagaagaagctgaaggtgtggttccgcatccccaaccagttccagagcgaccccccagcccccagcgacaagtctgtgaagattgaggagcgggagggcatcaccgtgtacagcatgcagtttggaggctacgccaaggaggccgactatgtggcccaggccacccggctgcgggccgccctggagggcacagccacctacagaggagacatctacttctgcaccggctatgacccccccatgaagccctacggcagaagaaatgagatctggctgctgaagacctag

SEQ ID NO: 155066 - DNA, 4059 bp, synthetic construct
  misc_feature 1..4059: note = Description of Artificial Sequence: Synthetic coding sequence
  source 1..4059: mol_type = other DNA
atgagcaaggtgacagcccctggcagcggccccccagctgctgccagcggcaaggagaagaggagcttcagcaagaggctcttccgcagcggccgggccggcggcggcggggccggcggccctggggccagcggccctgctgcccccagcagccccagcagccccagcagcgcccggtctgtgggcagcttcatgagccgggtgctgaagaccctgagcaccctgagccacctgagcagcgagggcgccgccccagaccggggcggcctgcggagctgcttccccccaggccctgctgctgcccccaccccaccaccctgccccccacctccagccagccctgcccccccagcctgtgccgctgagcctgtgcctggggtggccggcctgagaaatcatggcaacacctgcttcatgaatgccaccctgcagtgcctgagcaacacagagctgtttgctgagtacctggccctgggccagtacagagctggccggcctgagcccagcccagaccctgagcagcctgctggccgcggggcccagggccagggcgaggtgacagagcagctggcccacctggtgcgggccctgtggaccctggagtacaccccccagcacagccgggacttcaagaccatcgtgtccaagaatgccctgcagtaccggggcaacagccagcatgatgcccaggagttcctgctgtggctgctggacagagtgcatgaggacctgaaccacagcgtgaagcagagcggccagccccccctgaagccacccagcgagacagacatgatgcctgagggccccagcttccctgtgtgcagcacctttgtgcaggagctgttccaggcccagtaccgcagcagcctgacctgcccccactgccagaagcagagcaacacctttgaccccttcctgtgcatcagcctgcccatccccctgccccacacccggcccctgtatgtgacagtggtgtaccagggcaagtgcagccactgcatgagaattggagtggccgtgcccctgtctggaacagtggcccggctgcgggaggccgtgtccatggagaccaagatccccacagaccagatcgtgctgacagagatgtactatgatggcttccaccgctccttctgtgacacagatgacctggagaccgtgcatgaaagtgactgcatctttgcctttgagaccccagagatcttccggcctgagggcatcctgagccagaggggcatccacctgaacaacaacctgaaccacctgaagtttggcctggactaccaccggctgagcagccccacccagacagctgccaagcagggcaagatggacagccccaccagcagagctggcagtgacaagatcgtgctgctggtgtgcaacagagcctgcaccggccagcagggcaagagatttggcctgccctttgtgctgcacctggagaagaccatcgcctgggacctgctgcagaaggagatcctggagaagatgaagtacttcctgcggcccaccgtgtgcatccaggtgtgccccttcagcctgcgggtggtgtctgtggtgggcatcacctacctgctgccccaggaggagcagcccctgtgccaccccatcgtggagcgggccctgaagagctgtggccctgggggcacagcccacgtgaagctggtggtggagtgggacaaggagacccgggacttcctgtttgtgaacacagaagatgagtacatcccagatgctgagagcgtgcggctgcagcgggagcggcaccaccagccccagacctgcaccctgagccagtgcttccagctgtacaccaaggaggagcggctggccccagatgatgcctggcgctgcccccactgcaagcagctgcagcagggcagcatcaccctgagcctgtggaccctgcctgatgtgctgatcatccacctgaagcgcttccggcaggagggggacaggaggatgaagctgcagaacatggtgaagttccccctgaccggcctggacatgaccccccacgtggtgaagaggagccagagctcctggagcctgcccagccactggagcccctggaggcggccctacggcctgggccgggaccctgaggactacatctatgacctgtatgctgtgtgcaaccaccacggcaccatgcagggcggccactacacagcctactgcaagaacagcgtggatggcctgtggtactgctttgatgacagtgatgtgcagcagctgtctgaagatgaggtgtgcacccagacagcctacatcctcttctaccagaggagaacagccatccccagctggagcgccaacagctctgtggccggcagcaccagcagcagcctgtgtgagcactgggtgtcccggctgcccggcagcaagccagcctctgtgaccagcgctgccagcagcaggaggaccagcctggccagcctgtctgagagcgtggagatgaccggggagaggagtgaagatgatggcggcttcagcacccggccctttgtgcgctctgtgcagaggcagagcctgagcagccgcagctctgtgaccagccccctggccgtgaatgaaaactgcatgaggcccagctggagcctgagcgccaagctgcagatgaggagcaacagccccagccgcttcagcggggacagccccatccacagcagcgccagcaccctggagaagattggagaggccgcagatgacaaggtgtccatcagctgcttcggcagcctgaggaacctgagcagcagctaccaggagcccagcgacagccacagcagaagagagcacaaggctgtgggccgggcccccctggccgtgatggagggcgtcttcaaggatgaaagtgacacccggcggctgaacagctctgtggtggacacccagagcaagcacagcgcccagggcgaccggctgccccccctgagcggcccctttgacaacaacaaccagatcgcctacgtggaccagagcgacagcgtggacagcagccctgtgaaggaggtgaaggcccccagccaccctggcagcctggccaagaagccagagagcaccaccaagaggagccccagcagcaagggcaccagcgagcctgagaagagcctgaggaagggccggcctgccctggccagccaggagagcagcctgagcagcaccagccccagcagccccctgcctgtgaaggtgtccctgaagcccagccgcagccgcagcaaggctgacagcagcagccggggcagcggccgccacagcagccctgccccagcccagcccaagaaggagagcagccccaagagccaggacagcgtgagcagccccagcccccagaagcagaagagcgccagcgccctgacctacacagccagcagcaccagcgccaagaaggccagcggccctgccaccaggagccccttccccccaggcaagagcaggaccagtgaccacagcctgagccgggagggcagccggcagagcctgggcagtgaccgggccagcgccaccagcaccagcaagcccaacagcccccgggtgtcccaggcccgggccggggagggccgcggggccggcaagcacgtgcgcagcagctccatggccagcctgcggagccccagcaccagcatcaagagcggcctgaagagggacagcaagtctgaggacaagggcctgtccttcttcaagagcgccctgcggcagaaggagaccaggaggagcacagacctgggcaagacagccctgctgagcaagaaggccggcggcagctctgtgaagtctgtgtgcaagaacacaggagatgatgaagctgagcggggccaccagcccccagccagccagcagcccaatgccaacaccaccgggaaggagcagctggtgaccaaggaccctgccagcgccaagcacagcctgctgagcgccaggaagagcaagagcagccagctggacagcggcgtgcccagcagccctgggggccggcagagcgctgagaagagcagcaagaagctgagcagctccatgcagaccagcgcccggcccagccagaagccccagtag

SEQ ID NO: 155067 - DNA, 951 bp, synthetic construct
  misc_feature 1..951: note = Description of Artificial Sequence: Synthetic coding sequence
  source 1..951: mol_type = other DNA
atgtctgctgaggtggagaccagcgagggcgtggatgagagcgagaagaagaacagcggggccctggagaaggagaaccagatgaggatggctgacctgtctgagctgctgaaggagggcaccaaggaggcccatgacagagctgagaacacccagtttgtgaaggacttcctgaagggcaacatcaagaaggagctgttcaagctggccaccacagccctgtacttcacctacagcgccctggaggaggagatggagaggaacaaggaccacccagcctttgcccccctgtacttccccatggagctgcacaggaaggaggccctgaccaaggacatggagtacttctttggagagaactgggaggagcaggtgcagtgccccaaggccgcccagaagtatgtggagcgcatccactacatcggccagaatgaacctgagctgctggtggcccacgcctacacccgctacatgggagacctgagcggcggccaggtgctgaagaaggtggcccagagggccctgaagctgcccagcactggagagggcacccagttctacctgtttgaaaatgtggacaatgcccagcagttcaagcagctgtaccgggccaggatgaatgccctggacctgaacatgaagaccaaggagagaattgtggaggaggccaacaaggcctttgagtacaacatgcagatcttcaatgagctggaccaggccggcagcaccctggcccgggagaccctggaggatggcttccctgtgcatgatggaaaaggagacatgaggaagtgccccttctatgctgctgagcaggacaagggggccctggagggcagcagctgccccttcagaacagccatggctgtgctgaggaagcccagcctgcagttcatcctggccgccggcgtggccctggccgccggcctgctggcctggtactacatgtag

SEQ ID NO: 155068 - DNA, 951 bp, synthetic construct; identical to SEQ ID NO: 155067
  misc_feature 1..951: note = Description of Artificial Sequence: Synthetic coding sequence
  source 1..951: mol_type = other DNA

SEQ ID NO: 155069 - DNA, 951 bp, synthetic construct; identical to SEQ ID NO: 155067
  misc_feature 1..951: note = Description of Artificial Sequence: Synthetic coding sequence
  source 1..951: mol_type = other DNA

SEQ ID NO: 155070 - DNA, 951 bp, synthetic construct; identical to SEQ ID NO: 155067
  misc_feature 1..951: note = Description of Artificial Sequence: Synthetic coding sequence
  source 1..951: mol_type = other DNA

SEQ ID NO: 155071 - DNA, 951 bp, synthetic construct; identical to SEQ ID NO: 155067
  misc_feature 1..951: note = Description of Artificial Sequence: Synthetic coding sequence
  source 1..951: mol_type = other DNA

SEQ ID NO: 155072 - DNA, 16908 bp, synthetic construct
  misc_feature 1..16908: note = Description of Artificial Sequence: Synthetic coding sequence
  source 1..16908: mol_type = other DNA
atgatctcctgggaggtggtgcacacagtgttcctgtttgccctgctgtacagcagcctggcccaggatgccagcccccagagcgagatccgggcagaggagatccctgagggcgccagcaccctggcctttgtgtttgatgtgacaggctccatgtatgatgacctggtgcaggtgattgagggcgccagcaagatcctggagaccagcctgaagaggcccaagaggcccctcttcaactttgccctggtgcccttccatgaccctgagatcggccctgtgaccatcaccacagaccccaagaagttccagtatgagctgcgggagctgtatgtgcagggcggcggggactgcccagagatgagcattggagccatcaagatcgccctggagatcagcctgcccggcagcttcatctacgtgttcacagatgcccggagcaaggactaccgcctgacccatgaggtgctgcagctgatccagcagaagcagagccaggtggtgtttgtgctgaccggggactgtgatgacaggacccacatcggctacaaggtgtatgaggagatcgccagcaccagcagcggccaggtgttccacctggacaagaagcaggtgaatgaggtgctgaagtgggtggaggaggccgtgcaggccagcaaggtgcacctgctgagcacagaccacctggagcaggccgtgaacacctggaggatcccctttgaccccagcctgaaggaggtgacagtgtccctgagcggccccagccccatgattgagatccggaaccccctgggcaagctgatcaagaagggcttcggcctgcacgagctgctgaacatccacaacagcgccaaggtggtgaatgtgaaggagcctgaggccggcatgtggacagtgaagaccagcagcagcggccgccacagcgtgcgcatcaccggcctgagcaccatcgacttccgggccggcttcagcaggaagcccaccctggacttcaagaagacagtgtccaggcctgtgcagggcatccccacctacgtgctgctgaacaccagcggcatcagcaccccagccagaattgacctgctggagctgctgagcatcagcggcagcagcctgaagaccatccctgtgaagtactacccccacaggaagccctacggcatctggaacatcagtgactttgtgcccccaaatgaggccttcttcctgaaggtgacaggctatgacaaggatgactacctgttccagagggtgtcctctgtgtccttcagcagcatcgtgcctgatgcccccaaggtgaccatgcctgagaagaccccaggctactacctgcagcccggccagatcccctgcagcgtggacagcctgctgcccttcaccctgagctttgtgagaaatggagtgaccctgggcgtggaccagtacctgaaggagagcgcctctgtgaacctggacatcgccaaggtgaccctgagtgatgagggcttctatgagtgcatcgctgtgagcagcgctggcaccggccgggcccagaccttctttgatgtgtctgagcccccacctgtgatccaggtgcccaacaacgtgacagtgaccccaggagagagagctgtgctgacctgcctgatcatctctgctgtggactacaacctgacctggcagagaaatgacagagatgtgcggctggccgagcccgcccgcatccgcaccctggccaacctgagcctggagctgaagtctgtgaagttcaatgatgctggggagtaccactgcatggtgtcctctgagggcggcagcagcgctgcctctgtgttcctgactgtgcaggagccccccaaggtgacagtgatgcccaagaaccagagcttcaccggcggcagcgaggtgtccatcatgtgcagcgccaccggctaccccaagcccaagatcgcctggacagtgaatgacatgttcatcgtgggcagccaccgctacaggatgaccagtgatggcaccctcttcatcaagaatgctgcccccaaggatgctggcatctacggctgcctggccagcaacagcgctggaacagacaagcagaacagcaccctgcgctacatcgaggcccccaagctgatggtggtgcagagcgagctgctggtggccctgggggacatcaccgtgatggagtgcaagaccagcggcatccccccaccccaggtgaagtggttcaagggggacctggagctgcggcccagcaccttcctgatcatcgaccccctgctgggcctgctgaagatccaggagacccaggacctggatgctggggactacacctgtgtggccatcaatgaggccggccgggccaccgggaagatcaccctggatgtgggcagcccccctgtgttcatccaggagccagcagatgtgtccatggagatcggcagcaatgtgaccctgccctgctacgtgcagggctacccagagcccaccatcaagtggaggcggctggacaacatgcccatcttcagccggcccttctctgtgagcagcatcagccagctgaggactggagccctcttcatcctgaacctgtgggccagtgacaagggcacctacatctgtgaggccgagaaccagtttgggaagatccagagcgagaccaccgtgacagtgacaggcctggtggcccccctcatcggcatcagccccagcgtggccaacgtcatcgagggccagcagctgaccctgccctgcaccctgctggccggcaaccccatccctgagcggcgctggatcaagaacagcgccatgctgctgcagaacccctacatcaccgtgcggagtgatggcagcctgcacatcgagcgggtgcagctgcaggacggcggggagtacacctgtgtggccagcaatgtggccggcaccaacaacaagaccacctctgtggtggtgcacgtgctgcccaccatccagcacggccagcagatcctgagcaccatcgagggcatccctgtgaccctgccctgcaaggccagcggcaaccccaagcccagcgtcatctggagcaagaagggggagctgatcagcaccagcagcgccaagttctctgctggagcagatggcagcctgtatgtggtgtccccaggaggagaggagagcggggagtatgtgtgcacagccaccaacacagctggctacgccaagaggaaggtgcagctgactgtgtatgtgcggccccgggtgtttggagaccagaggggcctgagccaggacaagcctgtggagatctctgtgctggccggggaggaggtgaccctgccctgtgaggtgaagagcctgcccccacccatcatcacctgggccaaggagacccagctgatcagccccttcagccccaggcacaccttcctgcccagcggctccatgaagatcacagagaccaggaccagtgacagcggcatgtacctgtgtgtggccaccaacattgctggaaatgtgacccaggccgtgaagctgaatgtgcacgtgccccccaagatccagaggggccccaagcacctgaaggtgcaggtgggccagagggtggacatcccctgcaatgcccagggcacccccctgcccgtcatcacctggagcaagggcggcagcaccatgctggtggatggagagcaccacgtgagcaacccagatggcaccctgagcattgaccaggccacccccagtgatgctggcatctacacctgtgtggccaccaacattgctggaacagatgaaacagagatcaccctgcacgtgcaggagcccccaacagtggaggacctggagcccccctacaacaccaccttccaggagcgggtggccaaccagagaattgagttcccctgcccagccaagggcacccccaagcccaccatcaagtggctgcacaacggccgggagctgaccggccgggagcccggcatcagcatcctggaggatggcaccctgctggtgattgcctctgtgaccccctatgacaatggagagtacatctgtgtggccgtgaatgaggccggcaccacagagaggaagtacaacctgaaggtgcacgtgccccctgtgatcaaggacaaggagcaggtgaccaacgtgtctgtgctgctgaaccagctgaccaacctcttctgtgaggtggagggcacccccagccccatcatcatgtggtacaaggacaacgtgcaggtgacagagagcagcaccatccagacagtgaacaacgggaagatcctgaagctgttccgggccaccccagaagatgctggccgctacagctgcaaggccatcaacattgctggcaccagccagaagtacttcaacattgatgtgctggtgccccccaccatcatcggcaccaacttccccaatgaggtgtctgtggtgctgaacagagatgtggccctggagtgccaggtgaagggcacccccttcccagacatccactggttcaaggatggcaagcccctcttcctgggggaccccaacgtggagctgctggaccggggccaggtgctgcacctgaagaatgccaggagaaatgacaagggccgctaccagtgcaccgtgtccaatgctgctgggaagcaggccaaggacatcaagctgaccatctacatccccccatccatcaagggcggcaatgtgaccacagacatctctgtgctgatcaacagcctcatcaagctggagtgtgagacccggggcctgcccatgcctgccatcacctggtacaaggatggccagcccatcatgagcagcagccaggccctgtacatcgacaagggccagtacctgcacatcccccgggcccaggtgtctgattctgccacctacacctgccacgtggccaacgtggccggcacagctgagaagagcttccacgtggatgtgtatgtgccccccatgattgagggcaacctggccacccccctgaacaagcaggtggtgattgcccacagcctgaccctggagtgcaaggccgccggcaaccccagccccatcctgacctggctgaaggatggagtgcctgtgaaggccaatgacaacatccgcatcgaggccggcggcaagaagctggagatcatgtctgcccaggagattgaccggggccagtacatctgtgtggccacctctgtggccggggagaaggagatcaagtatgaggtggatgtgctggtgcccccagccattgaaggaggagatgagaccagctacttcatcgtgatggtgaacaacctgctggagctggactgccacgtgacaggcagccccccacccaccatcatgtggctgaaggatggccagctgattgatgaaagagatggcttcaagatcctgctgaatggaaggaagctggtgattgcccaggcccaggtgagcaacacaggcctgtaccgctgcatggccgccaacacagctggggaccacaagaaggagtttgaggtgacagtgcacgtgccccccaccatcaagagcagcggcctgtctgagcgggtggtggtgaagtacaagcctgtggccctgcagtgcatcgccaacggcatccccaaccccagcatcacctggctgaaggatgaccagcctgtgaacacagcccagggcaacctgaagatccagagcagcggccgggtgctgcagatcgccaagaccctgctggaggatgctggccgctacacctgtgtggccaccaatgctgctggggagacccagcagcacatccagctgcacgtgcatgagccccccagcctggaggatgctgggaagatgctgaatgaaacagtgctggtgagcaaccctgtgcagctggagtgcaaggctgctggcaaccctgtgcctgtgatcacctggtacaaggacaaccggctgctgagcggcagcacctccatgaccttcctgaacagaggccagatcatcgacatcgagagcgcccagatcagtgatgctggcatctacaagtgtgtggccatcaacagcgctggggccacagagctgttctacagcctgcaggtgcacgtggcccccagcatcagcggcagcaacaacatggtggccgtggtggtgaacaaccctgtgcggctggagtgtgaggcccggggcatcccagcccccagcctgacctggctgaaggatggcagccctgtgagcagcttcagcaatggcctgcaggtgctgagcggcggccgcatcctggccctgaccagcgcccagatcagtgacaccggccgctacacctgtgtggccgtgaatgctgctggggagaagcagagggacatcgacctgcgggtgtatgtgccccccaacatcatgggagaggagcagaatgtgtctgtgctgatcagccaggccgtggagctgctgtgccagagtgatgccatccccccacccaccctgacctggctgaaggatggccaccccctgctgaagaagccaggcctgagcatcagcgagaacagatctgtgctgaagattgaagatgcccaggtgcaggacaccggccgctacacctgtgaggccaccaacgtggccggcaagacagagaagaactacaacgtgaacatctgggtgccccccaacattggaggcagtgatgagctgacccagctgactgtgattgagggcaacctgatcagcctgctgtgtgagagcagcggcatccccccacccaacctgatctggaagaagaagggcagccctgtgctgacagacagcatgggccgggtgcgcatcctgagcggcggccggcagctgcagatcagcattgctgagaagagtgatgctgccctgtacagctgtgtggccagcaatgtggccggcacagccaagaaggagtacaacctgcaggtgtacatccggcccaccatcaccaacagcggcagccaccccacagagatcatcgtgacccggggcaagagcatcagcctggagtgtgaggtgcagggcatccccccacccaccgtgacctggatgaaggatggccaccccctcatcaaggccaagggcgtggagatcctggatgagggccacatcctgcagctgaagaacatccacgtgtctgacaccggccgctacgtgtgtgtggccgtgaatgtggccggcatgacagacaagaagtatgacctgtctgtgcacgcccctccttccatcatcggcaaccacaggagccctgagaacatctctgtggtggagaagaacagcgtgtccctgacctgtgaggccagcggcatccccctgcccagcatcacctggttcaaggatggctggcctgtgtccctgagcaacagcgtgcgcatcctgagcggcggccgcatgctgcggctgatgcagaccaccatggaggatgctggccagtacacctgtgtggtgagaaatgctgctggggaggagaggaagatcttcggcctgtctgtgctggtgcccccccacatcgtgggggagaacaccctggaggatgtgaaggtgaaggagaagcagagcgtgaccctgacctgtgaggtgacaggcaaccctgtgcctgagatcacctggcacaaggatggccagcccctgcaggaggatgaggcccaccacatcatcagcggcggccgcttcctgcagatcaccaacgtgcaggtgccccacacaggccgctacacctgcctggccagcagccctgctggccacaagagccgctccttcagcctgaatgtgtttgtgagccccaccatcgccggcgtgggcagtgatggcaacccagaagatgtgaccgtcatcctgaacagccccaccagcctggtgtgtgaggcctacagctaccccccagccaccatcacctggttcaaggatggcacccccctggagagcaacagaaacatccgcatcctgcccggcggccgcaccctgcagatcctgaatgcccaggaggacaatgccggccgctacagctgtgtggccaccaatgaggccggggagatgatcaagcactatgaggtgaaggtgtacatcccccccatcatcaacaagggggacctgtggggccctggcctgagccccaaggaggtgaagatcaaggtgaacaacaccctgaccctggagtgtgaggcctatgccatccccagcgccagcctgtcctggtacaaggatggccagcccctgaagagtgatgaccacgtgaacattgctgccaacggccacaccctgcagatcaaggaggcccagatcagtgacaccggccgctacacctgtgtggccagcaacattgctggagaagatgagctggactttgatgtgaacatccaggtgcccccatccttccagaagctgtgggagatcggcaacatgctggacaccggcagaaatggagaggccaaggatgtgatcatcaacaaccccatcagcctgtactgtgagaccaatgctgcccccccacccaccctgacctggtacaaggatggccaccccctgaccagcagtgacaaggtgctgatcctgcccggcggccgggtgctgcagatcccccgggccaaggtggaggatgctggccgctacacctgtgtggccgtgaatgaggccggggaggacagcctgcagtatgatgtgcgggtgctggtgccccccatcatcaagggggccaacagcgacctgcctgaggaggtgacagtgctggtgaacaagagcgccctgattgaatgtctgagcagcggcagccctgcccccagaaattcctggcagaaggatggccagcccctgctggaggatgaccaccacaagttcctgagcaatggccgcatcctgcagatcctgaacacccagatcacagacatcggccgctacgtgtgtgtggccgagaacacagctggcagcgccaagaagtacttcaacctgaatgtgcacgtgcccccatctgtgattggccccaagtctgagaacctgactgtggtggtgaacaacttcatcagcctgacctgtgaggtgtctggcttccccccaccagacctgtcctggctgaagaatgagcagcccatcaagctgaacaccaacaccctgattgtgcctgggggccgcaccctgcagatcatccgggccaaggtgtctgatggaggagagtacacctgcatcgccatcaaccaggccggggagagcaagaagaagttcagcctgactgtgtatgtgcccccatccatcaaggaccatgattctgagagcctgtctgtggtgaatgtgcgggagggcacctctgtgtccctggagtgtgagagcaatgctgtgcccccacctgtgatcacctggtacaagaatggccgcatgatcacagagagcacccacgtggagatcctggctgatggccagatgctgcacatcaagaaggccgaggtgtctgacaccggccagtatgtgtgccgggccatcaacgtggccggcagagatgacaagaacttccacctgaatgtgtatgtgccccccagcattgagggccctgagcgggaggtgattgtggagaccatcagcaaccctgtgaccctgacctgtgatgccaccggcatccccccacccaccatcgcctggctgaagaaccacaagagaattgaaaattctgacagcctggaggtgcgcatcctgagcggcggcagcaagctgcagatcgcccggagccagcacagcgacagcggcaactacacctgcatcgccagcaacatggagggcaaggcccagaagtactacttcctgagcatccaggtgccccccagcgtggccggggctgagatccccagtgatgtgtctgtgctgctgggggagaatgtggagctggtgtgcaatgccaacggcatccccacccccctcatccagtggctgaaggatggcaagcccatcgccagcggggagacagagcgcatccgggtgtctgccaacggcagcaccctgaacatctatggagccctgaccagtgacaccgggaagtacacctgtgtggccaccaacccagctggggaggaggaccgcatcttcaacctgaatgtgtatgtgacccccaccatccggggcaacaaggatgaagctgagaagctgatgaccctggtggacaccagcatcaacattgaatgtcgggccaccggcaccccaccaccccagatcaactggctgaagaatggcctgcccctgcccctgagcagccacatccggctgctggccgccggccaggtgatccgcatcgtgcgggcccaggtgtctgatgtggccgtgtacacctgtgtggccagcaacagagctggggtggacaacaagcactacaacctgcaggtgtttgccccacccaacatggacaacagcatgggcacagaggagatcaccgtgctgaagggcagcagcacctccatggcctgcatcacagatggcaccccagcccccagcatggcctggctgagagatggccagcccctgggcctggatgcccacctgactgtgtccacccacggcatggtgctgcagctgctgaaggccgagacagaagattctgggaagtacacctgcatcgccagcaatgaggccggggaggtgtccaagcacttcatcctgaaggtgctggagcccccccacatcaatggcagcgaggagcacgaggagatctctgtgattgtgaacaaccccctggagctgacctgcatcgccagcggcatcccagcccccaagatgacctggatgaaggatggccggcccctgccccagacagaccaggtgcagaccctgggcggcggggaggtgctgcgcatcagcacagcccaggtggaggacaccggccgctacacctgcctggccagcagccctgctggagatgatgacaaggagtacctggtgcgggtgcacgtgccccccaacattgctggaacagatgagccccgggacatcaccgtgctgaggaaccggcaggtgaccctggagtgcaagagtgatgctgtgcccccacctgtgatcacctggctgagaaatggagagcggctgcaggccaccccccgggtgcgcatcctgagcggcggccgctacctgcagatcaacaatgctgacctgggggacacagccaactacacctgtgtggccagcaacattgctgggaagaccacccgggagttcatcctgactgtgaatgtgccccccaacatcaagggcggcccccagagcctggtgatcctgctgaacaagagcacagtgctggagtgcatcgccgagggcgtgcccaccccccgcatcacctggaggaaggatggagctgtgctggccggcaaccacgcccgctacagcatcctggagaatggcttcctgcacatccagagcgcccacgtgacagacaccggccgctacctgtgcatggccaccaatgctgctggaacagacagaagaagaattgacctgcaggtgcacgtgcccccatccatcgcccctggccccaccaacatgaccgtcatcgtgaatgtgcagaccaccctggcctgtgaggccaccggcatccccaagcccagcatcaactggaggaagaatggccacctgctgaatgtggaccagaaccagaacagctaccgcctgctgagcagcggcagcctggtgatcatcagccccagcgtggatgacacagccacctatgaatgtactgtgaccaacggggctggagatgacaagaggacagtggacctgactgtgcaggtgccccccagcattgctgatgagcccacagacttcctggtgaccaagcacgccccagctgtgatcacctgcacagccagcggcgtgcccttccccagcatccactggaccaagaatggcatccggctgctgcccagaggagatggctaccgcatcctgagcagcggggccatcgagatcctggccacccagctgaaccacgccggccgctacacctgtgtggccagaaatgctgctggcagcgcccacagacatgtgaccctgcacgtgcatgagccccctgtgatccagccccagcccagcgagctgcacgtgatcctgaacaaccccatcctgctgccctgtgaggccaccggcacccccagccccttcatcacctggcagaaggagggcatcaacgtgaacaccagcggcagaaatcatgctgtgctgcccagcggcggcctgcagatcagcagagctgtgagagaagatgctggcacctacatgtgtgtggcccagaacccagctggaacagccctgggcaagatcaagctgaatgtgcaggtgccccctgtgatcagcccccacctgaaggagtatgtgattgctgtggacaagcccatcaccctgagctgtgaggctgatggcctgcccccaccagacatcacctggcacaaggatggccgggccatcgtggagagcatccggcagagggtgctgagcagcggcagcctgcagatcgcctttgtgcagcctggagatgctggccactacacctgcatggccgccaacgtggccggcagcagcagcaccagcaccaagctgactgtgcacgtgcccccacgcatccgcagcacagagggccactacacagtgaatgaaaacagccaggccatcctgccctgtgtggctgatggcatccccaccccagccatcaactggaagaaggacaacgtgctgctggccaacctgctgggcaagtacacagctgagccctatggagagctgatcctggagaatgtggtgctggaggacagcggcttctacacctgtgtggccaacaatgctgctggggaggacacccacacagtgtccctgactgtgcacgtgctgcccaccttcacagagctgcctggagatgtgtccctgaacaagggggagcagctgcggctgagctgcaaggccaccggcatccccctgcccaagctgacctggaccttcaacaacaacatcatcccagcccactttgacagcgtgaatggccacagcgagctggtgattgagcgggtgtccaaagaagattctggcacctacgtgtgcacagcagaaaattctgtgggctttgtgaaggccatcggctttgtgtatgtgaaggagccccctgtgttcaagggggactaccccagcaactggattgagcccctgggcggcaatgccatcctgaactgtgaggtgaagggggaccccacccccaccatccagtggaacaggaagggcgtggacatcgagatcagccaccgcatccggcagctgggcaatggcagcctggccatctatggaacagtgaatgaagatgctggggactacacctgtgtggccaccaatgaagctggggtggtggagaggtccatgagcctgaccctgcagagcccccccatcatcaccctggagcctgtggagaccgtcatcaatgccggcggcaagatcatcctgaactgccaggccaccggggagccccagcccaccatcacctggagccggcagggccacagcatctcctgggatgacagagtgaatgtgctgagcaacaacagcctgtacatcgcagatgcccagaaggaggacaccagcgagtttgaatgtgtggccaggaacctgatgggctctgtgctggtgcgggtgcctgtgattgtgcaggtgcatggaggcttcagccagtggagcgcctggagggcctgcagcgtgacctgtgggaagggcatccagaagaggagccggctgtgcaaccagcccctgcctgccaatggaggcaagccctgccagggcagtgacctggagatgaggaactgccagaacaagccctgccctgtggatggctcctggagcgagtggagcctgtgggaggagtgcaccaggagctgtggccggggcaaccagaccaggaccaggacctgcaacaaccccagcgtgcagcacggcggccggccctgtgagggcaatgctgtggagatcatcatgtgcaacatccggccctgccctgtgcatggagcctggagcgcctggcagccctggggcacctgcagcgagagctgtgggaagggcacccagacccgggcccggctgtgcaacaaccccccaccagcctttggaggcagctactgtgatggagctgagacccagatgcaggtgtgcaatgaaagaaactgccccatccacggcaagtgggccacctgggcctcctggagcgcctgcagcgtgtcctgtggcggcggggcccggcagaggacccggggctgcagcgaccctgtgccccagtatggaggcaggaaatgtgagggcagtgatgtgcagagcgacttctgcaacagcgacccctgccccacccacggcaactggagcccctggagcggctggggcacctgcagcaggacctgcaatggaggccagatgaggcgctaccgcacctgtgacaaccccccacccagcaatggaggccgggcctgtggcggccctgacagccagatccagcgctgcaacacagacatgtgccctgtggatggctcctggggctcctggcacagctggagccagtgcagcgccagctgtggcggcggggagaagaccaggaagaggctgtgtgaccaccctgtgcctgtgaagggcggccggccctgccctggggacaccacccaggtgacccgctgcaatgtgcaggcctgccctgggggcccccagagggcccggggcagcgtcatcggcaacatcaatgatgtggagtttggcatcgccttcctgaatgccaccatcacagacagccccaacagcgacacccgcatcatccgggccaagatcaccaacgtgcccaggagcctgggcagcgccatgaggaagatcgtgtccatcctgaaccccatctactggaccacagccaaggagattggagaggccgtgaatggcttcaccctgaccaatgctgtgttcaagcgggagacccaggtggagtttgccactggagagatcctgcagatgagccacatcgcccggggcctggacagtgatggcagcctgctgctggacatcgtggtgtctggctacgtgctgcagctgcagagccctgctgaggtgacagtgaaggactacacagaggactacatccagacaggccctggccagctgtatgcctacagcaccaggctcttcaccattgatggcatcagcatcccctacacctggaaccacacagtgttctatgaccaggcccagggccgcatgcccttcctggtggagaccctgcacgccagctctgtggagagtgactacaaccagatcgaggagaccctgggcttcaagatccacgccagcatcagcaaaggagacaggagcaaccagtgccccagcggcttcaccctggacagcgtgggccccttctgtgctgatgaagatgaatgtgccgccggcaacccctgcagccacagctgccacaatgccatgggcacctactactgcagctgccccaagggcctgaccatcgccgcagatggccgcacctgccaggacattgatgaatgtgccctgggccgccacacctgccacgccggccaggactgtgacaacaccatcggcagctaccgctgtgtggtgcgctgtggcagcggcttccggaggaccagtgatggcctgagctgccaggacatcaatgaatgccaggagagcagcccctgccaccagcgctgcttcaatgccatcggcagcttccactgcggctgtgagcccggctaccagctgaagggcaggaagtgcatggatgtgaatgaatgtcggcagaatgtgtgcaggccagaccagcactgcaagaacacccggggcggctacaagtgcatcgacctgtgccccaacggcatgaccaaggccgagaatggcacctgcattgatattgatgagtgcaaggatggcacccaccagtgccgctacaaccagatctgtgagaacacccggggcagctaccgctgtgtgtgcccccggggctaccgcagccagggcgtgggccggccctgcatggacatcaatgaatgtgagcaggtgcccaagccctgtgcccaccagtgcagcaacaccccaggcagcttcaagtgcatctgccccccaggccagcacctgctgggagatggcaagagctgtgccggcctggagcggctgcccaactacggcacccagtacagcagctacaacctggcccgcttcagccctgtgaggaacaactaccagccccagcagcactaccggcagtacagccacctgtacagcagctacagcgagtacagaaacagcaggaccagcctgagcaggaccaggaggaccatcaggaagacctgcccagagggcagcgaggccagccatgacacctgtgtggacattgatgaatgtgaaaatacagatgcctgccagcacgagtgcaagaacaccttcggcagctaccagtgcatctgccccccaggctaccagctgacccacaacgggaagacctgccaggacattgatgaatgtctggagcagaatgtgcactgcggccccaacaggatgtgcttcaacatgaggggcagctaccagtgcatcgacaccccctgcccccccaactaccagagggaccctgtgtctggcttctgcctgaagaactgccccccaaatgacctggagtgtgccctgagcccctatgccctggagtacaagctggtgtccctgccctttggaattgccaccaaccaggacctgatccggctggtggcctacacccaggatggagtgatgcaccccaggaccaccttcctgatggtggatgaggagcagacagtgccctttgccctgagagatgagaacctgaagggcgtggtgtacaccacccggcccctgcgggaggccgagacctacaggatgagggtgcgggccagcagctacagcgccaacggcaccatcgagtaccagaccaccttcatcgtgtacatcgctgtgtctgcctacccctactag

SEQ ID NO: 155073 - DNA, 16557 bp, synthetic construct
  misc_feature 1..16557: note = Description of Artificial Sequence: Synthetic coding sequence
  source 1..16557: mol_type = other DNA
atgatctcctgggaggtggtgcacacagtgttcctgtttgccctgctgtacagcagcctggcccaggatgccagcccccagagcgagatccgggcagaggagatccctgagggcgccagcaccctggcctttgtgtttgatgtgacaggctccatgtatgatgacctggtgcaggtgattgagggcgccagcaagatcctggagaccagcctgaagaggcccaagaggcccctcttcaactttgccctggtgcccttccatgaccctgagatcggccctgtgaccatcaccacagaccccaagaagttccagtatgagctgcgggagctgtatgtgcagggcggcggggactgcccagagatgagcattggagccatcaagatcgccctggagatcagcctgcccggcagcttcatctacgtgttcacagatgcccggagcaaggactaccgcctgacccatgaggtgctgcagctgatccagcagaagcagagccaggtggtgtttgtgctgaccggggactgtgatgacaggacccacatcggctacaaggtgtatgaggagatcgccagcaccagcagcggccaggtgttccacctggacaagaagcaggtgaatgaggtgctgaagtgggtggaggaggccgtgcaggccagcaaggtgcacctgctgagcacagaccacctggagcaggccgtgaacacctggaggatcccctttgaccccagcctgaaggaggtgacagtgtccctgagcggccccagccccatgattgagatccggaaccccctgggcaagctgatcaagaagggcttcggcctgcacgagctgctgaacatccacaacagcgccaaggtggtgaatgtgaaggagcctgaggccggcatgtggacagtgaagaccagcagcagcggccgccacagcgtgcgcatcaccggcctgagcaccatcgacttccgggccggcttcagcaggaagcccaccctggacttcaagaagacagtgtccaggcctgtgcagggcatccccacctacgtgctgctgaacaccagcggcatcagcaccccagccagaattgacctgctggagctgctgagcatcagcggcagcagcctgaagaccatccctgtgaagtactacccccacaggaagccctacggcatctggaacatcagtgactttgtgcccccaaatgaggccttcttcctgaaggtgacaggctatgacaaggatgactacctgttccagagggtgtcctctgtgtccttcagcagcatcgtgcctgatgcccccaaggtgaccatgcctgagaagaccccaggctactacctgcagcccggccagatcccctgcagcgtggacagcctgctgcccttcaccctgagctttgtgagaaatggagtgaccctgggcgtggaccagtacctgaaggagagcgcctctgtgaacctggacatcgccaaggtgaccctgagtgatgagggcttctatgagtgcatcgctgtgagcagcgctggcaccggccgggcccagaccttctttgatgtgtctgagcccccacctgtgatccaggtgcccaacaacgtgacagtgaccccaggagagagagctgtgctgacctgcctgatcatctctgctgtggactacaacctgacctggcagagaaatgacagagatgtgcggctggccgagcccgcccgcatccgcaccctggccaacctgagcctggagctgaagtctgtgaagttcaatgatgctggggagtaccactgcatggtgtcctctgagggcggcagcagcgctgcctctgtgttcctgactgtgcaggagccccccaaggtgacagtgatgcccaagaaccagagcttcaccggcggcagcgaggtgtccatcatgtgcagcgccaccggctaccccaagcccaagatcgcctggacagtgaatgacatgttcatcgtgggcagccaccgctacaggatgaccagtgatggcaccctcttcatcaagaatgctgcccccaaggatgctggcatctacggctgcctggccagcaacagcgctggaacagacaagcagaacagcaccctgcgctacatcgaggcccccaagctgatggtggtgcagagcgagctgctggtggccctgggggacatcaccgtgatggagtgcaagaccagcggcatccccccaccccaggtgaagtggttcaagggggacctggagctgcggcccagcaccttcctgatcatcgaccccctgctgggcctgctgaagatccaggagacccaggacctggatgctggggactacacctgtgtggccatcaatgaggccggccgggccaccgggaagatcaccctggatgtgggcagcccccctgtgttcatccaggagccagcagatgtgtccatggagatcggcagcaatgtgaccctgccctgctacgtgcagggctacccagagcccaccatcaagtggaggcggctggacaacatgcccatcttcagccggcccttctctgtgagcagcatcagccagctgaggactggagccctcttcatcctgaacctgtgggccagtgacaagggcacctacatctgtgaggccgagaaccagtttgggaagatccagagcgagaccaccgtgacagtgacaggcctggtggcccccctcatcggcatcagccccagcgtggccaacgtcatcgagggccagcagctgaccctgccctgcaccctgctggccggcaaccccatccctgagcggcgctggatcaagaacagcgccatgctgctgcagaacccctacatcaccgtgcggagtgatggcagcctgcacatcgagcgggtgcagctgcaggacggcggggagtacacctgtgtggccagcaatgtggccggcaccaacaacaagaccacctctgtggtggtgcacgtgctgcccaccatccagcacggccagcagatcctgagcaccatcgagggcatccctgtgaccctgccctgcaaggccagcggcaaccccaagcccagcgtcatctggagcaagaagggggagctgatcagcaccagcagcgccaagttctctgctggagcagatggcagcctgtatgtggtgtccccaggaggagaggagagcggggagtatgtgtgcacagccaccaacacagctggctacgccaagaggaaggtgcagctgactgtgtatgtgcggccccgggtgtttggagaccagaggggcctgagccaggacaagcctgtggagatctctgtgctggccggggaggaggtgaccctgccctgtgaggtgaagagcctgcccccacccatcatcacctgggccaaggagacccagctgatcagccccttcagccccaggcacaccttcctgcccagcggctccatgaagatcacagagaccaggaccagtgacagcggcatgtacctgtgtgtggccaccaacattgctggaaatgtgacccaggccgtgaagctgaatgtgcacgtgccccccaagatccagaggggccccaagcacctgaaggtgcaggtgggccagagggtggacatcccctgcaatgcccagggcacccccctgcccgtcatcacctggagcaagggcggcagcaccatgctggtggatggagagcaccacgtgagcaacccagatggcaccctgagcattgaccaggccacccccagtgatgctggcatctacacctgtgtggccaccaacattgctggaacagatgaaacagagatcaccctgcacgtgcaggagcccccaacagtggaggacctggagcccccctacaacaccaccttccaggagcgggtggccaaccagagaattgagttcccctgcccagccaagggcacccccaagcccaccatcaagtggctgcacaacggccgggagctgaccggccgggagcccggcatcagcatcctggaggatggcaccctgctggtgattgcctctgtgaccccctatgacaatggagagtacatctgtgtggccgtgaatgaggccggcaccacagagaggaagtacaacctgaaggtgcacgtgccccctgtgatcaaggacaaggagcaggtgaccaacgtgtctgtgctgctgaaccagctgaccaacctcttctgtgaggtggagggcacccccagccccatcatcatgtggtacaaggacaacgtgcaggtgacagagagcagcaccatccagacagtgaacaacgggaagatcctgaagctgttccgggccaccccagaagatgctggccgctacagctgcaaggccatcaacattgctggcaccagccagaagtacttcaacattgatgtgctggtgccccccaccatcatcggcaccaacttccccaatgaggtgtctgtggtgctgaacagagatgtggccctggagtgccaggtgaagggcacccccttcccagacatccactggttcaaggatggcaagcccctcttcctgggggaccccaacgtggagctgctggaccggggccaggtgctgcacctgaagaatgccaggagaaatgacaagggccgctaccagtgcaccgtgtccaatgctgctgggaagcaggccaaggacatcaagctgaccatctacatccccccatccatcaagggcggcaatgtgaccacagacatctctgtgctgatcaacagcctcatcaagctggagtgtgagacccggggcctgcccatgcctgccatcacctggtacaaggatggccagcccatcatgagcagcagccaggccctgtacatcgacaagggccagtacctgcacatcccccgggcccaggtgtctgattctgccacctacacctgccacgtggccaacgtggccggcacagctgagaagagcttccacgtggatgtgtatgtgccccccatgattgagggcaacctggccacccccctgaacaagcaggtggtgattgcccacagcctgaccctggagtgcaaggccgccggcaaccccagccccatcctgacctggctgaaggatggagtgcctgtgaaggccaatgacaacatccgcatcgaggccggcggcaagaagctggagatcatgtctgcccaggagattgaccggggccagtacatctgtgtggccacctctgtggccggggagaaggagatcaagtatgaggtggatgtgctggtgcccccagccattgaaggaggagatgagaccagctacttcatcgtgatggtgaacaacctgctggagctggactgccacgtgacaggcagccccccacccaccatcatgtggctgaaggatggccagctgattgatgaaagagatggcttcaagatcctgctgaatggaaggaagctggtgattgcccaggcccaggtgagcaacacaggcctgtaccgctgcatggccgccaacacagctggggaccacaagaaggagtttgaggtgacagtgcacgtgccccccaccatcaagagcagcggcctgtctgagcgggtggtggtgaagtacaagcctgtggccctgcagtgcatcgccaacggcatccccaaccccagcatcacctggctgaaggatgaccagcctgtgaacacagcccagggcaacctgaagatccagagcagcggccgggtgctgcagatcgccaagaccctgctggaggatgctggccgctacacctgtgtggccaccaatgctgctggggagacccagcagcacatccagctgcacgtgcatgagccccccagcctggaggatgctgggaagatgctgaatgaaacagtgctggtgagcaaccctgtgcagctggagtgcaaggctgctggcaaccctgtgcctgtgatcacctggtacaaggacaaccggctgctgagcggcagcacctccatgaccttcctgaacagaggccagatcatcgacatcgagagcgcccagatcagtgatgctggcatctacaagtgtgtggccatcaacagcgctggggccacagagctgttctacagcctgcaggtgcacgtggcccccagcatcagcggcagcaacaacatggtggccgtggtggtgaacaaccctgtgcggctggagtgtgaggcccggggcatcccagcccccagcctgacctggctgaaggatggcagccctgtgagcagcttcagcaatggcctgcaggtgctgagcggcggccgcatcctggccctgaccagcgcccagatcagtgacaccggccgctacacctgtgtggccgtgaatgctgctggggagaagcagagggacatcgacctgcgggtgtatgtgccccccaacatcatgggagaggagcagaatgtgtctgtgctgatcagccaggccgtggagctgctgtgccagagtgatgccatccccccacccaccctgacctggctgaaggatggccaccccctgctgaagaagccaggcctgagcatcagcgagaacagatctgtgctgaagattgaagatgcccaggtgcaggacaccggccgctacacctgtgaggccaccaacgtggccggcaagacagagaagaactacaacgtgaacatctgggtgccccccaacattggaggcagtgatgagctgacccagctgactgtgattgagggcaacctgatcagcctgctgtgtgagagcagcggcatccccccacccaacctgatctggaagaagaagggcagccctgtgctgacagacagcatgggccgggtgcgcatcctgagcggcggccggcagctgcagatcagcattgctgagaagagtgatgctgccctgtacagctgtgtggccagcaatgtggccggcacagccaagaaggagtacaacctgcaggtgtacatccggcccaccatcaccaacagcggcagccaccccacagagatcatcgtgacccggggcaagagcatcagcctggagtgtgaggtgcagggcatccccccacccaccgtgacctggatgaaggatggccaccccctcatcaaggccaagggcgtggagatcctggatgagggccacatcctgcagctgaagaacatccacgtgtctgacaccggccgctacgtgtgtgtggccgtgaatgtggccggcatgacagacaagaagtatgacctgtctgtgcacgcccctccttccatcatcggcaaccacaggagccctgagaacatctctgtggtggagaagaacagcgtgtccctgacctgtgaggccagcggcatccccctgcccagcatcacctggttcaaggatggctggcctgtgtccctgagcaacagcgtgcgcatcctgagcggcggccgcatgctgcggctgatgcagaccaccatggaggatgctggccagtacacctgtgtggtgagaaatgctgctggggaggagaggaagatcttcggcctgtctgtgctggtgcccccccacatcgtgggggagaacaccctggaggatgtgaaggtgaaggagaagcagagcgtgaccctgacctgtgaggtgacaggcaaccctgtgcctgagatcacctggcacaaggatggccagcccctgcaggaggatgaggcccaccacatcatcagcggcggccgcttcctgcagatcaccaacgtgcaggtgccccacacaggccgctacacctgcctggccagcagccctgctggccacaagagccgctccttcagcctgaatgtgtttgtgagccccaccatcgccggcgtgggcagtgatggcaacccagaagatgtgaccgtcatcctgaacagccccaccagcctggtgtgtgaggcctacagctaccccccagccaccatcacctggttcaaggatggcacccccctggagagcaacagaaacatccgcatcctgcccggcggccgcaccctgcagatcctgaatgcccaggaggacaatgccggccgctacagctgtgtggccaccaatgaggccggggagatgatcaagcactatgaggtgaaggtgtacatcccccccatcatcaacaagggggacctgtggggccctggcctgagccccaaggaggtgaagatcaaggtgaacaacaccctgaccctggagtgtgaggcctatgccatccccagcgccagcctgtcctggtacaaggatggccagcccctgaagagtgatgaccacgtgaacattgctgccaacggccacaccctgcagatcaaggaggcccagatcagtgacaccggccgctacacctgtgtggccagcaacattgctggagaagatgagctggactttgatgtgaacatccaggtgcccccatccttccagaagctgtgggagatcggcaacatgctggacaccggcagaaatggagaggccaaggatgtgatcatcaacaaccccatcagcctgtactgtgagaccaatgctgcccccccacccaccctgacctggtacaaggatggccaccccctgaccagcagtgacaaggtgctgatcctgcccggcggccgggtgctgcagatcccccgggccaaggtggaggatgctggccgctacacctgtgtggccgtgaatgaggccggggaggacagcctgcagtatgatgtgcgggtgctggtgccccccatcatcaagggggccaacagcgacctgcctgaggaggtgacagtgctggtgaacaagagcgccctgattgaatgtctgagcagcggcagccctgcccccagaaattcctggcagaaggatggccagcccctgctggaggatgaccaccacaagttcctgagcaatggccgcatcctgcagatcctgaacacccagatcacagacatcggccgctacgtgtgtgtggccgagaacacagctggcagcgccaagaagtacttcaacctgaatgtgcacgtgcccccatctgtgattggccccaagtctgagaacctgactgtggtggtgaacaacttcatcagcctgacctgtgaggtgtctggcttccccccaccagacctgtcctggctgaagaatgagcagcccatcaagctgaacaccaacaccctgattgtgcctgggggccgcaccctgcagatcatccgggccaaggtgtctgatggaggagagtacacctgcatcgccatcaaccaggccggggagagcaagaagaagttcagcctgactgtgtatgtgcccccatccatcaaggaccatgattctgagagcctgtctgtggtgaatgtgcgggagggcacctctgtgtccctggagtgtgagagcaatgctgtgcccccacctgtgatcacctggtacaagaatggccgcatgatcacagagagcacccacgtggagatcctggctgatggccagatgctgcacatcaagaaggccgaggtgtctgacaccggccagtatgtgtgccgggccatcaacgtggccggcagagatgacaagaacttccacctgaatgtgtatgtgccccccagcattgagggccctgagcgggaggtgattgtggagaccatcagcaaccctgtgaccctgacctgtgatgccaccggcatccccccacccaccatcgcctggctgaagaaccacaagagaattgaaaattctgacagcctggaggtgcgcatcctgagcggcggcagcaagctgcagatcgcccggagccagcacagcgacagcggcaactacacctgcatcgccagcaacatggagggcaaggcccagaagtactacttcctgagcatccaggtgccccccagcgtggccggggctgagatccccagtgatgtgtctgtgctgctgggggagaatgtggagctggtgtgcaatgccaacggcatccccacccccctcatccagtggctgaaggatggcaagcccatcgccagcggggagacagagcgcatccgggtgtctgccaacggcagcaccctgaacatctatggagccctgaccagtgacaccgggaagtacacctgtgtggccaccaacccagctggggaggaggaccgcatcttcaacctgaatgtgtatgtgacccccaccatccggggcaacaaggatgaagctgagaagctgatgaccctggtggacaccagcatcaacattgaatgtcgggccaccggcaccccaccaccccagatcaactggctgaagaatggcctgcccctgcccctgagcagccacatccggctgctggccgccggccaggtgatccgcatcgtgcgggcccaggtgtctgatgtggccgtgtacacctgtgtggccagcaacagagctggggtggacaacaagcactacaacctgcaggtgtttgccccacccaacatggacaacagcatgggcacagaggagatcaccgtgctgaagggcagcagcacctccatggcctgcatcacagatggcaccccagcccccagcatggcctggctgagagatggccagcccctgggcctggatgcccacctgactgtgtccacccacggcatggtgctgcagctgctgaaggccgagacagaagattctgggaagtacacctgcatcgccagcaatgaggccggggaggtgtccaagcacttcatcctgaaggtgctggagcccccccacatcaatggcagcgaggagcacgaggagatctctgtgattgtgaacaaccccctggagctgacctgcatcgccagcggcatcccagcccccaagatgacctggatgaaggatggccggcccctgccccagacagaccaggtgcagaccctgggcggcggggaggtgctgcgcatcagcacagcccaggtggaggacaccggccgctacacctgcctggccagcagccctgctggagatgatgacaaggagtacctggtgcgggtgcacgtgccccccaacattgctggaacagatgagccccgggacatcaccgtgctgaggaaccggcaggtgaccctggagtgcaagagtgatgctgtgcccccacctgtgatcacctggctgagaaatggagagcggctgcaggccaccccccgggtgcgcatcctgagcggcggccgctacctgcagatcaacaatgctgacctgggggacacagccaactacacctgtgtggccagcaacattgctgggaagaccacccgggagttcatcctgactgtgaatgtgccccccaacatcaagggcggcccccagagcctggtgatcctgctgaacaagagcacagtgctggagtgcatcgccgagggcgtgcccaccccccgcatcacctggaggaaggatggagctgtgctggccggcaaccacgcccgctacagcatcctggagaatggcttcctgcacatccagagcgcccacgtgacagacaccggccgctacctgtgcatggccaccaatgctgctggaacagacagaagaagaattgacctgcaggtgcacgtgcccccatccatcgcccctggccccaccaacatgaccgtcatcgtgaatgtgcagaccaccctggcctgtgaggccaccggcatccccaagcccagcatcaactggaggaagaatggccacctgctgaatgtggaccagaaccagaacagctaccgcctgctgagcagcggcagcctggtgatcatcagccccagcgtggatgacacagccacctatgaatgtactgtgaccaacggggctggagatgacaagaggacagtggacctgactgtgcaggtgccccccagcattgctgatgagcccacagacttcctggtgaccaagcacgccccagctgtgatcacctgcacagccagcggcgtgcccttccccagcatccactggaccaagaatggcatccggctgctgcccagaggagatggctaccgcatcctgagcagcggggccatcgagatcctggccacccagctgaaccacgccggccgctacacctgtgtggccagaaatgctgctggcagcgcccacagacatgtgaccctgcacgtgcatgagccccctgtgatccagccccagcccagcgagctgcacgtgatcctgaacaaccccatcctgctgccctgtgaggccaccggcacccccagccccttcatcacctggcagaaggagggcatcaacgtgaacaccagcggcagaaatcatgctgtgctgcccagcggcggcctgcagatcagcagagctgtgagagaagatgctggcacctacatgtgtgtggcccagaacccagctggaacagccctgggcaagatcaagctgaatgtgcaggtgccccctgtgatcagcccccacctgaaggagtatgtgattgctgtggacaagcccatcaccctgagctgtgaggctgatggcctgcccccaccagacatcacctggcacaaggatggccgggccatcgtggagagcatccggcagagggtgctgagcagcggcagcctgcagatcgcctttgtgcagcctggagatgctggccactacacctgcatggccgccaacgtggccggcagcagcagcaccagcaccaagctgactgtgcacgtgcccccacgcatccgcagcacagagggccactacacagtgaatgaaaacagccaggccatcctgccctgtgtggctgatggcatccccaccccagccatcaactggaagaaggacaacgtgctgctggccaacctgctgggcaagtacacagctgagccctatggagagctgatcctggagaatgtggtgctggaggacagcggcttctacacctgtgtggccaacaatgctgctggggaggacacccacacagtgtccctgactgtgcacgtgctgcccaccttcacagagctgcctggagatgtgtccctgaacaagggggagcagctgcggctgagctgcaaggccaccggcatccccctgcccaagctgacctggaccttcaacaacaacatcatcccagcccactttgacagcgtgaatggccacagcgagctggtgattgagcgggtgtccaaagaagattctggcacctacgtgtgcacagcagaaaattctgtgggctttgtgaaggccatcggctttgtgtatgtgaaggagccccctgtgttcaagggggactaccccagcaactggattgagcccctgggcggcaatgccatcctgaactgtgaggtgaagggggaccccacccccaccatccagtggaacaggaagggcgtggacatcgagatcagccaccgcatccggcagctgggcaatggcagcctggccatctatggaacagtgaatgaagatgctggggactacacctgtgtggccaccaatgaagctggggtggtggagaggtccatgagcctgaccctgcagagcccccccatcatcaccctggagcctgtggagaccgtcatcaatgccggcggcaagatcatcctgaactgccaggccaccggggagccccagcccaccatcacctggagccggcagggccacagcatctcctgggatgacagagtgaatgtgctgagcaacaacagcctgtacatcgcagatgcccagaaggaggacaccagcgagtttgaatgtgtggccaggaacctgatgggctctgtgctggtgcgggtgcctgtgattgtgcaggtgcatggaggcttcagccagtggagcgcctggagggcctgcagcgtgacctgtgggaagggcatccagaagaggagccggctgtgcaaccagcccctgcctgccaatggaggcaagccctgccagggcagtgacctggagatgaggaactgccagaacaagccctgccctgtggatggctcctggagcgagtggagcctgtgggaggagtgcaccaggagctgtggccggggcaaccagaccaggaccaggacctgcaacaaccccagcgtgcagcacggcggccggccctgtgagggcaatgctgtggagatcatcatgtgcaacatccggccctgccctgtgcatggagcctggagcgcctggcagccctggggcacctgcagcgagagctgtgggaagggcacccagacccgggcccggctgtgcaacaaccccccaccagcctttggaggcagctactgtgatggagctgagacccagatgcaggtgtgcaatgaaagaaactgccccatccacggcaagtgggccacctgggcctcctggagcgcctgcagcgtgtcctgtggcggcggggcccggcagaggacccggggctgcagcgaccctgtgccccagtatggaggcaggaaatgtgagggcagtgatgtgcagagcgacttctgcaacagcgacccctgccccacccacggcaactggagcccctggagcggctggggcacctgcagcaggacctgcaatggaggccagatgaggcgctaccgcacctgtgacaaccccccacccagcaatggaggccgggcctgtggcggccctgacagccagatccagcgctgcaacacagacatgtgccctgtggatggctcctggggctcctggcacagctggagccagtgcagcgccagctgtggcggcggggagaagaccaggaagaggctgtgtgaccaccctgtgcctgtgaagggcggccggccctgccctggggacaccacccaggtgacccgctgcaatgtgcaggcctgccctgggggcccccagagggcccggggcagcgtcatcggcaacatcaatgatgtggagtttggcatcgccttcctgaatgccaccatcacagacagccccaacagcgacacccgcatcatccgggccaagatcaccaacgtgcccaggagcctgggcagcgccatgaggaagatcgtgtccatcctgaaccccatctactggaccacagccaaggagattggagaggccgtgaatggcttcaccctgaccaatgctgtgttcaagcgggagacccaggtggagtttgccactggagagatcctgcagatgagccacatcgcccggggcctggacagtgatggcagcctgctgctggacatcgtggtgtctggctacgtgctgcagctgcagagccctgctgaggtgacagtgaaggactacacagaggactacatccagacaggccctggccagctgtatgcctacagcaccaggctcttcaccattgatggcatcagcatcccctacacctggaaccacacagtgttctatgaccaggcccagggccgcatgcccttcctggtggagaccctgcacgccagctctgtggagagtgactacaaccagatcgaggagaccctgggcttcaagatccacgccagcatcagcaaaggagacaggagcaaccagtgccccagcggcttcaccctggacagcgtgggccccttctgtgctgatgaagatgaatgtgccgccggcaacccctgcagccacagctgccacaatgccatgggcacctactactgcagctgccccaagggcctgaccatcgccgcagatggccgcacctgccaggacattgatgaatgtgccctgggccgccacacctgccacgccggccaggactgtgacaacaccatcggcagctaccgctgtgtggtgcgctgtggcagcggcttccggaggaccagtgatggcctgagctgccaggacatcaatgaatgccaggagagcagcccctgccaccagcgctgcttcaatgccatcggcagcttccactgcggctgtgagcccggctaccagctgaagggcaggaagtgcatggatgtgaatgaatgtcggcagaatgtgtgcaggccagaccagcactgcaagaacacccggggcggctacaagtgcatcgacctgtgccccaacggcatgaccaaggccgagaatggcacctgcattgatattgatgagtgcaaggatggcacccaccagtgccgctacaaccagatctgtgagaacacccggggcagctaccgctgtgtgtgcccccggggctaccgcagccagggcgtgggccggccctgcatggacattgatgaatgtgagaacacagatgcctgccagcacgagtgcaagaacaccttcggcagctaccagtgcatctgccccccaggctaccagctgacccacaacgggaagacctgccaggacattgatgagtgcctggagcagaatgtgcactgcggccccaacaggatgtgcttcaacatgaggggcagctaccagtgcatcgacaccccctgcccccccaactaccagagggaccctgtgtctggcttctgcctgaagaactgccccccaaatgacctggagtgtgccctgagcccctatgccctggagtacaagctggtgtccctgcccttcggcatcgccaccaaccaggacctgatccggctggtggcctacacccaggatggagtgatgcaccccaggaccaccttcctgatggtggatgaggagcagacagtgccctttgccctgagagatgagaacctgaagggcgtggtgtacaccacccggcccctgcgggaggccgagacctacaggatgagggtgcgggccagcagctacagcgccaacggcaccatcgagtaccagaccaccttcatcgtgtacatcgctgtgtctgcctacccctactag

SEQ ID NO: 155074 - DNA, 723 bp, synthetic construct
  misc_feature 1..723: note = Description of Artificial Sequence: Synthetic coding sequence
  source 1..723: mol_type = other DNA
gccatcggcagcttccactgcggctgtgagcccggctaccagctgaagggcaggaagtgcatggatgtgaatgaatgtcggcagaatgtgtgcaggccagaccagcactgcaagaacacccggggcggctacaagtgcatcgacctgtgccccaacggcatgaccaaggccgagaatggcacctgcattgatattgatgagtgcaaggatggcacccaccagtgccgctacaaccagatctgtgagaacacccggggcagctaccgctgtgtgtgcccccggggctaccgcagccagggcgtgggccggccctgcatggacattgatgaatgtgagaacacagatgcctgccagcacgagtgcaagaacaccttcggcagctaccagtgcatctgccccccaggctaccagctgacccacaacgggaagacctgccaggacattgatgagtgcctggagcagaatgtgcactgcggccccaacaggatgtgcttcaacatgaggggcagctaccagtgcatcgacaccccctgcccccccaactaccagagggaccctgtgtctggcttctgcctgaagaactgccccccaaatgacctggagtgtgccctgagcccctatgccctggagtacaagctggtgtccctgcccttcggcatcgccaccaaccaggacctgatccggctggtggcctacacccaggatggagtgatgcacccctag

SEQ ID NO: 155075 - DNA, 1455 bp, synthetic construct
  misc_feature 1..1455: note = Description of Artificial Sequence: Synthetic coding sequence
  source 1..1455: mol_type = other DNA
atggacctgggcaaggaccagagccacctgaagcaccaccagaccccagacccccaccaggaggagaaccacagccctgaggtgattggcacctggagcctgaggaaccgggagctgctgaggaagaggaaggccgaggtgcatgagaaggagaccagccagtggctgtttggagagcagaagaagaggaagcagcagaggacaggcaagggcaacagaagaggaaggaagaggcagcagaacacagagctgaaggtggagccccagccccagatcgagaaggagatcgtggagaaggccctggcccccatcgagaagaagacagagcccccaggcagcatcaccaaggtgttccccagcgtggccagcccccagaaggtggtgcctgaggagcacttcagcgagatctgccaggagagcaacatctaccaggagaacttcagcgagtaccaggagattgctgtgcagaaccacagcagcgagacctgccagcacgtgtctgagcctgaggacctgagccccaagatgtaccaggagatctctgtgctgcaggacaacagcagcaagatctgccaggacatgaaggagcctgaggacaacagccccaacacctgccaggtgatcagcgtcatccaggaccaccccttcaagatgtaccaggacatggccaagcgggaggacctggcccccaagatgtgccaggaggccgctgtgcccaagatcctgccctgccccaccagcgaggacacagctgacctggccggctgcagcctgcaggcctaccccaagccagatgtgcccaagggctacatcctggacacagaccagaacccagctgagcctgaggagtacaatgaaacagaccagggcattgctgagacagagggcctcttccccaagatccaggagattgctgagcccaaggacctgagcaccaagacccaccaggagagcgctgagcccaagtacctgccccacaagacctgcaatgagatcatcgtgcccaaggcccccagccacaagaccatccaggagaccccccacagcgaggactacagcattgagatcaaccaggagaccccaggcagcgagaagtacagccctgagacctaccaggagatccctggcctggaggagtacagccctgagatctaccaggagaccagccagctggaggagtacagccctgagatctaccaggagaccccaggccctgaggacctgagcacagagacctacaagaacaaggatgtgcccaaggagtgcttccctgagccccaccaggagaccggcggcccccagggccaggaccccaaggcccaccaggaggatgccaaggatgcctacaccttcccccaggagatgaaggagaagcccaaggaggagcccggcatcccagccatcctgaatgaaagccacccagaaaatgatgtgtacagctatgtgctcttctag

SEQ ID NO: 155076 - DNA, 1455 bp, synthetic construct; identical to SEQ ID NO: 155075
  misc_feature 1..1455: note = Description of Artificial Sequence: Synthetic coding sequence
  source 1..1455: mol_type = other DNA

SEQ ID NO: 155077 - DNA, 429 bp, synthetic construct
  misc_feature 1..429: note = Description of Artificial Sequence: Synthetic coding sequence
  source 1..429: mol_type = other DNA
atggtgctgagccctgctgacaagaccaacgtgaaggccgcctggggcaaggtgggcgcccacgccggggagtatggagctgaggccctggagaggatgttcctgtccttccccaccaccaagacctacttcccccactttgacctgagccacggcagcgcccaggtgaagggccacggcaagaaggtggctgatgccctgaccaatgctgtggcccacgtggatgacatgcccaatgccctgagcgccctgagtgacctgcacgcccacaagctgcgggtggaccctgtgaacttcaagctgctgagccactgcctgctggtgaccctggccgcccacctgcctgctgagttcaccccagctgtgcacgccagcctggacaagttcctggcctctgtgtccacagtgctgaccagcaagtacagatag

SEQ ID NO: 155078 - DNA, 429 bp, synthetic construct; identical to SEQ ID NO: 155077
  misc_feature 1..429: note = Description of Artificial Sequence: Synthetic coding sequence
  source 1..429: mol_type = other DNA

SEQ ID NO: 155079 - DNA, 333 bp, synthetic construct
  misc_feature 1..333: note = Description of Artificial Sequence: Synthetic coding sequence
  source 1..333: mol_type = other DNA
atgttcctgtccttccccaccaccaagacctacttcccccactttgacctgagccacggcagcgcccaggtgaagggccacggcaagaaggtggctgatgccctgaccaatgctgtggcccacgtggatgacatgcccaatgccctgagcgccctgagtgacctgcacgcccacaagctgcgggtggaccctgtgaacttcaagctgctgagccactgcctgctggtgaccctggccgcccacctgcctgctgagttcaccccagctgtgcacgccagcctggacaagttcctggcctctgtgtccacagtgctgaccagcaagtacagatag

SEQ ID NO: 155080 - DNA, 444 bp, synthetic construct
  misc_feature 1..444: note = Description of Artificial Sequence: Synthetic coding sequence
  source 1..444: mol_type = other DNA
atggtgcacctgaccccagaggagaagtctgctgtgacagccctgtggggcaaggtgaatgtggatgaggtgggcggggaggccctgggccgcctgctggtggtgtacccctggacccagcgcttctttgagagctttggagacctgagcaccccagatgctgtgatgggcaaccccaaggtgaaggcccacggcaagaaggtgctgggcgccttcagtgatggcctggcccacctggacaacctgaagggcacctttgccaccctgtctgagctgcactgtgacaagctgcacgtggaccctgagaacttccggctgctgggcaatgtgctggtgtgtgtgctggcccaccactttgggaaggagttcaccccacctgtgcaggccgcctaccagaaggtggtggccggcgtggccaatgccctggcccacaagtaccactag

SEQ ID NO: 155081 - DNA, 273 bp, synthetic construct
  misc_feature 1..273: note = Description of Artificial Sequence: Synthetic coding sequence
  source 1..273: mol_type = other DNA
atggtgcacctgaccccagaggagaagtctgctgtgacagccctgtggggcaaggtgaatgtggatgaggtgggcggggaggccctgggccgcctgctggtggtgtacccctggacccagcgcttctttgagagctttggagacctgagcaccccagatgctgtgatgggcaaccccaaggtgaaggcccacggcaagaaggtgctgggcgccttcagtgatggcctggcccacctggacaacctgaagggcacctttgccaccctgtcctag

SEQ ID NO: 155082 - DNA, 426 bp, synthetic construct
  misc_feature 1..426: note = Description of Artificial Sequence: Synthetic coding sequence
  source 1..426: mol_type = other DNA
atggtgcacctgaccccagaggagaagacagctgtgaatgccctgtggggcaaggtgaatgtggatgctgtgggcggggaggccctgggccgcctgctggtggtgtacccctggacccagcgcttctttgagagctttggagacctgagcagcccagatgctgtgatgggcaaccccaaggtgaaggcccacggcaagaaggtgctgggcgccttcagtgatggcctggcccacctggacaacctgaagggcaccttcagccagctgtctgagctgcactgtgacaagctgcacgtggaccctgagaacttccgggtgtgcaagaaggtgcctgaggccctgcagatcggcagcacctgcctcttctacaaggagtacatgggcaaggagaagagcaaaggaacagtgcagggcatcaatggatag

SEQ ID NO: 155083 - DNA, 444 bp, synthetic construct
  misc_feature 1..444: note = Description of Artificial Sequence: Synthetic coding sequence
  source 1..444: mol_type = other DNA
atggtgcacctgaccccagaggagaagacagctgtgaatgccctgtggggcaaggtgaatgtggatgctgtgggcggggaggccctgggccgcctgctggtggtgtacccctggacccagcgcttctttgagagctttggagacctgagcagcccagatgctgtgatgggcaaccccaaggtgaaggcccacggcaagaaggtgctgggcgccttcagtgatggcctggcccacctggacaacctgaagggcaccttcagccagctgtctgagctgcactgtgacaagctgcacgtggaccctgagaacttccggctgctgggcaatgtgctggtgtgtgtgctggccaggaactttgggaaggagttcaccccccagatgcaggccgcctaccagaaggtggtggccggcgtggccaatgccctggcccacaagtaccactag

SEQ ID NO: 155084 - DNA, 315 bp, synthetic construct
  misc_feature 1..315: note = Description of Artificial Sequence: Synthetic coding sequence
  source 1..315: mol_type = other DNA
atggtgcacctgaccccagaggagaagacagctgtgaatgccctgtggggcaaggtgaatgtggatgctgtgggcggggaggccctgggccgcctgctggtggtgtacccctggacccagcgcttctttgagagctttggagacctgagcagcccagatgctgtgatgggcaaccccaaggtgaaggcccacggcaagaaggtgctgggcgccttcagtgatggcctggcccacctggacaacctgaagggcaccttcagccagctgtctgagctgcactgtgacaagctgcacgtggaccctgagaacttctag

SEQ ID NO: 155085 - DNA, 444 bp, synthetic construct
  misc_feature 1..444: note = Description of Artificial Sequence: Synthetic coding sequence
  source 1..444: mol_type = other DNA
atggtgcacttcaccgctgaggagaaggctgctgtgaccagcctgtggagcaagatgaatgtggaggaggccggcggggaggccctgggccgcctgctggtggtgtacccctggacccagcgcttctttgacagctttggaaacctgagcagccccagcgccatcctgggcaaccccaaggtgaaggcccacggcaagaaggtgctgaccagctttggagatgccatcaagaacatggacaacctgaagccagcctttgccaagctgtctgagctgcactgtgacaagctgcacgtggaccctgagaacttcaagctgctgggcaatgtgatggtgatcatcctggccacccactttgggaaggagttcaccccagaggtgcaggccgcctggcagaagctggtgtctgctgtggccatcgccctggcccacaagtaccactag

SEQ ID NO: 155086 - DNA, 444 bp, synthetic construct; identical to SEQ ID NO: 155085
  misc_feature 1..444: note = Description of Artificial Sequence: Synthetic coding sequence
  source 1..444: mol_type = other DNA

SEQ ID NO: 155087 - DNA, 264 bp, synthetic construct
  misc_feature 1..264: note = Description of Artificial Sequence: Synthetic coding sequence
  source 1..264: mol_type = other DNA
atggtgcacttcaccgctgaggagaaggctgctgtgaccagcctgtggagcaagatgaatgtggaggaggccggcggggaggccctgggccgcctgctggtggtgtacccctggacccagcgcttctttgacagctttggaaacctgagcagccccagcgccatcctgggcaaccccaaggtgaaggcccacggcaagaaggtgctgaccagctttggagatgccatcaagaacatggacaacctgaagccagcctttgcctag

SEQ ID NO: 155088 - DNA, 444 bp, synthetic construct
  misc_feature 1..444: note = Description of Artificial Sequence: Synthetic coding sequence
  source 1..444: mol_type = other DNA
atgggccacttcacagaggaggacaaggccaccatcaccagcctgtggggcaaggtgaatgtggaggatgctggaggagagaccctgggccgcctgctggtggtgtacccctggacccagcgcttctttgacagctttggaaacctgagcagcgccagcgccatcatgggcaaccccaaggtgaaggcccacggcaagaaggtgctgaccagcctgggagatgccaccaagcacctggatgacctgaagggcacctttgcccagctgtctgagctgcactgtgacaagctgcacgtggaccctgagaacttcaagctgctgggcaatgtgctggtgacagtgctggccatccactttgggaaggagttcaccccagaggtgcaggcctcctggcagaagatggtgacagctgtggccagcgccctgagcagccgctaccactag

SEQ ID NO: 155089 - DNA, 444 bp, synthetic construct
  misc_feature 1..444: note = Description of Artificial Sequence: Synthetic coding sequence
  source 1..444: mol_type = other DNA
atgggccacttcacagaggaggacaaggccaccatcaccagcctgtggggcaaggtgaatgtggaggatgctggaggagagaccctgggccgcctgctggtggtgtacccctggacccagcgcttctttgacagctttggaaacctgagcagcgccagcgccatcatgggcaaccccaaggtgaaggcccacggcaagaaggtgctgaccagcctgggagatgccatcaagcacctggatgacctgaagggcacctttgcccagctgtctgagctgcactgtgacaagctgcacgtggaccctgagaacttcaagctgctgggcaatgtgctggtgacagtgctggccatccactttgggaaggagttcaccccagaggtgcaggcctcctggcagaagatggtgactggagtggccagcgccctgagcagccgctaccactag

SEQ ID NO: 155090 - DNA, 477 bp, synthetic construct
  misc_feature 1..477: note = Description of Artificial Sequence: Synthetic coding sequence
  source 1..477: mol_type = other DNA
atgggccacttcacagaggaggacaaggccaccatcaccagcctgtggggcaaggtgaatgtggaggatgctggaggagagaccctgggccgcctgctggtggtgtacccctggacccagcgcttctttgacagctttggaaacctgagcagcgccagcgccatcatgggcaaccccaaggtgaaggcccacggcaagaaggtgctgaccagcctgggagatgccatcaagcacctggatgacctgaagggcacctttgcccagctgtctgagctgcactgtgacaagctgcacgtggaccctgagaacttcaagctgctgggcaatgtgctggtgacagtgctggccatccactttgggaaggagttcaccccagaggtgcaggcctcctggcagaagatggactggagcggccagtgccctgtgctgcagatccccctgagcagcctgcccatgatgcagagcttccagggctag

SEQ ID NO: 155091 - DNA, 414 bp, synthetic construct
  misc_feature 1..414: note = Description of Artificial Sequence: Synthetic coding sequence
  source 1..414: mol_type = other DNA
atggtggtgctgggggagatgaagaggaaggtgctgcccctgcacttcctgcccttcatgaggctgctggtggtgtacccctggacccagcgcttctttgacagctttggaaacctgagcagcgccagcgccatcatgggcaaccccaaggtgaaggcccacggcaagaaggtgctgaccagcctgggagatgccatcaagcacctggatgacctgaagggcacctttgcccagctgtctgagctgcactgtgacaagctgcacgtggaccctgagaacttcaagctgctgggcaatgtgctggtgacagtgctggccatccactttgggaaggagttcaccccagaggtgcaggcctcctggcagaagatggtgactggagtggccagcgccctgagcagccgctaccactag

SEQ ID NO: 155092 - DNA, 444 bp, synthetic construct; identical to SEQ ID NO: 155089
  misc_feature 1..444: note = Description of Artificial Sequence: Synthetic coding sequence
  source 1..444: mol_type = other DNA

SEQ ID NO: 155093 - DNA, 426 bp, synthetic construct
  misc_feature 1..426: note = Description of Artificial Sequence: Synthetic coding sequence
  source 1..426: mol_type = other DNA
atgctgagcgcccaggagcgggcccagatcgcccaggtgtgggacctgattgctggccacgaggcccagtttggagctgagctgctgctgcggctcttcaccgtgtaccccagcaccaaggtgtacttcccccacctgagcgcctgccaggatgccacccagctgctgagccacggccagaggatgctggccgctgtgggcgctgctgtgcagcacgtggacaacctgcgggccgccctgagccccctggccgacctgcacgccctggtgctgcgggtggaccctgccaacttccccctgctgatccagtgcttccacgtggtgctggccagccacctgcaggatgagttcaccgtgcagatgcaggccgcctgggacaagttcctgactggagtggccgtggtgctgacagagaagtacagatag

SEQ ID NO: 155094 - DNA, 429 bp, synthetic construct
  misc_feature 1..429: note = Description of Artificial Sequence: Synthetic coding sequence
  source 1..429: mol_type = other DNA
atggccctgtctgctgaggaccgggccctggtgcgggccctgtggaagaagctgggcagcaatgtgggcgtgtacaccacagaggccctggagaggaccttcctggccttccctgccaccaagacctacttcagccacctggacctgagccctggcagcagccaggtgcgggcccacggccagaaggtggctgatgccctgagcctggccgtggagcggctggatgacctgccccacgccctgagcgccctgagccacctgcacgcctgccagctgcgggtggaccctgccagcttccagctgctgggccactgcctgctggtgaccctggcccggcactacccaggggacttcagccctgccctgcaggccagcctggacaagttcctgagccacgtgatcagcgccctggtgtctgagtacagatag

SEQ ID NO: 155095 - DNA, 429 bp, synthetic construct
  misc_feature 1..429: note = Description of Artificial Sequence: Synthetic coding sequence
  source 1..429: mol_type = other DNA
atgagcctgaccaagacagagaggaccatcatcgtgtccatgtgggccaagatcagcacccaggccgacaccatcggcacagagaccctggagcggctcttcctgagccacccccagaccaagacctacttcccccactttgacctgcaccctggcagcgcccagctgcgggcccacggcagcaaggtggtggccgctgtgggagatgctgtgaagagcattgatgacattggaggagccctgagcaagctgtctgagctgcacgcctacatcctgcgggtggaccctgtgaacttcaagctgctgagccactgcctgctggtgaccctggccgcccgcttccctgctgacttcaccgctgaggcccacgccgcctgggacaagttcctgtctgtggtgtcctctgtgctgacagagaagtacagatag

SEQ ID NO: 155096 - DNA, 1389 bp, synthetic construct
  misc_feature 1..1389: note = Description of Artificial Sequence: Synthetic coding sequence
  source 1..1389: mol_type = other DNA
atggcccgggtgctgggcgcccctgtggccctgggcctgtggagcctgtgctggagcctggccatcgccacccccctgccccccaccagcgcccacggcaatgtggccgagggggagaccaagccagaccctgatgtgacagagcgctgcagtgatggctggagctttgatgccaccaccctggatgacaatggcaccatgctgttcttcaagggggagtttgtgtggaagagccacaagtgggaccgggagctgatcagcgagcgctggaagaacttccccagccctgtggatgctgccttccggcagggccacaacagcgtcttcctgatcaagggggacaaggtgtgggtgtacccacctgagaagaaggagaagggctaccccaagctgctgcaggatgagttccctggcatccccagccccctggatgctgctgtggagtgccacagaggagagtgccaggccgagggcgtgctcttcttccagggcgaccgggagtggttctgggacctggccaccggcaccatgaaggagaggtcctggccagctgtgggcaactgcagcagcgccctgcgctggctgggccgctactactgcttccagggcaaccagttcctgcgctttgatcctgtgcggggggaggtgcccccacgctaccccagagatgtgcgggactacttcatgccctgccccggccggggccacggccacagaaatggcaccggccacggcaacagcacccaccacggccctgagtacatgcgctgcagcccccacctggtgctgagcgccctgaccagtgacaaccacggggccacctacgccttcagcggcacccactactggaggctggacaccagcagagatggctggcacagctggcccatcgcccaccagtggccccagggccccagcgctgtggatgctgccttctcctgggaggagaagctgtacctggtgcagggcacccaggtgtatgtgttcctgaccaagggcggctacaccctggtgtctggctaccccaagaggctggagaaggaggtgggcacccctcatggcatcatcctggacagcgtggatgctgccttcatctgccccggcagcagccggctgcacatcatggccggccggcggctgtggtggctggacctgaagagcggggcccaggccacctggacagagctgccctggccccatgagaaggtggatggagccctgtgcatggagaagagcctgggccccaacagctgcagcgccaatggacctggcctgtacctgattcatggccccaacctgtactgctacagtgatgtggagaagctgaatgctgccaaggccctgccccagccccagaatgtgaccagcctgctgggctgcacccactag

SEQ ID NO: 155097 - DNA, 765 bp, synthetic construct
  misc_feature 1..765: note = Description of Artificial Sequence: Synthetic coding sequence
  source 1..765: mol_type = other DNA
atggcccgggtgctgggcgcccctgtggccctgggcctgtggagcctgtgctggagcctggccatcgccacccccctgccccccaccagcgcccacggcaatgtggccgagggggagaccaagccagaccctgatgtgacagagcgctgcagtgatggctggagctttgatgccaccaccctggatgacaatggcaccatgctgttcttcaagggggagtttgtgtggaagagccacaagtgggaccgggagctgatcagcgagcgctggaagaacttccccagccctgtggatgctgccttccggcagggccacaacagcgtcttcctgatcaagggggacaaggtgtgggtgtacccacctgagaagaaggagaagggctaccccaagctgctgcaggatgagttccctggcatccccagccccctggatgctgctgtggagtgccacagaggagagtgccaggccgagggcgtgctcttcttccagggcgaccgggagtggttctgggacctggccaccggcaccatgaaggagaggtcctggccagctgtgggcaactgcagcagcgccctgcgctggctgggccgctactactgcttccagggcaaccagttcctgcgctttgatcctgtgcggggggaggtgcccccacgctaccccagagatgtgcgggactacttcatgccctgccccggccggggccacggccacagaaatggcaccggccacggcaacagcatctgtgctgtggcccacatctag

SEQ ID NO: 155098 - DNA, 1353 bp, synthetic construct
  misc_feature 1..1353: note = Description of Artificial Sequence: Synthetic coding sequence
  source 1..1353: mol_type = other DNA
atgtggctgaaggtgttcaccaccttcctgagctttgccaccggggcctgcagcggcctgaaggtgacagtgcccagccacacagtgcacggcgtgcggggccaggccctgtacctgcctgtgcactacggcttccacaccccagccagtgacatccagatcatctggctgtttgagcggccccacaccatgcccaagtacctgctgggctctgtgaacaagtctgtggtgcctgacctggagtaccagcacaagttcaccatgatgcccccaaatgccagcctgctgatcaaccccctgcagttcccagatgagggcaactacatcgtgaaggtgaacatccagggcaatggcaccctgagcgccagccagaagatccaggtgacagtggatgatcctgtgaccaagcctgtggtgcagatccaccccccatctggagctgtggagtatgtgggcaacatgaccctgacctgccacgtggagggcggcacccggctggcctaccagtggctgaagaatggccggcctgtgcacaccagcagcacctacagcttcagcccccagaacaacaccctgcacatcgcccctgtgaccaaggaggacatcggcaactacagctgcctggtgaggaaccctgtgtctgagatggagagtgacatcatcatgcccatcatctactacggcccctacggcctgcaggtgaacagcgacaagggcctgaaggtgggggaggtgttcaccgtggacctgggggaggccatcctgtttgactgcagcgctgacagccacccccccaacacctacagctggatccggaggacagacaacaccacctacatcatcaagcacggcccccggctggaggtggccagcgagaaggtggcccagaagaccatggactatgtgtgctgtgcctacaacaacatcaccggccggcaggatgagacccacttcaccgtcatcatcacctctgtgggcctggagaagctggcccagaagggcaagagcctgagccccctggccagcatcaccggcatcagcctcttcctgatcatctccatgtgcctgctcttcctgtggaagaagtaccagccctacaaggtgatcaagcagaagctggagggccggcctgagacagagtacaggaaggcccagaccttcagcggccatgaagatgccctggatgactttggcatctatgaatttgtggccttcccagatgtgtctggagtgagccgcatccccagccgctctgtgcctgccagtgactgtgtgtctggccaggacctgcacagcacagtgtatgaagtcatccagcacatcccagcccagcagcaggaccaccctgagtag

SEQ ID NO: 155099 - DNA, 1389 bp, synthetic construct
  misc_feature 1..1389: note = Description of Artificial Sequence: Synthetic coding sequence
  source 1..1389: mol_type = other DNA
atgggccaggatgccttcatggagccctttggagacaccctgggcgtcttccagtgcaagatctacctgctgctgtttggagcctgcagcggcctgaaggtgacagtgcccagccacacagtgcacggcgtgcggggccaggccctgtacctgcctgtgcactacggcttccacaccccagccagtgacatccagatcatctggctgtttgagcggccccacaccatgcccaagtacctgctgggctctgtgaacaagtctgtggtgcctgacctggagtaccagcacaagttcaccatgatgcccccaaatgccagcctgctgatcaaccccctgcagttcccagatgagggcaactacatcgtgaaggtgaacatccagggcaatggcaccctgagcgccagccagaagatccaggtgacagtggatgatcctgtgaccaagcctgtggtgcagatccaccccccatctggagctgtggagtatgtgggcaacatgaccctgacctgccacgtggagggcggcacccggctggcctaccagtggctgaagaatggccggcctgtgcacaccagcagcacctacagcttcagcccccagaacaacaccctgcacatcgcccctgtgaccaaggaggacatcggcaactacagctgcctggtgaggaaccctgtgtctgagatggagagtgacatcatcatgcccatcatctactacggcccctacggcctgcaggtgaacagcgacaagggcctgaaggtgggggaggtgttcaccgtggacctgggggaggccatcctgtttgactgcagcgctgacagccacccccccaacacctacagctggatccggaggacagacaacaccacctacatcatcaagcacggcccccggctggaggtggccagcgagaaggtggcccagaagaccatggactatgtgtgctgtgcctacaacaacatcaccggccggcaggatgagacccacttcaccgtcatcatcacctctgtgggcctggagaagctggcccagaagggcaagagcctgagccccctggccagcatcaccggcatcagcctcttcctgatcatctccatgtgcctgctcttcctgtggaagaagtaccagccctacaaggtgatcaagcagaagctggagggccggcctgagacagagtacaggaaggcccagaccttcagcggccatgaagatgccctggatgactttggcatctatgaatttgtggccttcccagatgtgtctggagtgagccgcatccccagccgctctgtgcctgccagtgactgtgtgtctggccaggacctgcacagcacagtgtatgaagtcatccagcacatcccagcccagcagcaggaccaccctgagtag

SEQ ID NO: 155100 - DNA, 1104 bp, synthetic construct
  misc_feature 1..1104: note = Description of Artificial Sequence: Synthetic coding sequence
  source 1..1104: mol_type = other DNA
atggcctacagagtgctgggccgggccggccccccccagccccggcgggcccggcggctgctgtttgccttcaccctgagcctgagctgcacctacctgtgctacagcttcctgtgctgctgtgatgacctgggccgcagccggctgctgggcgccccccgctgcctgcggggccccagcgctgggggccagaagctgctgcagaagagccggccctgtgaccccagcggccccaccccatctgagcccagcgcccccagcgccccagctgctgctgtgcctgccccccggctgagcggcagcaaccacagcggcagccccaagctgggcaccaagaggctgccccaggccctgattgtgggcgtgaagaagggcggcaccagggctgtgctggagttcatccgggtgcacccagatgtgcgggccctgggcacagagccccacttctttgacaggaactacggccggggcctggactggtaccgcagcctgatgcccaggaccctggagagccagatcaccctggagaagacccccagctactttgtgacccaggaggccccccggcgcatcttcaacatgagccgggacaccaagctgattgtggtggtgagaaatcctgtgacccgggccatcagtgactacacccagaccctgagcaagaagccagacatccccacctttgagggcctgtccttcaggaacagaaccctgggcctggtggatgtgtcctggaatgccatccgcatcggcatgtatgtgctgcacctggagagctggctgcagtacttccccctggcccagatccactttgtgtctggagagcggctcatcacagatcctgctggggagatgggccgggtgcaggacttcctgggcatcaagcgcttcatcacagacaagcacttctacttcaacaagaccaagggcttcccctgcctgaagaagacagagagcagcctgctgccccgctgcctgggcaagagcaagggccgcacccacgtgcagattgatcctgaggtgattgaccagctgcgggagttctaccggccctacaacatcaagttctatgaaacagtgggccaggacttccgctgggagtag

SEQ ID NO: 155101 - DNA, 1035 bp, synthetic construct
  misc_feature 1..1035: note = Description of Artificial Sequence: Synthetic coding sequence
  source 1..1035: mol_type = other DNA
cctccagcccgggcccacggggccatggcctacagagtgctgggccgggccggccccccccagccccggcgggcccggcggctgctgtttgccttcaccctgagcctgagctgcacctacctgtgctacagcttcctgtgctgctgtgatgacctgggccgcagccggctgctgggcgccccccgctgcctgcggggccccagcgctgggggccagaagctgctgcagaagagccggccctgtgaccccagcggccccaccccatctgagcccagcgcccccagcgccccagctgctgctgtgcctgccccccggctgagcggcagcaaccacagcggcagccccaagctgggcaccaagaggctgccccaggccctgattgtgggcgtgaagaagggcggcaccagggctgtgctggagttcatccgggtgcacccagatgtgcgggccctgggcacagagccccacttctttgacaggaactacggccggggcctggactggtaccgcagcctgatgcccaggaccctggagagccagatcaccctggagaagacccccagctactttgtgacccaggaggccccccggcgcatcttcaacatgagccgggacaccaagctgattgtggtggtgagaaatcctgtgacccgggccatcagtgactacacccagaccctgagcaagaagccagacatccccacctttgagggcctgtccttcaggaacagaaccctgggcctggtggatgtgtcctggaatgccatccgcatcggcatgtatgtgctgcacctggagagctggctgcagtacttccccctggcccagatccactttgtgtctggagagcggctcatcacagatcctgctggggagatgggccgggtgcaggacttcctgggcatcaagcgcttcatcacagacaagcacttctacttcaacaagaccaagggcttcccctgcctgaagaaccgcatcgagcccccagcctccatgctgggccagatcaagcgggagaacagctgcacagactag

SEQ ID NO: 155102 - DNA, 1221 bp, synthetic construct
  misc_feature 1..1221: note = Description of Artificial Sequence: Synthetic coding sequence
  source 1..1221: mol_type = other DNA
atggcccctcctggccctgccagcgccctgagcaccagcgctgagcccctgagccgcagcatcttcaggaagttcctgctgatgctgtgcagcctgctgaccagcctgtatgtgttctactgcctggccgagcgctgccagaccctgagcggccctgtggtgggcctgagcggcggcggggaggaggccggggcccctgggggcggcgtgctggccggcggcccccgggagctggccgtgtggccagctgctgcccagaggaagaggctgctgcagctgccccagtggaggagaagaagacctccagcccccagagatgatggagaggaggccgcctgggaggaggagagccctggcctgagcggcggccctgggggcagcggggccggcagcacagtggccgaggcccctcctggcaccctggccctgctgctggatgagggcagcaagcagctgccccaggccatcatcatcggcgtgaagaagggcggcacccgggccctgctggagttcctgcgggtgcacccagatgtgcgggctgtgggcgctgagccccacttctttgacaggagctatgacaagggcctggcctggtacagagacctgatgcccaggaccctggatggccagatcaccatggagaagacccccagctactttgtgacccgggaggccccagcccgcatcagcgccatgagcaaggacaccaagctgattgtggtggtgcgggaccctgtgacccgggccatcagtgactacacccagaccctgagcaagaggccagacatccccacctttgagagcctgaccttcaagaacagaacagctggcctgattgacacctcctggagcgccatccagatcggcatctatgccaagcacctggagcactggctgcggcacttccccatccggcagatgctgtttgtgtctggagagcggctcatcagtgaccctgctggggagctgggccgggtgcaggacttcctgggcctgaagaggatcatcacagacaagcacttctacttcaacaagaccaagggcttcccctgcctgaagaaggccgagggcagcagccggccccactgcctgggcaagaccaagggccgcacccaccctgagattgaccgggaggtggtgcggcggctgcgggagttctaccggcccttcaacctgaagttctaccagatgacaggccatgactttggctgggatggatag

SEQ ID NO: 155103 - DNA, 1173 bp, synthetic construct
  misc_feature 1..1173: note = Description of Artificial Sequence: Synthetic coding sequence
  source 1..1173: mol_type = other DNA
atgggccagaggctgagcggcggccgcagctgcctggatgtgcccggccgcctgctgccccagcccccacctcctcctcctcctgtgcggaggaagctggccctgctgtttgccatgctgtgtgtgtggctgtacatgttcctgtacagctgtgccggcagctgtgccgccgcccctggcctgctgctgctgggcagcggcagccgggccgcccatgaccccccagccctggccacagccccagatggcaccccaccccggctgcccttccgggcccccccagccacccccctggccagcggcaaggagatggccgagggcgccgccagccctgaggagcagagccctgaggtgcctgacagccccagccccatcagcagcttcttcagcggcagcggcagcaagcagctgccccaggccatcatcattggagtgaagaagggcggcacccgggccctgctggagttcctgcgggtgcacccagatgtgcgggctgtgggcgctgagccccacttctttgacaggagctatgacaagggcctggcctggtacagagacctgatgcccaggaccctggatggccagatcaccatggagaagacccccagctactttgtgacccgggaggccccagcccgcatcagcgccatgagcaaggacaccaagctgattgtggtggtgcgggaccctgtgacccgggccatcagtgactacacccagaccctgagcaagaggccagacatccccacctttgagagcctgaccttcaagaacagaacagctggcctgattgacacctcctggagcgccatccagatcggcatctatgccaagcacctggagcactggctgcggcacttccccatccggcagatgctgtttgtgtctggagagcggctcatcagtgaccctgctggggagctgggccgggtgcaggacttcctgggcctgaagaggatcatcacagacaagcacttctacttcaacaagaccaagggcttcccctgcctgaagaaggccgagggcagcagccggccccactgcctgggcaagaccaagggccgcacccaccctgagattgaccgggaggtggtgcggcggctgcgggagttctaccggcccttcaacctgaagttctaccagatgactggacatgactttggctgggactag

SEQ ID NO: 155104 - DNA, 1173 bp, synthetic construct; identical to SEQ ID NO: 155103
  misc_feature 1..1173: note = Description of Artificial Sequence: Synthetic coding sequence
  source 1..1173: mol_type = other DNA

SEQ ID NO: 155105 - DNA, 1371 bp, synthetic construct
  misc_feature 1..1371: note = Description of Artificial Sequence: Synthetic coding sequence
  source 1..1371: mol_type = other DNA
atggcccgctggccagcccctcctcctcctcctcctcctcctccacccctggccgcccctcctcctcctggggccagcgccaagggccccccagccaggaagctgctcttcatgtgcaccctgagcctgtctgtgacctacctgtgctacagcctgctgggcggcagcggcagcctgcagttccccctggccctgcaggagagccctggagctgctgctgagcccccacccagccccccaccacccagcctgctgcccacccctgtgcggctgggcgcccccagccagcccccagcccccccacccctggacaatgccagccacggggagcccccagagcccccagagcagcctgctgcccctggaacagatggctggggcctgcccagcggcggcggcggggcccaggatgcctggctgcggacccccctggcccccagcgagatgatcacagcccagagcgccctgcctgagcgggaggcccaggagagcagcaccacagatgaggacctggccggccggcgggccgccaacggcagcagcgagcggggcggcgctgtgtccaccccagactatggagagaagaagctgccccaggccctgatcattggagtgaagaagggcggcacccgggccctgctggaggccatccgggtgcacccagatgtgcgggctgtgggcgtggagccccacttctttgacagaaattatgagaagggcctggagtggtacagaaatgtgatgcccaagaccctggatggccagatcaccatggagaagacccccagctactttgtgaccaatgaggcccccaagaggatccacagcatggccaaggacatcaagctgattgtggtggtgaggaaccctgtgacccgggccatcagtgactacacccagaccctgagcaagaagccagagatccccacctttgaggtgctggccttcaagaacagaaccctgggcctgattgatgcctcctggagcgccatcagaattggcatctatgccctgcacctggagaactggctgcagtacttccccctgagccagatcctgtttgtgtctggagagcggctgattgtggaccctgctggggagatggccaaggtgcaggacttcctgggcctgaagagggtggtgacagagaagcacttctacttcaacaagaccaagggcttcccctgcctgaagaagccagaggacagcagcgccccccgctgcctgggcaagagcaaaggaagaacccaccccagaattgatcctgatgtgatccaccggctgaggaagttctacaagcccttcaacctgatgttctaccagatgacaggccaggacttccagtgggagcaggaggagggggacaagtag

SEQ ID NO: 155106 - DNA, 1041 bp, synthetic construct
  misc_feature 1..1041: note = Description of Artificial Sequence: Synthetic coding sequence
  source 1..1041: mol_type = other DNA
atgctgttcaagcagcaggcctggctgcggcagaagctgctggtgctgggcagcctggccgtgggcagcctgctgtacctggtggcccgggtgggcagcctggaccggctgcagcccatctgccccatcgagggccgcctgggcggggcccggacccaggccgagttccccctgcgggccctgcagttcaagaggggcctgctgcacgagttcagaaaaggaaatgccagcaaggagcaggtgcggctgcatgacctggtgcagcagctgcccaaggccatcatcatcggcgtgaggaagggcggcacccgggccctgctggagatgctgaacctgcaccctgctgtggtgaaggccagccaggagatccacttctttgacaatgatgagaactacggcaagggcatcgagtggtacaggaagaagatgcccttctcctacccccagcagatcaccatcgagaagagccctgcctacttcatcacagaggaggtgcctgagcgcatctacaagatgaacagcagcatcaagctgctgatcatcgtgcgggagcccaccacccgggccatcagtgactacacccaggtgctggagggcaaggagaggaagaacaagacctactacaagtttgagaagctggccatcgaccccaacacctgtgaggtgaacaccaagtacaaggctgtgaggaccagcatctacaccaagcacctggagcgctggctgaagtacttccccatcgagcagttccacgtggtggatggagacaggctcatcacagagcccctgcctgagctgcagctggtggagaagttcctgaacctgcccccacgcatcagccagtacaacctgtacttcaatgccacccggggcttctactgcctgcgcttcaacatcatcttcaacaagtgcctggccggcagcaagggccgcatccaccctgaggtggaccccagcgtcatcaccaagctgaggaagttcttccaccccttcaaccagaagttctaccagatcactggaagaaccctgaactggccctag

SEQ ID NO: 155107 - DNA, 1041 bp, synthetic construct; identical to SEQ ID NO: 155106
  misc_feature 1..1041: note = Description of Artificial Sequence: Synthetic coding sequence
  source 1..1041: mol_type = other DNA

SEQ ID NO: 155108 - DNA, 969 bp, synthetic construct
  misc_feature 1..969: note = Description of Artificial Sequence: Synthetic coding sequence
  source 1..969: mol_type = other DNA
atgctgttcatcaagttcatccacctggaggtgttctccatgcctgagcgggccatcgcccggcatgaggtgcgggagattgagcagaggcacaccatggatggcccccggcaggatgccaccctggatgaggaggaggacatggtgatcatctacaacagagtgcccaagacagccagcaccagcttcaccaacatcgcctatgacctgtgtgccaagaacaagtaccacgtgctgcacatcaacaccaccaagaacaaccctgtgatgagcctgcaggaccaggtgcgctttgtgaagaacatcacctcctggaaggagatgaagccaggcttctaccacggccacgtgtcctacctggactttgccaagtttggagtgaagaagaagcccatctacatcaacgtcatccgggaccccatcgagcggctggtgtcctactactacttcctgcgctttggagatgactacagacctggcctgcggcggaggaagcagggcgacaagaagacctttgatgaatgtgtggccgagggcggcagtgactgtgcccctgagaagctgtggctgcagatccccttcttctgtggccacagcagcgagtgctggaatgtgggcagccgctgggccatggaccaggccaagtacaacctgatcaatgagtacttcctggtgggcgtgacagaggagctggaggacttcatcatgctgctggaggccgccctgccccgcttcttccggggggccacagagctgtacagaacagccccagacacagccacccccagccaccgccacggccccatctgtggcagcaagagcatcagcagcctgctggtgaaggtgtcccctgtgtgcaaggacagccactgccactgccggcggggcaccggcacccccaagggggagaccctggccaccctggccccctgcagccagagctggagctctgtgacccaccgctggtag

SEQ ID NO: 155109 - DNA, 912 bp, synthetic construct
  misc_feature 1..912: note = Description of Artificial Sequence: Synthetic coding sequence
  source 1..912: mol_type = other DNA
atgctgttcatcaagttcatccacctggaggtgttctccatgcctgagcgggccatcgcccggcatgaggtgcgggagattgagcagaggcacaccatggatggcccccggcaggatgccaccctggatgaggaggaggacatggtgatcatctacaacagagtgcccaagacagccagcaccagcttcaccaacatcgcctatgacctgtgtgccaagaacaagtaccacgtgctgcacatcaacaccaccaagaacaaccctgtgatgagcctgcaggaccaggtgcgctttgtgaagaacatcacctcctggaaggagatgaagccaggcttctaccacggccacgtgtcctacctggactttgccaagtttggagtgaagaagaagcccatctacatcaacgtcatccgggaccccatcgagcggctggtgtcctactactacttcctgcgctttggagatgactacagacctggcctgcggcggaggaagcagggcgacaagaagacctttgatgaatgtgtggccgagggcggcagtgactgtgcccctgagaagctgtggctgcagatccccttcttctgtggccacagcagcgagtgctggaatgtgggcagccgctgggccatggaccaggccaagtacaacctgatcaatgagtacttcctggtgggcgtgacagaggagctggaggacttcatcatgctgctggaggccgccctgccccgcttcttccggggggccacagagctgtacagaacagccccagacacagccacccccagccaccgccacggccccatctgtggcagcaagagcatcagcagcctgctggtgaaggtgtcccctgtgtgcaaggacagccactgcctgggcaagtgcagcagaaatggcctgtctgctgtgtag

SEQ ID NO: 155110 - DNA, 1071 bp, synthetic construct
  misc_feature 1..1071: note = Description of Artificial Sequence: Synthetic coding sequence
  source 1..1071: mol_type = other DNA
atgggcctgctgcgcatcatgatgccacccaagctgcagctgctggccgtggtggcctttgctgtggccatgctgttcctggagaaccagatccagaagctggaggagagccgcagcaagctggagcgggccatcgcccggcatgaggtgcgggagattgagcagaggcacaccatggatggcccccggcaggatgccaccctggatgaggaggaggacatggtgatcatctacaacagagtgcccaagacagccagcaccagcttcaccaacatcgcctatgacctgtgtgccaagaacaagtaccacgtgctgcacatcaacaccaccaagaacaaccctgtgatgagcctgcaggaccaggtgcgctttgtgaagaacatcacctcctggaaggagatgaagccaggcttctaccacggccacgtgtcctacctggactttgccaagtttggagtgaagaagaagcccatctacatcaacgtcatccgggaccccatcgagcggctggtgtcctactactacttcctgcgctttggagatgactacagacctggcctgcggcggaggaagcagggcgacaagaagacctttgatgaatgtgtggccgagggcggcagtgactgtgcccctgagaagctgtggctgcagatccccttcttctgtggccacagcagcgagtgctggaatgtgggcagccgctgggccatggaccaggccaagtacaacctgatcaatgagtacttcctggtgggcgtgacagaggagctggaggacttcatcatgctgctggaggccgccctgccccgcttcttccggggggccacagagctgtacagaacaggcaagaagagccacctgaggaagaccacagagaagaagctgcccaccaagcagaccatcgccaagctgcagcagagcgacatctggaagatggagaatgagttctatgaatttgccctggagcagttccagttcatccgggcccatgctgtgcgggagaaggatggagacctgtacatcctggcccagaacttcttctatgagaagatctaccccaagagcaactag

SEQ ID NO: 155111 - DNA, 690 bp, synthetic construct
  misc_feature 1..690: note = Description of Artificial Sequence: Synthetic coding sequence
  source 1..690: mol_type = other DNA
atgggcctgctgcgcatcatgatgccacccaagctgcagctgctggccgtggtggcctttgctgtggccatgctgttcctggagaaccagatccagaagctggaggagagccgcagcaagctggagcgggccatcgcccggcatgaggtgcgggagattgagcagaggcacaccatggatggcccccggcaggatgccaccctggatgaggaggaggacatggtgatcatctacaacagagtgcccaagacagccagcaccagcttcaccaacatcgcctatgacctgtgtgccaagaacaagtaccacgtgctgcacatcaacaccaccaagaacaaccctgtgatgagcctgcaggaccaggtgcgctttgtgaagaacatcacctcctggaaggagatgaagccaggcttctaccacggccacgtgtcctacctggactttgccaagtttggagtgaagaagaagcccatctacatcaacgtcatccgggaccccatcgagcggctggtgtcctactactacttcctgcgctttggagatgactacagacctggcctgcggcggaggaagcagggcgacaagaagacctttgatgaatgtgtggccgagggcggcagtgactgtgcccctgagaagctgtggctgcagatccccttcttctgtggccacagcagcgagtgctggtag

SEQ ID NO: 155112 - DNA, 1236 bp, synthetic construct
  misc_feature 1..1236: note = Description of Artificial Sequence: Synthetic coding sequence
  source 1..1236: mol_type = other DNA
atgagaagaagaagagctgggggccgcaccatggtggagcgggccagcaagtttgtgctggtggtggccggctctgtgtgcttcatgctgatcctgtaccagtatgccggccctggcctgagcctgggcgcccctgggggccgggcccccccagatgacctggacctcttccccaccccagacccccactatgagaagaagtactacttccctgtgcgggagctggagaggagcctgcgctttgacatgaagggagatgatgtgattgtgttcctgcacatccagaagacaggaggcaccaccttcggccgccacctggtgcagaatgtgcggctggaggtgccctgtgactgccggcccggccagaagaagtgcacctgctaccggcccaacagaagagagacctggctgttcagccgcttcagcacaggctggagctgtggcctgcatgctgactggacagagctgaccaactgtgtgcctggggtgctggaccggcgggacagcgctgccctgcggacccccaggaagttctactacatcaccctgctgcgggaccctgtgagccgctacctgtctgagtggaggcatgtgcagagaggagccacctggaagaccagcctgcacatgtgtgatggccgcacccccaccccagaggagctgcccccctgctatgagggcacagactggagcggctgcaccctgcaggagttcatggactgcccctacaacctggccaacaaccggcaggtgaggatgctggccgacctgagcctggtgggctgctacaacctgtccttcatccctgagggcaagagggcccagctgctgctggagagcgccaagaagaacctgcggggcatggccttcttcggcctgacagagttccagaggaagacccagtacctgtttgagaggaccttcaacctgaagttcatccggcccttcatgcagtacaacagcacccgggccggcggcgtggaggtggatgaggacaccatcagaagaattgaggagctgaatgacctggacatgcagctgtatgactatgccaaggacctcttccagcagcgctaccagtacaagaggcagctggagcggcgggagcagaggctgcggagccgggaggagcggctgctgcaccgggccaaggaggccctgccccgggaggatgctgatgagcccggccgggtgcccacagaggactacatgagccacatcatcgagaagtggtag

SEQ ID NO: 155113 - DNA, 831 bp, synthetic construct
  misc_feature 1..831: note = Description of Artificial Sequence: Synthetic coding sequence
  source 1..831: mol_type = other DNA
atgctgttcctgtttgctgtgattgtgctgcagtatgtgtgccctggaacagagtgccagctgctgcggctgcaggccttcagcagccctgtgcctgacccctacagaagtgaagatgagagcagcgccaggtttgtgccccgctacaacttcaccaggggggacctgctgaggaaggtggactttgacatcaagggagatgacctgattgtgttcctgcacatccagaagacaggaggcaccaccttcggccgccacctggtgaggaacatccagctggagcagccctgtgagtgccgggtgggccagaagaagtgcacctgccacaggcctgggaagcgggagacctggctgttcagccgcttcagcacaggctggagctgtggcctgcacgccgactggacagagctgaccagctgtgtgcccagcgtggtggatggcaagagagatgcccggctgcggcccagccgctggaggatcttccagatcctggatgctgccagcaaggacaagaggggcagccccaacaccaatgctggggccaacagccccagcagcaccaagaccaggaacaccagcaagagcggcaagaacttccactacatcaccatcctgcgggaccctgtgagccgctacctgtctgagtggaggcatgtgcagagaggagccacctggaaggccagcctgcacgtgtgtgatggccggccccccaccagcgaggagctgcccagctgctacacaggagatgactggagcggctgccccctgaaggagttcatggactgcccctacaacctggccaacaacagatgtgcctgcagccccacctag

SEQ ID NO: 155114 - DNA, 1389 bp, synthetic construct
  misc_feature 1..1389: note = Description of Artificial Sequence: Synthetic coding sequence
  source 1..1389: mol_type = other DNA
atggatgagaagagcaacaagctgctgctggccctggtgatgctgttcctgtttgctgtgattgtgctgcagtatgtgtgccccggcacagagtgccagctgctgcggctgcaggccttcagcagccctgtgcctgacccctacagaagtgaagatgagagcagcgccaggtttgtgccccgctacaacttcaccaggggggacctgctgaggaaggtggactttgacatcaagggagatgacctgattgtgttcctgcacatccagaagacaggaggcaccaccttcggccgccacctggtgaggaacatccagctggagcagccctgtgaatgtcgggtgggccagaagaagtgcacctgccacaggcctgggaagcgggagacctggctgttcagccgcttcagcacaggctggagctgtggcctgcatgctgactggacagagctgaccagctgtgtgcccagcgtggtggatggcaagagagatgcccggctgcggcccagccgctggaggatcttccagatcctggatgctgccagcaaggacaagaggggcagccccaacaccaatgctggggccaacagccccagcagcaccaagaccaggaacaccagcaagagcggcaagaacttccactacatcaccatcctgcgggaccctgtgagccgctacctgtctgagtggaggcatgtgcagagaggagccacctggaaggccagcctgcacgtgtgtgatggccggccccccaccagcgaggagctgcccagctgctacacaggagatgactggagcggctgccccctgaaggagttcatggactgcccctacaacctggccaacaaccggcaggtgaggatgctgagtgacctgaccctggtgggctgctacaacctgtctgtgatgcctgagaagcagaggaacaaggtgctgctggagagcgccaagagcaacctgaagcacatggccttcttcggcctgacagagttccagaggaagacccagtacctgtttgagaagaccttcaacatgaacttcatcagccccttcacccagtacaacaccacccgggccagctctgtggagatcaatgaggagatccagaagagaattgagggcctgaacttcctggacatggagctgtacagctatgccaaggacctcttcctgcagcgctaccagttcatgaggcagaaggagcaccaggaggcccggaggaagaggcaggagcagaggaagttcctgaagggccgcctgctgcagacccacttccagagccagggccagggccagagccagaaccccaaccagaaccagagcaaggagcagaatgacaacaccagcaatggcaccaatgactacatcggctctgtggagaagtggaggtag

SEQ ID NO: 155115 - DNA, 1818 bp, synthetic construct
  misc_feature 1..1818: note = Description of Artificial Sequence: Synthetic coding sequence
  source 1..1818: mol_type = other DNA
atggccctgcctgcctgtgctgtgcgggagtttgagcccccccggcagcctgagcggggggcccctgtgaggaccacctgccccaggaggcacagccgggtggaggccgagctggccgccagcaggcctggctctgtggccgcctctgtgcgggccggccccccccggggcgtgagccacggcttccacacccggcccctgctggacaagcccaggaaggccagcagcagcctggccggggccgcctgtgcccccctgtttgccctgctgagccggggcagaagaagaaggatgcacgtgctgcggcggcgctgggacctgggcagcctgtgccgggccctgctgacccggggcctggccgccctgggccacagcctgaagcacgtgctgggcgccatcttcagcaagatcttcggccccatggcctctgtgggcaacatggatgagaagagcaacaagctgctgctggccctggtgatgctgttcctgtttgctgtgattgtgctgcagtatgtgtgccccggcacagagtgccagctgctgcggctgcaggccttcagcagccctgtgcctgacccctacagaagtgaagatgagagcagcgccaggtttgtgccccgctacaacttcaccaggggggacctgctgaggaaggtggactttgacatcaagggagatgacctgattgtgttcctgcacatccagaagacaggaggcaccaccttcggccgccacctggtgaggaacatccagctggagcagccctgtgaatgtcgggtgggccagaagaagtgcacctgccacaggcctgggaagcgggagacctggctgttcagccgcttcagcacaggctggagctgtggcctgcatgctgactggacagagctgaccagctgtgtgcccagcgtggtggatggcaagagagatgcccggctgcggcccagcaggaacttccactacatcaccatcctgcgggaccctgtgagccgctacctgtctgagtggaggcatgtgcagagaggagccacctggaaggccagcctgcacgtgtgtgatggccggccccccaccagcgaggagctgcccagctgctacacaggagatgactggagcggctgccccctgaaggagttcatggactgcccctacaacctggccaacaaccggcaggtgaggatgctgagtgacctgaccctggtgggctgctacaacctgtctgtgatgcctgagaagcagaggaacaaggtgctgctggagagcgccaagagcaacctgaagcacatggccttcttcggcctgacagagttccagaggaagacccagtacctgtttgagaagaccttcaacatgaacttcatcagccccttcacccagtacaacaccacccgggccagctctgtggagatcaatgaggagatccagaagagaattgagggcctgaacttcctggacatggagctgtacagctatgccaaggacctcttcctgcagcgctaccagttcatgaggcagaaggagcaccaggaggcccggaggaagaggcaggagcagaggaagttcctgaagggccgcctgctgcagacccacttccagagccagggccagggccagagccagaaccccaaccagaaccagagccagaaccccaaccccaatgccaaccagaacctgacccagaacctgatgcagaacctgacccagagcctgagccagaaggaaaatcgggagagccccaagcagaacagcggcaaggagcagaatgacaacaccagcaatggcaccaatgactacatcggctctgtggagaagtggaggtag

SEQ ID NO: 155116 - DNA, 1380 bp, synthetic construct
  misc_feature 1..1380: note = Description of Artificial Sequence: Synthetic coding sequence
  source 1..1380: mol_type = other DNA
atggatgagaagagcaacaagctgctgctggccctggtgatgctgttcctgtttgctgtgattgtgctgcagtatgtgtgccccggcacagagtgccagctgctgcggctgcaggccttcagcagccctgtgcctgacccctacagaagtgaagatgagagcagcgccaggtttgtgccccgctacaacttcaccaggggggacctgctgaggaaggtggactttgacatcaagggagatgacctgattgtgttcctgcacatccagaagacaggaggcaccaccttcggccgccacctggtgaggaacatccagctggagcagccctgtgaatgtcgggtgggccagaagaagtgcacctgccacaggcctgggaagcgggagacctggctgttcagccgcttcagcacaggctggagctgtggcctgcatgctgactggacagagctgaccagctgtgtgcccagcgtggtggatggcaagagagatgcccggctgcggcccagcaggaacttccactacatcaccatcctgcgggaccctgtgagccgctacctgtctgagtggaggcatgtgcagagaggagccacctggaaggccagcctgcacgtgtgtgatggccggccccccaccagcgaggagctgcccagctgctacacaggagatgactggagcggctgccccctgaaggagttcatggactgcccctacaacctggccaacaaccggcaggtgaggatgctgagtgacctgaccctggtgggctgctacaacctgtctgtgatgcctgagaagcagaggaacaaggtgctgctggagagcgccaagagcaacctgaagcacatggccttcttcggcctgacagagttccagaggaagacccagtacctgtttgagaagaccttcaacatgaacttcatcagccccttcacccagtacaacaccacccgggccagctctgtggagatcaatgaggagatccagaagagaattgagggcctgaacttcctggacatggagctgtacagctatgccaaggacctcttcctgcagcgctaccagttcatgaggcagaaggagcaccaggaggcccggaggaagaggcaggagcagaggaagttcctgaagggccgcctgctgcagacccacttccagagccagggccagggccagagccagaaccccaaccagaaccagagccagaaccccaaccccaatgccaaccagaacctgacccagaacctgatgcagaacctgacccagagcctgagccagaaggaaaatcgggagagccccaagcagaacagcggcaaggagcagaatgacaacaccagcaatggcaccaatgactacatcggctctgtggagaagtggaggtag

SEQ ID NO: 155117 - DNA, 996 bp, synthetic construct
  misc_feature 1..996: note = Description of Artificial Sequence: Synthetic coding sequence
  source 1..996: mol_type = other DNA
atgctgctgaagcacaacgggaagctgctgctcttctacctgctgagctaccaggccctggccagtgactggttctactgcagcttcaaccgctggaggatcttccagatcctggatgctgccaggaacttccactacatcaccatcctgcgggaccctgtgagccgctacctgtctgagtggaggcatgtgcagagaggagccacctggaaggccagcctgcacgtgtgtgatggccggccccccaccagcgaggagctgcccagctgctacacaggagatgactggagcggctgccccctgaaggagttcatggactgcccctacaacctggccaacaaccggcaggtgaggatgctgagtgacctgaccctggtgggctgctacaacctgtctgtgatgcctgagaagcagaggaacaaggtgctgctggagagcgccaagagcaacctgaagcacatggccttcttcggcctgacagagttccagaggaagacccagtacctgtttgagaagaccttcaacatgaacttcatcagccccttcacccagtacaacaccacccgggccagctctgtggagatcaatgaggagatccagaagagaattgagggcctgaacttcctggacatggagctgtacagctatgccaaggacctcttcctgcagcgctaccagttcatgaggcagaaggagcaccaggaggcccggaggaagaggcaggagcagaggaagttcctgaagggccgcctgctgcagacccacttccagagccagggccagggccagagccagaaccccaaccagaaccagagccagaaccccaaccccaatgccaaccagaacctgacccagaacctgatgcagaacctgacccagagcctgagccagaaggaaaatcgggagagccccaagcagaacagcggcaaggagcagaatgacaacaccagcaatggcaccaatgactacatcggctctgtggagaagtggaggtag

SEQ ID NO: 155118 - DNA, 1938 bp, synthetic construct
  misc_feature 1..1938: note = Description of Artificial Sequence: Synthetic coding sequence
  source 1..1938: mol_type = other DNA
atggccctgcctgcctgtgctgtgcgggagtttgagcccccccggcagcctgagcggggggcccctgtgaggaccacctgccccaggaggcacagccgggtggaggccgagctggccgccagcaggcctggctctgtggccgcctctgtgcgggccggccccccccggggcgtgagccacggcttccacacccggcccctgctggacaagcccaggaaggccagcagcagcctggccggggccgcctgtgcccccctgtttgccctgctgagccggggcagaagaagaaggatgcacgtgctgcggcggcgctgggacctgggcagcctgtgccgggccctgctgacccggggcctggccgccctgggccacagcctgaagcacgtgctgggcgccatcttcagcaagatcttcggccccatggcctctgtgggcaacatggatgagaagagcaacaagctgctgctggccctggtgatgctgttcctgtttgctgtgattgtgctgcagtatgtgtgccccggcacagagtgccagctgctgcggctgcaggccttcagcagccctgtgcctgacccctacagaagtgaagatgagagcagcgccaggtttgtgccccgctacaacttcaccaggggggacctgctgaggaaggtggactttgacatcaagggagatgacctgattgtgttcctgcacatccagaagacaggaggcaccaccttcggccgccacctggtgaggaacatccagctggagcagccctgtgaatgtcgggtgggccagaagaagtgcacctgccacaggcctgggaagcgggagacctggctgttcagccgcttcagcacaggctggagctgtggcctgcatgctgactggacagagctgaccagctgtgtgcccagcgtggtggatggcaagagagatgcccggctgcggcccagccgctggaggatcttccagatcctggatgctgccagcaaggacaagaggggcagccccaacaccaatgctggggccaacagccccagcagcaccaagaccaggaacaccagcaagagcggcaagaacttccactacatcaccatcctgcgggaccctgtgagccgctacctgtctgagtggaggcatgtgcagagaggagccacctggaaggccagcctgcacgtgtgtgatggccggccccccaccagcgaggagctgcccagctgctacacaggagatgactggagcggctgccccctgaaggagttcatggactgcccctacaacctggccaacaaccggcaggtgaggatgctgagtgacctgaccctggtgggctgctacaacctgtctgtgatgcctgagaagcagaggaacaaggtgctgctggagagcgccaagagcaacctgaagcacatggccttcttcggcctgacagagttccagaggaagacccagtacctgtttgagaagaccttcaacatgaacttcatcagccccttcacccagtacaacaccacccgggccagctctgtggagatcaatgaggagatccagaagagaattgagggcctgaacttcctggacatggagctgtacagctatgccaaggacctcttcctgcagcgctaccagttcatgaggcagaaggagcaccaggaggcccggaggaagaggcaggagcagaggaagttcctgaagggccgcctgctgcagacccacttccagagccagggccagggccagagccagaaccccaaccagaaccagagccagaaccccaaccccaatgccaaccagaacctgacccagaacctgatgcagaacctgacccagagcctgagccagaaggaaaatcgggagagccccaagcagaacagcggcaaggagcagaatgacaacaccagcaatggcaccaatgactacatcggctctgtggagaagtggaggtag

SEQ ID NO: 155119 - DNA, 1416 bp, synthetic construct
  misc_feature 1..1416: note = Description of Artificial Sequence: Synthetic coding sequence
  source 1..1416: mol_type = other DNA
atggatgagcgcttcaacaagtggctgctgacccctgtgctgaccctgctgtttgtggtgatcatgtaccagtatgtgagccccagctgcaccagcagctgcaccaactttggagagcagcccagggctggggaggccggccccccagctgtgcccggccctgcccggcgggcccaggcccctcctgaggagtgggagcggcggccccagctgcccccaccaccccggggccccccagagggccccagaggagctgctgcccctgaggaggaggatgaggagcccggggacccccgggagggggaggaggaggaggaggaggatgagccagaccctgaggccccagaaaatggcagcctgcccaggtttgtgccccgcttcaacttcagcctgaaggacctgaccaggtttgtggacttcaacatcaagggcagagatgtgattgtgttcctgcacatccagaagacaggaggcaccaccttcggccgccacctggtgaagaacatccggctggagcagccctgcagctgcaaggccggccagaagaagtgcacctgccacaggcctgggaagaaggagacctggctgttcagccgcttcagcacaggctggagctgtggcctgcacgccgactggacagagctgaccaactgtgtgcctgccatcatggagaagaaggactgccccaggaaccacagccacaccaggaacttctactacatcaccatgctgcgggaccctgtgagccgctacctgtctgagtggaagcacgtgcagagaggagccacctggaagaccagcctgcacatgtgtgatggccgcagccccaccccagatgagctgcccacctgctacccaggagatgactggagcggcgtgtccctgcgggagttcatggactgcacctacaacctggccaacaaccggcaggtgaggatgctggccgacctgagcctggtgggctgctacaacctgaccttcatgaatgaaagtgaaagaaacaccatcctgctgcagagcgccaagaacaacctgaagaacatggccttcttcggcctgacagagttccagaggaagacccagttcctgtttgagaggaccttcaacctgaagttcatcagccccttcacccagttcaacatcacccgggccagcaatgtggagatcaatgaaggagcccggcagagaattgaggacctgaacttcctggacatgcagctgtatgaatatgccaaggacctcttccagcagcgctaccaccacaccaagcagctggagcaccagagggaccggcagaagaggcgggaggagcggcggctgcagcgggagcaccgggaccaccagtggcccaaggaggatggagctgctgagggcaccgtgacagaggactacaacagccaggtggtgcgctggtag

SEQ ID NO: 155120 - DNA, 543 bp, synthetic construct
  misc_feature 1..543: note = Description of Artificial Sequence: Synthetic coding sequence
  source 1..543: mol_type = other DNA
tgagcccagaccccacctcctcctcctgctgctgtggccgtggccgtgacccctgtgccccagttcccccgggcctgcacagaagctgagtttgcctgccacagctacaatgaatgtgtggccctggagtaccgctgtgaccggcggccagactgccgggacatgtctgatgagctgaactgtgaggagcctgtgctgggcatcagccccaccttcagcctgctggtggagaccaccagcctgccccccaggcctgagaccaccatcatgaggcagccccctgtgacccacgccccccagcccctgctgcccggctctgtgcggcccctgccctgtggcccccaggaggccgcctgcagaaatggccactgcatcccccgggactacctgtgtgatggccaggaggactgtgaagatggcagtgatgagctggactgtggccccccaccaccctgtgagcccaatgagttcccctgtggaaatggccactgtgccctgaagctgtggaggtgtgatggagactttgactgtgaggacagatag

SEQ ID NO: 155121 - DNA, 285 bp, synthetic construct
  misc_feature 1..285: note = Description of Artificial Sequence: Synthetic coding sequence
  source 1..285: mol_type = other DNA
tgaggccacccccacagccccagcagtggagctgcctgggccgccgccttcctgggcggccggcccccaggcaccagctgctgcaccctgtctgtgcagcccctgcggacccaggccgccacagctgctggcagccccacccgctgggcccagccccggcccctgcccagctgcagcagcaagaaccctgagctgggccctgagctgcccagagatgtgtacatgcctggcccctggaccctgggggagggccctggccagtgcccagctggctaccccaggtag

SEQ ID NO: 155122 - DNA, 13176 bp, synthetic construct
  misc_feature 1..13176: note = Description of Artificial Sequence: Synthetic coding sequence
  source 1..13176: mol_type = other DNA
atgggctggagggctgctggggccctgctgctggccctgctgctgcacggccgcctgctggccgtgacccacggcctgcgggcctatgatggcctgagcctgcctgaggacatcgagaccgtgacagccagccagatgcgctggacccacagctacctgagtgatgatgaggacatgctggccgacagcatctctggagatgacctgggcagcggggacctgggcagcggggacttccagatggtgtacttccgggccctggtgaacttcaccaggagcattgagtacagcccccagctggaggatgctggcagccgggagttccgggaggtgtctgaggccgtggtggacaccctggagagcgagtacctgaagatccctggggaccaggtggtgtctgtggtgttcatcaaggagctggatggctgggtgtttgtggagctggatgtgggcagcgagggcaatgctgatggagcccagatccaggagatgctgctgcgggtcatcagcagcggctctgtggccagctatgtgaccagcccccagggcttccagttccggcggctgggcaccgtgccccagttcccccgggcctgcacagaggccgagtttgcctgccacagctacaatgaatgtgtggccctggagtaccgctgtgacagaagaccagactgccgggacatgtctgatgagctgaactgtgaggagcctgtgctgggcatcagccccaccttcagcctgctggtggagaccaccagcctgccccccaggcctgagaccaccatcatgaggcagccccctgtgacccacgccccccagcccctgctgcccggctctgtgcggcccctgccctgtggcccccaggaggccgcctgcagaaatggccactgcatcccccgggactacctgtgtgatggccaggaggactgtgaagatggcagtgatgagctggactgtggccccccaccaccctgtgagcccaatgagttcccctgtggaaatggccactgtgccctgaagctgtggaggtgtgatggagactttgactgtgaggacagaacagatgaggccaactgccccaccaagaggcctgaggaggtgtgtggccccacccagttccgctgtgtgtccaccaacatgtgcatcccagccagcttccactgtgatgaggagagtgactgcccagacagaagtgatgaatttggctgcatgccaccccaggtggtgaccccaccccgggagagcatccaggccagccggggccagacagtgaccttcacctgtgtggccatcggcgtgcccacccccatcatcaactggaggctgaactggggccacatccccagccacccccgggtgacagtgaccagcgagggcggccggggcaccctcatcatcagagatgtgaaggagagtgaccagggcgcctacacctgtgaggccatgaatgcccggggcatggtgtttggcatcccagatggagtgctggagctggtgccccagaggggcccctgcccagatggccacttctacctggagcacagcgctgcctgcctgccctgcttctgcttcggcatcacctctgtgtgccagagcacccggcgcttccgggaccagatccggctgcgctttgaccagccagatgacttcaagggcgtgaatgtgaccatgcctgcccagcccggcaccccacccctgagcagcacccagctgcagattgaccccagcctgcacgagttccagctggtggacctgagccgccgcttcctggtgcatgacagcttctgggccctgcctgagcagttcctgggcaacaaggtggacagctatggaggcagcctgcgctacaacgtgcgctatgagctggcccggggcatgctggagcctgtgcagaggccagatgtggtgctgatgggcgccggctaccgcctgctgagccggggccacacccccacccagcccggggccctgaaccagaggcaggtgcagttcagcgaggagcactgggtgcatgaaagtggccggcctgtgcagagagctgagctgctgcaggtgctgcagagcctggaggccgtgctgatccagacagtgtacaacaccaagatggcctctgtgggcctgagtgacatcgccatggacaccaccgtgacccacgccaccagccacggccgggcccacagcgtggaggagtgccgctgccccatcggctacagcggcctgagctgtgagagctgtgatgcccacttcaccagggtgcctgggggcccctacctgggcacctgcagcggctgcaactgcaatggacatgccagcagctgtgaccctgtgtatggccactgcctgaactgccagcacaacacagagggcccccagtgcaacaagtgcaaggccggcttctttggagatgccatgaaggccacagccaccagctgccggccctgcccctgcccctacattgatgccagccgccgcttcagtgacacctgcttcctggacacagatggccaggccacctgtgatgcctgtgcccctggctacacaggaagaagatgtgagagctgtgcccctggctatgagggcaaccccatccagcccggcggcaagtgcaggcctgtgaaccaggagatcgtgcgctgtgatgagcggggctccatgggcaccagcggggaggcctgccgctgcaagaacaacgtggtgggccgcctgtgcaatgaatgtgctgatggcagcttccacctgagcaccaggaacccagatggctgcctgaagtgcttctgcatgggcgtgagccgccactgcaccagcagctcctggagccgggcccagctgcacggggccagcgaggagcccggccacttcagcctgaccaatgctgccagcacccacaccaccaatgaaggcatcttcagccccaccccaggagagctgggcttcagcagcttccaccggctgctgagcggcccctacttctggagcctgcccagccgcttcctgggggacaaggtgaccagctatggaggagagctgcgcttcaccgtgacccagaggagccagcccggcagcacccccctgcacggccagcccctggtggtgctgcagggcaacaacatcatcctggagcaccacgtggcccaggagcccagccctggccagcccagcaccttcatcgtgcccttccgggagcaggcctggcagaggccagatggccagcctgccacccgggagcacctgctgatggccctggccggcatcgacaccctgctgatccgggccagctatgcccagcagcctgctgagagccgggtgtctggcatctccatggatgtggccgtgcctgaggagaccggccaggaccctgccctggaggtggagcagtgcagctgccccccaggctaccggggccccagctgccaggactgtgacaccggctacaccaggaccccatctggcctgtacctgggcacctgtgagcgctgcagctgccacggccacagcgaggcctgtgagcctgagaccggggcctgccagggctgccagcaccacacagagggcccccgctgtgagcagtgccagcccggctactatggagatgcccagaggggcaccccccaggactgccagctgtgcccctgctacggggaccctgctgctggccaggccgcccacacctgcttcctggacacagatggccaccccacctgtgatgcctgcagccctggccacagcggccgccactgtgagcgctgtgcccctggctactacggcaaccccagccagggccagccctgccagagggacagccaggtgcccggccccatcggctgcaactgtgacccccagggctctgtgagcagccagtgtgatgctgctggccagtgccagtgcaaggcccaggtggagggcctgacctgcagccactgccggccccaccacttccacctgagcgccagcaacccagatggctgcctgccctgcttctgcatgggcatcacccagcagtgtgccagcagcgcctacaccaggcacctgatcagcacccactttgcccctggggacttccagggctttgccctggtgaacccccagaggaacagccggctgaccggggagttcaccgtggagcctgtgcctgagggcgcccagctgagctttggaaactttgcccagctgggccacgagagcttctactggcagctgcctgagacctaccagggcgacaaggtggccgcctatggaggcaagctgcgctacaccctgagctacacagctggcccccagggcagccccctgagtgaccctgatgtgcagatcaccggcaacaacatcatgctggtggccagccagcctgccctgcagggccctgagcggcgctcctatgagatcatgttccgggaggagttctggaggaggccagatggccagcctgccacccgggagcacctgctgatggccctggccgacctggatgagctgctgatccgggccaccttcagctctgtgcccctggccgccagcatctctgctgtgtccctggaggtggcccagcccggccccagcaaccggccccgggccctggaggtggaggagtgccgctgccccccaggctacatcggcctgagctgccaggactgtgcccctggctacaccaggactggaagtggcctgtacctgggccactgtgagctgtgtgagtgcaatggccacagcgacctgtgccaccctgagaccggggcctgcagccagtgccagcacaatgctgctggggagttctgtgagctgtgtgcccctggctactatggagatgccacagctggcaccccagaggactgccagccctgtgcctgccccctgaccaaccctgagaacatgttcagcaggacctgtgagagcctgggcgccggcggctaccgctgcacagcctgtgagcccggctacacaggccagtactgtgagcagtgtggccctggctacgtgggcaaccccagcgtgcagggcggccagtgcctgcctgagaccaaccaggcccccctggtggtggaggtgcacccagcccggagcatcgtgccccagggcggcagccacagcctgcgctgccaggtgtctggcagccccccccactacttctactggagcagagaagatggccggcctgtgcccagcggcacccagcagaggcaccagggcagcgagctgcacttccccagcgtgcagcccagtgatgctggggtgtacatctgcacctgcaggaacctgcaccagagcaacaccagcagagctgagctgctggtgacagaggcccccagcaagcccatcaccgtgacagtggaggagcagaggagccagagcgtgcggcctggagcagatgtgaccttcatctgcacagccaagagcaagagccctgcctacaccctggtgtggacccggctgcacaacgggaagctgcccacccgggccatggacttcaacggcatcctgaccatcagaaatgtgcagctgagtgatgctggcacctacgtgtgcaccggcagcaacatgtttgccatggaccagggcacagccaccctgcacgtgcaggccagcggcaccctgagcgcccctgtggtgtccatccaccccccccagctgactgtgcagcccggccagctggccgagttccgctgcagcgccaccggcagccccacccccaccctggagtggacaggaggccctgggggccagctgcctgccaaggcccagatccacggcggcatcctgcggctgcctgctgtggagcccacagaccaggcccagtacctgtgccgggcccacagcagcgctggccagcaggtggcccgggctgtgctgcacgtgcatggaggcggcggcccccgggtgcaggtgtccccagagaggacccaggtgcatgctggccgcacagtgcggctgtactgcagagctgctggggtgcccagcgccaccatcacctggaggaaggagggcggcagcctgcccccccaggcccggtctgagaggacagacatcgccaccctgctgatcccagccatcaccacagcagatgctggcttctacctgtgtgtggccaccagccctgctggaacagcccaggcccgcatccaggtggtggtgctgagcgccagtgatgccagccccccacctgtgaagattgagagcagcagccccagcgtgacagagggccagaccctggacctgaactgtgtggtggccggcagcgcccacgcccaggtgacctggtaccgccggggcggcagcctgcccccccacacccaggtgcacggcagccggctgcggctgccccaggtgtccccagctgacagcggggagtatgtgtgccgggtggagaatggaagtggccccaaggaggccagcatcaccgtgtctgtgctgcacggcacccacagcggccccagctacacccctgtgcccggcagcacccggcccatccgcatcgagcccagcagcagccacgtggccgagggccagaccctggacctgaactgtgtggtgcccggccaggcccacgcccaggtgacctggcacaagagaggaggcagcctgcctgcccggcaccagacccacggcagcctgctgcggctgcaccaggtgaccccagctgacagcggggagtatgtgtgccacgtggtgggcaccagcggccccctggaggcctctgtgctggtgaccatcgaggccagcgtcatccctggccccatcccccctgtgagaattgagagcagcagcagcacagtggccgagggccagaccctggacctgagctgtgtggtggccggccaggcccacgcccaggtgacctggtacaagaggggcggcagcctgcctgcccggcaccaggtgcggggcagccggctgtacatcttccaggccagccctgcagatgctggccagtatgtgtgccgggccagcaatggcatggaggccagcatcaccgtgacagtgacaggcacccagggcgccaacctggcctacccagctggcagcacccagcccatcagaattgagcccagcagcagccaggtggccgagggccagaccctggacctgaactgtgtggtgcccggccagagccacgcccaggtgacctggcacaagaggggcggcagcctgcctgtgcgccaccagacccacggcagcctgctgcggctgtaccaggccagccctgctgacagcggggagtatgtgtgccgggtgctgggcagctctgtgcccctggaggcctctgtgctggtgaccatcgagcctgctggctctgtgcctgccctgggcgtgacccccaccgtgagaattgagagcagcagcagccaggtggccgagggccagaccctggacctgaactgcctggtggccggccaggcccacgcccaggtgacctggcacaagaggggcggcagcctgcctgcccggcaccaggtgcacggcagccggctgcggctgctgcaggtgaccccagctgacagcggggagtatgtgtgccgggtggtgggcagcagcggcacccaggaggcctctgtgctggtgaccatccagcagaggctgagcggcagccacagccagggcgtggcctaccctgtgcgcatcgagagcagcagcgccagcctggccaacggccacaccctggacctgaactgcctggtggccagccaggccccccacaccatcacctggtacaagagaggaggcagcctgcccagccgccaccagatcgtgggcagccggctgcgcatcccccaggtgaccccagctgacagcggggagtatgtgtgccacgtgtccaatggagctggcagccgggagaccagcctcatcgtgaccatccagggcagcggcagcagccacgtgcccagcgtgagcccccccatccgcatcgagagcagcagccccaccgtggtggagggccagaccctggacctgaactgtgtggtggcccggcagccccaggccatcatcacctggtacaagagaggaggcagcctgcccagccgccaccagacccacggcagccacctgcggctgcaccagatgtctgtggccgacagcggggagtatgtgtgccgggccaacaacaacattgatgccctggaggccagcatcgtcatctctgtgagccccagcgctggcagccccagcgcccctggcagctccatgcccatcagaattgagagcagcagcagccacgtggccgagggggagaccctggacctgaactgtgtggtgcccggccaggcccacgcccaggtgacctggcacaagaggggcggcagcctgcccagccaccaccagacccggggcagccggctgcggctgcaccacgtgtccccagctgacagcggggagtatgtgtgccgggtgatgggcagcagcggccccctggaggcctctgtgctggtgaccatcgaggccagcggcagcagcgctgtgcacgtgcctgcccctggaggagccccacccatcagaattgagcccagcagcagccgggtggccgagggccagaccctggacctgaagtgtgtggtgcccggccaggcccacgcccaggtgacctggcacaagaggggcggcaacctgcctgcccggcaccaggtgcacggccccctgctgcggctgaaccaggtgtccccagctgacagcggggagtacagctgccaggtgacaggcagcagcggcaccctggaggcctctgtgctggtgaccatcgagcccagcagccctggccccatcccagcccctggcctggcccagcccatctacatcgaggccagcagcagccacgtgacagagggccagaccctggacctgaactgtgtggtgcccggccaggcccacgcccaggtgacctggtacaagaggggcggcagcctgcctgcccggcaccagacccacggcagccagctgcggctgcacctggtgtccccagctgacagcggggagtatgtgtgcagagctgccagcggccctggccctgagcaggaggccagcttcaccgtgacagtgccccccagcgagggcagcagctaccgcctgcggagccctgtgatcagcattgacccccccagcagcacagtgcagcagggccaggatgccagcttcaagtgcctgattcatgatggagctgcccccatcagcctggagtggaagaccaggaaccaggagctggaggacaacgtgcacatcagccccaacggcagcatcatcaccatcgtgggcacccggcccagcaaccacggcacctaccgctgtgtggccagcaatgcctatggagtggcccagagcgtggtgaacctgtctgtgcacggccccccaacagtgtctgtgctgcctgagggccctgtgtgggtgaaggtgggcaaggctgtgaccctggagtgtgtgtctgctggggagcccaggagcagcgcccgctggacccgcatcagcagcaccccagccaagctggagcagaggacctacggcctgatggacagccatgctgtgctgcagatcagcagcgccaagcccagtgatgctggcacctacgtgtgcctggcccagaatgccctgggcacagcccagaagcaggtggaggtgattgtggacaccggggccatggcccctggggccccccaggtgcaggccgaggaggccgagctgactgtggaggccggccacacagccaccctgcgctgcagcgccaccggcagccctgcccccaccatccactggagcaagctgcggagccccctgccctggcagcaccggctggagggggacaccctcatcatcccccgggtggcccagcaggacagcggccagtacatctgcaatgccaccagccctgctggccatgctgaggccaccatcatcctgcacgtggagagccccccctatgccaccaccgtgcctgagcacgcctctgtgcaggccggggagaccgtgcagctgcagtgcctggcccacggcaccccacccctgaccttccagtggagccgggtgggcagcagcctgcccggccgggccacagccagaaatgagctgctgcactttgaaagagctgcccctgaggacagcggccgctaccgctgccgggtgaccaacaaggtgggcagcgctgaggcctttgcccagctgctggtgcagggccccccaggcagcctgcctgccaccagcatcccagctggcagcacccccaccgtgcaggtgaccccccagctggagaccaagagcattggagcctctgtggagttccactgtgctgtgcccagcgaccggggcacccagctgcgctggttcaaggagggcggccagctgcccccaggccacagcgtgcaggatggagtgctgcgcatccagaacctggaccagagctgccagggcacctacatctgccaggcccacggcccctggggcaaggcccaggccagcgcccagctggtgatccaggccctgcccagcgtgctgatcaacatccgcacctctgtgcagacagtggtggtgggccatgctgtggagtttgaatgtctggccctgggggaccccaagccccaggtgacctggagcaaggtgggcggccacctgcggcccggcatcgtgcagagcggcggcgtggtgcgcatcgcccacgtggagctggctgatgctggccagtaccgctgcacagccaccaatgctgctggcaccacccagagccacgtgctgctgctggtgcaggccctgccccagatctccatgccccaggaggtgcgggtgcctgctggcagcgctgctgtgttcccctgcatcgccagcggctaccccaccccagacatctcctggagcaagctggatggcagcctgcccccagacagccggctggagaacaacatgctgatgctgcccagcgtgcggccccaggatgctggcacctacgtgtgcacagccaccaaccggcagggcaaggtgaaggcctttgcccacctgcaggtgcctgagcgggtggtgccctacttcacccagaccccctacagcttcctgcccctgcccaccatcaaggatgcctacaggaagtttgagatcaagatcaccttccggccagacagcgcagatggcatgctgctgtacaacggccagaagagggtgcccggcagccccaccaacctggccaaccggcagcctgacttcatcagctttggcctggtgggcggccggcctgagttccgctttgatgctggcagcggcatggccaccatccgccaccccacccccctggccctgggccacttccacacagtgaccctgctgcggagcctgacccagggcagcctcatcgtgggggacctggcccctgtgaatggcaccagccagggcaagttccagggcctggacctgaatgaggagctgtacctgggcggctacccagactatggagccatccccaaggccggcctgagcagcggcttcatcggctgtgtgcgggagctgcgcatccagggcgaggagatcgtgttccatgacctgaacctgacagcccacggcatcagccactgccccacctgccgggaccggccctgccagaatggaggccagtgccacgacagcgagagcagcagctatgtgtgtgtgtgcccagctggcttcaccggcagccgctgtgagcacagccaggccctgcactgccaccctgaggcctgtggcccagatgccacctgtgtgaacagaccagatggccggggctacacctgccgctgccacctgggccgcagcggcctgcgctgtgaggagggcgtgacagtgaccacccccagcctgtctggagctggcagctacctggccctgcctgccctgaccaacacccaccacgagctgcggctggatgtggagttcaagcccctggccccagatggagtgctgctcttcagcggcggcaagagcggccctgtggaggactttgtgtccctggccatggtgggcggccacctggagttccgctatgagctgggcagcggcctggccgtgctgcggtctgctgagcccctggccctgggccgctggcaccgggtgtctgctgagcggctgaacaaggatggcagcctgcgggtgaatggaggccggcctgtgctgcggagcagccctgggaagagccagggcctgaacctgcacaccctgctgtacctgggcggcgtggagcccagcgtgcccctgagccctgccaccaacatgtctgcccacttccggggctgtgtgggggaggtgtctgtgaatggcaagaggctggacctgacctacagcttcctgggcagccagggcatcggccagtgctatgacagcagcccctgtgagcggcagccctgccagcacggggccacctgcatgcctgctggggagtatgagttccagtgcctgtgcagagatggcttcaagggggacctgtgtgagcacgaggagaacccctgccagctgcgggagccctgcctgcatggaggcacctgccagggcacccgctgcctgtgcctgcccggcttcagcggcccccgctgccagcagggcagcggccatggaattgctgagagtgactggcacctggagggcagcggcggcaatgatgcccctggccagtacggggcctacttccatgatgatggcttcctggccttccctggccacgtgttcagccgcagcctgcctgaggtgcctgagaccatcgagctggaggtgaggaccagcacagccagcggcctgctgctgtggcagggcgtggaggtgggggaggccggccagggcaaggacttcatcagcctgggcctgcaggacggccacctggtgttccgctaccagctgggcagcggggaggcccggctggtgtctgaggaccccatcaatgatggagagtggcaccgggtgacagccctgcgggagggcagaagaggcagcatccaggtggatggagaggagctggtgtctggccgcagccctggccccaacgtggccgtgaatgccaagggctctgtgtacatcggcggggccccagatgtggccaccctgaccggcggccgcttcagcagcggcatcaccggctgtgtgaagaacctggtgctgcacagcgcccggcctggggcccccccaccccagcccctggacctgcagcaccgggcccaggccggggccaacacccggccctgccccagctag

SEQ ID NO: 155123 - DNA, 720 bp, synthetic construct
  misc_feature 1..720: note = Description of Artificial Sequence: Synthetic coding sequence
  source 1..720: mol_type = other DNA
gtcacccacggcctgcgggcctatgatggcctgagcctgcctgaagatattgaaacagtgacagccagccagatgcgctggacccacagctacctgagtgatgatgaggacatgctggccgacagcatctctggagatgacctgggcagcggggacctgggcagcggggacttccagatgggctcctggatggccggcttcctgtggagctggatgtgggccaggaagggcatgaggatgggcctgcgcttccgccgctgctgcagcggcagcagccctgctgccctgtggccacccaccagccccctgccccgggacagcagcagtgatgcctgggcccagtgccccagcagccaggagcccgcccggcggcccagcctgcctgccacagccaccatgtctgtgtggccctggagcattgctgtgactggaggccccacagctggcacctgcctgatgagcagcatcgtgcgcagccagagctgggtgtctgccccccacagcctgagcctgtggaggaggcacctgtacagacctggccagaggcagcccagctgtgacagccaccagagccccaccctgctgagcccctgcttccctgtgcccagcggcccctgccctgtgggcccccggcggccccatgctgccatgggcacagccagccctgagaccaccagcgccacagacagaagaacagccaggacagctgccatgtcctag

SEQ ID NO: 155124 - DNA, 567 bp, synthetic construct
  misc_feature 1..567: note = Description of Artificial Sequence: Synthetic coding sequence
  source 1..567: mol_type = other DNA
atgaatgctggggcctctgtgctgaccttcccctgggccgtgtatggcctgccccgggcccggcctgctgtgacagacctgaccggccccctgccccccagcagccctgccctgcccagcgtgctgatcaacatccgcacctctgtgcagacagtggtggtgggccatgctgtggagtttgaatgtctggccctgggggaccccaagccccaggtgacctggagcaaggtgggcggccacctgcggcccggcatcgtgcagagcggcggcgtggtgcgcatcgcccacgtggagctggctgatgctggccagtaccgctgcacagccaccaatgctgctggcaccacccagagccacgtgctgctgctggtgcaggccctgccccagatctccatgccccaggaggtgcgggtgcctgctggcagcgctgctgtgttcccctgcatcgccagcggctaccccaccccagacatctcctggagcaagctggatggcagcctgcccccagacagccggctggagaacaacatgctgatgctgcccagcgtgcggccccaggatgcctag

SEQ ID NO: 155125 - DNA, 594 bp, synthetic construct
  misc_feature 1..594: note = Description of Artificial Sequence: Synthetic coding sequence
  source 1..594: mol_type = other DNA
tgaacacccagcggcctgtacctgggcacctgtgagcgctgcagctgccacggccacagcgaggcctgtgagcctgagactggagcctgccagggctgccagcaccacacagagggcccccgctgtgagcagtgccagcccggctactatggagatgcccagaggggcaccccccaggactgccagctgtgcccctgctatggagaccctgctgctggccaggccgcccacacctgcttcctggacacagatggccaccccacctgtgatgcctgcagccctggccacagcggccgccactgtgagcgctgtgcccctggctactacggcaaccccagccagggccagccctgccagagggacagccaggtgcccggccccatcggctgcaactgtgacccccagggctctgtgagcagccagtgtgatgctgctggccagtgccagtgcaaggtgagccccaacccctgcccctgtggggcctgcagcgcccccctgccccggccctgtggggagatccggcagcacctggtggaggccgagacctgggcctggggcgccggccatggaggccagggccggggctgcccctag

SEQ ID NO: 155126 - DNA, 492 bp, synthetic construct
  misc_feature 1..492: note = Description of Artificial Sequence: Synthetic coding sequence
  source 1..492: mol_type = other DNA
cctcctgtgaagattgagagcagcagccccagcgtgacagagggccagaccctggacctgaactgtgtggtggccggcagcgcccacgcccaggtgacctggtaccgccggggcggcagcctgcccccccacacccaggtgcacggcagccggctgcggctgccccaggtgtccccagctgacagcggggagtatgtgtgccgggtggagaatggaagtggccccaaggaggccagcatcaccgtgtcctactgccccccagcctggagctggtgtgtgcccggcagcacccggcccatccgcatcgagcccagcagcagccacgtggccgagggccagaccctggacctgaactgtgtggtgcccggccaggcccacgcccaggtgacctggcacaagagaggaggcagcctgcctgcccggcaccagacccacggcagcctgctgcggctgcaccaggtgaccccagctgacagcggggagtatgtgtag

SEQ ID NO: 155127 - DNA, 573 bp, synthetic construct
  misc_feature 1..573: note = Description of Artificial Sequence: Synthetic coding sequence
  source 1..573: mol_type = other DNA
cctgaggacatcgagaccgtgacagccagccagatgcgctggacccacagctacctgagtgatgatgaggacatgctggccgacagcatctctggagatgacctgggcagcggggacctgggcagcggggacttccagatggtgtacttccgggccctggtgaacttcaccaggagcattgagtacagcccccagctggaggatgctggcagccgggagttccgggaggtgtctgaggccgtggtggacaccctggagagcgagtacctgaagatccctggggaccaggtggtgtctgtggtgttcatcaaggagctggatggctgggtgtttgtggagctggatgtgggcagcgagggcaatgctgatggagcccagatccaggagatgctgctgcgggtcatcagcagcggctctgtggccagctatgtgaccagcccccagggcttccagttccggcggctgggcactggagagcccatcctggtgtctggcatcgccagcagccggctggtgggcagccccttctctgtgtctgccatcggcagccagctgggcctggcccaccactag

SEQ ID NO: 155128 - DNA, 624 bp, synthetic construct
  misc_feature 1..624: note = Description of Artificial Sequence: Synthetic coding sequence
  source 1..624: mol_type = other DNA
ggggagagccgggagggccggggctaccggcaggtggcccagagggtggccgagaggagccctgtgcccagcctgctgagccacagcggctgtgtggtgcacacccggctgagccctgtgcccagcgtgtccccacccatcagaattgagagcagcagccccaccgtggtggagggccagaccctggacctgaactgtgtggtggcccggcagccccaggccatcatcacctggtacaagaggggcggcagcctgcccagccgccaccagacccacggcagccacctgcggctgcaccagatgtctgtggccgacagcggggagtatgtgtgccgggccaacaacaacattgatgccctggaggccagcatcgtcatctctgtgagccccagcgctggcagccccagcgcccctggcagctccatgcccatccgcatcgagagcagcagcagccacgtggccgagggggagaccctggacctgaactgtgtggtgcccggccaggcccacgcccaggtgacctggcacaagagaggaggcagcctgcccagccaccaccagacccggggcagccggctgcggctgcaccacgtgtccccagctgacagcggggagtatgtgtag

SEQ ID NO: 155129 - DNA, 1104 bp, synthetic construct
  misc_feature 1..1104: note = Description of Artificial Sequence: Synthetic coding sequence
  source 1..1104: mol_type = other DNA
atgggctggaggcggggccgcggggccccccgcttcccagatggcatggccgccggccagaggaggagcagcctgagccggctgggcagccaggccgagggcctgctgaccagccagaccatgggcggccaggccgagaccctgctgaccagccagacaggctggctgctgggccggggctgcaacctgggcagccctgggggccaggtgtcctgggacaaggtgcgcatccctggggtgctgcagaggctgggcgtgacctactttgtggtggccgtgctggagctgctgtttgccaagcctgtgcctgagcactgtgccagcgagaggagctgcctgagcctgcgggacatcaccagctcctggccccagtggctgctgatcctggtgctggagggcctgtggctgggcctgaccttcctgctgcctgtgcccggctgccccaccggctacctgggccctgggggcattggagactttgggaagtaccccaactgcacaggaggagctgctggctacatcgaccggctgctgctgggagatgaccacctgtaccagcaccccagcagcgctgtgctgtaccacacagaggtggcctatgaccctgagggcatcctgggcaccatcaacagcatcgtgatggccttcctgggcgtgcaggccggcaagatcctgctgtactacaaggcccggaccaaggacatcctgatccgcttcaccgcctggtgctgcatcctgggcctcatctctgtggccctgaccaaggtgtctgaaaatgaaggcttcatccctgtgaacaagaacctgtggagcctgtcctatgtgaccaccctgagcagctttgccttcttcatcctgctggtgctgtaccctgtggtggatgtgaagggcctgtggacaggcacccccttcttctacccaggcatgaacagcatcctggtgtatgtgggccacgaggtgtttgagaactacttccccttccagtggaagctgaaggacaaccagagccacaaggagcacctgacccagaacatcgtggccacagccctgtgggtgctgattgcctacatcctgtacaggaagaagatcttctggaagatctag

SEQ ID NO: 155130 - DNA, 669 bp, synthetic construct
  misc_feature 1..669: note = Description of Artificial Sequence: Synthetic coding sequence
  source 1..669: mol_type = other DNA
atgtctggggccggccgggccctggccgccctgctgctggccgcctctgtgctgtctgctgccctgctggcccctgggggcagcagcggcagagatgcccaggccgccccaccccgggacctggacaagaagagacatgctgagctgaagatggaccaggccctgctgctgatccacaatgagctgctgtggaccaacctgactgtgtactggaagtctgagtgctgctaccactgcctcttccaggtgctggtgaatgtgccccagagccccaaggccggcaagcccagcgctgctgctgcctctgtgtccacccagcacggcagcatcctgcagctgaatgacaccctggaggagaaggaggtgtgccgcctggagtacagatttggagaatttggaaactacagcctgctggtgaagaacatccacaacggggtgtctgaaattgcctgtgacctggccgtgaatgaagatcctgtggacagcaacctgcctgtgtccatcgccttcctgattggcctggccgtcatcatcgtcatctccttcctgcggctgctgctgcgggtgctgctgtgccaccctggctggagcgctgtggcccccagccggctgacccccagcagcgccagccgggtgcacaccatcctgctgccccagcccccagagtag

SEQ ID NO: 155131 - DNA, 1908 bp, synthetic construct
  misc_feature 1..1908: note = Description of Artificial Sequence: Synthetic coding sequence
  source 1..1908: mol_type = other DNA
atgtctggggccggccgggccctggccgccctgctgctggccgcctctgtgctgtctgctgccctgctggcccctgggggcagcagcggcagagatgcccaggccgccccaccccgggacctggacaagaagagacatgctgagctgaagatggaccaggccctgctgctgatccacaatgagctgctgtggaccaacctgactgtgtactggaagtctgagtgctgctaccactgcctcttccaggtgctggtgaatgtgccccagagccccaaggccggcaagcccagcgctgctgctgcctctgtgtccacccagcacggcagcatcctgcagctgaatgacaccctggaggagaaggaggtgtgccgcctggagtacagatttggagaatttggaaactacagcctgctggtgaagaacatccacaacggggtgtctgaaattgcctgtgacctggccgtgaatgaagatcctgtggacagcaacctgcctgtgtccatcgccttcctgattggcctggccgtcatcatcgtcatctccttcctgcggctgctgctgagcctggatgacttcaacaactggatcagcaaggccatcagcagccgggagacagacaggctcatcaacagcgagctgggcagccccagcaggacagaccccctggatggagatgtgcagcctgccacctggaggctgagcgccctgcccccccggctgcggtctgtggacaccttccggggcatcgccctgatcctgatggtgtttgtgaactatggaggcggcaagtactggtacttcaagcacgcctcctggaatggcctgactgtggccgacctggtgttcccctggtttgtgttcatcatgggcagcagcatcttcctgtccatgaccagcatcctgcagaggggctgcagcaagttccggctgctgggcaagatcgcctggaggagcttcctgctgatctgcatcggcatcatcatcgtgaaccccaactactgcctgggccccctgtcctgggacaaggtgcgcatccctggggtgctgcagaggctgggcgtgacctactttgtggtggccgtgctggagctgctgtttgccaagcctgtgcctgagcactgtgccagcgagaggagctgcctgagcctgcgggacatcaccagctcctggccccagtggctgctgatcctggtgctggagggcctgtggctgggcctgaccttcctgctgcctgtgcccggctgccccaccggctacctgggccctgggggcattggagactttgggaagtaccccaactgcacaggaggagctgctggctacatcgaccggctgctgctgggagatgaccacctgtaccagcaccccagcagcgctgtgctgtaccacacagaggtggcctatgaccctgagggcatcctgggcaccatcaacagcatcgtgatggccttcctgggcgtgcaggccggcaagatcctgctgtactacaaggcccggaccaaggacatcctgatccgcttcaccgcctggtgctgcatcctgggcctcatctctgtggccctgaccaaggtgtctgaaaatgaaggcttcatccctgtgaacaagaacctgtggagcctgtcctatgtgaccaccctgagcagctttgccttcttcatcctgctggtgctgtaccctgtggtggatgtgaagggcctgtggacaggcacccccttcttctacccaggcatgaacagcatcctggtgtatgtgggccacgaggtgtttgagaactacttccccttccagtggaagctgaaggacaaccagagccacaaggagcacctgacccagaacatcgtggccacagccctgtgggtgctgattgcctacatcctgtacaggaagaagatcttctggaagatctag

SEQ ID NO: 155132 - DNA, 1992 bp, synthetic construct
  misc_feature 1..1992: note = Description of Artificial Sequence: Synthetic coding sequence
  source 1..1992: mol_type = other DNA
atgaccggggcccgggccagcgctgctgagcagaggcgggccggccgcagcggccaggcccgggctgctgagagagctgctggcatgtctggggccggccgggccctggccgccctgctgctggccgcctctgtgctgtctgctgccctgctggcccctgggggcagcagcggcagagatgcccaggccgccccaccccgggacctggacaagaagagacatgctgagctgaagatggaccaggccctgctgctgatccacaatgagctgctgtggaccaacctgactgtgtactggaagtctgagtgctgctaccactgcctcttccaggtgctggtgaatgtgccccagagccccaaggccggcaagcccagcgctgctgctgcctctgtgtccacccagcacggcagcatcctgcagctgaatgacaccctggaggagaaggaggtgtgccgcctggagtacagatttggagaatttggaaactacagcctgctggtgaagaacatccacaacggggtgtctgaaattgcctgtgacctggccgtgaatgaagatcctgtggacagcaacctgcctgtgtccatcgccttcctgattggcctggccgtcatcatcgtcatctccttcctgcggctgctgctgagcctggatgacttcaacaactggatcagcaaggccatcagcagccgggagacagacaggctcatcaacagcgagctgggcagccccagcaggacagaccccctggatggagatgtgcagcctgccacctggaggctgagcgccctgcccccccggctgcggtctgtggacaccttccggggcatcgccctgatcctgatggtgtttgtgaactatggaggcggcaagtactggtacttcaagcacgcctcctggaatggcctgactgtggccgacctggtgttcccctggtttgtgttcatcatgggcagcagcatcttcctgtccatgaccagcatcctgcagaggggctgcagcaagttccggctgctgggcaagatcgcctggaggagcttcctgctgatctgcatcggcatcatcatcgtgaaccccaactactgcctgggccccctgtcctgggacaaggtgcgcatccctggggtgctgcagaggctgggcgtgacctactttgtggtggccgtgctggagctgctgtttgccaagcctgtgcctgagcactgtgccagcgagaggagctgcctgagcctgcgggacatcaccagctcctggccccagtggctgctgatcctggtgctggagggcctgtggctgggcctgaccttcctgctgcctgtgcccggctgccccaccggctacctgggccctgggggcattggagactttgggaagtaccccaactgcacaggaggagctgctggctacatcgaccggctgctgctgggagatgaccacctgtaccagcaccccagcagcgctgtgctgtaccacacagaggtggcctatgaccctgagggcatcctgggcaccatcaacagcatcgtgatggccttcctgggcgtgcaggccggcaagatcctgctgtactacaaggcccggaccaaggacatcctgatccgcttcaccgcctggtgctgcatcctgggcctcatctctgtggccctgaccaaggtgtctgaaaatgaaggcttcatccctgtgaacaagaacctgtggagcctgtcctatgtgaccaccctgagcagctttgccttcttcatcctgctggtgctgtaccctgtggtggatgtgaagggcctgtggacaggcacccccttcttctacccaggcatgaacagcatcctggtgtatgtgggccacgaggtgtttgagaactacttccccttccagtggaagctgaaggacaaccagagccacaaggagcacctgacccagaacatcgtggccacagccctgtgggtgctgattgcctacatcctgtacaggaagaagatcttctggaagatctag

SEQ ID NO: 155133 - DNA, 1647 bp, synthetic construct
  misc_feature 1..1647: note = Description of Artificial Sequence: Synthetic coding sequence
  source 1..1647: mol_type = other DNA
atgagggtgctgtgtgccttccctgaggccatgcccagcagcaacagccggcccccagcctgcctggcccctggggccctgtacctggccctgctgctgcacctgagcctgagcagccaggccggggaccggcggcccctgcctgtggacagagctgctggcctgaaggagaagaccctcatcctgctggatgtgtccaccaagaaccctgtgaggacagtgaatgaaaacttcctgagcctgcagctggaccccagcatcatccatgatggctggctggacttcctgagcagcaagaggctggtgaccctggcccggggcctgagccctgccttcctgcgctttggaggcaagaggacagacttcctgcagttccagaacctgagaaatcctgccaagagccggggcggccctggccctgactactacctgaagaactatgaagatgacatcgtgcggagtgatgtggccctggacaagcagaagggctgcaagatcgcccagcacccagatgtgatgctggagctgcagcgggagaaggccgcccagatgcacctggtgctgctgaaggagcagttcagcaacacctacagcaacctgatcctgacagcccggagcctggacaagctgtacaactttgctgactgcagcggcctgcacctgatctttgccctgaatgccctgcggaggaaccccaacaacagctggaacagcagcagcgccctgagcctgctgaagtacagcgccagcaagaagtacaacatctcctgggagctgggcaatgagcccaacaactaccgcaccatgcacggccgggctgtgaatggcagccagctgggcaaggactacatccagctgaagagcctgctgcagcccatccgcatctacagccgggccagcctgtatggccccaacatcggccggcccaggaagaatgtcatcgccctgctggatggcttcatgaaggtggccggcagcacagtggatgctgtgacctggcagcactgctacattgatggccgggtggtgaaggtgatggacttcctgaagacccggctgctggacaccctgagtgaccagatcaggaagatccagaaggtggtgaacacctacaccccaggcaagaagatctggctggagggcgtggtgaccaccagcgctgggggcaccaacaacctgagtgacagctatgctgctggcttcctgtggctgaacaccctgggcatgctggccaaccagggcattgatgtggtgatccgccacagcttctttgaccacggctacaaccacctggtggaccagaacttcaaccccctgcctgactactggctgagcctgctgtacaagaggctcatcggccccaaggtgctggccgtgcacgtggccggcctgcagaggaagccccggcccggccgggtcatccgggacaagctgcgcatctatgcccactgcaccaaccaccacaaccacaactacgtgcggggcagcatcaccctcttcatcatcaacctgcacaggagcaggaagaagatcaagctggccggcaccctgcgggacaagctggtgcaccagtacctgctgcagccctacggccaggagggcctgaagagcaagacccagcgctgccagtactgcggcatcatctag

SEQ ID NO: 155134 - DNA, 1605 bp, synthetic construct
  misc_feature 1..1605: note = Description of Artificial Sequence: Synthetic coding sequence
  source 1..1605: mol_type = other DNA
atgagggtgctgtgtgccttccctgaggccatgcccagcagcaacagccggcccccagcctgcctggcccctggggccctgtacctggccctgctgctgcacctgagcctgagcagccaggccggggaccggcggcccctgcctgtggacagagctgctggcctgaaggagaagaccctcatcctgctggatgtgtccaccaagaaccctgtgaggacagtgaatgaaaacttcctgagcctgcagctggaccccagcatcatccatgatggctggctggacttcctgagcagcaagaggctggtgaccctggcccggggcctgagccctgccttcctgcgctttggaggcaagaggacagacttcctgcagttccagaacctgagaaatcctgccaagagccggggcggccctggccctgactactacctgaagaactatgaagatgacatcgtgcggagtgatgtggccctggacaagcagaagggctgcaagatcgcccagcacccagatgtgatgctggagctgcagcgggagaaggccgcccagatgcacctggtgctgctgaaggagcagttcagcaacacctacagcaacctgatcctgacagagcccaacaactaccgcaccatgcacggccgggctgtgaatggcagccagctgggcaaggactacatccagctgaagagcctgctgcagcccatccgcatctacagccgggccagcctgtatggccccaacatcggccggcccaggaagaatgtcatcgccctgctggatggcttcatgaaggtggccggcagcacagtggatgctgtgacctggcagcactgctacattgatggccgggtggtgaaggtgatggacttcctgaagacccggctgctggacaccctgagtgaccagatcaggaagatccagaaggtggtgaacacctacaccccaggcaagaagatctggctggagggcgtggtgaccaccagcgctgggggcaccaacaacctgagtgacagctatgctgctggcttcctgtggctgaacaccctgggcatgctggccaaccagggcattgatgtggtgatccgccacagcttctttgaccacggctacaaccacctggtggaccagaacttcaaccccctgcctgactactggctgagcctgctgtacaagaggctcatcggccccaaggtgctggccgtgcacgtggccggcctgcagaggaagccccggcccggccgggtcatccgggacaagctgcgcatctatgcccactgcaccaaccaccacaaccacaactacgtgcggggcagcatcaccctcttcatcatcaacctgcacaggagcaggaagaagatcaagctggccggcaccctgcgggacaagctggtgcaccagtacctgctgcagccctacggccaggagggcctgaagagcaagtctgtgcagctgaatggccagcccctggtgatggtggatgatggcaccctgcctgagctgaagccccggcccctgcgggccggccgcaccctggtgatcccccctgtgaccatgggcttctacgtggtgaagaatgtgaatgccctggcctgccgctacagatag

SEQ ID NO: 155135 - DNA, 1779 bp, synthetic construct
  misc_feature 1..1779: note = Description of Artificial Sequence: Synthetic coding sequence
  source 1..1779: mol_type = other DNA
atgagggtgctgtgtgccttccctgaggccatgcccagcagcaacagccggcccccagcctgcctggcccctggggccctgtacctggccctgctgctgcacctgagcctgagcagccaggccggggaccggcggcccctgcctgtggacagagctgctggcctgaaggagaagaccctcatcctgctggatgtgtccaccaagaaccctgtgaggacagtgaatgaaaacttcctgagcctgcagctggaccccagcatcatccatgatggctggctggacttcctgagcagcaagaggctggtgaccctggcccggggcctgagccctgccttcctgcgctttggaggcaagaggacagacttcctgcagttccagaacctgagaaatcctgccaagagccggggcggccctggccctgactactacctgaagaactatgaagatgacatcgtgcggagtgatgtggccctggacaagcagaagggctgcaagatcgcccagcacccagatgtgatgctggagctgcagcgggagaaggccgcccagatgcacctggtgctgctgaaggagcagttcagcaacacctacagcaacctgatcctgacagcccggagcctggacaagctgtacaactttgctgactgcagcggcctgcacctgatctttgccctgaatgccctgcggaggaaccccaacaacagctggaacagcagcagcgccctgagcctgctgaagtacagcgccagcaagaagtacaacatctcctgggagctgggcaatgagcccaacaactaccgcaccatgcacggccgggctgtgaatggcagccagctgggcaaggactacatccagctgaagagcctgctgcagcccatccgcatctacagccgggccagcctgtatggccccaacatcggccggcccaggaagaatgtcatcgccctgctggatggcttcatgaaggtggccggcagcacagtggatgctgtgacctggcagcactgctacattgatggccgggtggtgaaggtgatggacttcctgaagacccggctgctggacaccctgagtgaccagatcaggaagatccagaaggtggtgaacacctacaccccaggcaagaagatctggctggagggcgtggtgaccaccagcgctgggggcaccaacaacctgagtgacagctatgctgctggcttcctgtggctgaacaccctgggcatgctggccaaccagggcattgatgtggtgatccgccacagcttctttgaccacggctacaaccacctggtggaccagaacttcaaccccctgcctgactactggctgagcctgctgtacaagaggctcatcggccccaaggtgctggccgtgcacgtggccggcctgcagaggaagccccggcccggccgggtcatccgggacaagctgcgcatctatgcccactgcaccaaccaccacaaccacaactacgtgcggggcagcatcaccctcttcatcatcaacctgcacaggagcaggaagaagatcaagctggccggcaccctgcgggacaagctggtgcaccagtacctgctgcagccctacggccaggagggcctgaagagcaagtctgtgcagctgaatggccagcccctggtgatggtggatgatggcaccctgcctgagctgaagccccggcccctgcgggccggccgcaccctggtgatcccccctgtgaccatgggcttctacgtggtgaagaatgtgaatgccctggcctgccgctacagatag

SEQ ID NO: 155136 - DNA, 1443 bp, synthetic construct
  misc_feature 1..1443: note = Description of Artificial Sequence: Synthetic coding sequence
  source 1..1443: mol_type = other DNA
atgagggtgctgtgtgccttccctgaggccatgcccagcagcaacagccggcccccagcctgcctggcccctggggccctgtacctggccctgctgctgcacctgagcctgagcagccaggccggggaccggcggcccctgcctgtggacagagctgctggcctgaaggagaagaccctcatcctgctggatgtgtccaccaagaaccctgtgaggacagtgaatgaaaacttcctgagcctgcagctggaccccagcatcatccatgatggctggctggacttcctgagcagcaagaggctggtgaccctggcccggggcctgagccctgccttcctgcgctttggaggcaagaggacagacttcctgcagttccagaacctgagaaatcctgccaagagccggggcggccctggccctgactactacctgaagaactatgaagatgagcccaacaactaccgcaccatgcacggccgggctgtgaatggcagccagctgggcaaggactacatccagctgaagagcctgctgcagcccatccgcatctacagccgggccagcctgtatggccccaacatcggccggcccaggaagaatgtcatcgccctgctggatggcttcatgaaggtggccggcagcacagtggatgctgtgacctggcagcactgctacattgatggccgggtggtgaaggtgatggacttcctgaagacccggctgctggacaccctgagtgaccagatcaggaagatccagaaggtggtgaacacctacaccccaggcaagaagatctggctggagggcgtggtgaccaccagcgctgggggcaccaacaacctgagtgacagctatgctgctggcttcctgtggctgaacaccctgggcatgctggccaaccagggcattgatgtggtgatccgccacagcttctttgaccacggctacaaccacctggtggaccagaacttcaaccccctgcctgactactggctgagcctgctgtacaagaggctcatcggccccaaggtgctggccgtgcacgtggccggcctgcagaggaagccccggcccggccgggtcatccgggacaagctgcgcatctatgcccactgcaccaaccaccacaaccacaactacgtgcggggcagcatcaccctcttcatcatcaacctgcacaggagcaggaagaagatcaagctggccggcaccctgcgggacaagctggtgcaccagtacctgctgcagccctacggccaggagggcctgaagagcaagtctgtgcagctgaatggccagcccctggtgatggtggatgatggcaccctgcctgagctgaagccccggcccctgcgggccggccgcaccctggtgatcccccctgtgaccatgggcttctacgtggtgaagaatgtgaatgccctggcctgccgctacagatag

SEQ ID NO: 155137 - DNA, 1251 bp, synthetic construct
  misc_feature 1..1251: note = Description of Artificial Sequence: Synthetic coding sequence
  source 1..1251: mol_type = other DNA
atgaagcgggagcggggggccctgagccgggccagccgggccctgcggctggccccctttgtgtacctgctgctgatccagacagaccccctggagggcgtgaacatcaccagccctgtgcggctcatccacggcaccgtgggcaagagcgccctgctgtctgtgcagtacagcagcaccagcagtgacaggcctgtggtgaagtggcagctgaagagggacaagcctgtgacagtggtgcagagcattggaacagaggtgattggcaccctgcggccagactacagagaccgcatccggctgtttgaaaatggcagcctgctgctgagtgacctgcagctggctgatgagggcacctatgaggtggagatcagcatcacagatgacaccttcaccggggagaagaccatcaacctgactgtggatgtgcccatcagccggccccaggtgctggtggccagcaccaccgtgctggagctgtctgaggccttcaccctgaactgcagccatgaaaatggcaccaagcccagctacacctggctgaaggatggcaagcccctgctgaatgacagcaggatgctgctgagcccagaccagaaggtgctgaccatcaccagggtgctgatggaggatgatgacctgtacagctgcatggtggagaaccccatcagccagggccgcagcctgcctgtgaagatcaccgtgtacagaagaagcagcctgtacatcatcctgagcactggaggcatcttcctgctggtgaccctggtgacagtgtgtgcctgctggaagcccagcaagaggaagcagaagaagctggagaagcagaacagcctggagtacatggaccagaatgatgaccggctgaagccagaggccgacaccctgcccaggtctggagagcaggagaggaagaaccccatggccctgtacatcctgaaggacaaggacagccctgagacagaagaaaatcctgcccctgagcccaggtctgccacagagcccggccccccaggctacagcgtgtccccagctgtgcccggccgcagccctggcctgcccatccgcagcgcccggcgctaccccaggagccctgcccggagccctgccactggaagaacccacagcagccccccccgggcccccagcagccctggccgcagccgcagcgccagcaggaccctgaggacagctggggtgcacatcatccgggagcaggatgaagctggccctgtggagatcagcgcctag

SEQ ID NO: 155138 - DNA, 1104 bp, synthetic construct
  misc_feature 1..1104: note = Description of Artificial Sequence: Synthetic coding sequence
  source 1..1104: mol_type = other DNA
atgaagcgggagcggggggccctgagccgggccagccgggccctgcggctggccccctttgtgtacctgctgctgatccagacagaccccctggagggcgtgaacatcaccagccctgtgcggctcatccacggcaccgtgggcaagagcgccctgctgtctgtgcagtacagcagcaccagcagtgacaggcctgtggtgaagtggcagctgaagagggacaagcctgtgacagtggtgcagagcattggaacagaggtgattggcaccctgcggccagactacagagaccgcatccggctgtttgaaaatggcagcctgctgctgagtgacctgcagctggctgatgagggcacctatgaggtggagatcagcatcacagatgacaccttcaccggggagaagaccatcaacctgactgtggatgtgcccatcagccggccccaggtgctggtggccagcaccaccgtgctggagctgtctgaggccttcaccctgaactgcagccatgaaaatggcaccaagcccagctacacctggctgaaggatggcaagcccctgctgaatgacagcaggatgctgctgagcccagaccagaaggtgctgaccatcaccagggtgctgatggaggatgatgacctgtacagctgcatggtggagaaccccatcagccagggccgcagcctgcctgtgaagatcaccgtgtacagaagaagcagcctgtacatcatcctgagcactggaggcatcttcctgctggtgaccctggtgacagtgtgtgcctgctggaagcccagcaagaggaagcagaagaagctggagaagcagaacagcctggagtacatggaccagaatgatgaccggctgaagccagagggggagctgcctgccacccagagccccatccccagcaccatccgctctgtgggctgctgggagaaggccgagctgggggacaaggagaacagcagcgctggcaccctgcccagcgacctgggcgccagcaagggcaaggagcctgagcccgccagcctggccagcagccacagcctgcccaggagacatgccatgcccagcaccctgtctgtgtctgtgcatgaatag

SEQ ID NO: 155139 - DNA, 669 bp, synthetic construct
  misc_feature 1..669: note = Description of Artificial Sequence: Synthetic coding sequence
  source 1..669: mol_type = other DNA
atgagccagaccaagatgctgaaggtgcgggtgaccctcttctgcatcctggccggcatcgtgctggccatgacagctgtggtgacagaccactgggccgtgctgagcccccacatggagcaccacaacaccacctgtgaggccgcccacttcggcctgtggaggatctgcaccaagaggatccccatggatgacagcaagacctgtggccccatcaccctgcctggagagaagaactgcagctacttccgccacttcaaccctggagagagcagcgagatctttgagttcaccacccagaaggagtacagcatctctgctgctgccatcgccatcttcagcctgggcttcatcatcctgggcagcctgtgtgtgctgctgagcctgggcaagaagagggactacctgctgcggcctgcctccatgttctacgcctttgctggcctgtgcatcctggtgtctgtggaggtgatgaggcagagcgtgaagaggatgattgacagtgaagatactgtgtggattgagtactactacagctggagctttgcctgtgcctgtgccgccttcatcctgctcttcctgggcggcctggccctgctgctcttcagcctgcccaggatgcccaggaacccctgggagagctgcatggatgctgagcctgagcactag

SEQ ID NO: 155140 - DNA, 633 bp, synthetic construct
  misc_feature 1..633: note = Description of Artificial Sequence: Synthetic coding sequence
  source 1..633: mol_type = other DNA
atggacctggaggagttcctgtctgaaaatggcatcccccccagccccagccagcacgaccacagcccccaccccccaggcctgcagcctgccagcagcgctgcccccagcgtgatggacctgagcagccgggccagcgcccccctgcaccctggcatccccagccccaactgcatgcagagccccatccggcccggccagctgctgcctgccaacagaaacacccccagccccattgatcctgacaccatccaggtgcctgtgggctatgagccagaccctgctgacctggccctgagcagcatccctggccaggagatgtttgaccccaggaagaggaagttcagcgaggaggagctgaagccccagcccatgatcaagaaggccaggaaggtgttcatcccagatgacctgaaggatgacaagtactgggcccggcggaggaagaacaacatggccgccaagaggagcagagatgcccggcggctgaaggagaaccagatcgccatccgggccagcttcctggagaaggagaacagcgccctgcggcaggaggtggccgacctgaggaaggagctgggcaagtgcaagaacatcctggccaagtatgaggcccggcacggccccctgtag

SEQ ID NO: 155141 - DNA, 1095 bp, synthetic construct
  misc_feature 1..1095: note = Description of Artificial Sequence: Synthetic coding sequence
  source 1..1095: mol_type = other DNA
atgcacccccaggtggtgatcctgagcctcatcctgcacctggccgacagcgtggccggctctgtgaaggtgggcggggaggccggccccagcgtgaccctgccctgccactacagcggggctgtgacctccatgtgctggaacagaggcagctgcagcctcttcacctgccagaatggaattgtgtggaccaacggcacccacgtgacctacaggaaggacacccgctacaagctgctgggggacctgagcagaagagatgtgtccctgaccattgaaaatacagctgtgtctgacagcggcgtgtactgctgccgggtggagcaccggggctggttcaatgacatgaagatcaccgtgtccctggagatcgtgccccccaaggtgaccaccacccccatcgtgaccaccgtgcccaccgtgaccaccgtgaggaccagcaccaccgtgcccaccaccaccaccgtgcccatgaccaccgtgcccaccaccaccgtgcccaccaccatgagcatccccaccaccaccaccgtgctgaccaccatgacagtgtccaccaccacctctgtgcccaccaccaccagcatccccaccaccacctctgtgcctgtgaccaccaccgtgtccacctttgtgccccccatgcccctgccccggcagaaccacgagcctgtggccaccagccccagcagcccccagcctgctgagacccaccccaccaccctgcagggcgccatcagaagagagcccaccagcagccccctgtacagctacaccacagatggaaatgacacagtgacagagagcagtgatggcctgtggaacaacaaccagacccagctgttcctggagcacagcctgctgacagccaacaccaccaagggcatctatgctggggtgtgcatctctgtgctggtgctgctggccctgctgggcgtcatcatcgccaagaagtacttcttcaagaaggaggtgcagcagctgtctgtgtccttcagcagcctgcagatcaaggccctgcagaatgctgtggagaaggaggtgcaggccgaggacaacatctacatcgagaacagcctgtatgccacagactag

SEQ ID NO: 155142 - DNA, 1206 bp, synthetic construct
  misc_feature 1..1206: note = Description of Artificial Sequence: Synthetic coding sequence
  source 1..1206: mol_type = other DNA
atgcacccccaggtggtgatcctgagcctcatcctgcacctggccgacagcgtggccggctctgtgaaggtgggcggggaggccggccccagcgtgaccctgccctgccactacagcggggctgtgacctccatgtgctggaacagaggcagctgcagcctcttcacctgccagaatggaattgtgtggaccaacggcacccacgtgacctacaggaaggacacccgctacaagctgctgggggacctgagcagaagagatgtgtccctgaccattgaaaatacagctgtgtctgacagcggcgtgtactgctgccgggtggagcaccggggctggttcaatgacatgaagatcaccgtgtccctggagatcgtgccccccaaggtgaccaccacccccatcgtgaccaccgtgcccaccgtgaccaccgtgaggaccagcaccaccgtgcccaccaccaccaccgtgcccatgaccaccgtgcccaccaccaccgtgcccaccaccatgagcatccccaccaccaccaccgtgctgaccaccatgacagtgtccaccaccacctctgtgcccaccaccaccagcatccccaccaccacctctgtgcctgtgaccaccaccgtgtccacctttgtgccccccatgcccctgccccggcagaaccacgagcctgtggccaccagccccagcagcccccagcctgctgagacccaccccaccaccctgcagggcgccatcagaagagagcccaccagcagccccctgtacagctacaccacagatggaaatgacacagtgacagagagcagtgatggcctgtggaacaacaaccagacccagctgttcctggagcacagcctgctgacagccaacaccaccaagggcatctatgctggggtgtgcatctctgtgctggtgctgctggccctgctgggcgtcatcatcgccaagatgttccacctggccgccttcaagctgaagctgtgcaagatgcagctgaagaggaagagcaagcagaagaccatcagcaccctgagaattgtgttcatgcccaggaccaagacccagtggtgcagcctgcgggtgtatgcccacgagtgccggcggctgaacagacaccagcacatccggcggctgctggaccccaagaccatcttcctgttccagttccacctggccttccagcacgtgtctgacaccggctag

SEQ ID NO: 155143 - DNA, 672 bp, synthetic construct
  misc_feature 1..672: note = Description of Artificial Sequence: Synthetic coding sequence
  source 1..672: mol_type = other DNA
atgcacccccaggtggtgatcctgagcctcatcctgcacctggccgacagcgtggccggctctgtgaaggtgggcggggaggccggccccagcgtgaccctgccctgccactacagcggggctgtgacctccatgtgctggaacagaggcagctgcagcctcttcacctgccagaatggaattgtgtggaccaacggcacccacgtgacctacaggaaggacacccgctacaagctgctgggggacctgagcagaagagatgtgtccctgaccattgaaaatacagctgtgtctgacagcggcgtgtactgctgccgggtggagcaccggggctggttcaatgacatgaagatcaccgtgtccctggagatcgtgccccccaaggtgaccaccacccccatcgtgaccaccgtgcccaccgtgaccaccgtgaggaccagcaccaccgtgcccaccaccaccaccgtgcccatgaccaccgtgcccaccaccaccgtgcccaccaccatgagcatccccaccaccaccaccgtgctgaccaccatgacagtgtccaccaccacctctgtgcccaccaccaccagcatccccaccaccacctctgtgcctgtgaccaccaccgtgtccacctttgtgccccccatgcccctgccccggcagaaccacgagtag

SEQ ID NO: 155144 - DNA, 1095 bp, synthetic construct; identical to SEQ ID NO: 155141
  misc_feature 1..1095: note = Description of Artificial Sequence: Synthetic coding sequence
  source 1..1095: mol_type = other DNA

SEQ ID NO: 155145 - DNA, 1095 bp, synthetic construct; identical to SEQ ID NO: 155141
  misc_feature 1..1095: note = Description of Artificial Sequence: Synthetic coding sequence
  source 1..1095: mol_type = other DNA

SEQ ID NO: 155146 - DNA, 522 bp, synthetic construct
  misc_feature 1..522: note = Description of Artificial Sequence: Synthetic coding sequence
  source 1..522: mol_type = other DNA
atggagcctggagctggccacctggatggccacagagctggcagccccagcctgcggcaggccctgtgtgatggcagcgctgtgatgttcagcagcaaggagcggggccgctgcaccgtcatcaactttgtgcccctggaggcccccctgcggagcacccccaggagccggcaggtgacagaggcctgtggcggggagggccgggctgtgcccctgggcagcgagcctgagtggagcgtgggcggcatggaggccaccctggagcagcacctggaggacaccatgaagaaccccagcatcgtgggcgtgctgtgcacagacagccagggcctgaacctgggctgccggggcaccctgagtgatgaacatgctggggtcatctctgtgctggcccagcaggccgccaagctgaccagtgaccccacagacatccctgtggtgtgcctggagagtgacaatggaaacatcatgatccagaagcatgatggcatcaccgtggccgtgcacaagatggccagctag

SEQ ID NO: 155147 - DNA, 267 bp, synthetic construct
  misc_feature 1..267: note = Description of Artificial Sequence: Synthetic coding sequence
  source 1..267: mol_type = other DNA
atgggcaactggggcctgggcatcgccccctgggtggatggagagagcgagctggagttccggcggctgggcatgcagggccccctggaggccctgcggcggcgggagtggaacacccagagggccagcttctccttctccttcctgattgccctgagcccccacacagtggactactgccacagctatgagctgttcaacagacgctggcacggccacgtgctggccacccagaggcccagcctcttcatcctgatgctggtgtag

SEQ ID NO: 155148 - DNA, 2334 bp, synthetic construct
  misc_feature 1..2334: note = Description of Artificial Sequence: Synthetic coding sequence
  source 1..2334: mol_type = other DNA
atgggccggggcagcggcacctttgagcggctgctggacaaggccaccagccagctgctgctggagacagactgggagagcatcctgcagatctgtgacctgatccggcagggcgacacccaggccaagtatgctgtgaacagcatcaagaagaaggtgaatgacaagaacccccacgtggccctgtatgccctggaggtgatggagagcgtggtgaagaactgtggccagacagtgcatgatgaggtggccaacaagcagaccatggaggagctgaaggacctgctgaagaggcaggtggaggtgaatgtgaggaacaagatcctgtacctgatccaggcctgggcccacgccttcagaaatgagcccaagtacaaggtggtgcaggacacctaccagatcatgaaggtggagggccacgtgtttcctgagttcaaggagagtgatgccatgtttgctgctgagcgggccccagactgggtggatgctgaggagtgccaccgctgccgggtgcagtttggagtgatgaccaggaagcaccactgccgggcctgtggccagatcttctgtgggaagtgcagcagcaagtacagcaccatccccaagtttggaattgagaaggaggtgcgggtgtgtgagccctgctatgagcagctgaacaggaaggccgagggcaaggccaccagcaccacagagctgcccccagagtacctgaccagccccctgagccagcagagccagctgccccccaagagagatgaaacagccctgcaggaggaggaggagctgcagctggccctggccctgagccagagcgaggccgaggagaaggagcggctgcggcagaagagcacctacaccagctaccccaaggccgagcccatgcccagcgccagcagcgcccccccagccagcagcctgtacagcagccctgtgaacagcagcgcccccctggccgaggacatcgaccctgagctggcccgctacctgaacagaaactactgggagaagaagcaggaggaggccaggaagagccccaccccatctgcccctgtgcccctgacagagcctgctgcccagcctggagagggccacgccgcccccaccaacgtggtggagaaccccctgcctgagacagacagccagcccatccccccatctgggggccccttcagcgagccccagttccacaacggggagagcgaggagagccatgagcagttcctgaaggccctgcagaatgctgtgaccacctttgtgaacaggatgaagagcaaccacatgaggggccgcagcatcaccaatgattctgctgtgctgagcctcttccagagcatcaatggcatgcacccccagctgctggagctgctgaaccagctggatgaaagaagactctactatgagggcctgcaggacaagctggcccagatcagagatgcccggggggccctgagcgccctgcgggaggagcaccgggagaagctgcggcgggctgctgaggaggccgagcggcagaggcagatccagctggcccagaagctggagatcatgaggcagaagaagcaggagtacctggaggtgcagaggcagctggccatccagaggctgcaggagcaggagaaggagcggcagatgaggctggagcagcagaagcagacagtgcagatgagggcccagatgcctgccttccccctgccctatgcccagctgcaggccatgcctgctgctgggggcgtgctgtaccagcccagcggccctgccagcttccccagcaccttctccccagctggctctgtggagggcagccccatgcatggagtgtacatgagccagcctgccccagctgctggcccctaccccagcatgcccagcacagctgctgaccccagcatggtgtctgcctacatgtacccagctggggccaccggggcccaggccgccccccaggcccaggccggccccacagccagccctgcctacagcagctaccagcccacccccacagctggctaccagaatgtggccagccaggccccccagagcctgcctgccatcagccagcccccccagagcagcaccatgggctacatgggcagccagagcgtgtccatgggctaccagccctacaacatgcagaacctgatgaccaccctgcccagccaggatgccagcctgcccccccagcagccctacatcgccggccagcagcccatgtaccagcagatggcccccagcggcggccccccccagcagcagccccctgtggcccagcagccccaggcccagggccccccagcccagggcagcgaggcccagctgatcagctttgattag

SEQ ID NO: 155149 - DNA, 2076 bp, synthetic construct
  misc_feature 1..2076: note = Description of Artificial Sequence: Synthetic coding sequence
  source 1..2076: mol_type = other DNA
atgggccggggcagcggcacctttgagcggctgctggacaaggccaccagccagctgctgctggagacagactgggagagcatcctgcagatctgtgacctgatccggcagggcgacacccaggccaagtatgctgtgaacagcatcaagaagaaggtgaatgacaagaacccccacgtggccctgtatgccctggaggtgatggagagcgtggtgaagaactgtggccagacagtgcatgatgaggtggccaacaagcagaccatggaggagctgaaggacctgctgaagaggcaggtggaggtgaatgtgaggaacaagatcctgtacctgatccaggcctgggcccacgccttcagaaatgagcccaagtacaaggtggtgcaggacacctaccagatcatgaaggtggagggccacgtgtttcctgagttcaaggagagtgatgccatgtttgctgctgagcgggccccagactgggtggatgctgaggagtgccaccgctgccgggtgcagtttggagtgatgaccaggaagcaccactgccgggcctgtggccagatcttctgtgggaagtgcagcagcaagtacagcaccatccccaagtttggaattgagaaggaggtgcgggtgtgtgagccctgctatgagcagctgaacaggaaggccgagggcaaggccaccagcaccacagagctgcccccagagtacctgaccagccccctgagccagcagagccagctgccccccaagagagatgaaacagccctgcaggaggaggaggagctgcagctggccctggccctgagccagagcgaggccgaggagaaggagcggctgcggcagaagagcacctacaccagctaccccaaggccgagcccatgcccagcgccagcagcgcccccccagccagcagcctgtacagcagccctgtgaacagcagcgcccccctggccgaggacatcgaccctgagctggcccgctacctgaacagaaactactgggagaagaagcaggaggaggccaggaagagccccaccccatctgcccctgtgcccctgacagagcctgctgcccagcctggagagggccacgccgcccccaccaacgtggtggagaaccccctgcctgagacagacagccagcccatccccccatctgggggccccttcagcgagccccagttccacaacggggagagcgaggagagccatgagcagttcctgaaggccctgcagaatgctgtgaccacctttgtgaacaggatgaagagcaaccacatgaggggccgcagcatcaccaatgattctgctgtgctgagcctcttccagagcatcaatggcatgcacccccagctgctggagctgctgaaccagctggatgaaagaagactctactatgagggcctgcaggacaagctggcccagatcagagatgcccggggggccctgagcgccctgcgggaggagcaccgggagaagctgcggcgggctgctgaggaggccgagcggcagaggcagatccagctggcccagaagctggagatcatgatgcatggagtgtacatgagccagcctgccccagctgctggcccctaccccagcatgcccagcacagctgctgaccccagcatggtgtctgcctacatgtacccagctggggccaccggggcccaggccgccccccaggcccaggccggccccacagccagccctgcctacagcagctaccagcccacccccacagctggctaccagaatgtggccagccaggccccccagagcctgcctgccatcagccagcccccccagagcagcaccatgggctacatgggcagccagagcgtgtccatgggctaccagccctacaacatgcagaacctgatgaccaccctgcccagccaggatgccagcctgcccccccagcagccctacatcgccggccagcagcccatgtaccagcagatggcccccagcggcggccccccccagcagcagccccctgtggcccagcagccccaggcccagggccccccagcccagggcagcgaggcccagctgatcagctttgattag

SEQ ID NO: 155150 - DNA, 324 bp, synthetic construct
  misc_feature 1..324: note = Description of Artificial Sequence: Synthetic coding sequence
  source 1..324: mol_type = other DNA
atgaggctgagcaagaccctggtggacatggacatggctgactacagcgctgccctggaccctgcctacaccaccctggagtttgaaaatgtgcaggtgctgaccatgggaaatgactttgtggccgccgccagccggcagatcgaggccagcccccccaccagcctggagcacatctggaggggcggccagttcagcacaggccgccacgtgcccatccgccgccaccagccccagagggcccagcagcccggctgccagaggcctgtgtgccacctgcggggccctggccacggccagaccctgcgctgcctggagctgtag

SEQ ID NO: 155151 - DNA, 1425 bp, synthetic construct
  misc_feature 1..1425: note = Description of Artificial Sequence: Synthetic coding sequence
  source 1..1425: mol_type = other DNA
atgaggctgagcaagaccctggtggacatggacatggctgactacagcgctgccctggaccctgcctacaccaccctggagtttgaaaatgtgcaggtgctgaccatgggaaatgacaccagccccagcgagggcaccaacctgaatgcccccaacagcctgggcgtgtctgccctgtgtgccatctgtggggaccgggccaccgggaagcactacggggccagcagctgtgatggctgcaagggcttcttcagaagatctgtgaggaagaaccacatgtacagctgccgcttcagccggcagtgtgtggtggacaaggacaagaggaaccagtgccgctactgccgcctgaagaagtgcttccgggccggcatgaagaaggaggccgtgcagaatgaaagagaccgcatcagcacccggcgcagcagctatgaggacagcagcctgcccagcatcaatgccctgctgcaggccgaggtgctgagccggcagatcaccagccctgtgtctggcatcaatggagacatccgggccaagaagatcgccagcattgctgatgtgtgtgagagcatgaaggagcagctgctggtgctggtggagtgggccaagtacatcccagccttctgtgagctgcccctggatgaccaggtggccctgctgcgggcccacgccggggagcacctgctgctgggcgccaccaagaggtccatggtgttcaaggatgtgctgctgctgggcaatgactacatcgtgcccaggcactgcccagagctggccgagatgagccgggtgtccatccgcatcctggatgagctggtgctgcccttccaggagctgcagattgatgacaatgaatatgcctacctgaaggccatcatcttctttgatcctgatgccaagggcctgagtgaccccgggaagatcaagaggctgcggagccaggtgcaggtgtccctggaggactacatcaatgaccggcagtatgacagccggggccgctttggagagctgctgctgctgctgcccaccctgcagagcatcacctggcagatgattgagcagatccagttcatcaagctgtttggcatggccaagattgacaacctgctgcaggagatgctgctgggcggcagccccagtgatgccccccacgcccaccaccccctgcacccccacctgatgcaggagcacatgggcaccaacgtgattgtggccaacaccatgcccacccacctgagcaatggccagatgtgtgagtggccccggccccggggccaggccgccaccccagagaccccccagcccagccccccaggcggcagcggcagcgagccctacaagctgctgcccggggctgtggccaccatcgtgaagcccctgagcgccatcccccagcccaccatcaccaagcaggaggtgatctag

SEQ ID NO: 155152 - DNA, 1359 bp, synthetic construct
  misc_feature 1..1359: note = Description of Artificial Sequence: Synthetic coding sequence
  source 1..1359: mol_type = other DNA
atggtgtctgtgaatgcccccctgggcgcccctgtggagagcagctatgacaccagccccagcgagggcaccaacctgaatgcccccaacagcctgggcgtgtctgccctgtgtgccatctgtggggaccgggccaccgggaagcactacggggccagcagctgtgatggctgcaagggcttcttcagaagatctgtgaggaagaaccacatgtacagctgccgcttcagccggcagtgtgtggtggacaaggacaagaggaaccagtgccgctactgccgcctgaagaagtgcttccgggccggcatgaagaaggaggccgtgcagaatgaaagagaccgcatcagcacccggcgcagcagctatgaggacagcagcctgcccagcatcaatgccctgctgcaggccgaggtgctgagccggcagatcaccagccctgtgtctggcatcaatggagacatccgggccaagaagatcgccagcattgctgatgtgtgtgagagcatgaaggagcagctgctggtgctggtggagtgggccaagtacatcccagccttctgtgagctgcccctggatgaccaggtggccctgctgcgggcccacgccggggagcacctgctgctgggcgccaccaagaggtccatggtgttcaaggatgtgctgctgctgggcaatgactacatcgtgcccaggcactgcccagagctggccgagatgagccgggtgtccatccgcatcctggatgagctggtgctgcccttccaggagctgcagattgatgacaatgaatatgcctacctgaaggccatcatcttctttgatcctgatgccaagggcctgagtgaccccgggaagatcaagaggctgcggagccaggtgcaggtgtccctggaggactacatcaatgaccggcagtatgacagccggggccgctttggagagctgctgctgctgctgcccaccctgcagagcatcacctggcagatgattgagcagatccagttcatcaagctgtttggcatggccaagattgacaacctgctgcaggagatgctgctgggcggcagccccagtgatgccccccacgcccaccaccccctgcacccccacctgatgcaggagcacatgggcaccaacgtgattgtggccaacaccatgcccacccacctgagcaatggccagatgtgtgagtggccccggccccggggccaggccgccaccccagagaccccccagcccagccccccaggcggcagcggcagcgagccctacaagctgctgcccggggctgtggccaccatcgtgaagcccctgagcgccatcccccagcccaccatcaccaagcaggaggtgatctag

SEQ ID NO: 155153 - DNA, 1515 bp, synthetic construct
  misc_feature 1..1515: note = Description of Artificial Sequence: Synthetic coding sequence
  source 1..1515: mol_type = other DNA
atgaggctgagcaagaccctggtggacatggacatggctgactacagcgctgccctggaccctgcctacaccaccctggagtttgaaaatgtgcaggtgctgaccatgggaaatgtgctgctgcccctgcggctggcccggctgcggcaccccctgcggcaccactggagcatctctggaggagtggacagcagcccccagggcgacaccagccccagcgagggcaccaacctgaatgcccccaacagcctgggcgtgtctgccctgtgtgccatctgtggggaccgggccaccgggaagcactacggggccagcagctgtgatggctgcaagggcttcttcagaagatctgtgaggaagaaccacatgtacagctgccgcttcagccggcagtgtgtggtggacaaggacaagaggaaccagtgccgctactgccgcctgaagaagtgcttccgggccggcatgaagaaggaggccgtgcagaatgaaagagaccgcatcagcacccggcgcagcagctatgaggacagcagcctgcccagcatcaatgccctgctgcaggccgaggtgctgagccggcagatcaccagccctgtgtctggcatcaatggagacatccgggccaagaagatcgccagcattgctgatgtgtgtgagagcatgaaggagcagctgctggtgctggtggagtgggccaagtacatcccagccttctgtgagctgcccctggatgaccaggtggccctgctgcgggcccacgccggggagcacctgctgctgggcgccaccaagaggtccatggtgttcaaggatgtgctgctgctgggcaatgactacatcgtgcccaggcactgcccagagctggccgagatgagccgggtgtccatccgcatcctggatgagctggtgctgcccttccaggagctgcagattgatgacaatgaatatgcctacctgaaggccatcatcttctttgatcctgatgccaagggcctgagtgaccccgggaagatcaagaggctgcggagccaggtgcaggtgtccctggaggactacatcaatgaccggcagtatgacagccggggccgctttggagagctgctgctgctgctgcccaccctgcagagcatcacctggcagatgattgagcagatccagttcatcaagctgtttggcatggccaagattgacaacctgctgcaggagatgctgctgggcggcagccccagtgatgccccccacgcccaccaccccctgcacccccacctgatgcaggagcacatgggcaccaacgtgattgtggccaacaccatgcccacccacctgagcaatggccagatgtgtgagtggccccggccccggggccaggccgccaccccagagaccccccagcccagccccccaggcggcagcggcagcgagccctacaagctgctgcccggggctgtggccaccatcgtgaagcccctgagcgccatcccccagcccaccatcaccaagcaggaggtgatctag

SEQ ID NO: 155154 - DNA, 1395 bp, synthetic construct
  misc_feature 1..1395: note = Description of Artificial Sequence: Synthetic coding sequence
  source 1..1395: mol_type = other DNA
atgaggctgagcaagaccctggtggacatggacatggctgactacagcgctgccctggaccctgcctacaccaccctggagtttgaaaatgtgcaggtgctgaccatgggaaatgacaccagccccagcgagggcaccaacctgaatgcccccaacagcctgggcgtgtctgccctgtgtgccatctgtggggaccgggccaccgggaagcactacggggccagcagctgtgatggctgcaagggcttcttcagaagatctgtgaggaagaaccacatgtacagctgccgcttcagccggcagtgtgtggtggacaaggacaagaggaaccagtgccgctactgccgcctgaagaagtgcttccgggccggcatgaagaaggaggccgtgcagaatgaaagagaccgcatcagcacccggcgcagcagctatgaggacagcagcctgcccagcatcaatgccctgctgcaggccgaggtgctgagccggcagatcaccagccctgtgtctggcatcaatggagacatccgggccaagaagatcgccagcattgctgatgtgtgtgagagcatgaaggagcagctgctggtgctggtggagtgggccaagtacatcccagccttctgtgagctgcccctggatgaccaggtggccctgctgcgggcccacgccggggagcacctgctgctgggcgccaccaagaggtccatggtgttcaaggatgtgctgctgctgggcaatgactacatcgtgcccaggcactgcccagagctggccgagatgagccgggtgtccatccgcatcctggatgagctggtgctgcccttccaggagctgcagattgatgacaatgaatatgcctacctgaaggccatcatcttctttgatcctgatgccaagggcctgagtgaccccgggaagatcaagaggctgcggagccaggtgcaggtgtccctggaggactacatcaatgaccggcagtatgacagccggggccgctttggagagctgctgctgctgctgcccaccctgcagagcatcacctggcagatgattgagcagatccagttcatcaagctgtttggcatggccaagattgacaacctgctgcaggagatgctgctgggcggcagccccagtgatgccccccacgcccaccaccccctgcacccccacctgatgcaggagcacatgggcaccaacgtgattgtggccaacaccatgcccacccacctgagcaatggccagatgagcaccccagagaccccccagcccagccccccaggcggcagcggcagcgagccctacaagctgctgcccggggctgtggccaccatcgtgaagcccctgagcgccatcccccagcccaccatcaccaagcaggaggtgatctag

SEQ ID NO: 155155 - DNA, 1254 bp, synthetic construct
  misc_feature 1..1254: note = Description of Artificial Sequence: Synthetic coding sequence
  source 1..1254: mol_type = other DNA
atgaggctgagcaagaccctggtggacatggacatggctgactacagcgctgccctggaccctgcctacaccaccctggagtttgaaaatgtgcaggtgctgaccatgggaaatgacaccagccccagcgagggcaccaacctgaatgcccccaacagcctgggcgtgtctgccctgtgtgccatctgtggggaccgggccaccgggaagcactacggggccagcagctgtgatggctgcaagggcttcttcagaagatctgtgaggaagaaccacatgtacagctgccgcttcagccggcagtgtgtggtggacaaggacaagaggaaccagtgccgctactgccgcctgaagaagtgcttccgggccggcatgaagaaggaggccgtgcagaatgaaagagaccgcatcagcacccggcgcagcagctatgaggacagcagcctgcccagcatcaatgccctgctgcaggccgaggtgctgagccggcagatcaccagccctgtgtctggcatcaatggagacatccgggccaagaagatcgccagcattgctgatgtgtgtgagagcatgaaggagcagctgctggtgctggtggagtgggccaagtacatcccagccttctgtgagctgcccctggatgaccaggtggccctgctgcgggcccacgccggggagcacctgctgctgggcgccaccaagaggtccatggtgttcaaggatgtgctgctgctgggcaatgactacatcgtgcccaggcactgcccagagctggccgagatgagccgggtgtccatccgcatcctggatgagctggtgctgcccttccaggagctgcagattgatgacaatgaatatgcctacctgaaggccatcatcttctttgatcctgatgccaagggcctgagtgaccccgggaagatcaagaggctgcggagccaggtgcaggtgtccctggaggactacatcaatgaccggcagtatgacagccggggccgctttggagagctgctgctgctgctgcccaccctgcagagcatcacctggcagatgattgagcagatccagttcatcaagctgtttggcatggccaagattgacaacctgctgcaggagatgctgctgggcggcccctgccaggcccaggagggccggggctggagcggggacagccctggggaccggccccacacagtgagcagccccctgagcagcctggccagccccctgtgccgcttcggccaggtggcctag

SEQ ID NO: 155156 - DNA, 1329 bp, synthetic construct
  misc_feature 1..1329: note = Description of Artificial Sequence: Synthetic coding sequence
  source 1..1329: mol_type = other DNA
atggtgtctgtgaatgcccccctgggcgcccctgtggagagcagctatgacaccagccccagcgagggcaccaacctgaatgcccccaacagcctgggcgtgtctgccctgtgtgccatctgtggggaccgggccaccgggaagcactacggggccagcagctgtgatggctgcaagggcttcttcagaagatctgtgaggaagaaccacatgtacagctgccgcttcagccggcagtgtgtggtggacaaggacaagaggaaccagtgccgctactgccgcctgaagaagtgcttccgggccggcatgaagaaggaggccgtgcagaatgaaagagaccgcatcagcacccggcgcagcagctatgaggacagcagcctgcccagcatcaatgccctgctgcaggccgaggtgctgagccggcagatcaccagccctgtgtctggcatcaatggagacatccgggccaagaagatcgccagcattgctgatgtgtgtgagagcatgaaggagcagctgctggtgctggtggagtgggccaagtacatcccagccttctgtgagctgcccctggatgaccaggtggccctgctgcgggcccacgccggggagcacctgctgctgggcgccaccaagaggtccatggtgttcaaggatgtgctgctgctgggcaatgactacatcgtgcccaggcactgcccagagctggccgagatgagccgggtgtccatccgcatcctggatgagctggtgctgcccttccaggagctgcagattgatgacaatgaatatgcctacctgaaggccatcatcttctttgatcctgatgccaagggcctgagtgaccccgggaagatcaagaggctgcggagccaggtgcaggtgtccctggaggactacatcaatgaccggcagtatgacagccggggccgctttggagagctgctgctgctgctgcccaccctgcagagcatcacctggcagatgattgagcagatccagttcatcaagctgtttggcatggccaagattgacaacctgctgcaggagatgctgctgggcggcagccccagtgatgccccccacgcccaccaccccctgcacccccacctgatgcaggagcacatgggcaccaacgtgattgtggccaacaccatgcccacccacctgagcaatggccagatgagcaccccagagaccccccagcccagccccccaggcggcagcggcagcgagccctacaagctgctgcccggggctgtggccaccatcgtgaagcccctgagcgccatcccccagcccaccatcaccaagcaggaggtgatctag

SEQ ID NO: 155157 - DNA, 1227 bp, synthetic construct
  misc_feature 1..1227: note = Description of Artificial Sequence: Synthetic coding sequence
  source 1..1227: mol_type = other DNA
atgaacaccacagacaacggggtgaactgcctgtgtgccatctgtggggaccgggccaccgggaagcactacggggccagcagctgtgatggctgcaagggcttcttcagaagaagcatcaggaagagccacgtgtacagctgccgcttcagccggcagtgtgtggtggacaaggacaagaggaaccagtgccgctactgccgcctgaggaagtgcttccgggccggcatgaagaaggaggccgtgcagaatgaaagagaccgcatcagcacccggcgcagcacctttgatggcagcaacatccccagcatcaacaccctggcccaggccgaggtgcgcagccggcagatctctgtgagcagccctggcagcagcacagacatcaacgtgaagaagatcgccagcattggagatgtgtgtgagagcatgaagcagcagctgctggtgctggtggagtgggccaagtacatcccagccttctgtgagctgcccctggatgaccaggtggccctgctgcgggcccacgccggggagcacctgctgctgggcgccaccaagaggtccatgatgtacaaggacatcctgctgctgggcaacaactacgtgatccacaggaacagctgtgaggtggagatcagccgggtggccaacagagtgctggatgagctggtgcggcccttccaggagatccagattgatgacaatgaatatgcctgcctgaaggccatcgtgttctttgatcctgatgccaagggcctgagtgaccctgtgaagatcaagaacatgaggttccaggtgcagatcggcctggaggactacatcaatgaccggcagtatgacagccggggccgctttggagagctgctgctgctgctgcccaccctgcagagcatcacctggcagatgattgagcagatccagtttgtgaagctgtttggcatggtgaagattgacaacctgctgcaggagatgctgctgggcggggccagcaatgatggcagccacctgcaccaccccatgcacccccacctgagccaggaccccctgaccggccagaccatcctgctgggccccatgagcaccctggtgcatgctgaccagatcagcaccccagagacccccctgcccagccccccccagggcagcggccaggagcagtacaagattgctgccaaccaggccagcgtcatcagccaccagcacctgagcaagcagaagcagctgtag

SEQ ID NO: 155158 - DNA, 1338 bp, synthetic construct
  misc_feature 1..1338: note = Description of Artificial Sequence: Synthetic coding sequence
  source 1..1338: mol_type = other DNA
atggacatggccaactacagcgaggtgctggaccccacctacaccaccctggagtttgagaccatgcagatcctgtacaacagcagtgacagcagcgcccctgagacctccatgaacaccacagacaatggagtgaactgcctgtgtgccatctgtggggaccgggccaccgggaagcactatggagccagcagctgtgatggctgcaagggcttcttccgccgcagcatcaggaagagccacgtgtacagctgccgcttcagccggcagtgtgtggtggacaaggacaagaggaaccagtgccgctactgccgcctgaggaagtgcttccgggccggcatgaagaaggaggccgtgcagaatgaaagagaccgcatcagcaccaggaggagcacctttgatggcagcaacatccccagcatcaacaccctggcccaggccgaggtgcgcagccggcagatctctgtgagcagccctggcagcagcacagacatcaacgtgaagaagatcgccagcattggagatgtgtgtgagagcatgaagcagcagctgctggtgctggtggagtgggccaagtacatcccagccttctgtgagctgcccctggatgaccaggtggccctgctgcgggcccatgctggggagcacctgctgctgggcgccaccaagaggtccatgatgtacaaggacatcctgctgctgggcaacaactacgtgatccacaggaacagctgtgaggtggagatcagccgggtggccaacagagtgctggatgagctggtgcggcccttccaggagatccagattgatgacaatgaatatgcctgcctgaaggccatcgtgttctttgatcctgatgccaagggcctgagtgaccctgtgaagatcaagaacatgaggttccaggtgcagatcggcctggaggactacatcaatgaccggcagtatgacagccggggccgctttggagagctgctgctgctgctgcccaccctgcagagcatcacctggcagatgattgagcagatccagtttgtgaagctgtttggcatggtgaagattgacaacctgctgcaggagatgctgctgggcggggccagcaatgatggcagccacctgcaccaccccatgcacccccacctgagccaggaccccctgaccggccagaccatcctgctgggccccatgagcaccctggtgcacgccgaccagatcagcaccccagagacccccctgcccagccccccccagggcagcggccaggagcagtacaagattgctgccaaccaggccagcgtcatcagccaccagcacctgagcaagcagaagcagctgtag

SEQ ID NO: 155159 - DNA, 723 bp, synthetic construct
  misc_feature 1..723: note = Description of Artificial Sequence: Synthetic coding sequence
  source 1..723: mol_type = other DNA
atgagccgcagcaaccggcagaaggagtacaagtgtggggacctggtgtttgccaagatgaagggctacccccactggccagccagaattgatgagatgcctgaggccgctgtgaagagcacagccaacaagtaccaggtgttcttcttcggcacccatgaaacagccttcctgggccccaaggacctcttcccctatgaggagagcaaggagaagtttgggaagcccaacaagaggaagggcttcagcgagggcctgtgggagattgagaacaaccccaccgtgaaggccagcggctaccagagcagccagaagaagagctgtgtggaggagcctgagcctgagcctgaggccgcagaaggagatggagacaagaagggaaatgctgagggcagcagtgatgaggagggcaagctggtgattgatgagcccgccaaggagaagaatgaaaaaggagccctgaagaggcgggccggggacctgctggaggacagccccaagaggcccaaggaggctgaaaatcctgagggggaggagaaggaggccgccaccctggaggtggagcggcccctgcccatggaggtggagaagaacagcacccccagcgagcccggcagcggccggggccccccccaggaggaggaggaggaggaggatgaggaggaggaggccaccaaggaggatgctgaggcccctggcatccgggaccacgagagcctgtag

SEQ ID NO: 155160 - DNA, 771 bp, synthetic construct
  misc_feature 1..771: note = Description of Artificial Sequence: Synthetic coding sequence
  source 1..771: mol_type = other DNA
atgcaccctgagggcggccagtttgtgccccagctgctgggccacctgctggccaccaagctgaagcgcttcctgctgagcaagggcggcagaagagcccagatcccagatgtgtcccgggccaccccccacaccattgatgagatgcctgaggccgctgtgaagagcacagccaacaagtaccaggtgttcttcttcggcacccatgaaacagccttcctgggccccaaggacctcttcccctatgaggagagcaaggagaagtttgggaagcccaacaagaggaagggcttcagcgagggcctgtgggagattgagaacaaccccaccgtgaaggccagcggctaccagagcagccagaagaagagctgtgtggaggagcctgagcctgagcctgaggccgcagaaggagatggagacaagaagggaaatgctgagggcagcagtgatgaggagggcaagctggtgattgatgagcccgccaaggagaagaatgaaaaaggagccctgaagaggcgggccggggacctgctggaggacagccccaagaggcccaaggaggctgaaaatcctgagggggaggagaaggaggccgccaccctggaggtggagcggcccctgcccatggaggtggagaagaacagcacccccagcgagcccggcagcggccggggccccccccaggaggaggaggaggaggaggatgaggaggaggaggccaccaaggaggatgctgaggcccctggcatccgggaccacgagagcctgtag

SEQ ID NO: 155161 - DNA, 702 bp, synthetic construct
  misc_feature 1..702: note = Description of Artificial Sequence: Synthetic coding sequence
  source 1..702: mol_type = other DNA
atggagcagagagctgggggcaacagagtgcagaccagcaccctgaactgtgccggggctgctgtgattgatgagatgcctgaggccgctgtgaagagcacagccaacaagtaccaggtgttcttcttcggcacccatgaaacagccttcctgggccccaaggacctcttcccctatgaggagagcaaggagaagtttgggaagcccaacaagaggaagggcttcagcgagggcctgtgggagattgagaacaaccccaccgtgaaggccagcggctaccagagcagccagaagaagagctgtgtggaggagcctgagcctgagcctgaggccgcagaaggagatggagacaagaagggaaatgctgagggcagcagtgatgaggagggcaagctggtgattgatgagcccgccaaggagaagaatgagaagggggccctgaagagaagagctggggacctgctggaggacagccccaagaggcccaaggaggccgagaaccctgagggggaggagaaggaggccgccaccctggaggtggagcggcccctgcccatggaggtggagaagaacagcaccccatctgagcccggcagcggccggggccccccccaggaggaggaggaggaggaggatgaggaggaggaggccaccaaggaggatgctgaggcccctggcatccgggaccacgagagcctgtag

SEQ ID NO: 155162 - DNA, 789 bp, synthetic construct
  misc_feature 1..789: note = Description of Artificial Sequence: Synthetic coding sequence
  source 1..789: mol_type = other DNA
atgagccgcagcaaccggcagaaggagtacaagtgtggggacctggtgtttgccaagatgaagggctacccccactggccagccagaattgatgagatgcctgaggccgctgtgaagagcacagccaacaagtaccaggtgttcttcagcggccccacccggcggcacagctgggcccccaagaccagcagcctgaccaggaacccccggcgcagcctggccagccccacccggggcaagggcagcgcccggggctgcggccgcagcaggaccaccctgctgagccggctgcctgccatcagccccccacccagctgcacagagccctgcctgcccggccagtgggtgtacccaggggccaaccccacagagagcagccagaagaagagctgtgtggaggagcctgagcctgagcctgaggccgcagaaggagatggagacaagaagggaaatgctgagggcagcagtgatgaggagggcaagctggtgattgatgagcccgccaaggagaagaatgagaagggggccctgaagagaagagctggggacctgctggaggacagccccaagaggcccaaggaggccgagaaccctgagggggaggagaaggaggccgccaccctggaggtggagcggcccctgcccatggaggtggagaagaacagcaccccatctgagcccggcagcggccggggccccccccaggaggaggaggaggaggaggatgaggaggaggaggccaccaaggaggatgctgaggcccctggcatccgggaccacgagaggtag

SEQ ID NO: 155163 - DNA, 627 bp, synthetic construct
  misc_feature 1..627: note = Description of Artificial Sequence: Synthetic coding sequence
  source 1..627: mol_type = other DNA
atgcctgaggccgctgtgaagagcacagccaacaagtaccaggtgttcttcttcggcacccatgaaacagccttcctgggccccaaggacctcttcccctatgaggagagcaaggagaagtttgggaagcccaacaagaggaagggcttcagcgagggcctgtgggagattgagaacaaccccaccgtgaaggccagcggctaccagagcagccagaagaagagctgtgtggaggagcctgagcctgagcctgaggccgcagaaggagatggagacaagaagggaaatgctgagggcagcagtgatgaggagggcaagctggtgattgatgagcccgccaaggagaagaatgaaaaaggagccctgaagaggcgggccggggacctgctggaggacagccccaagaggcccaaggaggctgaaaatcctgagggggaggagaaggaggccgccaccctggaggtggagcggcccctgcccatggaggtggagaagaacagcacccccagcgagcccggcagcggccggggccccccccaggaggaggaggaggaggaggatgaggaggaggaggccaccaaggaggatgctgaggcccctggcatccgggaccacgagagcctgtag

SEQ ID NO: 155164 - DNA, 723 bp, synthetic construct; identical to SEQ ID NO: 155159
  misc_feature 1..723: note = Description of Artificial Sequence: Synthetic coding sequence
  source 1..723: mol_type = other DNA

SEQ ID NO: 155165 - DNA, 2676 bp, synthetic construct
  misc_feature 1..2676: note = Description of Artificial Sequence: Synthetic coding sequence
  source 1..2676: mol_type = other DNA
atgcacgccatcaatggatttgtgtttggaaacctgcctgagctgaacatgtgtgcccagaagagggtggcctggcacctgtttggcatgggaaatgaaattgatgtgcacacagccttcttccacggccagatgctgaccacccggggccaccacacagatgtggccaacatcttccctgccacctttgtgacagctgagatggtgccctgggagcccggcacctggctgatcagctgccaggtgaacagccacttcagagatggcatgcaggccctgtacaaggtgaagagctgcagcatggcccctcctgtggacctgctgaccgggaaggtgcggcagtacttcatcgaggcccacgagatccagtgggactatggccccatgggccatgatggcagcacaggcaagaacctgcgggagcccggcagcatcagtgacaagttcttccagaagagcagcagcagaattggaggcacctactggaaggtgcgctatgaggccttccaggatgagaccttccaggagaagatgcacctggaggaggacagacacctgggcatcctgggccctgtgatccgggcagaggtgggggacaccatccaggtggtgttctacaacagagccagccagcccttctccatgcagccccacggcgtcttctatgagaaggactatgagggcaccgtgtacaatgatggcagcagctacccaggcctggtggccaagccctttgagaaggtgacctaccgctggacagtgccccctcatgctggccccacagcccaggaccctgcctgcctgacctggatgtacttctctgctgctgaccccatccgggacaccaacagcggcctggtgggccccctgctggtgtgcagagctggggccctgggcgcagatggcaagcagaagggcgtggacaaggagttcttcctgctcttcaccgtgctggatgagaacaagtcctggtacagcaatgccaaccaggccgccgccatgctggacttccggctgctgtctgaggacatcgagggcttccaggacagcaacaggatgcacgccatcaatggcttcctgttcagcaacctgccccggctggacatgtgcaagggggacacagtggcctggcacctgctgggcctgggcacagaaacagatgtgcatggagtgatgttccagggcaacacagtgcagctgcagggcatgaggaaaggagctgccatgctgttcccccacacctttgtgatggccatcatgcagcctgacaacctgggcacctttgagatctactgccaggccggcagccaccgggaggccggcatgagggccatctacaacgtgtcccagtgccccggccaccaggccaccccccggcagcgctaccaggccgcccgcatctactacatcatggccgaggaggtggagtgggactactgcccagaccgctcctgggagcgggagtggcacaaccagagcgagaaggacagctatggctacatcttcctgagcaacaaggatggcctgctgggcagccgctacaagaaggctgtgttccgggagtacacagatggcaccttccgcatcccccggcccaggacaggccctgaggagcacctgggcatcctgggccccctcatcaagggggaggtgggggacatcctgactgtggtgttcaagaacaatgccagccggccctacagcgtgcacgcccacggcgtgctggagagcaccaccgtgtggcccctggccgctgagcctggagaggtggtgacctaccagtggaacatccctgagaggagcggccctggccccaatgacagcgcctgtgtgtcctggatctactacagcgctgtggaccccatcaaggacatgtacagcggcctggtgggccccctggccatctgccagaagggcatcctggagccccacggcggccgcagtgacatggaccgggagtttgccctgctcttcctgatctttgatgagaacaagtcctggtacctggaggagaatgtggccacccacggcagccaggaccccggcagcatcaacctgcaggatgagaccttcctggagagcaacaagatgcacgccatcaatggcaagctgtatgccaacctgcggggcctgaccatgtaccagggcgagcgggtggcctggtacatgctggccatgggccaggatgtggacctgcacaccatccacttccacgccgagagcttcctgtacagaaatggagagaactacagagcagatgtggtggacctcttccctggcacctttgaggtggtggagatggtggccagcaaccctggcacctggctgatgcactgccacgtgacagaccacgtgcatgctggcatggagaccctcttcaccgtcttcagcaggacagagcacctgagccccctgaccgtcatcaccaaggagacagagaaggctgtgcccccccgggacatcgaggagggcaatgtgaagatgctgggcatgcagatccccatcaagaatgtggagatgctggcctctgtgctggtggccatctctgtgaccctgctgctggtggtgctggccctgggcggcgtggtgtggtaccagcaccggcagaggaagctgcggaggaacagaagaagcatcctggatgacagcttcaagctgctgtccttcaagcagtag

SEQ ID NO: 155166 - DNA, 3477 bp, synthetic construct
  misc_feature 1..3477: note = Description of Artificial Sequence: Synthetic coding sequence
  source 1..3477: mol_type = other DNA
atggagagcggccacctgctgtgggccctgctcttcatgcagagcctgtggccccagctgacagatggagccaccagggtgtactacctgggcatcagagatgtgcagtggaactatgcccccaagggcagaaatgtcatcaccaaccagcccctggacagcgacatcgtggccagcagcttcctgaagagtgacaagaacagaattggaggcacctacaagaagaccatctacaaggagtacaaggatgacagctacacagatgaggtggcccagcctgcctggctgggcttcctgggccctgtgctgcaggccgaggtgggagatgtgatcctgatccacctgaagaactttgccacccggccctacaccatccacccccacggcgtcttctatgagaaggacagcgagggcagcctgtacccagatggcagcagcggccccctgaaggcagatgacagcgtgcccccaggcggcagccacatctacaactggaccatccctgagggccacgcccccacagatgctgaccctgcctgcctgacctggatctaccacagccacgtggatgccccccgggacatcgccaccggcctcatcggccccctcatcacctgcaagagaggagccctggatggcaacagccccccccagaggcaggatgtggaccatgacttcttcctgctcttctctgtggtggatgagaacctgtcctggcacctgaatgaaaatattgccacctactgcagcgaccctgcctctgtggacaaggaggatgagaccttccaggagagcaacaggatgcacgccatcaatggatttgtgtttggaaacctgcctgagctgaacatgtgtgcccagaagagggtggcctggcacctgtttggcatgggaaatgaaattgatgtgcacacagccttcttccacggccagatgctgaccacccggggccaccacacagatgtggccaacatcttccctgccacctttgtgacagctgagatggtgccctgggagcccggcacctggctgatcagctgccaggtgaacagccacttcagagatggcatgcaggccctgtacaaggtgaagagctgcagcatggcccctcctgtggacctgctgaccgggaaggtgcggcagtacttcatcgaggcccacgagatccagtgggactatggccccatgggccatgatggcagcacaggcaagaacctgcgggagcccggcagcatcagtgacaagttcttccagaagagcagcagccgcatcggcggcacctactggaaggtgcgctatgaggccttccaggatgagaccttccaggagaagatgcacctggaggaggacagacacctgggcatcctgggccctgtgatccgggcagaggtgggggacaccatccaggtggtgttctacaacagagccagccagcccttctccatgcagccccatggagtcttctatgagaaggactatgagggcaccgtgtacaatgatggcagcagctacccaggcctggtggccaagccctttgagaaggtgacctaccgctggacagtgccccctcatgctggccccacagcccaggaccctgcctgcctgacctggatgtacttctctgctgctgaccccatccgggacaccaacagcggcctggtgggccccctgctggtgtgccgggccggggccctgggcgcagatggcaagcagaagggcgtggacaaggagttcttcctgctcttcaccgtgctggatgagaacaagtcctggtacagcaatgccaaccaggccgccgccatgctggacttccggctgctgtctgaagatattgagggcttccaggacagcaacaggatgcacgccatcaatggcttcctgttcagcaacctgccccggctggacatgtgcaagggggacacagtggcctggcacctgctgggcctgggcacagaaacagatgtgcacggcgtgatgttccagggcaacacagtgcagctgcagggcatgaggaagggggccgccatgctgttcccccacacctttgtgatggccatcatgcagcctgacaacctgggcacctttgagatctactgccaggccggcagccaccgggaggccggcatgagggccatctacaacgtgtcccagtgccccggccaccaggccaccccccggcagcgctaccaggccgcccgcatctactacatcatggccgaggaggtggagtgggactactgcccagaccgctcctgggagcgggagtggcacaaccagagcgagaaggacagctatggctacatcttcctgagcaacaaggatggcctgctgggcagccgctacaagaaggctgtgttccgggagtacacagatggcaccttccgcatcccccggcccaggactggacctgaggagcacctgggcatcctgggccccctcatcaagggggaggtgggggacatcctgactgtggtgttcaagaacaatgccagccggccctacagcgtgcacgcccatggagtgctggagagcaccaccgtgtggcccctggccgctgagcccggggaggtggtgacctaccagtggaacatccctgagaggagcggccctggccccaatgattctgcctgtgtgtcctggatctactacagcgctgtggaccccatcaaggacatgtacagcggcctggtgggccccctggccatctgccagaagggcatcctggagccccatggaggccgcagtgacatggaccgggagtttgccctgctcttcctgatctttgatgagaacaagtcctggtacctggaggagaatgtggccacccacggcagccaggaccccggcagcatcaacctgcaggatgagaccttcctggagagcaacaagatgcacgccatcaacgggaagctgtatgccaacctgcggggcctgaccatgtaccagggcgagcgggtggcctggtacatgctggccatgggccaggatgtggacctgcacaccatccacttccacgccgagagcttcctgtacagaaatggagagaactacagagcagatgtggtggacctcttccctggcacctttgaggtggtggagatggtggccagcaaccctggcacctggctgatgcactgccacgtgacagaccacgtgcacgccggcatggagaccctcttcaccgtcttcagcaggacagagcacctgagccccctgaccgtcatcaccaaggagacagagaaggctgtgcccccccgggacatcgaggagggcaatgtgaagatgctgggcatgcagatccccatcaagaatgtggagatgctggcctctgtgctggtggccatctctgtgaccctgctgctggtggtgctggccctgggcggcgtggtgtggtaccagcaccggcagaggaagctgcggaggaacagaagaagcatcctggatgacagcttcaagctgctgtccttcaagcagtag

SEQ ID NO: 155167 - DNA, 3486 bp, synthetic construct
  misc_feature 1..3486: note = Description of Artificial Sequence: Synthetic coding sequence
  source 1..3486: mol_type = other DNA
atgtgggccatggagagcggccacctgctgtgggccctgctcttcatgcagagcctgtggccccagctgacagatggagccaccagggtgtactacctgggcatcagagatgtgcagtggaactatgcccccaagggcagaaatgtcatcaccaaccagcccctggacagcgacatcgtggccagcagcttcctgaagagtgacaagaaccgcatcggcggcacctacaagaagaccatctacaaggagtacaaggatgacagctacacagatgaggtggcccagcctgcctggctgggcttcctgggccctgtgctgcaggccgaggtgggagatgtgatcctgatccacctgaagaactttgccacccggccctacaccatccacccccatggagtcttctatgagaaggacagcgagggcagcctgtacccagatggcagcagcggccccctgaaggcagatgattctgtgcccccaggcggcagccacatctacaactggaccatccctgagggccacgcccccacagatgctgaccctgcctgcctgacctggatctaccacagccacgtggatgccccccgggacatcgccaccggcctgattggccccctcatcacctgcaagagaggagccctggatggcaacagccccccccagaggcaggatgtggaccatgacttcttcctgctcttctctgtggtggatgagaacctgtcctggcacctgaatgaaaacatcgccacctactgcagcgaccctgcctctgtggacaaggaggatgagaccttccaggagagcaacaggatgcacgccatcaatggatttgtgtttggaaacctgcctgagctgaacatgtgtgcccagaagagggtggcctggcacctgtttggcatgggaaatgaaattgatgtgcacacagccttcttccacggccagatgctgaccacccggggccaccacacagatgtggccaacatcttccctgccacctttgtgacagctgagatggtgccctgggagcccggcacctggctgatcagctgccaggtgaacagccacttcagagatggcatgcaggccctgtacaaggtgaagagctgcagcatggcccctcctgtggacctgctgaccgggaaggtgcggcagtacttcatcgaggcccacgagatccagtgggactatggccccatgggccatgatggcagcacaggcaagaacctgcgggagcccggcagcatcagtgacaagttcttccagaagagcagcagcagaattggaggcacctactggaaggtgcgctatgaggccttccaggatgagaccttccaggagaagatgcacctggaggaggacagacacctgggcatcctgggccctgtgatccgggcagaggtgggggacaccatccaggtggtgttctacaacagagccagccagcccttctccatgcagccccacggcgtcttctatgagaaggactatgagggcaccgtgtacaatgatggcagcagctacccaggcctggtggccaagccctttgagaaggtgacctaccgctggacagtgccccctcatgctggccccacagcccaggaccctgcctgcctgacctggatgtacttctctgctgctgaccccatccgggacaccaacagcggcctggtgggccccctgctggtgtgcagagctggggccctgggcgcagatggcaagcagaagggcgtggacaaggagttcttcctgctcttcaccgtgctggatgagaacaagtcctggtacagcaatgccaaccaggccgccgccatgctggacttccggctgctgtctgaggacatcgagggcttccaggacagcaacaggatgcacgccatcaatggcttcctgttcagcaacctgccccggctggacatgtgcaagggggacacagtggcctggcacctgctgggcctgggcacagaaacagatgtgcatggagtgatgttccagggcaacacagtgcagctgcagggcatgaggaaaggagctgccatgctgttcccccacacctttgtgatggccatcatgcagcctgacaacctgggcacctttgagatctactgccaggccggcagccaccgggaggccggcatgagggccatctacaacgtgtcccagtgccccggccaccaggccaccccccggcagcgctaccaggccgcccgcatctactacatcatggccgaggaggtggagtgggactactgcccagaccgctcctgggagcgggagtggcacaaccagagcgagaaggacagctatggctacatcttcctgagcaacaaggatggcctgctgggcagccgctacaagaaggctgtgttccgggagtacacagatggcaccttccgcatcccccggcccaggacaggccctgaggagcacctgggcatcctgggccccctcatcaagggggaggtgggggacatcctgactgtggtgttcaagaacaatgccagccggccctacagcgtgcacgcccacggcgtgctggagagcaccaccgtgtggcccctggccgctgagcctggagaggtggtgacctaccagtggaacatccctgagaggagcggccctggccccaatgacagcgcctgtgtgtcctggatctactacagcgctgtggaccccatcaaggacatgtacagcggcctggtgggccccctggccatctgccagaagggcatcctggagccccacggcggccgcagtgacatggaccgggagtttgccctgctcttcctgatctttgatgagaacaagtcctggtacctggaggagaatgtggccacccacggcagccaggaccccggcagcatcaacctgcaggatgagaccttcctggagagcaacaagatgcacgccatcaatggcaagctgtatgccaacctgcggggcctgaccatgtaccagggcgagcgggtggcctggtacatgctggccatgggccaggatgtggacctgcacaccatccacttccacgccgagagcttcctgtacagaaatggagagaactacagagcagatgtggtggacctcttccctggcacctttgaggtggtggagatggtggccagcaaccctggcacctggctgatgcactgccacgtgacagaccacgtgcatgctggcatggagaccctcttcaccgtcttcagcaggacagagcacctgagccccctgaccgtcatcaccaaggagacagagaaggctgtgcccccccgggacatcgaggagggcaatgtgaagatgctgggcatgcagatccccatcaagaatgtggagatgctggcctctgtgctggtggccatctctgtgaccctgctgctggtggtgctggccctgggcggcgtggtgtggtaccagcaccggcagaggaagctgcggaggaacagaagaagcatcctggatgacagcttcaagctgctgtccttcaagcagtag

SEQ ID NO: 155168 - DNA, 2910 bp, synthetic construct
  misc_feature 1..2910: note = Description of Artificial Sequence: Synthetic coding sequence
  source 1..2910: mol_type = other DNA
atgtgggccatggagagcggccacctgctgtgggccctgctcttcatgcagagcctgtggccccagctgacagatggagccaccagggtgtactacctgggcatcagagatgtgcagtggaactatgcccccaagggcagaaatgtcatcaccaaccagcccctggacagcgacatcgtggccagcagcttcctgaagagtgacaagaaccgcatcggcggcacctacaagaagaccatctacaaggagtacaaggatgacagctacacagatgaggtggcccagcctgcctggctgggcttcctgggccctgtgctgcaggccgaggtgggagatgtgatcctgatccacctgaagaactttgccacccggccctacaccatccacccccatggagtcttctatgagaaggacagcgagggcagcctgtacccagatggcagcagcggccccctgaaggcagatgattctgtgcccccaggcggcagccacatctacaactggaccatccctgagggccacgcccccacagatgctgaccctgcctgcctgacctggatctaccacagccacgtggatgccccccgggacatcgccaccggcctgattggccccctcatcacctgcaagagaggagccctggatggcaacagccccccccagaggcaggatgtggaccatgacttcttcctgctcttctctgtggtggatgagaacctgtcctggcacctgaatgaaaacatcgccacctactgcagcgaccctgcctctgtggacaaggaggatgagaccttccaggagagcaacaggatgcacgccatcaatggatttgtgtttggaaacctgcctgagctgaacatgtgtgcccagaagagggtggcctggcacctgtttggcatgggaaatgaaattgatgtgcacacagccttcttccacggccagatgctgaccacccggggccaccacacagatgtggccaacatcttccctgccacctttgtgacagctgagatggtgccctgggagcccggcacctggctgatcagctgccaggtgaacagccacttcagagatggcatgcaggccctgtacaaggtgaagagctgcagcatggcccctcctgtggacctgctgaccgggaaggtgcggcagtacttcatcgaggcccacgagatccagtgggactatggccccatgggccatgatggcagcacaggcaagaacctgcgggagcccggcagcatcagtgacaagttcttccagaagagcagcagcagaattggaggcacctactggaaggtgcgctatgaggccttccaggatgagaccttccaggagaagatgcacctggaggaggacagacacctgggcatcctgggccctgtgatccgggcagaggtgggggacaccatccaggtggtgttctacaacagagccagccagcccttctccatgcagccccacggcgtcttctatgagaaggactatgagggcaccgtgtacaatgatggcacctttgagatctactgccaggccggcagccaccgggaggccggcatgagggccatctacaacgtgtcccagtgccccggccaccaggccaccccccggcagcgctaccaggccgcccgcatctactacatcatggccgaggaggtggagtgggactactgcccagaccgctcctgggagcgggagtggcacaaccagagcgagaaggacagctatggctacatcttcctgagcaacaaggatggcctgctgggcagccgctacaagaaggctgtgttccgggagtacacagatggcaccttccgcatcccccggcccaggacaggccctgaggagcacctgggcatcctgggccccctcatcaagggggaggtgggggacatcctgactgtggtgttcaagaacaatgccagccggccctacagcgtgcacgcccacggcgtgctggagagcaccaccgtgtggcccctggccgctgagcctggagaggtggtgacctaccagtggaacatccctgagaggagcggccctggccccaatgacagcgcctgtgtgtcctggatctactacagcgctgtggaccccatcaaggacatgtacagcggcctggtgggccccctggccatctgccagaagggcatcctggagccccacggcggccgcagtgacatggaccgggagtttgccctgctcttcctgatctttgatgagaacaagtcctggtacctggaggagaatgtggccacccacggcagccaggaccccggcagcatcaacctgcaggatgagaccttcctggagagcaacaagatgcacgccatcaatggcaagctgtatgccaacctgcggggcctgaccatgtaccagggcgagcgggtggcctggtacatgctggccatgggccaggatgtggacctgcacaccatccacttccacgccgagagcttcctgtacagaaatggagagaactacagagcagatgtggtggacctcttccctggcacctttgaggtggtggagatggtggccagcaaccctggcacctggctgatgcactgccacgtgacagaccacgtgcatgctggcatggagaccctcttcaccgtcttcagcaggacagagcacctgagccccctgaccgtcatcaccaaggagacagagaaggctgtgcccccccgggacatcgaggagggcaatgtgaagatgctgggcatgcagatccccatcaagaatgtggagatgctggcctctgtgctggtggccatctctgtgaccctgctgctggtggtgctggccctgggcggcgtggtgtggtaccagcaccggcagaggaagctgcggaggaacagaagaagcatcctggatgacagcttcaagctgctgtccttcaagcagtag

SEQ ID NO: 155169 - DNA, 2436 bp, synthetic construct
  misc_feature 1..2436: note = Description of Artificial Sequence: Synthetic coding sequence
  source 1..2436: mol_type = other DNA
atggagagcggccacctgctgtgggccctgctcttcatgcagagcctgtggccccagctgacagatggagccaccagggtgtactacctgggcatcagagatgtgcagtggaactatgcccccaagggcagaaatgtcatcaccaaccagcccctggacagcgacatcgtggccagcagcttcctgaagagtgacaagaacagaattggaggcacctacaagaagaccatctacaaggagtacaaggatgacagctacacagatgaggtggcccagcctgcctggctgggcttcctgggccctgtgctgcaggccgaggtgggagatgtgatcctgatccacctgaagaactttgccacccggccctacaccatccacccccacggcgtcttctatgagaaggacagcgagggcagcctgtacccagatggcagcagcggccccctgaaggcagatgacagcgtgcccccaggcggcagccacatctacaactggaccatccctgagggccacgcccccacagatgctgaccctgcctgcctgacctggatctaccacagccacgtggatgccccccgggacatcgccaccggcctcatcggccccctcatcacctgcaagagaggagccctggatggcaacagccccccccagaggcaggatgtggaccatgacttcttcctgctcttctctgtggtggatgagaacctgtcctggcacctgaatgaaaatattgccacctactgcagcgaccctgcctctgtggacaaggaggatgagaccttccaggagagcaacaggatgcacgccatcaatggatttgtgtttggaaacctgcctgagctgaacatgtgtgcccagaagagggtggcctggcacctgtttggcatgggaaatgaaattgatgtgcacacagccttcttccacggccagatgctgaccacccggggccaccacacagatgtggccaacatcttccctgccacctttgtgacagctgagatggtgccctgggagcccggcacctggctgatcagctgccaggtgaacagccacttcagagatggcatgcaggccctgtacaaggtgaagagctgcagcatggcccctcctgtggacctgctgaccgggaaggtgcggcagtacttcatcgaggcccacgagatccagtgggactatggccccatgggccatgatggcagcacaggcaagaacctgcgggagcccggcagcatcagtgacaagttcttccagaagagcagcagccgcatcggcggcacctactggaaggtgcgctatgaggccttccaggatgagaccttccaggagaagatgcacctggaggaggacagacacctgggcatcctgggccctgtgatccgggcagaggtgggggacaccatccaggtggtgttctacaacagagccagccagcccttctccatgcagccccatggagtcttctatgagaaggactatgagggcaccgtgtacaatgatgaccccatccgggacaccaacagcggcctggtgggccccctgctggtgtgcagagctggggccctgggcgcagatggcaagcagaagggcgtggacaaggagttcttcctgctcttcaccgtgctggatgagaacaagtcctggtacagcaatgccaaccaggccgccgccatgctggacttccggctgctgtctgaggacatcgagggcttccaggacagcaacaggatgcacgccatcaatggcttcctgttcagcaacctgccccggctggacatgtgcaagggggacacagtggcctggcacctgctgggcctgggcacagaaacagatgtgcatggagtgatgttccagggcaacacagtgcagctgcagggcatgaggaaaggagctgccatgctgttcccccacacctttgtgatggccatcatgcagcctgacaacctgggcacctttgagatctactgccaggccggcagccaccgggaggccggcatgagggccatctacaacgtgtcccagtgccccggccaccaggccaccccccggcagcgctaccaggccgcccgcatctactacatcatggccgaggaggtggagtgggactactgcccagaccgctcctgggagcgggagtggcacaaccagagcgagaaggacagctatggctacatcttcctgagcaacaaggatggcctgctgggcagccgctacaagaaggctgtgttccgggagtacacagatggcaccttccgcatcccccggcccaggacaggccctgaggagcacctgggcatcctgggccccctcatcaagggggaggtgggggacatcctgactgtggtgttcaagaacaatgccagccggccctacagcgtgcacgcccacggcgtgctggagagcaccaccgtgtggcccctggccgctgagccctag

SEQ ID NO: 155170 - DNA, 3483 bp, synthetic construct
  misc_feature 1..3483: note = Description of Artificial Sequence: Synthetic coding sequence
  source 1..3483: mol_type = other DNA
atgtgggccatggagagcggccacctgctgtgggccctgctcttcatgcagagcctgtggccccagctgacagatggagccaccagggtgtactacctgggcatcagagatgtgcagtggaactatgcccccaagggcagaaatgtcatcaccaaccagcccctggacagcgacatcgtggccagcagcttcctgaagagtgacaagaaccgcatcggcggcacctacaagaagaccatctacaaggagtacaaggatgacagctacacagatgaggtggcccagcctgcctggctgggcttcctgggccctgtgctgcaggccgaggtgggagatgtgatcctgatccacctgaagaactttgccacccggccctacaccatccacccccatggagtcttctatgagaaggacagcgagggcagcctgtacccagatggcagcagcggccccctgaaggcagatgattctgtgcccccaggcggcagccacatctacaactggaccatccctgagggccacgcccccacagatgctgaccctgcctgcctgacctggatctaccacagccacgtggatgccccccgggacatcgccaccggcctgattggccccctcatcacctgcaagagaggagccctggatggcaacagccccccccagaggcaggatgtggaccatgacttcttcctgctcttctctgtggtggatgagaacctgtcctggcacctgaatgaaaacatcgccacctactgcagcgaccctgcctctgtggacaaggaggatgagaccttccaggagagcaacaggatgcacgccatcaatggatttgtgtttggaaacctgcctgagctgaacatgtgtgcccagaagagggtggcctggcacctgtttggcatgggaaatgaaattgatgtgcacacagccttcttccacggccagatgctgaccacccggggccaccacacagatgtggccaacatcttccctgccacctttgtgacagctgagatggtgccctgggagcccggcacctggctgatcagctgccaggtgaacagccacttcagagatggcatgcaggccctgtacaaggtgaagagctgcagcatggcccctcctgtggacctgctgaccgggaaggtgcggcagtacttcatcgaggcccacgagatccagtgggactatggccccatgggccatgatggcagcacaggcaagaacctgcgggagcccggcagcatcagtgacaagttcttccagaagagcagcagcagaattggaggcacctactggaaggtgcgctatgaggccttccaggatgagaccttccaggagaagatgcacctggaggaggacagacacctgggcatcctgggccctgtgatccgggcagaggtgggggacaccatccaggtggtgttctacaacagagccagccagcccttctccatgcagccccacggcgtcttctatgagaaggactatgagggcaccgtgtacaatgatggcagcagctacccaggcctggtggccaagccctttgagaaggtgacctaccgctggacagtgccccctcatgctggccccacagcccaggaccctgcctgcctgacctggatgtacttctctgctgctgaccccatccgggacaccaacagcggcctggtgggccccctgctggtgtgcagagctggggccctgggcgcagatggcaagcagaagggcgtggacaaggagttcttcctgctcttcaccgtgctggatgagaacaagtcctggtacagcaatgccaaccaggccgccgccatgctggacttccggctgctgtctgaggacatcgagggcttccaggacagcaacaggatgcacgccatcaatggcttcctgttcagcaacctgccccggctggacatgtgcaagggggacacagtggcctggcacctgctgggcctgggcacagaaacagatgtgcatggagtgatgttccagggcaacacagtgcagctgcagggcatgaggaaaggagctgccatgctgttcccccacacctttgtgatggccatcatgcagcctgacaacctgggcacctttgagatctactgccaggccggcagccaccgggaggccggcatgagggccatctacaacgtgtcccagtgccccggccaccaggccaccccccggcagcgctaccaggccgcccgcatctactacatcatggccgaggaggtggagtgggactactgcccagaccgctcctgggagcgggagtggcacaaccagagcgagaaggacagctatggctacatcttcctgagcaacaaggatggcctgctgggcagccgctacaagaaggctgtgttccgggagtacacagatggcaccttccgcatcccccggcccaggacaggccctgaggagcacctgggcatcctgggccccctcatcaagggggaggtgggggacatcctgactgtggtgttcaagaacaatgccagccggccctacagcgtgcacgcccacggcgtgctggagagcaccaccgtgtggcccctggccgctgagcctggagaggtggtgacctaccagtggaacatccctgagaggagcggccctggccccaatgacagcgcctgtgtgtcctggatctactacagcgctgtggaccccatcaaggacatgtacagcggcctggtgggccccctggccatctgccagaagggcatcctggagccccacggcggccgcagtgacatggaccgggagtttgccctgctcttcctgatctttgatgagaacaagtcctggtacctggaggagaatgtggccacccacggcagccaggaccccggcagcatcaacctgcaggatgagaccttcctggagagcaacaagatgcacgccatcaatggcaagctgtatgccaacctgcggggcctgaccatgtaccagggcgagcgggtggcctggtacatgctggccatgggccaggatgtggacctgcacaccatccacttccacgccgagagcttcctgtacagaaatggagagaactacagagcagatgtggtggacctcttccctggcacctttgaggtggtggagatggtggccagcaaccctggcacctggctgatgcactgccacgtgacagaccacgtgcatgctggcatggagaccctcttcaccgtcttcagcaggacagagcacctgagccccctgaccgtcatcaccaaggagacagagaaggtgcccccccgggacatcgaggagggcaatgtgaagatgctgggcatgcagatccccatcaagaatgtggagatgctggcctctgtgctggtggccatctctgtgaccctgctgctggtggtgctggccctgggcggcgtggtgtggtaccagcaccggcagaggaagctgcggaggaacagaagaagcatcctggatgacagcttcaagctgctgtccttcaagcagtag

SEQ ID NO: 155171 - DNA, 627 bp, synthetic construct
  misc_feature 1..627: note = Description of Artificial Sequence: Synthetic coding sequence
  source 1..627: mol_type = other DNA
atggagagcggccacctgctgtgggccctgctcttcatgcagagcctgtggccccagctgacagatggagccaccagggtgtactacctgggcatcagagatgtgcagtggaactatgcccccaagggcagaaatgtcatcaccaaccagcccctggacagcgacatcgtggccagcagcttcctgaagagtgacaagaacagaattggaggcacctacaagaagaccatctacaaggagtacaaggatgacagctacacagatgaggtggcccagcctgcctggctgggcttcctgggccctgtgctgcaggccgaggtgggagatgtgatcctgatccacctgaagaactttgccacccggccctacaccatccacccccacggcgtcttctatgagaaggacagcgagggcagcctgtacccagatggcagcagcggccccctgaaggcagatgacagcgtgcccccaggcggcagccacatctacaactggaccatccctgagggccacgcccccacagatgctgaccctgcctgcctgacctggatctaccacagccacgtggatgccccccgggacatcgccaccggcctcatcggccccctcatcacctgcaagaggtag

SEQ ID NO: 155172 - DNA, 3639 bp, synthetic construct
  misc_feature 1..3639: note = Description of Artificial Sequence: Synthetic coding sequence
  source 1..3639: mol_type = other DNA
atgacccagaccctgccctaccacctgagcctgctgaatgtgctcttccctggcccctgcagccgccacttcaagttcagaagaggaaaatgtgcccagcctgcctggaggaaggtgtctgcccccagccaggacctgctgatcaccaaggtgatgtgggccatggagagcggccacctgctgtgggccctgctcttcatgcagagcctgtggccccagctgacagatggagccaccagggtgtactacctgggcatcagagatgtgcagtggaactatgcccccaagggcagaaatgtcatcaccaaccagcccctggacagcgacatcgtggccagcagcttcctgaagagtgacaagaacagaattggaggcacctacaagaagaccatctacaaggagtacaaggatgacagctacacagatgaggtggcccagcctgcctggctgggcttcctgggccctgtgctgcaggccgaggtgggagatgtgatcctgatccacctgaagaactttgccacccggccctacaccatccacccccacggcgtcttctatgagaaggacagcgagggcagcctgtacccagatggcagcagcggccccctgaaggcagatgacagcgtgcccccaggcggcagccacatctacaactggaccatccctgagggccacgcccccacagatgctgaccctgcctgcctgacctggatctaccacagccacgtggatgccccccgggacatcgccaccggcctcatcggccccctcatcacctgcaagagaggagccctggatggcaacagccccccccagaggcaggatgtggaccatgacttcttcctgctcttctctgtggtggatgagaacctgtcctggcacctgaatgaaaatattgccacctactgcagcgaccctgcctctgtggacaaggaggatgagaccttccaggagagcaacaggatgcacgccatcaatggatttgtgtttggaaacctgcctgagctgaacatgtgtgcccagaagagggtggcctggcacctgtttggcatgggaaatgaaattgatgtgcacacagccttcttccacggccagatgctgaccacccggggccaccacacagatgtggccaacatcttccctgccacctttgtgacagctgagatggtgccctgggagcccggcacctggctgatcagctgccaggtgaacagccacttcagagatggcatgcaggccctgtacaaggtgaagagctgcagcatggcccctcctgtggacctgctgaccgggaaggtgcggcagtacttcatcgaggcccacgagatccagtgggactatggccccatgggccatgatggcagcacaggcaagaacctgcgggagcccggcagcatcagtgacaagttcttccagaagagcagcagccgcatcggcggcacctactggaaggtgcgctatgaggccttccaggatgagaccttccaggagaagatgcacctggaggaggacagacacctgggcatcctgggccctgtgatccgggcagaggtgggggacaccatccaggtggtgttctacaacagagccagccagcccttctccatgcagccccatggagtcttctatgagaaggactatgagggcaccgtgtacaatgatggcagcagctacccaggcctggtggccaagccctttgagaaggtgacctaccgctggacagtgccccctcatgctggccccacagcccaggaccctgcctgcctgacctggatgtacttctctgctgctgaccccatccgggacaccaacagcggcctggtgggccccctgctggtgtgccgggccggggccctgggcgcagatggcaagcagaagggcgtggacaaggagttcttcctgctcttcaccgtgctggatgagaacaagtcctggtacagcaatgccaaccaggccgccgccatgctggacttccggctgctgtctgaagatattgagggcttccaggacagcaacaggatgcacgccatcaatggcttcctgttcagcaacctgccccggctggacatgtgcaagggggacacagtggcctggcacctgctgggcctgggcacagaaacagatgtgcacggcgtgatgttccagggcaacacagtgcagctgcagggcatgaggaagggggccgccatgctgttcccccacacctttgtgatggccatcatgcagcctgacaacctgggcacctttgagatctactgccaggccggcagccaccgggaggccggcatgagggccatctacaacgtgtcccagtgccccggccaccaggccaccccccggcagcgctaccaggccgcccgcatctactacatcatggccgaggaggtggagtgggactactgcccagaccgctcctgggagcgggagtggcacaaccagagcgagaaggacagctatggctacatcttcctgagcaacaaggatggcctgctgggcagccgctacaagaaggctgtgttccgggagtacacagatggcaccttccgcatcccccggcccaggactggacctgaggagcacctgggcatcctgggccccctcatcaagggggaggtgggggacatcctgactgtggtgttcaagaacaatgccagccggccctacagcgtgcacgcccatggagtgctggagagcaccaccgtgtggcccctggccgctgagcccggggaggtggtgacctaccagtggaacatccctgagaggagcggccctggccccaatgattctgcctgtgtgtcctggatctactacagcgctgtggaccccatcaaggacatgtacagcggcctggtgggccccctggccatctgccagaagggcatcctggagccccatggaggccgcagtgacatggaccgggagtttgccctgctcttcctgatctttgatgagaacaagtcctggtacctggaggagaatgtggccacccacggcagccaggaccccggcagcatcaacctgcaggatgagaccttcctggagagcaacaagatgcacgccatcaacgggaagctgtatgccaacctgcggggcctgaccatgtaccagggcgagcgggtggcctggtacatgctggccatgggccaggatgtggacctgcacaccatccacttccacgccgagagcttcctgtacagaaatggagagaactacagagcagatgtggtggacctcttccctggcacctttgaggtggtggagatggtggccagcaaccctggcacctggctgatgcactgccacgtgacagaccacgtgcacgccggcatggagaccctcttcaccgtcttcagcaggacagagcacctgagccccctgaccgtcatcaccaaggagacagagaaggctgtgcccccccgggacatcgaggagggcaatgtgaagatgctgggcatgcagatccccatcaagaatgtggagatgctggcctctgtgctggtggccatctctgtgaccctgctgctggtggtgctggccctgggcggcgtggtgtggtaccagcaccggcagaggaagctgcggaggaacagaagaagcatcctggatgacagcttcaagctgctgtccttcaagcagtag

SEQ ID NO: 155173 - DNA, 1254 bp, synthetic construct
  misc_feature 1..1254: note = Description of Artificial Sequence: Synthetic coding sequence
  source 1..1254: mol_type = other DNA
atggcccagaaggagggcggccgcacagtgccctgctgcagccggcccaaggtggccgccctgacagctggcaccctgctgctgctgacagccatcggggccgcctcctgggccatcgtggccgtgctgctgcggagtgaccaggagcccctgtaccctgtgcaggtgagcagcgcagatgcccggctgatggtgtttgacaagacagagggcacctggaggctgctgtgcagcagccgcagcaatgcccgggtggccggcctgagctgtgaggagatgggcttcctgcgggccctgacccacagcgagctggatgtgaggacagctggggccaacggcaccagcggcttcttctgtgtggatgagggccgcctgccccacacccagaggctgctggaggtgatctctgtgtgtgactgcccccggggccgcttcctggccgccatctgccaggactgtggccgcaggaagctgcctgtggacagaattgtgggcggccgggacaccagcctgggccgctggccctggcaggtgtccctgcgctatgatggagcccacctgtgtggcggcagcctgctgagcggggactgggtgctgacagctgcccactgcttccctgagaggaacagagtgctgagccgctggagggtgtttgctggagctgtggcccaggccagcccccacggcctgcagctgggcgtgcaggccgtggtgtaccacggcggctacctgcccttccgggaccccaacagcgaggagaacagcaatgacatcgccctggtgcacctgagcagccccctgcccctgacagagtacatccagcctgtgtgcctgcctgctgctggccaggccctggtggatggcaagatctgcaccgtgacaggctggggcaacacccagtactacggccagcaggccggcgtgctgcaggaggcccgggtgcccatcatcagcaatgatgtgtgcaatggagctgacttctacggcaaccagatcaagcccaagatgttctgtgccggctacccagagggcggcattgatgcctgccagggcgacagcggcggcccctttgtgtgtgaggacagcatcagcaggaccccccgctggaggctgtgtggcatcgtgtcctggggcaccggctgtgccctggcccagaagccaggagtgtacaccaaggtgtctgacttccgggagtggatcttccaggccatcaagacccacagcgaggccagcggcatggtgacccagctgtag

SEQ ID NO: 155174 - DNA, 1254 bp, synthetic construct; identical to SEQ ID NO: 155173
  misc_feature 1..1254: note = Description of Artificial Sequence: Synthetic coding sequence
  source 1..1254: mol_type = other DNA

SEQ ID NO: 155175 - DNA, 1182 bp, synthetic construct
  misc_feature 1..1182: note = Description of Artificial Sequence: Synthetic coding sequence
  source 1..1182: mol_type = other DNA
atgtgcaagatgaggacccgggaggacatgcagctgggcaatgaaggacctggaacagccctgcggctcatccacctgcaggtgagcagcgcagatgcccggctgatggtgtttgacaagacagagggcacctggaggctgctgtgcagcagccgcagcaatgcccgggtggccggcctgagctgtgaggagatgggcttcctgcgggccctgacccacagcgagctggatgtgaggacagctggggccaacggcaccagcggcttcttctgtgtggatgagggccgcctgccccacacccagaggctgctggaggtgatctctgtgtgtgactgcccccggggccgcttcctggccgccatctgccaggactgtggccgcaggaagctgcctgtggacagaattgtgggcggccgggacaccagcctgggccgctggccctggcaggtgtccctgcgctatgatggagcccacctgtgtggcggcagcctgctgagcggggactgggtgctgacagctgcccactgcttccctgagaggaacagagtgctgagccgctggagggtgtttgctggagctgtggcccaggccagcccccacggcctgcagctgggcgtgcaggccgtggtgtaccacggcggctacctgcccttccgggaccccaacagcgaggagaacagcaatgacatcgccctggtgcacctgagcagccccctgcccctgacagagtacatccagcctgtgtgcctgcctgctgctggccaggccctggtggatggcaagatctgcaccgtgacaggctggggcaacacccagtactacggccagcaggccggcgtgctgcaggaggcccgggtgcccatcatcagcaatgatgtgtgcaatggagctgacttctacggcaaccagatcaagcccaagatgttctgtgccggctacccagagggcggcattgatgcctgccagggcgacagcggcggcccctttgtgtgtgaggacagcatcagcaggaccccccgctggaggctgtgtggcatcgtgtcctggggcaccggctgtgccctggcccagaagccaggagtgtacaccaaggtgtctgacttccgggagtggatcttccaggccatcaaggtgaaggtgggcagccgctgggagcccggctggggccgcctgggcgtgtag

SEQ ID NO: 155176 - DNA, 2103 bp, synthetic construct
  misc_feature 1..2103: note = Description of Artificial Sequence: Synthetic coding sequence
  source 1..2103: mol_type = other DNA
atgaagtgtgtgctggtggccacagagggcgctgaggtgctcttctactggacagaccaggagtttgaggagagcctgcggctgaagtttggccagagtgaaaatgaggaggaggagctgcctgccctggaggaccagctgagcaccctgctggcccctgtgatcatcagctccatgaccatgctggagaagctgagtgacacctacacctgcttcagcacagaaaatggaaacttcctgtatgtgctgcacctgtttggagagtgcctcttcatcgccatcaatggagaccacacagaaagtgaaggagacctgcggaggaagctgtatgtgctgaagtacctgtttgaggtgcacttcggcctggtgacagtggatggccacctgatcaggaaggagctgcggcccccagacctggcccagagggtgcagctgtgggagcacttccagagcctgctgtggacctacagccggctgcgggagcaggagcagtgctttgctgtggaggccctggagcggctcatccacccccagctgtgtgagctgtgcatcgaggccctggagcggcacgtgatccaggccgtgaacaccagccctgagcggggcggggaggaggccctgcacgccttcctgctggtgcacagcaagctgctggccttctacagcagccacagcgccagcagcctgcggcctgctgacctgctggccctgatcctgctggtgcaggacctgtaccccagcgagagcacagcagaagatgacatccagcccagcccccggcgggcccggagcagccagaacatccctgtgcagcaggcctggagcccccacagcacaggccccaccggcggcagcagcgctgagacagaaacagacagcttcagcctgcctgaggagtacttcaccccagcccccagccctggggaccagagcagcggcagcaccatctggctggagggcggcaccccacccatggatgccctgcagattgctgaggacaccctgcagaccctggtgccccactgccctgtgcccagcggcccccggcgcatcttcctggatgccaacgtgaaggagagctactgccccctggtgccccacaccatgtactgcctgcccctgtggcagggcatcaacctggtgctgctgaccaggagccccagcgcccccctggccctggtgctgagccagctgatggatggcttctccatgctggagaagaagctgaaggagggccctgagcccggggccagcctgcggagccagcccctggtgggggacctgcggcagaggatggacaagtttgtgaagaacagaggagcccaggagatccagagcacctggctggagttcaaggccaaggccttcagcaagtctgagcccggcagctcctgggagctgctgcaggcctgtgggaagctgaagaggcagctgtgtgccatctaccgcctgaacttcctgaccacagcccccagccggggcggcccccacctgccccagcacctgcaggaccaggtgcagaggctgatgagggagaagctgacagactggaaggacttcctgctggtgaagagcagaagaaacatcaccatggtgtcctacctggaggacttccctggcctggtgcacttcatctacgtggacaggaccaccggccagatggtggcccccagcctgaactgcagccagaagaccagcagcgagctgggcaagggccccctggccgcctttgtgaagaccaaggtgtggagcctcatccagctggcccggcgctacctgcagaagggctacaccaccctgctcttccaggagggggacttctactgcagctacttcctgtggtttgaaaatgacatgggctacaagctgcagatgattgaggtgcctgtgctgagtgatgattctgtgcccatcggcatgctgggcggggactactacaggaagctgctgcgctactacagcaagaaccggcccacagaagctgtgcgctgctatgagctgctggccctgcacctgagcgtcatccccacagacctgctggtgcagcaggccggccagctggcccggcggctgtgggaggccagccgcatccccctgctgtag

SEQ ID NO: 155177 - DNA, 975 bp, synthetic construct
  misc_feature 1..975: note = Description of Artificial Sequence: Synthetic coding sequence
  source 1..975: mol_type = other DNA
atgaagtgtgtgctggtggccacagagggcgctgaggtgctcttctactggacagaccaggagtttgaggagagcctgcggctgaagtttggccagagtgaaaatgaggaggaggagctgcctgccctggaggaccagctgagcaccctgctggcccctgtgatcatcagctccatgaccatgctggagaagctgagtgacacctacacctgcttcagcacagaaaatggaaacttcctgtatgtgctgcacctgtttggagagtgcctcttcatcgccatcaatggagaccacacagaaagtgaaggagacctgcggaggaagctgtatgtgctgaagtacctgtttgaggtgcacttcggcctggtgacagtggatggccacctgatcaggaaggagctgcggcccccagacctggcccagagggtgcagctgtgggagcacttccagagcctgctgtggacctacagccggctgcgggagcaggagcagtgctttgctgtggaggccctggagcggctcatccacccccagctgtgtgagctgtgcatcgaggccctggagcggcacgtgatccaggccgtgaacaccagccctgagcggggcggggaggaggccctgcacgccttcctgctggtgcacagcaagctgctggccttctacagcagccacagcgccagcagcctgcggcctgctgacctgctggccctgatcctgctggtgcaggacctgtaccccagcgagagcacagcagaagatgacatccagcccagcccccggcgggcccggagcagccagaacatccctgtgcagcaggcctggagcccccacagcacaggccccaccggcggcagcagcgctgagacagaaacagacagcttcagcctgcctgaggagtacttcaccccagcccccagccctggggaccagagcagcggggaggacaggaggaaggccggcggcaacaacagctag

SEQ ID NO: 155178 - DNA, 981 bp, synthetic construct
  misc_feature 1..981: note = Description of Artificial Sequence: Synthetic coding sequence
  source 1..981: mol_type = other DNA
cggctcatccacccccagctgtgtgagctgtgcatcgaggccctggagcggcacgtgatccaggccgtgaacaccagccctgagcggggcggggaggaggccctgcacgccttcctgctggtgcacagcaagctgctggccttctacagcagccacagcgccagcagcctgcggcctgctgacctgctggccctgatcctgctggtgcaggacctgtaccccagcgagagcacagcagaagatgacatccaggagacagacagcttcagcctgcctgaggagtacttcaccccagcccccagccctggggaccagagcagcggcagcaccatctggctggagggcggcaccccacccatggatgccctgcagattgctgaggacaccctgcagaccctggtgccccactgccctgtgcccagcggcccccggcgcatcttcctggatgccaacgtgaaggagagctactgccccctggtgccccacaccatgtactgcctgcccctgtggcagggcatcaacctggtgctgctgaccaggagccccagcgcccccctggccctggtgctgagccagctgatggatggcttctccatgctggagaagaagctgaaggagggccctgagcccggggccagcctgcggagccagcccctggtgggggacctgcggcagaggatggacaagtttgtgaagaacagaggagcccaggagatccagagcacctggctggagttcaaggccaaggccttcagcaagtctgagcccggcagctcctgggagctgctgcaggcctgtgggaagctgaagaggcagctgtgtgccatctaccgcctgaacttcctgaccacagcccccagcagaggaggcccccacctgccccagcacctgcaggaccaggtgcagaggctgatgagggagaagctgacagactggaaggacttcctgctggtgaagagcagaagaaacatcaccatgtag

SEQ ID NO: 155179 - DNA, 2103 bp, synthetic construct; identical to SEQ ID NO: 155176
  misc_feature 1..2103: note = Description of Artificial Sequence: Synthetic coding sequence
  source 1..2103: mol_type = other DNA

SEQ ID NO: 155180 - DNA, 2004 bp, synthetic construct
  misc_feature 1..2004: note = Description of Artificial Sequence: Synthetic coding sequence
  source 1..2004: mol_type = other DNA
atgaagtgtgtgctggtggccacagagggcgctgaggtgctcttctactggacagaccaggagtttgaggagagcctgcggctgaagtttggccagagtgaaaatgaggaggaggagctgcctgccctggaggaccagctgagcaccctgctggcccctgtgatcatcagctccatgaccatgctggagaagctgagtgacacctacacctgcttcagcacagaaaatggaaacttcctgtatgtgctgcacctgtttggagagtgcctcttcatcgccatcaatggagaccacacagaaagtgaaggagacctgcggaggaagctgtatgtgctgaagtacctgtttgaggtgcacttcggcctggtgacagtggatggccacctgatcaggaaggagctgcggcccccagacctggcccagagggtgcagctgtgggagcacttccagagcctgctgtggacctacagccggctgcgggagcaggagcagtgctttgctgtggaggccctggagcggctcatccacccccagctgtgtgagctgtgcatcgaggccctggagcggcacgtgatccaggccgtgaacaccagccctgagcggggcggggaggaggccctgcacgccttcctgctggtgcacagcaagctgctggccttctacagcagccacagcgccagcagcctgcggcctgctgacctgctggccctgatcctgctggtgcaggacctgtaccccagcgagagcacagcagaagatgacatccaggagacagacagcttcagcctgcctgaggagtacttcaccccagcccccagccctggggaccagagcagcggcagcaccatctggctggagggcggcaccccacccatggatgccctgcagattgctgaggacaccctgcagaccctggtgccccactgccctgtgcccagcggcccccggcgcatcttcctggatgccaacgtgaaggagagctactgccccctggtgccccacaccatgtactgcctgcccctgtggcagggcatcaacctggtgctgctgaccaggagccccagcgcccccctggccctggtgctgagccagctgatggatggcttctccatgctggagaagaagctgaaggagggccctgagcccggggccagcctgcggagccagcccctggtgggggacctgcggcagaggatggacaagtttgtgaagaacagaggagcccaggagatccagagcacctggctggagttcaaggccaaggccttcagcaagtctgagcccggcagctcctgggagctgctgcaggcctgtgggaagctgaagaggcagctgtgtgccatctaccgcctgaacttcctgaccacagcccccagcagaggaggcccccacctgccccagcacctgcaggaccaggtgcagaggctgatgagggagaagctgacagactggaaggacttcctgctggtgaagagcagaagaaacatcaccatggtgtcctacctggaggacttccctggcctggtgcacttcatctacgtggacaggaccaccggccagatggtggcccccagcctgaactgcagccagaagaccagcagcgagctgggcaagggccccctggccgcctttgtgaagaccaaggtgtggagcctcatccagctggcccggcgctacctgcagaagggctacaccaccctgctcttccaggagggggacttctactgcagctacttcctgtggtttgaaaatgacatgggctacaagctgcagatgattgaggtgcctgtgctgagtgatgacagcgtgcccatcggcatgctgggcggggactactacaggaagctgctgcgctactacagcaagaaccggcccacagaggccgtgcgctgctatgagctgctggccctgcacctgagcgtcatccccacagacctgctggtgcagcaggccggccagctggcccggcggctgtgggaggccagccgcatccccctgctgtag

SEQ ID NO: 155181 - DNA, 480 bp, synthetic construct
  misc_feature 1..480: note = Description of Artificial Sequence: Synthetic coding sequence
  source 1..480: mol_type = other DNA
tgactgcggcccccagacctggcccagagggtgcagctgtgggagcacttccagagcctgctgtggacctacagccggctgcgggagcaggagcagtgctttgctgtggaggccctggagcggctcatccacccccagctgtgtgagctgtgcatcgaggccctggagcggcacgtgatccaggccgtgaacaccagccctgagcggggcggggaggaggccctgcacgccttcctgctggtgcacagcaagctgctggccttctacagcagccacagcgccagcagcctgcggcctgctgacctgctggccctgatcctgctggtgcaggacctgtaccccagcgagagcacagcagaagatgacatccaggagacagacagcttcagcctgcctgaggagtacttcaccccagcccccagccctggggaccagagcagtggagaagatagaaggaaggccggcggcaacaacagctag

SEQ ID NO: 155182 - DNA, 3015 bp, synthetic construct
  misc_feature 1..3015: note = Description of Artificial Sequence: Synthetic coding sequence
  source 1..3015: mol_type = other DNA
atggtgcagctgtacaacctgcaccccttcggcagccagcaggtggtgccctgcaagctggagccagaccgcttctgtggcggcggcagagatgccctgtttgtggccgccggctgcaaggtggaggcctttgctgtggccggccaggagctgtgccagccccgctgtgccttcagcaccctgggccgggtgctgcggctggcctacagcgaggccggggactacctggtggccatcgaggagaagaacaaggccaccttcctgcgggcctacgtgaactggaggaacaagaggacagagaacagccgggtgtgcatccgcatgattggccacaacgtggagggccccttcagcaaggccttccgggaccagatgtacatcatcgagatgcccctgtctgaggcccccctgtgcatcagctgctgccctgtgaagggggacctgctggtgggctgcaccaacaagctggtgctcttcagcctgaagtaccagatcatcaatgaggagttcagcctgctggactttgagaggagcctcatcatccacatcgacaacatcacccctgtggaggtgtccttctgtgtgggctacgtggccgtgatgtctgacctggaggtgctgattgtgaagctggagagcggccccaagaatggagagcgggtgcaccaccacccccacaagaccaacaaccgcatcagaagaacagaggagggcatcagcaatgagatcagccagctggagagtgatgactttgtgatctgccagaagcccctggagctgctgggggagaagtctgagcagagcggcctgtctgtgaccctggagagcacaggcctggctgatgagaagaggaagtacagccacttccagcacctgctgtacagaagatttgccccagacatcagcagctatgtgctgagtgatgacatcaagctgcacagcctgcagctgctgcccatctaccagacaggcagcctgaccagtgatggcaagaacctgagccaggagaaggagctgctgagcctcttctgcttcttcagcctgccccacgtgggctacctgtacatggtggtgaagtctgtggagctgatgtctgtgtaccagtacccagagaagagccagcaggccgtgctgaccccccagttcctgcacgtgatcaccagcaacaacctgcagtgcttcaccgtgcgctgcagcgctgctgctgcccgggaggaggacccctacatggacaccaccctgaaggcctgcccccctgtgtccatggatgtgtgtgccctgcgcatccagctgttcatcggcctgaaggccatctgccacttcaagaaccacatcatcctgctgaccaaggccgagcctgaggccatccctgagcggcggcagagccccaagaggctgctgagcaggaaggacacctctgtgaagatcaagatcccccctgtggccgaggccggctggaacctgtacatcgtgaacaccatcagccctgtgcagctgtacaaggagatggtggactacagcaacacctacaagacagtgaagacccagagctgcatccacctgctgtctgaggcccacctgctggtgcgggccgccctgatggatgccagccagctggagcctggagagaaggccgagctgctggaggccttcaaggagagctgtggccacctgggggactgctacagccggctggacagccagcacagccacctgaccctgccctactacaagatgagcggcctgtccatggccgaggtgctggccaggacagactggacagtggaggatggcctgcagaagtatgaaagaggcctcatcttctacatcaaccacagcctgtatgagaacctggatgaggagctgaatgaggagctggccgccaaggtggtgcagatgttttatgtggccgagcccaagcaggtgccccacatcctgtgcagccccagcatgaagaacatcaaccccctgacagccatgagctacctgaggaagctggacaccagcggcttcagcagcatcctggtgaccctgaccaaggctgctgtggccctgaagatgggagacctggacatgcacagaaatgagatgaagagccacagcgagatgaagctggtgtgtggcttcatcctggagccccggctgctgatccagcagaggaagggccagatcgtgcccacagagctggccctgcacctgaaggagacccagcccggcctgctggtggcctctgtgctgggcctgcagaagaacaacaagattggcatcgaggaggccgacagcttcttcaaggtgctgtgtgccaaggatgaggacaccatcccccagctgctggtggacttctgggaggcccagctggtggcctgcctgcctgatgtggtgctgcaggagctgttcttcaagctgaccagccagtacatctggaggctgagcaagaggcagcccccagacaccacccccctgcggaccagtgaagatctcatcaatgcctgcagccactacggcctcatctacccctgggtgcacgtggtgatcagcagtgacagcctggccgacaagaactacacagaggacctgagcaagctgcagagcctcatctgtggccccagctttgatattgccagcatcatccccttcctggagcccctgtctgaggacaccatcgccggcctgtctgtgcacgtgctgtgcaggacccggctgaaggagtatgagcagtgcatcgacatcctgctggagcgctgcccagaggccgtcatcccctatgccaaccacgagctgaaggaggagaacagaaccctgtggtggaagaagctgctgcctgagctgtgccagaggatcaagtgtggcggggagaagtaccagctgtacctgagcagcctgaaggagaccctgagcatcgtggccgtggagctggagctgaaggacttcatgaatgtgctgcctgaagatggaacagccaccttcttcctgccctacctgctgtactgcagcaggaagaagcccctgacctag

SEQ ID NO: 155183 - DNA, 1587 bp, synthetic construct
  misc_feature 1..1587: note = Description of Artificial Sequence: Synthetic coding sequence
  source 1..1587: mol_type = other DNA
atggccaccagcaccagcacagaggccaagagcgcctcctggtggaactacttcttcctgtatgatggcagcaaggtgaaggaggagggggaccccaccagggctggcatctgctacttctaccccagccagaccctgctggaccagcaggagctgctgtgtggccagattgctggggtggtgcgctgtgtgtctgacatcagtgacagcccccccaccctggtgcggctgaggaagctgaagtttgccatcaaggtggatggagactacctgtgggtgctgggctgtgctgtggagctgcctgatgtgtcctgcaagcgcttcctggaccagctggtgggcttcttcaacttctacaacggccctgtgtccctggcctatgagaactgcagccaggaggagctgagcacagagtgggacaccttcatcgagcagatcctgaagaacaccagtgacctgcacaagatcttcaacagcctgtggaacctggaccagaccaaggtggagcccctgctgctgctgaaggccgcccgcatcctgcagacctgccagaggagcccccacatcctggccggctgcatcctgtacaagggcctcatcgtgtccacccagctgccccccagcctgacagccaaggtgctgctgcacaggacagccccccaggagcagaggctgcccactggagaagatgccccccaggagcacggcaagtggatgctgtggagcttcaagaacagagtgacccaccagaaccccaatggagctgccctgccccccaacgtgcagatcatccctgtgtttgtgaccaaggaggaggccatcagcctgcacgagttccctgtggagcagatgaccaggagcctggccagccctgctggcctgcaggacggcagcgcccagcaccaccccaagggcggcagcaccagcgccctgaaggaaaatgccaccggccacgtggagagcatggcctggaccaccccagaccccaccagcccagatgaggcctgcccagatggcaggaaagaaaatggctgcctgagcggccatgacctggagagcatccggcctgctggcctgcacaacagcgcccggggggaggtgctgggcctgagcagcagcctgggcaaggagctggtgttcctgcaggaggagctggacctgtctgagatccacatccctgaggcccaggaggtggagatggccagcggccactttgccttcctgcacgtgcctgtgcctgatggccgggccccctactgcaaggccagcctgagcgccagcagcagcctggagcccaccccacctgaggacacagccatcagcagcctgcggcccccatctgcccctgagatgctgacccagcacggggcccaggagcagctggaggaccaccctggccacagcagccaggcccccatccccagggctgaccccctgcccaagagcacagtgctcttcagcggcggctgtgtgaagggcagtgacacccagctgtgtgtgcccggcctggtgtggtacctggagccccagttctactacgtgattgtgcgccacttctttgacagcatgaggcagacagctggatag

SEQ ID NO: 155184 - DNA, 2127 bp, synthetic construct
  misc_feature 1..2127: note = Description of Artificial Sequence: Synthetic coding sequence
  source 1..2127: mol_type = other DNA
atggccaccagcaccagcacagaggccaagagcgcctcctggtggaactacttcttcctgtatgatggcagcaaggtgaaggaggagggggaccccaccagggctggcatctgctacttctaccccagccagaccctgctggaccagcaggagctgctgtgtggccagattgctggggtggtgcgctgtgtgtctgacatcagtgacagcccccccaccctggtgcggctgaggaagctgaagtttgccatcaaggtggatggagactacctgtgggtgctgggctgtgctgtggagctgcctgatgtgtcctgcaagcgcttcctggaccagctggtgggcttcttcaacttctacaacggccctgtgtccctggcctatgagaactgcagccaggaggagctgagcacagagtgggacaccttcatcgagcagatcctgaagaacaccagtgacctgcacaagatcttcaacagcctgtggaacctggaccagaccaaggtggagcccctgctgctgctgaaggccgcccgcatcctgcagacctgccagaggagcccccacatcctggccggctgcatcctgtacaagggcctcatcgtgtccacccagctgccccccagcctgacagccaaggtgctgctgcacaggacagccccccaggagcagaggctgcccactggagaagatgccccccaggagcacggggccgccctgccccccaacgtgcagatcatccctgtgtttgtgaccaaggaggaggccatcagcctgcacgagttccctgtggagcagatgaccaggagcctggccagccctgctggcctgcaggacggcagcgcccagcaccaccccaagggcggcagcaccagcgccctgaaggaaaatgccaccggccacgtggagagcatggcctggaccaccccagaccccaccagcccagatgaggcctgcccagatggcaggaaagaaaatggctgcctgagcggccatgacctggagagcatccggcctgctggcctgcacaacagcgcccggggggaggtgctgggcctgagcagcagcctgggcaaggagctggtgttcctgcaggaggagctggacctgtctgagatccacatccctgaggcccaggaggtggagatggccagcggccactttgccttcctgcacgtgcctgtgcctgatggccgggccccctactgcaaggccagcctgagcgccagcagcagcctggagcccaccccacctgaggacacagccatcagcagcctgcggcccccatctgcccctgagatgctgacccagcacggggcccaggagcagctggaggaccaccctggccacagcagccaggcccccatccccagggctgaccccctgcccaggaggacccggcggcccctgctgctgccccggctggaccccggccagaggggcaacaagctgcccactggagagcagggcctggatgaagatgtggatggagtgtgtgagagccacgccgcccctggcctggagtgcagcagcggcagcgccaactgccagggcgccggccccagcgcagatggcatcagcagccggctgaccccagctgagagctgcatgggcctggtgaggatgaacctgtacacccactgtgtgaagggcctggtgctgagcctgctggccgaggagcccctgctgggggacagcgctgccatcgaggaggtgtaccacagcagcctggccagcctgaatggcctggaggtgcacctgaaggagaccctgcccagagatgaagctgccagcaccagcagcacctacaacttcacccactatgaccgcatccagagcctgctgatggccaacctgccccaggtggccaccccccaggaccggcgcttcctgcaggccgtgtccctgatgcacagcgagtttgcccagctgcctgccctgtatgagatgacagtgagaaatgccagcacagctgtgtatgcctgctgcaaccccatccaggagacctacttccagcagctggccccagctgcccggagcagcggcttccccaacccccaggatggagccttcagcctgagcggcaaggccaagcagaagctgctgaagcatggagtgaacctgctgtag

SEQ ID NO: 155185 - DNA, 2166 bp, synthetic construct
  misc_feature 1..2166: note = Description of Artificial Sequence: Synthetic coding sequence
  source 1..2166: mol_type = other DNA
atggcccccctgtgcagcctggcccgctggaactacttcttcctgtatgatggcagcaaggtgaaggaggagggggaccccacccgggccggcatctgctacttctaccccagccagaccctgctggaccagcaggagctgctgtgtggccagattgctggggtggtgcgctgtgtgtctgacatcagtgacagcccccccaccctggtgcggctgaggaagctgaagtttgccatcaaggtggatggagactacctgtgggtgctgggctgtgctgtggagctgcctgatgtgtcctgcaagcgcttcctggaccagctggtgggcttcttcaacttctacaatggacctgtgtccctggcctatgagaactgcagccaggaggagctgagcacagagtgggacaccttcatcgagcagatcctgaagaacaccagtgacctgcacaagatcttcaacagcctgtggaacctggaccagaccaaggtggagcccctgctgctgctgaaggccgcccgcatcctgcagacctgccagaggagcccccacatcctggccggctgcatcctgtacaagggcctgattgtgtccacccagctgccccccagcctgacagccaaggtgctgctgcacaggacagccccccaggagcagaggctgcccaccggggaggatgccccccaggagcacggcaagtggatgctgtggagcttcaagaacagagtgacccaccagaaccccaacggggccgccctgcccccaaatgtgcagatcatccctgtgtttgtgaccaaggaggaggccatcagcctgcacgagttccctgtggagcagatgaccaggagcctggccagccctgctggcctgcaggacggcagcgcccagcaccaccccaagggcggcagcaccagcgccctgaaggaaaatgccactggacatgtggagagcatggcctggaccaccccagaccccaccagcccagatgaggcctgcccagatggcaggaaagaaaatggctgcctgagcggccatgacctggagagcatccggcctgctggcctgcacaacagcgcccggggggaggtgctgggcctgagcagcagcctgggcaaggagctggtgttcctgcaggaggagctggacctgtctgagatccacatccctgaggcccaggaggtggagatggccagcggccactttgccttcctgcacgtgcctgtgcctgatggccgggccccctactgcaaggccagcctgagcgccagcagcagcctggagcccaccccacctgaggacacagccatcagcagcctgcggccccccagcgcccctgagatgctgacccagcacggggcccaggagcagctggaggaccaccctggccacagcagccaggcccccatccccagggctgaccccctgcccaggaggacccggcggcccctgctgctgccccggctggaccccggccagaggggcaacaagctgcccaccggggagcagggcctggatgaagatgtggatggagtgtgtgagagccatgctgcccctggcctggagtgcagcagcggcagcgccaactgccagggcgccggccccagcgcagatggcatcagcagccggctgaccccagctgagagctgcatgggcctggtgaggatgaacctgtacacccactgtgtgaagggcctggtgctgagcctgctggccgaggagcccctgctgggggacagcgctgccatcgaggaggtgtaccacagcagcctggccagcctgaatggcctggaggtgcacctgaaggagaccctgcccagagatgaggccgccagcaccagcagcacctacaacttcacccactatgaccgcatccagagcctgctgatggccaacctgccccaggtggccaccccccaggaccggcgcttcctgcaggccgtgtccctgatgcacagcgagtttgcccagctgcctgccctgtatgagatgacagtgagaaatgccagcacagctgtgtatgcctgctgcaaccccatccaggagacctacttccagcagctggccccagctgcccggagcagcggcttccccaacccccaggatggagccttcagcctgagcggcaaggccaagcagaagctgctgaagcacggcgtgaacctgctgtag

SEQ ID NO: 155186 - DNA, 2127 bp, synthetic construct; identical to SEQ ID NO: 155184
  misc_feature 1..2127: note = Description of Artificial Sequence: Synthetic coding sequence
  source 1..2127: mol_type = other DNA

SEQ ID NO: 155187 - DNA, 2112 bp, synthetic construct
  misc_feature 1..2112: note = Description of Artificial Sequence: Synthetic coding sequence
  source 1..2112: mol_type = other DNA
atggcccccctgtgcagcctggcccgctggaactacttcttcctgtatgatggcagcaaggtgaaggaggagggggaccccacccgggccggcatctgctacttctaccccagccagaccctgctggaccagcaggagctgctgtgtggccagattgctggggtggtgcgctgtgtgtctgacatcagtgacagcccccccaccctggtgcggctgaggaagctgaagtttgccatcaaggtggatggagactacctgtgggtgctgggctgtgctgtggagctgcctgatgtgtcctgcaagcgcttcctggaccagctggtgggcttcttcaacttctacaatggacctgtgtccctggcctatgagaactgcagccaggaggagctgagcacagagtgggacaccttcatcgagcagatcctgaagaacaccagtgacctgcacaagatcttcaacagcctgtggaacctggaccagaccaaggtggagcccctgctgctgctgaaggccgcccgcatcctgcagacctgccagaggagcccccacatcctggccggctgcatcctgtacaagggcctgattgtgtccacccagctgccccccagcctgacagccaaggtgctgctgcacaggacagccccccaggagcagaggctgcccaccggggaggatgccccccaggagcacggggccgccctgcccccaaatgtgcagatcatccctgtgtttgtgaccaaggaggaggccatcagcctgcacgagttccctgtggagcagatgaccaggagcctggccagccctgctggcctgcaggacggcagcgcccagcaccaccccaagggcggcagcaccagcgccctgaaggaaaatgccactggacatgtggagagcatggcctggaccaccccagaccccaccagcccagatgaggcctgcccagatggcaggaaagaaaatggctgcctgagcggccatgacctggagagcatccggcctgctggcctgcacaacagcgcccggggggaggtgctgggcctgagcagcagcctgggcaaggagctggtgttcctgcaggaggagctggacctgtctgagatccacatccctgaggcccaggaggtggagatggccagcggccactttgccttcctgcacgtgcctgtgcctgatggccgggccccctactgcaaggccagcctgagcgccagcagcagcctggagcccaccccacctgaggacacagccatcagcagcctgcggccccccagcgcccctgagatgctgacccagcacggggcccaggagcagctggaggaccaccctggccacagcagccaggcccccatccccagggctgaccccctgcccaggaggacccggcggcccctgctgctgccccggctggaccccggccagaggggcaacaagctgcccaccggggagcagggcctggatgaagatgtggatggagtgtgtgagagccatgctgcccctggcctggagtgcagcagcggcagcgccaactgccagggcgccggccccagcgcagatggcatcagcagccggctgaccccagctgagagctgcatgggcctggtgaggatgaacctgtacacccactgtgtgaagggcctggtgctgagcctgctggccgaggagcccctgctgggggacagcgctgccatcgaggaggtgtaccacagcagcctggccagcctgaatggcctggaggtgcacctgaaggagaccctgcccagagatgaggccgccagcaccagcagcacctacaacttcacccactatgaccgcatccagagcctgctgatggccaacctgccccaggtggccaccccccaggaccggcgcttcctgcaggccgtgtccctgatgcacagcgagtttgcccagctgcctgccctgtatgagatgacagtgagaaatgccagcacagctgtgtatgcctgctgcaaccccatccaggagacctacttccagcagctggccccagctgcccggagcagcggcttccccaacccccaggatggagccttcagcctgagcggcaaggccaagcagaagctgctgaagcacggcgtgaacctgctgtag

SEQ ID NO: 155188 - DNA, 3390 bp, synthetic construct
  misc_feature 1..3390: note = Description of Artificial Sequence: Synthetic coding sequence
  source 1..3390: mol_type = other DNA
atggcctttgtgcctgtgattcctgagagctacagccacgtgctggccgagtttgagagcctggaccccctgctgagcgccctgcggctggacagcagccggctgaagtgcaccagcattgctgtgtccaggaagtggctggccctgggcagcagcggcggcggcctgcacctgatccagaaggagggctggaagcacaggctcttcctgagccaccgggagggcgccatcagccaggtggcctgctgcctgcatgatgatgattatgtggccgtggccaccagccagggcctggtggtggtgtgggagctgaaccaggagcggcggggcaagccagagcagatgtatgtgtcctctgagcacaagggccggcgggtgacagccctgtgctgggacacagccatcctgcgggtgtttgtgggggaccacgccggcaaggtgtctgccatcaagctgaacaccagcaagcaggccaaggctgctgctgcctttgtgatgtttcctgtgcagaccatcaccaccgtggacagctgtgtggtgcagctggactacctggatggccgcctgctgatcagcagcctgaccaggagcttcctgtgtgacacagagcgggagaagttctggaagattggcaacaaggagagagatggagaatatggagcctgcttcttccctggccgctgcagcggcggccagcagcccctcatctactgtgcccggcccggcagcaggatgtgggaggtgaactttgatggagaggtgatcagcacccaccagttcaagaagctgctgagcctgccccccctgcccgtcatcaccctgcggtctgagccccagtatgaccacacagctggcagcagccagagcctgtccttccccaagctgctgcacctgtctgagcactgtgtgctgacctggacagagcggggcatctacatcttcatcccccagaatgtgcaggtgctgctgtggagcgaggtgaaggacatccaggatgtggccgtgtgcagaaatgagctgttctgcctgcacctgaatggcaaggtgagccacctgagcctcatctctgtggagcgctgtgtggagcggctgctgcggcggggcctgtggaacctggccgcccggacctgctgcctcttccagaacagcgtgattgccagccgggccaggaagaccctgacagctgacaagctggagcacctgaagagccagctggaccacggcacctacaatgacctgatcagccagctggaggagctgatcctgaagtttgagcccctggacagcgcctgcagcagccgccgcagcagcatcagcagccatgagagcttcagcatcctggacagcggcatctaccgcatcatcagcagccggcggggcagccagagtgatgaggacagctgcagcctgcacagccagaccctgtctgaagatgagcgcttcaaggagttcaccagccagcaggaggaggacctgcctgaccagtgctgcggcagccacggcaatgaagataatgtgagccacgcccctgtgatgtttgaaacagacaagaatgagaccttcctgcccttcggcatccccctgcccttccgcagccccagccccctggtgtccctgcaggccgtgaaggagagcgtgagcagctttgtgaggaagaccacagagaagattggcaccctgcacaccagcccagacctgaaggtgcggcctgagctgcggggagatgagcagagctgtgaagaagatgtgtccagtgacacctgccccaaggaggaggacacagaggaggagaaggaggtgaccagccccccaccagaagaagatcgcttccaggagctgaaggtggccacagctgaggccatgaccaagctgcaggaccccctggtgctgtttgaaagtgagagcctgaggatggtgctgcaggagtggctgagccacctggagaagacctttgccatgaaggacttctctggagtgtctgacacagacaacagctccatgaagctgaaccaggatgtgctgctggtgaatgaaagcaagaagggcatcctggatgaggacaatgagaaggagaagagggacagcctgggcaatgaggagagcgtggacaagacagcctgtgaatgtgtgcgcagcccccgggagagcctggatgacctcttccagatctgcagcccctgtgccatcgccagcggcctgagaaatgacctggccgagctgaccaccctgtgcctggagctgaatgtgctgaacagcaagatcaagagcaccagcggccacgtggaccacaccctgcagcagtacagccctgagatcctggcctgccagttcctgaagaagtacttcttcctgctgaacctgaagagggccaaggagagcatcaagctgagctacagcaacagccccagcgtgtgggacaccttcatcgagggcctgaaggagatggccagcagcaaccctgtgtacatggagatggagaagggggacctgcccacccggctgaagctgctggatgatgaggtgccctttgacagccccctgctggtggtgtatgccacccggctgtatgagaagtttggagagagcgccctgcggagcctcatcaagttcttccccagcatcctgcccagcgacatcatccagctgtgccaccaccaccctgctgagttcctggcctacctggacagcctggtgaagagcaggcctgaggaccagaggagcagcttcctggagagcctgctgcagcctgagagcctgcggctggactggctgctgctggccgtgtccctggatgccccacccagcaccagcaccatggatgatgagggctacccccggccccacagccacctgctgtcctggggctacagccagctgatcctgcacctgatcaagctgcctgctgacttcatcaccaaggagaagatgacagacatctgccgcagctgtggcttctggccaggctacctgatcctgtgcctggagctggagaggagaagagaggccttcaccaacatcgtgtacctgaatgacatgagcctgatggagggggacaatggctggatccctgagaccgtggaggagtggaagctgctgctgcacctgatccagagcaagagcaccaggcctgccccccaggagagcctgaatggcagcctgagtgatggccccagccccatcaacgtggagaatgtggccctgctgctggccaaggccatgggccctgaccgggcctggagcctgctgcaggagtgtggcctggccctggagctgtctgagaagttcaccaggacctgtgacatcctgagaattgctgagaagaggcagagggccctgatccagagcatgctggagaagtgtgaccgcttcctgtggagccagcaggcctag

SEQ ID NO: 155189 - DNA, 3048 bp, synthetic construct
  misc_feature 1..3048: note = Description of Artificial Sequence: Synthetic coding sequence
  source 1..3048: mol_type = other DNA
atgtatgtgtcctctgagcacaagggccggcgggtgacagccctgtgctgggacacagccatcctgcgggtgtttgtgggggaccacgccggcaaggtgtctgccatcaagctgaacaccagcaagcaggccaaggctgctgctgcctttgtgatgtttcctgtgcagaccatcaccaccgtggacagctgtgtggtgcagctggactacctggatggccgcctgctgatcagcagcctgaccaggagcttcctgtgtgacacagagcgggagaagttctggaagattggcaacaaggagagagatggagaatatggagcctgcttcttccctggccgctgcagcggcggccagcagcccctcatctactgtgcccggcccggcagcaggatgtgggaggtgaactttgatggagaggtgatcagcacccaccagttcaagaagctgctgagcctgccccccctgcccgtcatcaccctgcggtctgagccccagtatgaccacacagctggcagcagccagagcctgtccttccccaagctgctgcacctgtctgagcactgtgtgctgacctggacagagcggggcatctacatcttcatcccccagaatgtgcaggtgctgctgtggagcgaggtgaaggacatccaggatgtggccgtgtgcagaaatgagctgttctgcctgcacctgaatggcaaggtgagccacctgagcctcatctctgtggagcgctgtgtggagcggctgctgcggcggggcctgtggaacctggccgcccggacctgctgcctcttccagaacagcgtgattgccagccgggccaggaagaccctgacagctgacaagctggagcacctgaagagccagctggaccacggcacctacaatgacctgatcagccagctggaggagctgatcctgaagtttgagcccctggacagcgcctgcagcagccgccgcagcagcatcagcagccatgagagcttcagcatcctggacagcggcatctaccgcatcatcagcagccggcggggcagccagagtgatgaggacagctgcagcctgcacagccagaccctgtctgaagatgagcgcttcaaggagttcaccagccagcaggaggaggacctgcctgaccagtgctgcggcagccacggcaatgaagataatgtgagccacgcccctgtgatgtttgaaacagacaagaatgagaccttcctgcccttcggcatccccctgcccttccgcagccccagccccctggtgtccctgcaggccgtgaaggagagcgtgagcagctttgtgaggaagaccacagagaagattggcaccctgcacaccagcccagacctgaaggtgcggcctgagctgcggggagatgagcagagctgtgaagaagatgtgtccagtgacacctgccccaaggaggaggacacagaggaggagaaggaggtgaccagccccccaccagaagaagatcgcttccaggagctgaaggtggccacagctgaggccatgaccaagctgcaggaccccctggtgctgtttgaaagtgagagcctgaggatggtgctgcaggagtggctgagccacctggagaagacctttgccatgaaggacttctctggagtgtctgacacagacaacagctccatgaagctgaaccaggatgtgctgctggtgaatgaaagcaagaagggcatcctggatgaggacaatgagaaggagaagagggacagcctgggcaatgaggagagcgtggacaagacagcctgtgaatgtgtgcgcagcccccgggagagcctggatgacctcttccagatctgcagcccctgtgccatcgccagcggcctgagaaatgacctggccgagctgaccaccctgtgcctggagctgaatgtgctgaacagcaagatcaagagcaccagcggccacgtggaccacaccctgcagcagtacagccctgagatcctggcctgccagttcctgaagaagtacttcttcctgctgaacctgaagagggccaaggagagcatcaagctgagctacagcaacagccccagcgtgtgggacaccttcatcgagggcctgaaggagatggccagcagcaaccctgtgtacatggagatggagaagggggacctgcccacccggctgaagctgctggatgatgaggtgccctttgacagccccctgctggtggtgtatgccacccggctgtatgagaagtttggagagagcgccctgcggagcctcatcaagttcttccccagcatcctgcccagcgacatcatccagctgtgccaccaccaccctgctgagttcctggcctacctggacagcctggtgaagagcaggcctgaggaccagaggagcagcttcctggagagcctgctgcagcctgagagcctgcggctggactggctgctgctggccgtgtccctggatgccccacccagcaccagcaccatggatgatgagggctacccccggccccacagccacctgctgtcctggggctacagccagctgatcctgcacctgatcaagctgcctgctgacttcatcaccaaggagaagatgacagacatctgccgcagctgtggcttctggccaggctacctgatcctgtgcctggagctggagaggagaagagaggccttcaccaacatcgtgtacctgaatgacatgagcctgatggagggggacaatggctggatccctgagaccgtggaggagtggaagctgctgctgcacctgatccagagcaagagcaccaggcctgccccccaggagagcctgaatggcagcctgagtgatggccccagccccatcaacgtggagaatgtggccctgctgctggccaaggccatgggccctgaccgggcctggagcctgctgcaggagtgtggcctggccctggagctgtctgagaagttcaccaggacctgtgacatcctgagaattgctgagaagaggcagagggccctgatccagagcatgctggagaagtgtgaccgcttcctgtggagccagcaggcctag

SEQ ID NO: 155190 - DNA, 3048 bp, synthetic construct; identical to SEQ ID NO: 155189
  misc_feature 1..3048: note = Description of Artificial Sequence: Synthetic coding sequence
  source 1..3048: mol_type = other DNA

SEQ ID NO: 155191 - DNA, 2328 bp, synthetic construct
  misc_feature 1..2328: note = Description of Artificial Sequence: Synthetic coding sequence
  source 1..2328: mol_type = other DNA
atgaagaggagcggcaccctgcggctgctgagtgacctgagcgccttcggcggggccgcccggctgcgggagctggtggccggggacagcgctgtgcgggtgcggggcagcccagatggccgccacctgctgctgctgcggcccccaggagctgtggccccccagctgctggtggccagccggggccctggagctgagctggagcgggcctggccagctggccagcccagccccctggatgccttcttcctgccctggccagcccggcctgccctggtgctggtgtgggagagcggcctggccgaggtgtggggcgctggggtgggccctggctggaggcccctgcagagcacagagctgtgccctgggggcggggcccgggtggtggccgtggccgccctgcggggccgcctggtgtggtgtgaggagcggcaggcccgggcagagggccccagcggcagccctgctgctgccttcagccactgtgtgtgtgtgaggaccctggagcccagcggggaggccagcaccagcctgggccgcacccacgtgctgctgcaccactgcccagccttcggcctgctggccagctgccggcagctgttcctggtgcccacagccaccacctggccaggagtggcccacgtgctgctgatctggagccctgggaagggcaaggtgatggtggccgccccccggctgggcctgagctacagcaagagcctgaaccctggccgcggggacacctgggacttccgcaccctgctgcggggcctgcccggcctgctgagcccccgggagcccctggccgtgcacacctgggcccccaccccccagggcctgctgctgctggactttggaggcaccgtgtccctgctgcagagccatggaggcaccagggctgtgggcaccctgcaggaggcccctgtgggcccctggggcagcgctgccctgggcaccttccagggcaccctggcctgtgtgctgggcagcaccctggagctgctggacatgggcagcggccagctgctggagaggaaggtgctgagcacagacagagtgcacctgctggagcccccagcccctggcatggaggatgaggaggagctggagacccggggcaacctgcggctgctgagcgccctgggcctcttctgtgtgggctgggaggccccccagggcgtggagctgcccagcgccaaggacctggtgtttgaggaggcctgtggctactaccagaggaggagcctgcggggggcccagctgaccccagaggagctgcggcacagcagcaccttccgggccccccaggccctggccagcatcctgcagggccacctgcccccatctgccctgctgaccatgctgaggacagagctgcgggactaccggggcctggagcagctgaaggcccagctggtggccggagatgatgaggaggccggctggacagagctggccgagcaggaggtggcccggctgctgaggacagagctgattggagaccagctggcccagctgaacacagtgttccaggccctgcccacagctgcctggggcgccaccctgcgggccctgcagctgcagctggatggaaatggcaagctgcggagccaggcccccccagatgtgtggaagaaggtgctgggcggcatcacagctgggaaggagcccccaaatggcatcctgcccccatttgagctgctgtgccagtgcctgtgccagctggagccccgctggctgcccccatttgtggagctggcccagcagcagggcggccctggctggggcgccggcggccctggcctgcccctgtaccgccgggccctggccgtgctgggggaggagggcaccaggcctgaggccctggagctggagctgctgctgagcagcggccggcccaaggctgtgctgcaggccgtgggccagctggtgcagaaggagcagtgggaccgggccctggatgctggcctggccctgggccccagcagccccctgctgcggtctgagatcttcaagctgctgctggccgagtttgcccagcaccggcggctggatgcccacctgcccctgctgtgccgcctgtgccccccagagctggccccagctgagctgctgctgctgctgcggacctacctgcctgatgaggtgggcccccccacccccttccctgagcctggagctgagccccccctgactgtgggcctgctgaaggccctgctggagcagacaggagcccagggctggctgagcggccctgtgctgagcccctatgaggacatcctgtgggaccccagcaccccaccacccaccccaccccgggacctgtag

SEQ ID NO: 155192 - DNA, 1596 bp, synthetic construct
  misc_feature 1..1596: note = Description of Artificial Sequence: Synthetic coding sequence
  source 1..1596: mol_type = other DNA
atgctgggcttcctgagccggggccccagcatgaagctgtgcatgggcctggcctgtgtgctgagcctgtggaacacagtgtctggcatcaagggggaggccaagaaggagaagggcatgaccttcctgcccaccaccgtgtctggcctgcgggaggaggagaggaaggagaagggcgtggccttcctggccaccacagagctgcctgcccggagcattgacctgagcgccctgaacctgacagagctggtgaatggcatgctgagccgggccctgaaggacagcaagaagttcttcagcctgctgtctgtgaccagctacagcagctttgccttccacaagttctctgtggccgtgtacaacatcagcaacctgaagacagtggaccctgccaagttccccacccgctactgctactgcctgaacaacagaacaaatgacctgagtgacttcaccgccctgctggtggacatcatcggcaacagcaccagctacctgacagagatcttcaagagcaccagcatcctgtctgtgaaccagagcaatgaaagtgactgcatcttcatctgtgtgatgaccgggaagagcggcaggaacctgagtgacttctgggagattgaggagaagtaccccatcatcaactacaccttcaccagcggcctgagcggcgtgctgggcgccgccacccggggcacagcccggaccagcaagcccaccaccaagagccagaagaccctgcccagcaccagccctggccactggacccagagcaccccctgggccagcgccctgcggagcagcccctggacagaaacagctgcccccagcgagacagaggagaccctgaacacaggccggcccccagagctgcctgcccgggccacagccacctggttcagcgccagccacaccctgcctgccctggccaccaggagagtggcccggacccagtggctgacagctgaccggcagacctgggccagcatcagctctgtgccctgggcccagaccatcagcgagaagaagccaggcggcagcctgtgggagaccaggagcagcccccccaccacagctggaacagaggaggccatgaacaccaccagcctgctggccccagctgctgagatcatggccaccccaggcagccccagccaggccagccccaccctgggcgccttcacccacggcacccagacccccagccccaccaaggccacagccccccgctacccccagacaggagacctgtctgctgagtggcccttcaccgctggggaggagcctgtgctggtgccccggccccaccaggtgagccgctgcccccagcccctcttcaaggtgggcgccatggccgccgcccccctgaccctggccatccagaggctgaacccctgcctgatggagctgtgccagttcttccagcagtgcctgtgcatgagccagaggagccccaggacagaggacatgagatactgcctggagtactacagctggttcctgaagaatgccacctacatctgccagagggtgaagagggtgagccacagccacaccctgaagcagaagtgcctggagaacatctgcaagtctgtgtag

SEQ ID NO: 155193 - DNA, 558 bp, synthetic construct
  misc_feature 1..558: note = Description of Artificial Sequence: Synthetic coding sequence
  source 1..558: mol_type = other DNA
atgagccccagcctgcaggagggcgcccagctgggggagaacaagcccagcacctgcagcttcagcattgagcgcatcctgggcctggaccagaagaaggactgtgtgcccctgatgaagccccaccggccctgggccgacacctgcagcagcagcggcaaggatggcaacctgtgcctgcacgtgcccaaccccccatctggcatctccttccccagcgtggtggaccaccccatgcctgaggagcgggccagcaaatatgagaactacttcagcgccagcgagcggctgagcctgaagcgggagctgtcctggtaccggggcagaagacccaggacagccttcacccagaaccagatcgaggtgctggagaatgtgttccgggtgaactgctacccaggcatcgacatccgggaggacctggcccagaagctgaacctggaggaggaccgcatccagatctggttccagaacagaagagccaagctgaagaggagccaccgggagagccagttcctgatggccaagaagaacttcaacaccaacctgctggagtag

SEQ ID NO: 155194 - DNA, 324 bp, synthetic construct
  misc_feature 1..324: note = Description of Artificial Sequence: Synthetic coding sequence
  source 1..324: mol_type = other DNA
atgagccccagcctgcaggagggcgcccagctgggggagaacaagcccagcacctgcagcttcagcattgagcgcatcctgggcctggaccagaagaaggactgtgtgcccctgatgaagccccaccggccctgggccgacacctgcagcagcagcggcaaggatggcaacctgtgcctgcacgtgcccaaccccccatctggcatctccttccccagcgtggtggaccaccccatgcctgaggagcgggccagcaaatatgagaactacttcagcgccagcgagcggctgagcctgaagcgggagctgtcctggtacagatag

SEQ ID NO: 155195 - DNA, 1263 bp, synthetic construct
  misc_feature 1..1263: note = Description of Artificial Sequence: Synthetic coding sequence
  source 1..1263: mol_type = other DNA
atggaggtgcccccccggctgagccacgtgcccccacccctcttccccagcgccccagccaccctggccagccgcagcctgagccactggaggccccggcccccccggcagctggcccccctgctgcccagcctggcccccagcagcgcccggcagggcgcccggcgggcccagagacatgtgacagcccagcagcccagccggctggccggcggggccgccatcaagggcggcagaagaagaagaccagacctcttcagaagacacttcaagagcagcagcatccagaggtctgctgctgctgctgctgccaccaggacagcccggcagcaccccccagctgacagctctgtgaccatggaggacatgaatgagtacagcaacatcgaggagtttgctgagggcagcaagatcaatgccagcaagaaccagcaggatgatggcaagatgttcatcggcggcctgtcctgggacaccagcaagaaggacctgacagagtacctgagcagatttggagaggtggtggactgcaccatcaagacagatcctgtgacaggccgcagccggggctttggatttgtgctcttcaaggatgctgcctctgtggacaaggtgctggagctgaaggagcacaagctggatggcaagctgattgaccccaagagggccaaggccctgaagggcaaggagccccccaagaaggtgtttgtgggcggcctgagcccagacaccagcgaggagcagatcaaggagtactttggagccttcggggagattgagaacatcgagctgcccatggacaccaagaccaatgaaagaagaggcttctgcttcatcacctacacagatgaggagcctgtgaagaagctgctggagagccgctaccaccagatcggcagcgggaaatgtgagatcaaggtggcccagcccaaggaggtgtaccggcagcagcagcagcagcagaagggcggcagaggagctgctgctgggggccggggcggcacccggggccggggccggggccagggccagaactggaaccagggcttcaacaactactatgaccagggctacggcaactacaacagcgcctatggaggagaccagaactacagcggctacggcggctatgactacacaggctacaactacggcaactacggctacggccagggctacgccgactacagcggccagcagagcacctacggcaaggccagcagaggaggcggcaaccaccagaacaactaccagccctactag

SEQ ID NO: 155196 - DNA, 735 bp, synthetic construct
  misc_feature 1..735: note = Description of Artificial Sequence: Synthetic coding sequence
  source 1..735: mol_type = other DNA
atggaggacatgaatgagtacagcaacatcgaggagtttgctgagggcagcaagatcaatgccagcaagaaccagcaggatgatggcaagatgtttattggaggcctgtcctgggacaccagcaagaaggacctgacagagtacctgagcagatttggagaggtggtggactgcaccatcaagacagatcctgtgacaggccgcagccggggcttcggctttgtgctcttcaaggatgctgcctctgtggacaaggtgctggagctgaaggagcacaagctggatggcaagctgattgaccccaagagggccaaggccctgaagggcaaggagccccccaagaaggtgtttgtgggcggcctgagcccagacaccagcgaggagcagatcaaggagtactttggagcctttggagaaattgaaaatattgagctgcccatggacaccaagaccaatgaaagaagaggcttctgcttcatcacctacacagatgaggagcctgtgaagaagctgctggagagccgctaccaccagatcggcagcgggaaatgtgagatcaaggtggcccagcccaaggaggtgtaccggcagcagcagcagcagcagaagggcggccgcggggctgctgctgggggccggggcggcacccggggccggggccggggccagcagagcacctacggcaaggccagcagaggaggcggcaaccaccagaacaactaccagccctactag

SEQ ID NO: 155197 - DNA, 1263 bp, synthetic construct; identical to SEQ ID NO: 155195
  misc_feature 1..1263: note = Description of Artificial Sequence: Synthetic coding sequence
  source 1..1263: mol_type = other DNA

SEQ ID NO: 155198 - DNA, 1902 bp, synthetic construct
  misc_feature 1..1902: note = Description of Artificial Sequence: Synthetic coding sequence
  source 1..1902: mol_type = other DNA
atggccaaccaggtgaatggaaatgctgtgcagctgaaggaggaggaggagcccatggacaccagctctgtgacccacacagagcactacaagaccctcatcgaggccggcctgccccagaaggtggccgagcggctggatgagatcttccagacaggcctggtggcctacgtggacctggatgagcgggccattgatgccctgcgggagttcaatgaggagggcgccctgtctgtgctgcagcagttcaaggagagtgacctgagccacgtgcagaacaagagcgccttcctgtgtggggtgatgaagacctaccggcagcgggagaagcagggcagcaaggtgcaggagagcaccaagggcccagatgaggccaagatcaaggccctgctggagaggacaggctacaccctggatgtgaccaccggccagaggaaatatggaggccccccaccagacagcgtgtacagcggcgtgcagcccggcattggaacagaggtgtttgtgggcaagatcccccgggacctgtatgaagatgagctggtgcccctgtttgagaaggccggccccatctgggacctgcggctgatgatggaccccctgagcggccagaacagaggctacgccttcatcaccttctgtgggaaggaggccgcccaggaggccgtgaagctgtgtgacagctatgagatccggcctgggaagcacctgggcgtgtgcatctctgtggccaacaaccggctgtttgtgggcagcatccccaagaacaagaccaaggagaacatcctggaggagttcagcaaggtgacagagggcctggtggatgtgatcctgtaccaccagccagatgacaagaagaagaacagaggcttctgcttcctggagtatgaggaccacaagtctgctgcccaggcccggcggcggctgatgtctgggaaggtgaaggtgtggggcaatgtggtgacagtggagtgggccgaccctgtggaggagccagaccctgaggtgatggccaaggtgaaggtgctgtttgtgaggaacctggccaccaccgtgacagaggagatcctggagaagagcttcagcgagtttgggaagctggagcgggtgaagaagctgaaggactatgcctttgtgcactttgaggacagaggagctgctgtgaaggccatggatgagatgaatggcaaggagattgaaggagaggagattgagatcgtgctggccaagcccccagacaagaagaggaaggagcggcaggccgcccggcaggccagccgcagcacagcctatgaggactactactaccaccccccacccaggatgcccccacccatccggggccggggccggggcggcggccggggcggctacggctaccccccagactactacggctatgaggactactatgatgactactacggctatgactaccatgactaccggggcggctatgaggacccctactacggctatgatgatggctatgctgtgcggggccggggcggcggccggggcggccgcggggcccctcctccaccccggggccgcggggcccccccaccccggggccgggccggctacagccagagaggagcccccctgggccccccccggggcagccggggcggccggggcggccctgcccagcagcagaggggccggggcagccggggcagccggggcaacagaggaggaaatgtgggcggcaagaggaaggcagatggctacaaccagcctgacagcaagaggcggcagaccaacaaccagcagaactggggcagccagcccatcgcccagcagcccctgcagcagggcggggactacagcggcaactacggctacaacaatgacaaccaggagttctaccaggacacctacggccagcagtggaagtag

SEQ ID NO: 155199 - DNA, 1902 bp, synthetic construct; identical to SEQ ID NO: 155198
  misc_feature 1..1902: note = Description of Artificial Sequence: Synthetic coding sequence
  source 1..1902: mol_type = other DNA

SEQ ID NO: 155200 - DNA, 1911 bp, synthetic construct
  misc_feature 1..1911: note = Description of Artificial Sequence: Synthetic coding sequence
  source 1..1911: mol_type = other DNA
atggccaaccaggtgaatggaaatgctgtgcagctgaaggaggaggaggagcccatggacaccagctctgtgacccacacagagcactacaagaccctcatcgaggccggcctgccccagaaggtggccgagcggctggatgagatcttccagacaggcctggtggcctacgtggacctggatgagcgggccattgatgccctgcgggagttcaatgaggagggcgccctgtctgtgctgcagcagttcaaggagagtgacctgagccacgtgcagaacaagagcgccttcctgtgtggggtgatgaagacctaccggcagcgggagaagcagggcagcaaggtgcaggagagcaccaagggcccagatgaggccaagatcaaggccctgctggagaggacaggctacaccctggatgtgaccaccggccagaggaaatatggaggccccccaccagacagcgtgtacagcggcgtgcagcccggcattggaacagaggtgtttgtgggcaagatcccccgggacctgtatgaagatgagctggtgcccctgtttgagaaggccggccccatctgggacctgcggctgatgatggaccccctgagcggccagaacagaggctacgccttcatcaccttctgtgggaaggaggccgcccaggaggccgtgaagctgtgtgacagctatgagatccggcctgggaagcacctgggcgtgtgcatctctgtggccaacaaccggctgtttgtgggcagcatccccaagaacaagaccaaggagaacatcctggaggagttcagcaaggtgacaggcctgacagagggcctggtggatgtgatcctgtaccaccagccagatgacaagaagaagaacagaggcttctgcttcctggagtatgaggaccacaagtctgctgcccaggcccggcggcggctgatgtctgggaaggtgaaggtgtggggcaatgtggtgacagtggagtgggccgaccctgtggaggagccagaccctgaggtgatggccaaggtgaaggtgctgtttgtgaggaacctggccaccaccgtgacagaggagatcctggagaagagcttcagcgagtttgggaagctggagcgggtgaagaagctgaaggactatgcctttgtgcactttgaagatagaggagctgctgtgaaggccatggatgagatgaatggcaaggagattgaaggagaggagattgaaattgtgctggccaagcccccagacaagaagaggaaggagcggcaggccgcccggcaggccagccgcagcacagcctatgaggactactactaccaccccccacccaggatgcccccacccatccggggccggggccggggcggcggccggggcggctacggctaccccccagactactacggctatgaggactactatgatgactactacggctatgactaccatgactacagaggaggctatgaggacccctactacggctatgatgatggctatgctgtgcggggccggggcggcggccggggcggccgcggggcccctcctccaccccggggccgcggggcccccccaccccggggccgggccggctacagccagagaggagcccccctgggccccccccggggcagcagaggaggccggggcggccctgcccagcagcagaggggccggggcagccggggcagccggggcaacagaggaggaaatgtgggcggcaagaggaaggcagatggctacaaccagcctgacagcaagaggcggcagaccaacaaccagcagaactggggcagccagcccatcgcccagcagcccctgcagcagggcggggactacagcggcaactacggctacaacaatgacaaccaggagttctaccaggacacctacggccagcagtggaagtag

SEQ ID NO: 155201 - DNA, 1422 bp, synthetic construct
  misc_feature 1..1422: note = Description of Artificial Sequence: Synthetic coding sequence
  source 1..1422: mol_type = other DNA
atgaagacctaccggcagcgggagaagcagggcagcaaggtgcaggagagcaccaagggcccagatgaggccaagatcaaggccctgctggagaggacaggctacaccctggatgtgaccaccggccagaggaaatatggaggccccccaccagattctgtgtacagcggcgtgcagcccggcatcggcacagaatgtgacagctatgagatccggcctgggaagcacctgggcgtgtgcatctctgtggccaacaaccggctgtttgtgggcagcatccccaagaacaagaccaaggagaacatcctggaggagttcagcaaggtgacagagggcctggtggatgtgatcctgtaccaccagccagatgacaagaagaagaacagaggcttctgcttcctggagtatgaggaccacaagtctgctgcccaggcccggcggcggctgatgtctgggaaggtgaaggtgtggggcaatgtggtgacagtggagtgggccgaccctgtggaggagccagaccctgaggtgatggccaaggtgaaggtgctgtttgtgaggaacctggccaccaccgtgacagaggagatcctggagaagagcttcagcgagtttgggaagctggagcgggtgaagaagctgaaggactatgcctttgtgcactttgaggacagaggagctgctgtgaaggccatggatgagatgaatggcaaggagattgaaggagaggagattgagatcgtgctggccaagcccccagacaagaagaggaaggagcggcaggccgcccggcaggccagccgcagcacagcctatgaggactactactaccaccccccacccaggatgcccccacccatccggggccggggccggggcggcggccggggcggctacggctaccccccagactactacggctatgaggactactatgatgactactacggctatgactaccatgactaccggggcggctatgaggacccctactacggctatgatgatggctatgctgtgcggggccggggcggcggccggggcggccgcggggcccctcctccaccccggggccgcggggcccccccaccccggggccgggccggctacagccagagaggagcccccctgggccccccccggggcagccggggcggccggggcggccctgcccagcagcagaggggccggggcagccggggcagccggggcaacagaggaggaaatgtgggcggcaagaggaaggcagatggctacaaccagcctgacagcaagaggcggcagaccaacaaccagcagaactggggcagccagcccatcgcccagcagcccctgcagcagggcggggactacagcggcaactacggctacaacaatgacaaccaggagttctaccaggacacctacggccagcagtggaagtag

SEQ ID NO: 155202 - DNA, 1788 bp, synthetic construct
  misc_feature 1..1788: note = Description of Artificial Sequence: Synthetic coding sequence
  source 1..1788: mol_type = other DNA
atggccaaccaggtgaatggaaatgctgtgcagctgaaggaggaggaggagcccatggacaccagctctgtgacccacacagagcactacaagaccctcatcgaggccggcctgccccagaaggtggccgagcggctggatgagatcttccagacaggcctggtggcctacgtggacctggatgagcgggccattgatgccctgcgggagttcaatgaggagggcgccctgtctgtgctgcagcagttcaaggagagtgacctgagccacgtgcagaacaagagcgccttcctgtgtggggtgatgaagacctaccggcagcgggagaagcagggcagcaaggtgcaggagagcaccaagggcccagatgaggccaagatcaaggtgtttgtgggcaagatcccccgggacctgtatgaagatgagctggtgcccctgtttgagaaggccggccccatctgggacctgcggctgatgatggaccccctgagcggccagaacagaggctacgccttcatcaccttctgtgggaaggaggccgcccaggaggccgtgaagctgtgtgacagctatgagatccggcctgggaagcacctgggcgtgtgcatctctgtggccaacaaccggctgtttgtgggcagcatccccaagaacaagaccaaggagaacatcctggaggagttcagcaaggtgacagagggcctggtggatgtgatcctgtaccaccagccagatgacaagaagaagaacagaggcttctgcttcctggagtatgaggaccacaagtctgctgcccaggcccggcggcggctgatgtctgggaaggtgaaggtgtggggcaatgtggtgacagtggagtgggccgaccctgtggaggagccagaccctgaggtgatggccaaggtgaaggtgctgtttgtgaggaacctggccaccaccgtgacagaggagatcctggagaagagcttcagcgagtttgggaagctggagcgggtgaagaagctgaaggactatgcctttgtgcactttgaggacagaggagctgctgtgaaggccatggatgagatgaatggcaaggagattgaaggagaggagattgagatcgtgctggccaagcccccagacaagaagaggaaggagcggcaggccgcccggcaggccagccgcagcacagcctatgaggactactactaccaccccccacccaggatgcccccacccatccggggccggggccggggcggcggccggggcggctacggctaccccccagactactacggctatgaggactactatgatgactactacggctatgactaccatgactaccggggcggctatgaggacccctactacggctatgatgatggctatgctgtgcggggccggggcggcggccggggcggccgcggggcccctcctccaccccggggccgcggggcccccccaccccggggccgggccggctacagccagagaggagcccccctgggccccccccggggcagccggggcggccggggcggccctgcccagcagcagaggggccggggcagccggggcagccggggcaacagaggaggaaatgtgggcggcaagaggaaggcagatggctacaaccagcctgacagcaagaggcggcagaccaacaaccagcagaactggggcagccagcccatcgcccagcagcccctgcagcagggcggggactacagcggcaactacggctacaacaatgacaaccaggagttctaccaggacacctacggccagcagtggaagtag

SEQ ID NO: 155203 - DNA, 2304 bp, synthetic construct
  misc_feature 1..2304: note = Description of Artificial Sequence: Synthetic coding sequence
  source 1..2304: mol_type = other DNA
atgaggtcctgggccttctcctacctggatgccatggacaacatcacccggcagaaccagttctatgacacccaggtgatcaagcaggagaatgaaagtggctatgaaagaagacccctggagatggagcagcagcaggcctacagacctgagatgaagacagagatgaagcagggcgcccccaccagcttcctgcccccagaggccagccagctgaagccagaccggcagcagttccagagcaggaagaggccctatgaggagaacagaggccggggctactttgagcacagagaagatagaagaggccgcagcccccagcccccagctgaggaggatgaagatgactttgatgacaccctggtggccatcgacacctacaactgtgacctgcacttcaaggtggcccgggacaggagcagcggctaccccctgaccatcgagggctttgcctacctgtggagcggggcccgggccagctatggagtgcggcggggccgggtgtgctttgagatgaagatcaatgaggagatctctgtgaagcacctgcccagcacagagccagacccccacgtggtgagaattggctggagcctggacagctgcagcacccagctgggggaggagcccttctcctatggctatggaggcaccgggaagaagagcaccaacagcagatttgagaactacggggacaagtttgctgaaaatgatgtgattggctgctttgctgactttgaatgtggaaatgatgtggagctgtccttcaccaagaatggcaagtggatgggcatcgccttccgcatccagaaggaggccctgggcggccaggccctgtacccccacgtgctggtgaagaactgtgctgtggagttcaactttggccagagagctgagccctactgcagcgtgctgcccggcttcaccttcatccagcacctgcccctgtctgagcgcatccggggcaccgtgggccccaagagcaaggcagaatgtgagatcctgatgatggtgggcctgcctgctgctgggaagaccacctgggccatcaagcatgctgccagcaaccccagcaagaagtacaacatcctgggcaccaatgccatcatggacaagatgagggtgatgggcctgcggcggcagaggaactatgccggccgctgggatgtgctgatccagcaggccacccagtgcctgaacagactcatccagattgctgccaggaagaagaggaactacatcctggaccagaccaacgtgtatggcagcgcccagaggaggaagatgaggccctttgagggcttccagaggaaggccatcgtcatctgccccacagatgaggacctgaaggacaggaccatcaagaggacagatgaggagggcaaggatgtgcctgaccatgctgtgctggagatgaaggccaacttcaccctgcctgatgtgggggacttcctggatgaggtgctcttcatcgagctgcagcgggaggaggccgacaagctggtgcggcagtacaatgaggagggcaggaaggccggccccccacctgagaagagatttgacaacagaggaggcggcggcttccggggccggggcggcggcggcggcttccagagatatgaaaatagaggccccccaggcggcaacagaggaggcttccagaacagaggaggcggcagcggcggcggcggcaactaccggggcggcttcaacagaagtggcggcggcggctacagccagaaccgctggggcaacaacaacagagacaacaacaacagcaacaacagaggcagctacaacagagccccccagcagcagcccccaccccagcagcccccaccaccccagcccccaccccagcagcccccacctcctccttcctacagccctgccaggaaccccccaggggccagcacctacaacaagaacagcaacatccctggcagcagcgccaacaccagcacccccaccgtgagcagctacagccccccccagcccagctacagccagcccccctacaaccagggcggctacagccagggctacacagcccctcctcctcctcctcctcctcctccagcctacaactacggcagctatggaggctacaacccagccccctacaccccacctcctccacccacagcccagacctacccccagcccagctacaaccagtaccagcagtatgcccagcagtggaaccagtactaccagaaccagggccagtggccaccctactacggcaactatgactatggcagctacagcggcaacacccagggcggcaccagcacccagtag

SEQ ID NO: 155204 - DNA, 369 bp, synthetic construct
  misc_feature 1..369: note = Description of Artificial Sequence: Synthetic coding sequence
  source 1..369: mol_type = other DNA
atggatgtgcggcggctgaaggtgaatgagctgcgggaggagctgcagaggcggggcctggacacccggggcctgaaggccgagctggccgagcggctgcaggccgccctggaggccgaggagccagatgatgagcgggagctggatgctgatgatgagcccggccggcccggccacatcaatgaggaggccgagctgcagcctgccaccctgcagcccggccgcctgcagcccggcctgcacagccccacagccagcaccagcaccaccacctgcctgcagctgtgggagctgcggcggctgcagcccggccccctgtaccccacagccaccccccactgcacagacctgcccagcgcccagctgtag

SEQ ID NO: 155205 - DNA, 2271 bp, synthetic construct
  misc_feature 1..2271: note = Description of Artificial Sequence: Synthetic coding sequence
  source 1..2271: mol_type = other DNA
atggacaacatcacccggcagaaccagttctatgacacccaggtgatcaagcaggagaatgaaagtggctatgaaagaagacccctggagatggagcagcagcaggcctacagacctgagatgaagacagagatgaagcagggcgcccccaccagcttcctgcccccagaggccagccagctgaagccagaccggcagcagttccagagcaggaagaggccctatgaagaaaatagaggccggggctactttgagcaccgggaggaccggcggggccgcagcccccagcccccagcagaagaagatgaagatgactttgatgacaccctggtggccatcgacacctacaactgtgacctgcacttcaaggtggcccgggacaggagcagcggctaccccctgaccatcgagggctttgcctacctgtggagcggggcccgggccagctatggagtgagaagaggccgggtgtgctttgagatgaagatcaatgaggagatctctgtgaagcacctgcccagcacagagccagacccccacgtggtgcgcatcggctggagcctggacagctgcagcacccagctgggggaggagcccttctcctatggctacggcggcaccgggaagaagagcaccaacagcagatttgaaaattatggagacaagtttgctgaaaatgatgtgattggctgctttgctgactttgaatgtggaaatgatgtggagctgtccttcaccaagaatggcaagtggatgggcatcgccttccgcatccagaaggaggccctgggcggccaggccctgtacccccacgtgctggtgaagaactgtgctgtggagttcaactttggccagagagctgagccctactgcagcgtgctgcccggcttcaccttcatccagcacctgcccctgtctgagcgcatccggggcaccgtgggccccaagagcaaggccgagtgtgagatcctgatgatggtgggcctgcctgctgctgggaagaccacctgggccatcaagcacgccgccagcaaccccagcaagaagtacaacatcctgggcaccaatgccatcatggacaagatgagggtgatgggcctgcggcggcagagaaattatgccggccgctgggatgtgctgatccagcaggccacccagtgcctgaacagactcatccagattgctgccaggaagaagaggaactacatcctggaccagaccaacgtgtatggcagcgcccagaggaggaagatgaggccctttgagggcttccagaggaaggccatcgtcatctgccccacagatgaggacctgaaggacaggaccatcaagaggacagatgaggagggcaaggatgtgcctgaccatgctgtgctggagatgaaggccaacttcaccctgcctgatgtgggggacttcctggatgaggtgctcttcatcgagctgcagcgggaggaggccgacaagctggtgcggcagtacaatgaggagggcaggaaggccggccccccacctgagaagagatttgacaacagaggaggcggcggcttccggggccggggcggcggcggcggcttccagagatatgagaacagaggccccccaggcggcaacagaggaggcttccagaacagaggaggcggcagcggcggcggcggcaactacagaggaggcttcaacagaagtggcggcggcggctacagccagaaccgctggggcaacaacaacagagacaacaacaacagcaacaacagaggcagctacaacagagccccccagcagcagcccccaccccagcagcccccaccaccccagcccccaccccagcagcccccacctccacccagctacagccctgccagaaatcctcctggggccagcacctacaacaagaacagcaacatccctggcagcagcgccaacaccagcacccccaccgtgtcctcctacagccccccccagcccagctacagccagcccccctacaaccagggcggctacagccagggctacacagcccctcctcctcctcctcctcctcctccagcctacaactacggcagctatggaggctacaacccagccccctacaccccacctcctccacccacagcccagacctacccccagcccagctacaaccagtaccagcagtatgcccagcagtggaaccagtactaccagaaccagggccagtggccaccctactacggcaactatgactatggcagctacagcggcaacacccagggcggcaccagcacccagtag

SEQ ID NO: 155206 - DNA, 2259 bp, synthetic construct
  misc_feature 1..2259: note = Description of Artificial Sequence: Synthetic coding sequence
  source 1..2259: mol_type = other DNA
atggatgtgcggcggctgaaggtgaatgagctgcgggaggagctgcagaggcggggcctggacacccggggcctgaaggccgagctggccgagcggctgcagcccccacctcctggcctgcagccccacgccgagcccggcggctacagcggcccagatggccactacgccatggacaacatcacccggcagaaccagttctatgacacccaggtgatcaagcaggagaatgaaagtggctatgaaagaagacccctggagatggagcagcagcaggcctacagacctgagatgaagacagagatgaagcagggcgcccccaccagcttcctgcccccagaggccagccagctgaagccagaccggcagcagttccagagcaggaagaggccctatgaggagaacagaggccggggctactttgagcacagagaagatagaagaggccgcagcccccagcccccagctgaggaggatgaagatgactttgatgacaccctggtggccatcgacacctacaactgtgacctgcacttcaaggtggcccgggacaggagcagcggctaccccctgaccatcgagggctttgcctacctgtggagcggggcccgggccagctatggagtgcggcggggccgggtgtgctttgagatgaaggactttgaatgtggaaatgatgtggagctgtccttcaccaagaatggcaagtggatgggcatcgccttccgcatccagaaggaggccctgggcggccaggccctgtacccccacgtgctggtgaagaactgtgctgtggagttcaactttggccagagagctgagccctactgcagcgtgctgcccggcttcaccttcatccagcacctgcccctgtctgagcgcatccggggcaccgtgggccccaagagcaaggccgagtgtgagatcctgatgatggtgggcctgcctgctgctgggaagaccacctgggccatcaagcacgccgccagcaaccccagcaagaagtacaacatcctgggcaccaatgccatcatggacaagatgagggtgatgggcctgcggcggcagagaaattatgccggccgctgggatgtgctgatccagcaggccacccagtgcctgaacagactcatccagattgctgccaggaagaagaggaactacatcctggaccagaccaacgtgtatggcagcgcccagaggaggaagatgaggccctttgagggcttccagaggaaggccatcgtcatctgccccacagatgaggacctgaaggacaggaccatcaagaggacagatgaggagggcaaggatgtgcctgaccatgctgtgctggagatgaaggccaacttcaccctgcctgatgtgggggacttcctggatgaggtgctcttcatcgagctgcagcgggaggaggccgacaagctggtgcggcagtacaatgaggagggcaggaaggccggccccccacctgagaagagatttgacaacagaggaggcggcggcttccggggccggggcggcggcggcggcttccagagatatgagaacagaggccccccaggcggcaacagaggaggcttccagaacagaggaggcggcagcggcggcggcggcaactacagaggaggcttcaacagaagtggcggcggcggctacagccagaaccgctggggcaacaacaacagagacaacaacaacagcaacaacagaggcagctacaacagagccccccagcagcagcccccaccccagcagcccccaccaccccagcccccaccccagcagcccccacctccacccagctacagccctgccagaaatcctcctggggccagcacctacaacaagaacagcaacatccctggcagcagcgccaacaccagcacccccaccgtgtcctcctacagccccccccagagctttggcttcttccccagcaccttccagcccagctacagccagcccccctacaaccagggcggctacagccagggctacacagcccctcctcctcctcctcctcctcctccagcctacaactacggcagctatggaggctacaacccagccccctacaccccacctcctccacccacagcccagacctacccccagcccagctacaaccagtaccagcagtatgcccagcagtggaaccagtactaccagaaccagggccagtggccaccctactacggcaactatgactatggcagctacagcggcaacacccagggcggcaccagcacccagtag

SEQ ID NO: 155207 - DNA, 2571 bp, synthetic construct
  misc_feature 1..2571: note = Description of Artificial Sequence: Synthetic coding sequence
  source 1..2571: mol_type = other DNA
atggatgtgcggcggctgaaggtgaatgagctgcgggaggagctgcagaggcggggcctggacacccggggcctgaaggccgagctggccgagcggctgcaggccgccctggaggccgaggagccagatgatgagcgggagctggatgctgatgatgagcccggccggcccggccacatcaatgaggaggtggagacagagggcggcagcgagctggagggcacagcccagcccccacctcctggcctgcagccccatgctgagcccggcggctacagcggcccagatggccactacgccatggacaacatcacccggcagaaccagttctatgacacccaggtgatcaagcaggagaatgaaagtggctatgaaagaagacccctggagatggagcagcagcaggcctacagacctgagatgaagacagagatgaagcagggcgcccccaccagcttcctgcccccagaggccagccagctgaagccagaccggcagcagttccagagcaggaagaggccctatgaagaaaatagaggccggggctactttgagcaccgggaggaccggcggggccgcagcccccagcccccagcagaagaagatgaagatgactttgatgacaccctggtggccatcgacacctacaactgtgacctgcacttcaaggtggcccgggacaggagcagcggctaccccctgaccatcgagggctttgcctacctgtggagcggggcccgggccagctatggagtgagaagaggccgggtgtgctttgagatgaagatcaatgaggagatctctgtgaagcacctgcccagcacagagccagacccccacgtggtgcgcatcggctggagcctggacagctgcagcacccagctgggggaggagcccttctcctatggctacggcggcaccgggaagaagagcaccaacagcagatttgaaaattatggagacaagtttgctgaaaatgatgtgattggctgctttgctgactttgaatgtggaaatgatgtggagctgtccttcaccaagaatggcaagtggatgggcatcgccttccgcatccagaaggaggccctgggcggccaggccctgtacccccacgtgctggtgaagaactgtgctgtggagttcaactttggccagagagctgagccctactgcagcgtgctgcccggcttcaccttcatccagcacctgcccctgtctgagcgcatccggggcaccgtgggccccaagagcaaggccgagtgtgagatcctgatgatggtgggcctgcctgctgctgggaagaccacctgggccatcaagcacgccgccagcaaccccagcaagaagtacaacatcctgggcaccaatgccatcatggacaagatgagggtgatgggcctgcggcggcagagaaattatgccggccgctgggatgtgctgatccagcaggccacccagtgcctgaacagactcatccagattgctgccaggaagaagaggaactacatcctggaccagaccaacgtgtatggcagcgcccagaggaggaagatgaggccctttgagggcttccagaggaaggccatcgtcatctgccccacagatgaggacctgaaggacaggaccatcaagaggacagatgaggagggcaaggatgtgcctgaccatgctgtgctggagatgaaggccaacttcaccctgcctgatgtgggggacttcctggatgaggtgctcttcatcgagctgcagcgggaggaggccgacaagctggtgcggcagtacaatgaggagggcaggaaggccggccccccacctgagaagagatttgacaacagaggaggcggcggcttccggggccggggcggcggcggcggcttccagagatatgagaacagaggccccccaggcggcaacagaggaggcttccagaacagaggaggcggcagcggcggcggcggcaactacagaggaggcttcaacagaagtggcggcggcggctacagccagaaccgctggggcaacaacaacagagacaacaacaacagcaacaacagaggcagctacaacagagccccccagcagcagcccccaccccagcagcccccaccaccccagcccccaccccagcagcccccacctccacccagctacagccctgccagaaatcctcctggggccagcacctacaacaagaacagcaacatccctggcagcagcgccaacaccagcacccccaccgtgtcctcctacagccccccccagcccagctacagccagcccccctacaaccagggcggctacagccagggctacacagcccctcctcctcctcctcctcctcctccagcctacaactacggcagctatggaggctacaacccagccccctacaccccacctcctccacccacagcccagacctacccccagcccagctacaaccagtaccagcagtatgcccagcagtggaaccagtactaccagaaccagggccagtggccaccctactacggcaactatgactatggcagctacagcggcaacacccagggcggcaccagcacccagtag

SEQ ID NO: 155208 - DNA, 2751 bp, synthetic construct
  misc_feature 1..2751: note = Description of Artificial Sequence: Synthetic coding sequence
  source 1..2751: mol_type = other DNA
atggactgtgagcacagcctgagcctgccctgccgcggggctgaggcctgggagattggaattgacaagtacctgtatgccatgaggctgagtgatgagaccctgattgacatcatgacccgcttcaggaaggagatgaagaatggcctgagccgggacttcaaccccacagccaccgtgaagatgctgcccacctttgtgcgcagcatcccagatggcagcgagaagggggacttcatcgccctggacctgggcggcagcagcttccgcatcctgcgggtgcaggtgaaccacgagaagaaccagaatgtgcacatggagagcgaggtgtatgacaccccagaaaatattgtgcacggcagcggcagccagctgtttgaccacgtggctgaatgtctgggggacttcatggagaagaggaagatcaaggacaagaagctgcctgtgggcttcaccttctccttcccctgccagcagagcaagattgatgaggccatcctgatcacctggaccaagcgcttcaaggccagcggcgtggagggcgcagatgtggtgaagctgctgaacaaggccatcaagaagagaggagactatgatgccaacatcgtggccgtggtgaatgacacagtgggcaccatgatgacctgtggctatgatgaccagcactgtgaggtgggcctcatcattggaacaggcaccaatgcctgctacatggaggagctgcggcacatcgacctggtggagggagatgagggccgcatgtgcatcaacacagagtggggcgcctttggagatgatggcagcctggaggacatcagaacagaatttgaccgggagattgaccggggcagcctgaaccctgggaagcagctgtttgagaagatggtgtctggcatgtacctgggggagctggtgcggctcatcctggtgaagatggccaaggagggcctgctgtttgagggccgcatcaccccagagctgctgacccggggcaagttcaacaccagtgatgtgtctgccatcgagaagaacaaggagggcctgcacaatgccaaggagatcctgacccggctgggcgtggagcccagtgatgatgactgtgtgtctgtgcagcacgtgtgcaccatcgtgtccttccgcagcgccaacctggtggccgccaccctgggcgccatcctgaaccggctgcgggacaacaagggcaccccccggctgcggaccaccgtgggcgtggatggcagcctgtacaagacccacccccagtacagccgccgcttccacaagaccctgcggcggctggtgcctgacagtgatgtgcgcttcctgctgtctgagagcggcagcggcaagggggccgccatggtgacagctgtggcctaccgcctggccgagcagcaccggcagatcgaggagaccctggcccacttccacctgaccaaggacatgctgctggaggtgaagaagaggatgagagctgagatggagctgggcctgaggaagcagacccacaacaatgctgtggtgaagatgctgcccagctttgtgcggaggaccccagatggaacagaaaatggagacttcctggccctggacctgggcggcaccaacttccgggtgctgctggtgaagatccgcagcggcaagaagaggacagtggagatgcacaacaagatctatgccatccccatcgagatcatgcagggcactggagaggagctgtttgaccacatcgtgtcctgcatcagtgacttcctggactacatgggcatcaagggccccaggatgcccctgggcttcaccttctccttcccctgccagcagaccagcctggatgctggcatcctgatcacctggaccaagggcttcaaggccacagactgtgtgggccatgatgtggtgaccctgctgagagatgccatcaagaggcgggaggagtttgacctggatgtggtggccgtggtgaatgacacagtgggcaccatgatgacctgtgcctatgaggagcccacctgtgaggtgggcctcatcgtgggcaccggcagcaatgcctgctacatggaggagatgaagaatgtggagatggtggagggggaccagggccagatgtgcatcaacatggagtggggcgcctttggagacaatggctgcctggatgacatccgcacccactatgaccggctggtggatgagtacagcctgaatgccggcaagcagagatatgagaagatgatcagcggcatgtacctgggggagatcgtgaggaacatcctgattgacttcaccaagaagggcttcctgttccggggccagatcagcgagaccctgaagacccggggcatctttgagaccaagttcctgagccagattgaaagtgaccggctggccctgctgcaggtgcgggccatcctgcagcagctgggcctgaacagcacctgtgatgacagcatcctggtgaagacagtgtgtggggtggtgtccagaagagctgcccagctgtgtggggccggcatggctgctgtggtggacaagatccgggagaacagaggcctggaccggctgaatgtgacagtgggcgtggatggcaccctgtacaagctgcacccccacttcagccgcatcatgcaccagacagtgaaggagctgagccccaagtgcaatgtgtccttcctgctgtctgaagatggcagcggcaagggggccgccctgatcacagctgtgggcgtgcggctgaggacagaggccagcagctag

SEQ ID NO: 155209 - DNA, 2754 bp, synthetic construct
  misc_feature 1..2754: note = Description of Artificial Sequence: Synthetic coding sequence
  source 1..2754: mol_type = other DNA
atgattgctgcccagctgctggcctactacttcacagagctgaaggatgaccaggtgaagaagattgacaagtacctgtatgccatgaggctgagtgatgagaccctgattgacatcatgacccgcttcaggaaggagatgaagaatggcctgagccgggacttcaaccccacagccaccgtgaagatgctgcccacctttgtgcgcagcatcccagatggcagcgagaagggggacttcatcgccctggacctgggcggcagcagcttccgcatcctgcgggtgcaggtgaaccacgagaagaaccagaatgtgcacatggagagcgaggtgtatgacaccccagagaacatcgtgcacggcagcggcagccagctgtttgaccacgtggccgagtgcctgggggacttcatggagaagaggaagatcaaggacaagaagctgcctgtgggcttcaccttctccttcccctgccagcagagcaagattgatgaggccatcctgatcacctggaccaagcgcttcaaggccagcggcgtggagggcgcagatgtggtgaagctgctgaacaaggccatcaagaagagaggagactatgatgccaacatcgtggccgtggtgaatgacacagtgggcaccatgatgacctgtggctatgatgaccagcactgtgaggtgggcctcatcatcggcaccggcaccaatgcctgctacatggaggagctgcggcacatcgacctggtggagggagatgagggccgcatgtgcatcaacacagagtggggcgcctttggagatgatggcagcctggaggacatcagaacagaatttgaccgggagattgaccggggcagcctgaaccctgggaagcagctgtttgagaagatggtgtctggcatgtacctgggggagctggtgcggctcatcctggtgaagatggccaaggagggcctgctgtttgagggccgcatcaccccagagctgctgacccggggcaagttcaacaccagtgatgtgtctgccatcgagaagaacaaggagggcctgcacaatgccaaggagatcctgacccggctgggcgtggagcccagtgatgatgactgtgtgtctgtgcagcacgtgtgcaccatcgtgtccttccgcagcgccaacctggtggccgccaccctgggcgccatcctgaaccggctgcgggacaacaagggcaccccccggctgcggaccaccgtgggcgtggatggcagcctgtacaagacccacccccagtacagccgccgcttccacaagaccctgcggcggctggtgcctgacagtgatgtgcgcttcctgctgtctgagagcggcagcgggaaaggagctgccatggtgacagctgtggcctaccgcctggccgagcagcaccggcagatcgaggagaccctggcccacttccacctgaccaaggacatgctgctggaggtgaagaagaggatgagagctgagatggagctgggcctgaggaagcagacccacaacaatgctgtggtgaagatgctgcccagctttgtgcggaggaccccagatggaacagaaaatggagacttcctggccctggacctgggcggcaccaacttccgggtgctgctggtgaagatccgcagcggcaagaagaggacagtggagatgcacaacaagatctatgccatccccatcgagatcatgcagggcaccggggaggagctgtttgaccacatcgtgtcctgcatcagtgacttcctggactacatgggcatcaagggccccaggatgcccctgggcttcaccttctccttcccctgccagcagaccagcctggatgctggcatcctgatcacctggaccaagggcttcaaggccacagactgtgtgggccatgatgtggtgaccctgctgagagatgccatcaagagaagagaggagtttgacctggatgtggtggccgtggtgaatgacacagtgggcaccatgatgacctgtgcctatgaggagcccacctgtgaggtgggcctgattgtgggcaccggcagcaatgcctgctacatggaggagatgaagaatgtggagatggtggagggggaccagggccagatgtgcatcaacatggagtggggcgccttcggggacaatggctgcctggatgacatccgcacccactatgaccggctggtggatgagtacagcctgaatgctgggaagcagagatatgagaagatgatcagcggcatgtacctgggggagatcgtgaggaacatcctgattgacttcaccaagaagggcttcctgttccggggccagatcagcgagaccctgaagacccggggcatctttgagaccaagttcctgagccagatcgagagtgaccggctggccctgctgcaggtgcgggccatcctgcagcagctgggcctgaacagcacctgtgatgacagcatcctggtgaagacagtgtgtggggtggtgtcccggcgggccgcccagctgtgtggggccggcatggctgctgtggtggacaagatcagagaaaatagaggcctggaccggctgaatgtgacagtgggcgtggatggcaccctgtacaagctgcacccccacttcagccgcatcatgcaccagacagtgaaggagctgagccccaagtgcaatgtgtccttcctgctgtctgaagatggcagcgggaaaggagctgccctgatcacagctgtgggcgtgcggctgaggacagaggccagcagctag

SEQ ID NO: 155210 - DNA, 2718 bp, synthetic construct
  misc_feature 1..2718: note = Description of Artificial Sequence: Synthetic coding sequence
  source 1..2718: mol_type = other DNA
atggccaagagggccctgcatgacttcatcgacaagtacctgtatgccatgaggctgagtgatgagaccctgattgacatcatgacccgcttcaggaaggagatgaagaatggcctgagccgggacttcaaccccacagccaccgtgaagatgctgcccacctttgtgcgcagcatcccagatggcagcgagaagggggacttcatcgccctggacctgggcggcagcagcttccgcatcctgcgggtgcaggtgaaccacgagaagaaccagaatgtgcacatggagagcgaggtgtatgacaccccagagaacatcgtgcacggcagcggcagccagctgtttgaccacgtggccgagtgcctgggggacttcatggagaagaggaagatcaaggacaagaagctgcctgtgggcttcaccttctccttcccctgccagcagagcaagattgatgaggccatcctgatcacctggaccaagcgcttcaaggccagcggcgtggagggcgcagatgtggtgaagctgctgaacaaggccatcaagaagagaggagactatgatgccaacatcgtggccgtggtgaatgacacagtgggcaccatgatgacctgtggctatgatgaccagcactgtgaggtgggcctcatcatcggcaccggcaccaatgcctgctacatggaggagctgcggcacatcgacctggtggagggagatgagggccgcatgtgcatcaacacagagtggggcgcctttggagatgatggcagcctggaggacatcagaacagaatttgaccgggagattgaccggggcagcctgaaccctgggaagcagctgtttgagaagatggtgtctggcatgtacctgggggagctggtgcggctcatcctggtgaagatggccaaggagggcctgctgtttgagggccgcatcaccccagagctgctgacccggggcaagttcaacaccagtgatgtgtctgccatcgagaagaacaaggagggcctgcacaatgccaaggagatcctgacccggctgggcgtggagcccagtgatgatgactgtgtgtctgtgcagcacgtgtgcaccatcgtgtccttccgcagcgccaacctggtggccgccaccctgggcgccatcctgaaccggctgcgggacaacaagggcaccccccggctgcggaccaccgtgggcgtggatggcagcctgtacaagacccacccccagtacagccgccgcttccacaagaccctgcggcggctggtgcctgacagtgatgtgcgcttcctgctgtctgagagcggcagcgggaaaggagctgccatggtgacagctgtggcctaccgcctggccgagcagcaccggcagatcgaggagaccctggcccacttccacctgaccaaggacatgctgctggaggtgaagaagaggatgagagctgagatggagctgggcctgaggaagcagacccacaacaatgctgtggtgaagatgctgcccagctttgtgcggaggaccccagatggaacagaaaatggagacttcctggccctggacctgggcggcaccaacttccgggtgctgctggtgaagatccgcagcggcaagaagaggacagtggagatgcacaacaagatctatgccatccccatcgagatcatgcagggcaccggggaggagctgtttgaccacatcgtgtcctgcatcagtgacttcctggactacatgggcatcaagggccccaggatgcccctgggcttcaccttctccttcccctgccagcagaccagcctggatgctggcatcctgatcacctggaccaagggcttcaaggccacagactgtgtgggccatgatgtggtgaccctgctgagagatgccatcaagagaagagaggagtttgacctggatgtggtggccgtggtgaatgacacagtgggcaccatgatgacctgtgcctatgaggagcccacctgtgaggtgggcctgattgtgggcaccggcagcaatgcctgctacatggaggagatgaagaatgtggagatggtggagggggaccagggccagatgtgcatcaacatggagtggggcgccttcggggacaatggctgcctggatgacatccgcacccactatgaccggctggtggatgagtacagcctgaatgctgggaagcagagatatgagaagatgatcagcggcatgtacctgggggagatcgtgaggaacatcctgattgacttcaccaagaagggcttcctgttccggggccagatcagcgagaccctgaagacccggggcatctttgagaccaagttcctgagccagatcgagagtgaccggctggccctgctgcaggtgcgggccatcctgcagcagctgggcctgaacagcacctgtgatgacagcatcctggtgaagacagtgtgtggggtggtgtcccggcgggccgcccagctgtgtggggccggcatggctgctgtggtggacaagatcagagaaaatagaggcctggaccggctgaatgtgacagtgggcgtggatggcaccctgtacaagctgcacccccacttcagccgcatcatgcaccagacagtgaaggagctgagccccaagtgcaatgtgtccttcctgctgtctgaagatggcagcgggaaaggagctgccctgatcacagctgtgggcgtgcggctgaggacagaggccagcagctag

SEQ ID NO: 155211 - DNA, 2766 bp, synthetic construct
  misc_feature 1..2766: note = Description of Artificial Sequence: Synthetic coding sequence
  source 1..2766: mol_type = other DNA
atgggccagatctgccagcgggagagcgccacagctgctgagaagcccaagctgcacctgctggccgagagcgagattgacaagtacctgtatgccatgaggctgagtgatgagaccctgattgacatcatgacccgcttcaggaaggagatgaagaatggcctgagccgggacttcaaccccacagccaccgtgaagatgctgcccacctttgtgcgcagcatcccagatggcagcgagaagggggacttcatcgccctggacctgggcggcagcagcttccgcatcctgcgggtgcaggtgaaccacgagaagaaccagaatgtgcacatggagagcgaggtgtatgacaccccagagaacatcgtgcacggcagcggcagccagctgtttgaccacgtggccgagtgcctgggggacttcatggagaagaggaagatcaaggacaagaagctgcctgtgggcttcaccttctccttcccctgccagcagagcaagattgatgaggccatcctgatcacctggaccaagcgcttcaaggccagcggcgtggagggcgcagatgtggtgaagctgctgaacaaggccatcaagaagagaggagactatgatgccaacatcgtggccgtggtgaatgacacagtgggcaccatgatgacctgtggctatgatgaccagcactgtgaggtgggcctcatcatcggcaccggcaccaatgcctgctacatggaggagctgcggcacatcgacctggtggagggagatgagggccgcatgtgcatcaacacagagtggggcgcctttggagatgatggcagcctggaggacatcagaacagaatttgaccgggagattgaccggggcagcctgaaccctgggaagcagctgtttgagaagatggtgtctggcatgtacctgggggagctggtgcggctcatcctggtgaagatggccaaggagggcctgctgtttgagggccgcatcaccccagagctgctgacccggggcaagttcaacaccagtgatgtgtctgccatcgagaagaacaaggagggcctgcacaatgccaaggagatcctgacccggctgggcgtggagcccagtgatgatgactgtgtgtctgtgcagcacgtgtgcaccatcgtgtccttccgcagcgccaacctggtggccgccaccctgggcgccatcctgaaccggctgcgggacaacaagggcaccccccggctgcggaccaccgtgggcgtggatggcagcctgtacaagacccacccccagtacagccgccgcttccacaagaccctgcggcggctggtgcctgacagtgatgtgcgcttcctgctgtctgagagcggcagcgggaaaggagctgccatggtgacagctgtggcctaccgcctggccgagcagcaccggcagatcgaggagaccctggcccacttccacctgaccaaggacatgctgctggaggtgaagaagaggatgagagctgagatggagctgggcctgaggaagcagacccacaacaatgctgtggtgaagatgctgcccagctttgtgcggaggaccccagatggaacagaaaatggagacttcctggccctggacctgggcggcaccaacttccgggtgctgctggtgaagatccgcagcggcaagaagaggacagtggagatgcacaacaagatctatgccatccccatcgagatcatgcagggcaccggggaggagctgtttgaccacatcgtgtcctgcatcagtgacttcctggactacatgggcatcaagggccccaggatgcccctgggcttcaccttctccttcccctgccagcagaccagcctggatgctggcatcctgatcacctggaccaagggcttcaaggccacagactgtgtgggccatgatgtggtgaccctgctgagagatgccatcaagagaagagaggagtttgacctggatgtggtggccgtggtgaatgacacagtgggcaccatgatgacctgtgcctatgaggagcccacctgtgaggtgggcctgattgtgggcaccggcagcaatgcctgctacatggaggagatgaagaatgtggagatggtggagggggaccagggccagatgtgcatcaacatggagtggggcgccttcggggacaatggctgcctggatgacatccgcacccactatgaccggctggtggatgagtacagcctgaatgctgggaagcagagatatgagaagatgatcagcggcatgtacctgggggagatcgtgaggaacatcctgattgacttcaccaagaagggcttcctgttccggggccagatcagcgagaccctgaagacccggggcatctttgagaccaagttcctgagccagatcgagagtgaccggctggccctgctgcaggtgcgggccatcctgcagcagctgggcctgaacagcacctgtgatgacagcatcctggtgaagacagtgtgtggggtggtgtcccggcgggccgcccagctgtgtggggccggcatggctgctgtggtggacaagatcagagaaaatagaggcctggaccggctgaatgtgacagtgggcgtggatggcaccctgtacaagctgcacccccacttcagccgcatcatgcaccagacagtgaaggagctgagccccaagtgcaatgtgtccttcctgctgtctgaagatggcagcgggaaaggagctgccctgatcacagctgtgggcgtgcggctgaggacagaggccagcagctag

SEQ ID NO: 155212 - DNA, 2748 bp, synthetic construct
  misc_feature 1..2748: note = Description of Artificial Sequence: Synthetic coding sequence
  source 1..2748: mol_type = other DNA
atgattgctgcccagctgctggcctactacttcacagagctgaaggatgaccaggtgaagaagattgacaagtacctgtatgccatgaggctgagtgatgagaccctgattgacatcatgacccgcttcaggaaggagatgaagaatggcctgagccgggacttcaaccccacagccaccgtgaagatgctgcccacctttgtgcgcagcatcccagatggcagcgagaagggggacttcatcgccctggacctgggcggcagcagcttccgcatcctgcgggtgcaggtgaaccacgagaagaaccagaatgtgcacatggagagcgaggtgtatgacaccccagagaacatcgtgcacggcagcggcagccagctgtttgaccacgtggccgagtgcctgggggacttcatggagaagaggaagatcaaggacaagaagctgcctgtgggcttcaccttctccttcccctgccagcagagcaagattgatgaggccatcctgatcacctggaccaagcgcttcaaggccagcggcgtggagggcgcagatgtggtgaagctgctgaacaaggccatcaagaagagaggagactatgatgccaacatcgtggccgtggtgaatgacacagtgggcaccatgatgacctgtggctatgatgaccagcactgtgaggtgggcctcatcatcggcaccggcaccaatgcctgctacatggaggagctgcggcacatcgacctggtggagggagatgagggccgcatgtgcatcaacacagagtggggcgcctttggagatgatggcagcctggaggacatcagaacagaatttgaccgggagattgaccggggcagcctgaaccctgggaagcagctgtttgagaagatggtgtctggcatgtacctgggggagctggtgcggctcatcctggtgaagatggccaaggagggcctgctgtttgagggccgcatcaccccagagctgctgacccggggcaagttcaacaccagtgatgtgtctgccatcgagaagaacaaggagggcctgcacaatgccaaggagatcctgacccggctgggcgtggagcccagtgatgatgactgtgtgtctgtgcagcacgtgtgcaccatcgtgtccttccgcagcgccaacctggtggccgccaccctgggcgccatcctgaaccggctgcgggacaacaagggcaccccccggctgcggaccaccgtgggcgtggatggcagcctgtacaagacccacccccagtacagccgccgcttccacaagaccctgcggcggctggtgcctgacagtgatgtgcgcttcctgctgtctgagagcggcagcgggaaaggagctgccatggtgacagctgtggcctaccgcctggccgagcagcaccggcagatcgaggagaccctggcccacttccacctgaccaaggacatgctgctggaggtgaagaagaggatgagagctgagatggagctgggcctgaggaagcagacccacaacaatgctgtggtgaagatgctgcccagctttgtgcggaggaccccagatggaacagaaaatggagacttcctggccctggacctgggcggcaccaacttccgggtgctgctggtgaagatccgcagcggcaagaagaggacagtggagatgcacaacaagatctatgccatccccatcgagatcatgcagggcaccggggaggagctgtttgaccacatcgtgtcctgcatcagtgacttcctggactacatgggcatcaagggccccaggatgcccctgggcttcaccttctccttcccctgccagcagaccagcctggatgctggcatcctgatcacctggaccaagggcttcaaggccacagactgtgtgggccatgatgtggtgaccctgctgagagatgccatcaagagaagagaggagtttgacctggatgtggtggccgtggtgaatgacacagtgggcaccatgatgacctgtgcctatgaggagcccacctgtgaggtgggcctgattgtgggcaccggcagcaatgcctgctacatggaggagatgaagaatgtggagatggtggagggggaccagggccagatgtgcatcaacatggagtggggcgccttcggggacaatggctgcctggatgacatccgcacccactatgaccggctggtggatgagtacagcctgaatgctgggaagcagagatatgagaagatgatcagcggcatgtacctgggggagatcgtgaggaacatcctgattgacttcaccaagaagggcttcctgttccggggccagatcagcgagaccctgaagacccggggcatctttgagaccaagttcctgagccagatcgagagtgaccggctggccctgctgcaggtgcgggccatcctgcagcagctgggcctgaacagcacctgtgatgacagcatcctggtgaagacagtgtgtggggtggtgtcccggcgggccgcccagctgtgtggggccggcatggctgctgtggtggacaagatcagagaaaatagaggcctggaccggctgaatgtgacagtgggcgtggatggcaccctgtacaagctgcacccccacttcagccgcatcatgcaccagacagtgaaggagctgagccccaagtgcaatgtgtccttcctgctgtctgaagatggcagcgggaaaggagctgccctgatcacagctgtgggcgtgcggctgaggacagaggcctag

SEQ ID NO: 155213 - DNA, 345 bp, synthetic construct
  misc_feature 1..345: note = Description of Artificial Sequence: Synthetic coding sequence
  source 1..345: mol_type = other DNA
atggccaagagggccctgcatgacttcatcgacaagtacctgtatgccatgaggctgagtgatgagaccctgattgacatcatgacccgcttcaggaaggagatgaagaatggcctgagccgggacttcaaccccacagccaccgtgaagatgctgcccacctttgtgcgcagcatcccagatggcagcgagaagggggacttcatcgccctggacctgggcggcagcagcttccgcatcctgcgggtgcaggtgaaccacgagaagaaccagaatgtgcacatggagagcgaggtgtatgacaccccagagaacatcgtgcacggcagcggcagccagctgtag

SEQ ID NO: 155214 - DNA, 876 bp, synthetic construct
  misc_feature 1..876: note = Description of Artificial Sequence: Synthetic coding sequence
  source 1..876: mol_type = other DNA
atggactgtgagcacagcctgagcctgccctgccgcggggctgaggcctgggagattggaattgacaagtacctgtatgccatgaggctgagtgatgagaccctgattgacatcatgacccgcttcaggaaggagatgaagaatggcctgagccgggacttcaaccccacagccaccgtgaagatgctgcccacctttgtgcgcagcatcccagatggcagcgagaagggggacttcatcgccctggacctgggcggcagcagcttccgcatcctgcgggtgcaggtgaaccacgagaagaaccagaatgtgcacatggagagcgaggtgtatgacaccccagaaaatattgtgcacggcagcggcagccagctgtttgaccacgtggctgaatgtctgggggacttcatggagaagaggaagatcaaggacaagaagctgcctgtgggcttcaccttctccttcccctgccagcagagcaagattgatgaggccatcctgatcacctggaccaagcgcttcaaggccagcggcgtggagggcgcagatgtggtgaagctgctgaacaaggccatcaagaagagaggagactatgatgccaacatcgtggccgtggtgaatgacacagtgggcaccatgatgacctgtggctatgatgaccagcactgtgaggtgggcctcatcattggaacaggcaccaatgcctgctacatggaggagctgcggcacatcgacctggtggagggagatgagggccgcatgtgcatcaacacagagtggggcgcctttggagatgatggcagcctggaggacatcagaacagaatttgaccgggagattgaccggggcagcctgaaccctgggaagcagctgtag

SEQ ID NO: 155215 - DNA, 2859 bp, synthetic construct
  misc_feature 1..2859: note = Description of Artificial Sequence: Synthetic coding sequence
  source 1..2859: mol_type = other DNA
atgggccagatctgccagcgggagagccggcagggcctggccatgctgcccaggctcttcctgaacccctggaggcaggtgatcctgctgccccagccccccaaggtgctgggcctgcaggccacagctgctgagaagcccaagctgcacctgctggccgagagcgagattgacaagtacctgtatgccatgaggctgagtgatgagaccctgattgacatcatgacccgcttcaggaaggagatgaagaatggcctgagccgggacttcaaccccacagccaccgtgaagatgctgcccacctttgtgcgcagcatcccagatggcagcgagaagggggacttcatcgccctggacctgggcggcagcagcttccgcatcctgcgggtgcaggtgaaccacgagaagaaccagaatgtgcacatggagagcgaggtgtatgacaccccagaaaatattgtgcacggcagcggcagccagctgtttgaccacgtggctgaatgtctgggggacttcatggagaagaggaagatcaaggacaagaagctgcctgtgggcttcaccttctccttcccctgccagcagagcaagattgatgaggccatcctgatcacctggaccaagcgcttcaaggccagcggcgtggagggcgcagatgtggtgaagctgctgaacaaggccatcaagaagagaggagactatgatgccaacatcgtggccgtggtgaatgacacagtgggcaccatgatgacctgtggctatgatgaccagcactgtgaggtgggcctcatcattggaacaggcaccaatgcctgctacatggaggagctgcggcacatcgacctggtggagggagatgagggccgcatgtgcatcaacacagagtggggcgcctttggagatgatggcagcctggaggacatcagaacagaatttgaccgggagattgaccggggcagcctgaaccctgggaagcagctgtttgagaagatggtgtctggcatgtacctgggggagctggtgcggctcatcctggtgaagatggccaaggagggcctgctgtttgagggccgcatcaccccagagctgctgacccggggcaagttcaacaccagtgatgtgtctgccatcgagaagaacaaggagggcctgcacaatgccaaggagatcctgacccggctgggcgtggagcccagtgatgatgactgtgtgtctgtgcagcacgtgtgcaccatcgtgtccttccgcagcgccaacctggtggccgccaccctgggcgccatcctgaaccggctgcgggacaacaagggcaccccccggctgcggaccaccgtgggcgtggatggcagcctgtacaagacccacccccagtacagccgccgcttccacaagaccctgcggcggctggtgcctgacagtgatgtgcgcttcctgctgtctgagagcggcagcggcaagggggccgccatggtgacagctgtggcctaccgcctggccgagcagcaccggcagatcgaggagaccctggcccacttccacctgaccaaggacatgctgctggaggtgaagaagaggatgagagctgagatggagctgggcctgaggaagcagacccacaacaatgctgtggtgaagatgctgcccagctttgtgcggaggaccccagatggaacagaaaatggagacttcctggccctggacctgggcggcaccaacttccgggtgctgctggtgaagatccgcagcggcaagaagaggacagtggagatgcacaacaagatctatgccatccccatcgagatcatgcagggcactggagaggagctgtttgaccacatcgtgtcctgcatcagtgacttcctggactacatgggcatcaagggccccaggatgcccctgggcttcaccttctccttcccctgccagcagaccagcctggatgctggcatcctgatcacctggaccaagggcttcaaggccacagactgtgtgggccatgatgtggtgaccctgctgagagatgccatcaagaggcgggaggagtttgacctggatgtggtggccgtggtgaatgacacagtgggcaccatgatgacctgtgcctatgaggagcccacctgtgaggtgggcctcatcgtgggcaccggcagcaatgcctgctacatggaggagatgaagaatgtggagatggtggagggggaccagggccagatgtgcatcaacatggagtggggcgcctttggagacaatggctgcctggatgacatccgcacccactatgaccggctggtggatgagtacagcctgaatgccggcaagcagagatatgagaagatgatcagcggcatgtacctgggggagatcgtgaggaacatcctgattgacttcaccaagaagggcttcctgttccggggccagatcagcgagaccctgaagacccggggcatctttgagaccaagttcctgagccagattgaaagtgaccggctggccctgctgcaggtgcgggccatcctgcagcagctgggcctgaacagcacctgtgatgacagcatcctggtgaagacagtgtgtggggtggtgtccagaagagctgcccagctgtgtggggccggcatggctgctgtggtggacaagatccgggagaacagaggcctggaccggctgaatgtgacagtgggcgtggatggcaccctgtacaagctgcacccccacttcagccgcatcatgcaccagacagtgaaggagctgagccccaagtgcaatgtgtccttcctgctgtctgaagatggcagcggcaagggggccgccctgatcacagctgtgggcgtgcggctgaggacagaggccagcagctag

SEQ ID NO: 155216 - DNA, 420 bp, synthetic construct
  misc_feature 1..420: note = Description of Artificial Sequence: Synthetic coding sequence
  source 1..420: mol_type = other DNA
atgggccagatctgccagcgggagagcgccacagctgctgagaagcccaagctgcacctgctggccgagagcgagattgacaagtacctgtatgccatgaggctgagtgatgagaccctgattgacatcatgacccgcttcaggaaggagatgaagaatggcctgagccgggacttcaaccccacagccaccgtgaagatgctgcccacctttgtgcgcagcatcccagatggcagcgagaagggggacttcatcgccctggacctgggcggcagcagcttccgcatcctgcgggtgcaggtgaaccacgagaagaaccagaatgtgcacatggagagcgaggtgtatgacaccccagagaacatcgtgcacggcagcggcagccagctgtttgaccacgtggccgagtgcctgggctag

SEQ ID NO: 155217 - DNA, 2754 bp, synthetic construct
  misc_feature 1..2754: note = Description of Artificial Sequence: Synthetic coding sequence
  source 1..2754: mol_type = other DNA
atgattgccagccacctgctggcctacttcttcacagagctgaaccacgaccaggtgcagaaggtggaccagtacctgtaccacatgaggctgagtgatgagaccctgctggagatcagcaagcgcttcaggaaggagatggagaagggcctgggcgccaccacccaccccacagctgctgtgaagatgctgcccacctttgtgcgcagcaccccagatggaacagaacatggagagttcctggccctggacctgggcggcaccaacttccgggtgctgtgggtgaaggtgacagacaatggcctgcagaaggtggagatggagaaccagatctatgccatccctgaggacatcatgaggggcagcggcacccagctgtttgaccacatcgccgagtgcctggccaacttcatggacaagctgcagatcaaggacaagaagctgcccctgggcttcaccttctccttcccctgccaccagaccaagctggatgagagcttcctggtgtcctggaccaagggcttcaagagcagcggcgtggagggcagagatgtggtggccctgatcaggaaggccatccagaggagaggagactttgatattgatattgtggccgtggtgaatgacacagtgggcaccatgatgacctgtggctatgatgaccacaactgtgagatcggcctgattgtgggcaccggcagcaatgcctgctacatggaggagatgaggcacatcgacatggtggagggagatgagggccgcatgtgcatcaacatggagtggggcgcctttggagatgatggcagcctgaatgacatcagaacagaatttgaccaggagattgacatgggcagcctgaaccctgggaagcagctgtttgagaagatgatcagcggcatgtacatgggagagctggtgcggctcatcctggtgaagatggccaaggaggagctgctgtttggaggcaagctgagccctgagctgctgaacacaggccgctttgagaccaaggacatcagtgacatcgagggggagaaggatggcatcaggaaggcccgggaggtgctgatgaggctgggcctggaccccacccaggaggactgtgtggccacccaccgcatctgccagatcgtgtccaccaggtctgccagcctgtgtgccgccaccctggccgctgtgctgcagaggatcaaggaaaataaaggagaggagcggctgcggagcaccatcggcgtggatggctctgtgtacaagaagcacccccactttgccaagaggctgcacaagacagtgcggcggctggtgcccggctgtgatgtgcgcttcctgcggagtgaagatggcagcgggaaaggagctgccatggtgacagctgtggcctaccgcctggccgaccagcaccgggcccggcagaagaccctggagcacctgcagctgagccatgaccagctgctggaggtgaagaggaggatgaaggtggagatggagcggggcctgagcaaggagacccacgccagcgcccctgtgaagatgctgcccacctacgtgtgtgccaccccagatggaacagagaagggggacttcctggccctggacctgggcggcaccaacttccgggtgctgctggtgcgggtgagaaatggcaagtggggcggcgtggagatgcacaacaagatctatgccatcccccaggaggtgatgcacggcactggagatgagctgtttgaccacatcgtgcagtgcatcgctgacttcctggagtacatgggcatgaagggcgtgtccctgcccctgggcttcaccttctccttcccctgccagcagaacagcctggatgagagcatcctgctgaagtggaccaagggcttcaaggccagcggctgtgaaggagaagatgtggtgaccctgctgaaggaggccatccacagaagagaggagtttgacctggatgtggtggccgtggtgaatgacacagtgggcaccatgatgacctgtggctttgaggacccccactgtgaggtgggcctgattgtgggcaccggcagcaatgcctgctacatggaggagatgagaaatgtggagctggtggagggggaggagggccgcatgtgtgtgaacatggagtggggcgccttcggggacaatggctgcctggatgacttcagaacagaatttgatgtggccgtggatgagctgagcctgaaccctgggaagcagagatttgagaagatgatcagcggcatgtacctgggggagatcgtgaggaacatcctgattgacttcaccaagaggggcctgctcttccggggccgcatcagcgagcggctgaagacccggggcatctttgagaccaagttcctgagccagatcgagagtgactgcctggccctgctgcaggtgcgggccatcctgcagcacctgggcctggagagcacctgtgatgacagcatcatcgtgaaggaggtgtgcaccgtggtggcccggcgggccgcccagctgtgtggggccggcatggctgctgtggtggaccgcatcagagaaaatagaggcctggatgccctgaaggtgacagtgggcgtggatggcaccctgtacaagctgcacccccactttgccaaggtgatgcatgagaccgtgaaggacctggcccccaagtgtgatgtgtccttcctgcagagtgaagatggcagcgggaaaggagctgccctgatcacagctgtggcctgccgcatccgggaggccggccagaggtag

SEQ ID NO: 155218 - DNA, 2670 bp, synthetic construct
  misc_feature 1..2670: note = Description of Artificial Sequence: Synthetic coding sequence
  source 1..2670: mol_type = other DNA
atgaggctgagtgatgagaccctgctggagatcagcaagcgcttcaggaaggagatggagaagggcctgggcgccaccacccaccccacagctgctgtgaagatgctgcccacctttgtgcgcagcaccccagatggaacagaacatggagagttcctggccctggacctgggcggcaccaacttccgggtgctgtgggtgaaggtgacagacaatggcctgcagaaggtggagatggagaaccagatctatgccatccctgaggacatcatgaggggcagcggcacccagctgtttgaccacatcgccgagtgcctggccaacttcatggacaagctgcagatcaaggacaagaagctgcccctgggcttcaccttctccttcccctgccaccagaccaagctggatgagagcttcctggtgtcctggaccaagggcttcaagagcagcggcgtggagggcagagatgtggtggccctgatcaggaaggccatccagaggagaggagactttgatattgatattgtggccgtggtgaatgacacagtgggcaccatgatgacctgtggctatgatgaccacaactgtgagatcggcctgattgtgggcaccggcagcaatgcctgctacatggaggagatgaggcacatcgacatggtggagggagatgagggccgcatgtgcatcaacatggagtggggcgcctttggagatgatggcagcctgaatgacatcagaacagaatttgaccaggagattgacatgggcagcctgaaccctgggaagcagctgtttgagaagatgatcagcggcatgtacatgggagagctggtgcggctcatcctggtgaagatggccaaggaggagctgctgtttggaggcaagctgagccctgagctgctgaacacaggccgctttgagaccaaggacatcagtgacatcgagggggagaaggatggcatcaggaaggcccgggaggtgctgatgaggctgggcctggaccccacccaggaggactgtgtggccacccaccgcatctgccagatcgtgtccaccaggtctgccagcctgtgtgccgccaccctggccgctgtgctgcagaggatcaaggaaaataaaggagaggagcggctgcggagcaccatcggcgtggatggctctgtgtacaagaagcacccccactttgccaagaggctgcacaagacagtgcggcggctggtgcccggctgtgatgtgcgcttcctgcggagtgaagatggcagcgggaaaggagctgccatggtgacagctgtggcctaccgcctggccgaccagcaccgggcccggcagaagaccctggagcacctgcagctgagccatgaccagctgctggaggtgaagaggaggatgaaggtggagatggagcggggcctgagcaaggagacccacgccagcgcccctgtgaagatgctgcccacctacgtgtgtgccaccccagatggaacagagaagggggacttcctggccctggacctgggcggcaccaacttccgggtgctgctggtgcgggtgagaaatggcaagtggggcggcgtggagatgcacaacaagatctatgccatcccccaggaggtgatgcacggcactggagatgagctgtttgaccacatcgtgcagtgcatcgctgacttcctggagtacatgggcatgaagggcgtgtccctgcccctgggcttcaccttctccttcccctgccagcagaacagcctggatgagagcatcctgctgaagtggaccaagggcttcaaggccagcggctgtgaaggagaagatgtggtgaccctgctgaaggaggccatccacagaagagaggagtttgacctggatgtggtggccgtggtgaatgacacagtgggcaccatgatgacctgtggctttgaggacccccactgtgaggtgggcctgattgtgggcaccggcagcaatgcctgctacatggaggagatgagaaatgtggagctggtggagggggaggagggccgcatgtgtgtgaacatggagtggggcgccttcggggacaatggctgcctggatgacttcagaacagaatttgatgtggccgtggatgagctgagcctgaaccctgggaagcagagatttgagaagatgatcagcggcatgtacctgggggagatcgtgaggaacatcctgattgacttcaccaagaggggcctgctcttccggggccgcatcagcgagcggctgaagacccggggcatctttgagaccaagttcctgagccagatcgagagtgactgcctggccctgctgcaggtgcgggccatcctgcagcacctgggcctggagagcacctgtgatgacagcatcatcgtgaaggaggtgtgcaccgtggtggcccggcgggccgcccagctgtgtggggccggcatggctgctgtggtggaccgcatcagagaaaatagaggcctggatgccctgaaggtgacagtgggcgtggatggcaccctgtacaagctgcacccccactttgccaaggtgatgcatgagaccgtgaaggacctggcccccaagtgtgatgtgtccttcctgcagagtgaagatggcagcgggaaaggagctgccctgatcacagctgtggcctgccgcatccgggaggccggccagaggtag

SEQ ID NO: 155219 - DNA, 2754 bp, synthetic construct; identical to SEQ ID NO: 155217
  misc_feature 1..2754: note = Description of Artificial Sequence: Synthetic coding sequence
  source 1..2754: mol_type = other DNA

SEQ ID NO: 155220 - DNA, 2772 bp, synthetic construct
  misc_feature 1..2772: note = Description of Artificial Sequence: Synthetic coding sequence
  source 1..2772: mol_type = other DNA
atggacagcatcggcagcagcggcctgcggcagggcgaggagaccctgagctgcagcgaggagggcctgcccggccccagcgacagcagcgagctggtgcaggagtgcctgcagcagttcaaggtgacccgggcccagctgcagcagatccaggccagcctgctgggctccatggagcaggccctgcggggccaggccagccctgccccagctgtgaggatgctgcccacctacgtgggcagcaccccccacggcacagagcagggcgactttgtggtgctggagctgggcgccactggagccagcctgcgggtgctgtgggtgaccctgactggaattgagggccaccgggtggagcccaggagccaggagtttgtgatcccccaggaggtgatgctgggcgccggccagcagctgtttgattttgctgcccactgcctgtctgagttcctggatgcccagcctgtgaacaagcagggcctgcagctgggcttctccttctccttcccctgccaccagacaggcctggacaggagcaccctcatctcctggaccaagggcttccgctgcagcggcgtggagggccaggatgtggtgcagctgctgagagatgccatccggcggcagggcgcctacaacattgatgtggtggccgtggtgaatgacacagtgggcaccatgatgggctgtgagcccggggtgcggccctgtgaggtgggcctggtggtggacaccggcaccaatgcctgctacatggaggaggcccggcacgtggccgtgctggatgaagatcggggccgggtgtgtgtgtctgtggagtggggcagcttcagtgatgatggagccctgggccctgtgctgaccacctttgaccacaccctggaccacgagagcctgaaccctggggcccagagatttgagaagatgattggaggcctgtacctgggggagctggtgcggctggtgctggcccacctggcccgctgtggggtgctgtttggaggctgcaccagccctgccctgctgagccagggcagcatcctgctggagcacgtggccgagatggaggaccccagcactggagctgcccgggtgcacgccatcctgcaggacctgggcctgagccctggggccagtgatgtggagctggtgcagcacgtgtgtgccgctgtgtgcaccagggctgcccagctgtgtgccgccgccctggccgctgtgctgagctgcctgcagcacagccgggagcagcagaccctgcaggtggccgtggccactggaggccgggtgtgtgagcggcacccccgcttctgcagcgtgctgcagggcaccgtgatgctgctggccccagaatgtgatgtgtccctcatccccagcgtggatggcggcggccggggcgtggccatggtgacagctgtggccgcccggctggccgcccaccggcggctgctggaggagaccctggcccccttccggctgaaccacgaccagctggccgctgtgcaggcccagatgaggaaggccatggccaagggcctgcggggggaggccagcagcctgaggatgctgcccacctttgtgcgggccaccccagatggcagcgagcggggggacttcctggccctggacctgggcggcaccaacttccgggtgctgctggtgcgggtgaccactggagtgcagatcaccagcgagatctacagcatccctgagaccgtggcccagggcagcggccagcagctgtttgaccacatcgtggactgcatcgtggacttccagcagaagcagggcctgagcggccagagcctgcccctgggcttcaccttctccttcccctgccggcagctgggcctggaccagggcatcctgctgaactggaccaagggcttcaaggccagtgactgtgagggccaggatgtggtgtccctgctgcgggaggccatcacccggcggcaggccgtggagctgaatgtggtggccatcgtgaatgacacagtgggcaccatgatgagctgtggctatgaggacccccgctgtgagatcggcctgattgtgggcaccggcaccaatgcctgctacatggaggagctgagaaatgtggccggcgtgcctggggacagcggccgcatgtgcatcaacatggagtggggcgcctttggagatgatggcagcctggccatgctgagcaccaggtttgatgcctctgtggaccaggccagcatcaaccctgggaagcagagatttgagaagatgatcagcggcatgtacctgggggagatcgtgcgccacatcctgctgcacctgaccagcctgggcgtgctcttccggggccagcagatccagaggctgcagacccgggacatcttcaagaccaagttcctgtctgaaattgaaagtgacagcctggccctgcggcaggtgcgggccatcctggaggacctgggcctgcccctgaccagtgatgatgccctgatggtgctggaggtgtgccaggccgtgtcccagagagctgcccagctgtgtggggccggcgtggccgctgtggtggagaagatcagagaaaatagaggcctggaggagctggccgtgtctgtgggcgtggatggcaccctgtacaagctgcacccccgcttcagcagcctggtggccgccaccgtgcgggagctggccccccgctgtgtggtgaccttcctgcagagtgaagatggcagcgggaaaggagctgccctggtgacagctgtggcctgccgcctggcccagctgaccagggtgtag

SEQ ID NO: 155221 - DNA, 1590 bp, synthetic construct
  misc_feature 1..1590: note = Description of Artificial Sequence: Synthetic coding sequence
  source 1..1590: mol_type = other DNA
atgaccagcagccggctgtggttcagcctgctgctggccgccgcctttgctggccgggccacagccctgtggccctggccccagaacttccagaccagtgaccagagatatgtgctgtaccccaacaacttccagttccagtatgatgtgagcagcgctgcccagcccggctgcagcgtgctggatgaggccttccagcgctacagagacctgctgtttggaagtggctcctggccccggccctacctgaccgggaagaggcacaccctggagaagaatgtgctggtggtgtctgtggtgaccccaggctgcaaccagctgcccaccctggagagcgtggagaactacaccctgaccatcaatgatgaccagtgcctgctgctgtctgaaacagtgtggggcgccctgcggggcctggagaccttcagccagctggtgtggaagtctgctgagggcaccttcttcatcaacaagacagaaattgaggacttcccccgcttcccccaccggggcctgctgctggacaccagccgccactacctgcccctgagcagcatcctggacaccctggatgtgatggcctacaacaagctgaatgtgttccactggcacctggtggatgaccccagcttcccctatgagagcttcaccttccctgagctgatgaggaagggcagctacaaccctgtgacccacatctacacagcccaggatgtgaaggaggtgattgaatatgcccggctgcggggcatccgggtgctggccgagtttgacaccccaggccacaccctgtcctggggccctggcatccctggcctgctgaccccctgctacagcggcagcgagcccagcggcacctttggacctgtgaaccccagcctgaacaacacctatgagttcatgagcaccttcttcctggaggtgagcagcgtcttcccagacttctacctgcacctgggcggagatgaggtggacttcacctgctggaagagcaaccctgagatccaggacttcatgaggaagaagggctttggagaggacttcaagcagctggagagcttctacatccagaccctgctggacatcgtgtcctcctatggcaagggctacgtggtgtggcaggaggtgtttgacaacaaggtgaagatccagcctgacaccatcatccaggtgtggagggaggacatccctgtgaactacatgaaggagctggagctggtgaccaaggccggcttccgggccctgctgagcgccccctggtacctgaaccgcatctcctatggccctgactggaaggacttctacatcgtggagcccctggcctttgagggcaccccagagcagaaggccctggtgattggaggagaggcctgcatgtggggcgagtatgtggacaacaccaacctggtgccccggctgtggcccagggctggagctgtggccgagcggctgtggagcaacaagctgaccagtgacctgacctttgcctatgagcggctgagccacttccgctgtgagctgctgcggcggggcgtgcaggcccagcccctgaatgtgggcttctgtgagcaggagtttgagcagacctag

SEQ ID NO: 155222 - DNA, 906 bp, synthetic construct
  misc_feature 1..906: note = Description of Artificial Sequence: Synthetic coding sequence
  source 1..906: mol_type = other DNA
atgatgacctctgtgtacagcagcctgcggctgagcggggagctgtctgaagatgtgatggcctacaacaagctgaatgtgttccactggcacctggtggatgaccccagcttcccctatgagagcttcaccttccctgagctgatgaggaagggcagctacaaccctgtgacccacatctacacagcccaggatgtgaaggaggtgattgaatatgcccggctgcggggcatccgggtgctggccgagtttgacaccccaggccacaccctgtcctggggccctggcatccctggcctgctgaccccctgctacagcggcagcgagcccagcggcaccttcggccctgtgaaccccagcctgaacaacacctatgagttcatgagcaccttcttcctggaggtgtcctctgtgtttcctgacttctacctgcacctgggcggagatgaggtggacttcacctgctggaagagcaaccctgagatccaggacttcatgaggaagaagggctttggagaggacttcaagcagctggagagcttctacatccagaccctgctggacatcgtgagcagctatggcaagggctacgtggtgtggcaggaggtgtttgacaacaaggtgaagatccagcctgacaccatcatccaggtgtggagggaggacatccctgtgaactacatgaaggagctggagctggtgaccaaggccggcttccgggccctgctgagcgccccctggtacctgaaccgcatctcctatggccctgactggaaggacttctacatcgtggagcccctggcctttgagggcaccccagagcagaaggccctggtgattggaggagaggcctgcatgtggggcgagtatgtggacaacaccaacctggtgccccggctgtggtag

SEQ ID NO: 155223 - DNA, 507 bp, synthetic construct
  misc_feature 1..507: note = Description of Artificial Sequence: Synthetic coding sequence
  source 1..507: mol_type = other DNA
atggcctacaacaagctgaatgtgttccactggcacctggtggatgaccccagcttcccctatgagagcttcaccttccctgagctgatgaggaagggcagctacaaccctgtgacccacatctacacagcccaggatgtgaaggaggtgattgaatatgcccggctgcggggcatccgggtgctggccgagtttgacaccccaggccacaccctgtcctggggccctggcatccctggcctgctgaccccctgctacagcggcagcgagcccagcggcacctttggacctgtgaaccccagcctgaacaacacctatgagttcatgagcaccttcttcctggaggtgagcagcgtcttcccagacttctacctgcacctgggcggagatgaggtggacttcacctgctggaagagcaaccctgagatccaggacttcatgaggaagaagggctttggagaggacttcaagcagctggagagcttctacatccagacctacccctag

SEQ ID NO: 155224 - DNA, 1671 bp, synthetic construct
  misc_feature 1..1671: note = Description of Artificial Sequence: Synthetic coding sequence
  source 1..1671: mol_type = other DNA
atggagctgtgtggcctgggcctgcccaggcctcccatgctgctggccctgctgctggccaccctgctggccgccatgctggccctgctgacccaggtggccctggtggtgcaggtggccgaggccgcccgggcccccagcgtgtctgccaagccaggccctgccctgtggcccctgcccctgctggtgaagatgacccccaacctgctgcacctggcccctgagaacttctacatcagccacagccccaacagcacagctggccccagctgcaccctgctggaggaggccttccgccgctaccacggctacatcttcggcttctacaagtggcaccacgagcctgctgagttccaggccaagacccaggtgcagcagctgctggtgtccatcaccctgcagagtgaatgtgatgccttccccaacatcagcagtgatgagagctacaccctgctggtgaaggagcctgtggccgtgctgaaggccaacagagtgtggggcgccctgcggggcctggagaccttcagccagctggtgtaccaggacagctatggcaccttcaccatcaatgaaagcaccatcatcgacagcccccgcttcagccaccggggcatcctgattgacaccagccgccactacctgcctgtgaagatcatcctgaagaccctggatgccatggccttcaacaagttcaacgtgctgcactggcacatcgtggatgaccagagcttcccctaccagagcatcaccttccctgagctgagcaacaagggcagctacagcctgagccacgtgtacaccccaaatgatgtgaggatggtgattgaatatgcccggctgcggggcatccgggtgctgcctgagtttgacaccccaggccacaccctgtcctggggcaagggccagaaggacctgctgaccccctgctacagccggcagaacaagctggacagctttggccccatcaaccccaccctgaacaccacctacagcttcctgaccaccttcttcaaggagatcagcgaggtgtttcctgaccagttcatccacctgggcggagatgaggtggagttcaagtgctgggagagcaaccccaagatccaggacttcatgaggcagaagggcttcggcacagacttcaagaagctggagagcttctacatccagaaggtgctggacatcatcgccaccatcaacaagggcagcatcgtgtggcaggaggtgtttgatgacaaggccaagctggcccctggcaccatcgtggaggtgtggaaggacagcgcctacccagaggagctgagccgggtgacagccagcggcttccctgtgatcctgagcgccccctggtacctggacctgatctcctatggccaggactggaggaagtactacaaggtggagcccctggactttggaggcacccagaagcagaagcagctgttcatcggcggggaggcctgcctgtggggcgagtatgtggatgccaccaacctgaccccccggctgtggccccgggccagcgctgtgggggagcggctgtggagcagcaaggatgtgcgggacatggatgatgcctatgaccggctgaccaggcaccgctgcaggatggtggagcggggcattgctgcccagcccctgtatgccggctactgcaaccacgagaacatgtag

SEQ ID NO: 155225 - DNA, 996 bp, synthetic construct
  misc_feature 1..996: note = Description of Artificial Sequence: Synthetic coding sequence
  source 1..996: mol_type = other DNA
atggccttcaacaagttcaacgtgctgcactggcacatcgtggatgaccagagcttcccctaccagagcatcaccttccctgagctgagcaacaagggcagctacagcctgagccacgtgtacaccccaaatgatgtgaggatggtgattgaatatgcccggctgcggggcatccgggtgctgcctgagtttgacaccccaggccacaccctgtcctggggcaagggccagaaggacctgctgaccccctgctacagccggcagaacaagctggacagctttggccccatcaaccccaccctgaacaccacctacagcttcctgaccaccttcttcaaggagatcagcgaggtgtttcctgaccagttcatccacctgggcggagatgaggtggagttcaagtgctgggagagcaaccccaagatccaggacttcatgaggcagaagggctttggaacagacttcaagaagctggagagcttctacatccagaaggtgctggacatcatcgccaccatcaacaagggcagcatcgtgtggcaggaggtgtttgatgacaaggccaagctggcccctggcaccatcgtggaggtgtggaaggacagcgcctacccagaggagctgagccgggtgacagccagcggcttccctgtgatcctgagcgccccctggtacctggacctgatctcctatggccaggactggaggaagtactacaaggtggagcccctggactttggaggcacccagaagcagaagcagctgttcatcggcggggaggcctgcctgtggggcgagtatgtggatgccaccaacctgaccccccggctgtggccccgggccagcgctgtgggggagcggctgtggagcagcaaggatgtgcgggacatggatgatgcctatgaccggctgaccaggcaccgctgcaggatggtggagcggggcattgctgcccagcccctgtatgccggctactgcaaccacgagaacatgtag

SEQ ID NO: 155226 - DNA, 2376 bp, synthetic construct
  misc_feature 1..2376: note = Description of Artificial Sequence: Synthetic coding sequence
  source 1..2376: mol_type = other DNA
atgtggaacatgctgattgtggccatgtgcctggccctgctgggctgcctgcaggcccaggagctgcagggccacgtgtccatcatcctgctgggcgccaccggggacctggccaagaagtacctgtggcagggcctcttccagctgtacctggatgaggccggccggggccacagcttctccttccatggagctgccctgacagcccccaagcagggccaggagctgatggccaaggccctggagagcctgagctgccccaaggacatggcccccagccactgtgccgagcacaaggaccagttcctgcagctgagccagtaccggcagctgaagacagctgaggactaccaggccctgaacaaggacatcgaggcccagctgcagcacgccggcctgcgggaggccggccgcatcttctacttctctgtgcccccatttgcctatgaggacatcgccaggaacatcaacagcagctgccggcccggccctggggcctggctgcgggtggtgctggagaagcccttcggccatgaccacttcagcgcccagcagctggccacagagctgggcaccttcttccaggaggaggagatgtacagagtggaccactacctgggcaagcaggccgtggcccagatcctgcccttccgggaccagaacaggaaggccctggatggcctgtggaacagacaccacgtggagcgggtggagatcatcatgaaggagaccgtggatgctgagggccgcaccagcttctatgaggagtatggagtcatcagagatgtgctgcagaaccacctgacagaggtgctgaccctggtggccatggagctgccccacaacgtgtcctctgctgaggccgtgctgcggcacaagctgcaggtgttccaggccctgcggggcctgcagaggggcagcgctgtggtgggccagtaccagagctacagcgagcaggtgagaagagagctgcagaagccagacagcttccacagcctgacccccacctttgctgctgtgctggtgcacatcgacaacctgcgctgggagggcgtgcccttcatcctgatgtctgggaaggccctggatgagcgggtgggctacgcccgcatcctcttcaagaaccaggcctgctgcgtgcagagcgagaagcactgggccgccgcccagagccagtgcctgccccggcagctggtgttccacatcggccacggggacctgggcagccctgctgtgctggtgtccaggaacctcttccggcccagcctgcccagctcctggaaggagatggagggccccccaggcctgcggctgtttggcagccccctgagtgactactatgcctacagccctgtgcgggagagagatgcccacagcgtgctgctgagccacatcttccacggcaggaagaacttcttcatcaccacagagaacctgctggcctcctggaacttctggacccccctgctggagagcctggcccacaaggccccccggctgtacccaggcggcgcagaaaatggccgcctgctggactttgagttcagcagcggccgcctcttcttcagccagcagcagcctgagcagctggtgcccggccctggccctgcccccatgcccagcgacttccaggtgctgcgggccaagtaccgggagagccccctggtgtctgcctggagcgaggagctgatcagcaagctggccaatgacatcgaggccacagctgtgcgggctgtgcggcgcttcggccagttccacctggccctgagcggcggcagcagccctgtggccctcttccagcagctggccacagcccactacggcttcccctgggcccacacccacctgtggctggtggatgagcgctgtgtgcccctgagtgaccctgagagcaacttccagggcctgcaggcccacctgctgcagcacgtgcgcatcccctactacaacatccaccccatgcctgtgcacctgcagcagaggctgtgtgccgaggaggaccagggcgcccagatctatgcccgggagatcagcgccctggtggccaacagcagctttgacctggtgctgctgggcatgggcgcagatggccacacagccagcctcttcccccagagccccaccggcctggatggagagcagctggtggtgctgaccaccagccccagccagccccacaggaggatgagcctgagcctgcccctcatcaacagagccaagaaggtggccgtgctggtgatgggccgcatgaagcgggagatcaccaccctggtgtcccgggtgggccacgagcccaagaagtggcccatctctggagtgctgccccacagcggccagctggtgtggtacatggactatgatgccttcctgggctag

SEQ ID NO: 155227 - DNA, 1968 bp, synthetic construct
  misc_feature 1..1968: note = Description of Artificial Sequence: Synthetic coding sequence
  source 1..1968: mol_type = other DNA
atgggccgctgggcctgggtgcccagcccctggcccccacctggcctgggccccttcctgctgctgctgctgctgctgctgctgctgccccggggcttccagccccagcccggcggcaacagaacagagagccctgagcccaatgccacagccaccccagccatccccaccatcctggtgacctctgtgaccagcgagaccccagccaccagcgcccctgaggccgagggcccccagagcggcggcctgcccccaccacccagggctgtgcccagcagcagcagcccccaggcccaggccctgacagaagatggccggccctgccgcttccccttccgctatggaggccgcatgctgcacgcctgcaccagcgagggcagcgcccacaggaagtggtgtgccaccacccacaactatgaccgggaccgggcctggggctactgtgtggaggccaccccacctcctgggggccctgctgccctggacccctgtgccagcggcccctgcctgaatggaggcagctgcagcaacacccaggacccccagagctaccactgcagctgcccccgggccttcaccgggaaggactgtggcacagagaagtgctttgatgagaccaggtatgagtacctggagggcggggaccgctgggcccgggtgcggcagggccacgtggagcagtgtgaatgttttggaggccgcacctggtgtgagggcaccaggcacacagcctgcctgagcagcccctgcctgaatggaggcacctgccacctgattgtggccaccggcaccaccgtgtgtgcctgccccccaggctttgctggccgcctgtgcaacatcgagccagatgagcgctgcttcctgggcaatggcaccggctaccggggcgtggccagcaccagcgccagcggcctgagctgcctggcctggaacagcgacctgctgtaccaggagctgcacgtggacagcgtgggcgctgctgccctgctgggcctgggcccccacgcctactgcagaaatccagacaatgatgagcggccctggtgctacgtggtgaaggacagcgccctgtcctgggagtactgccgcctggaggcctgtgagagcctgaccagggtgcagctgagcccagacctgctggccaccctgcctgagcccgccagccctggccggcaggcctgtggccgccgccacaagaagaggaccttcctgcggccccgcatcattggaggcagcagcagcctgcccggcagccacccctggctggccgccatctacatcggggacagcttctgtgccggcagcctggtgcacacctgctgggtggtgtctgctgcccactgcttcagccacagccccccccgggacagcgtgtctgtggtgctgggccagcacttcttcaacagaaccacagatgtgacccagacctttggaattgagaagtacatcccctacaccctgtacagcgtcttcaaccccagcgaccatgacctggtgctgatccggctgaagaagaagggggacagatgtgccaccaggagccagtttgtgcagcccatctgcctgcctgagcccggcagcaccttccctgctggccacaagtgccagattgctggctggggccacctggatgaaaatgtgtctggctacagcagcagcctgcgggaggccctggtgcccctggtggccgaccacaagtgcagcagccctgaggtgtatggagctgacatcagccccaacatgctgtgtgccggctactttgactgcaagagtgatgcctgccagggcgacagcggcggccccctggcctgtgagaagaatggagtggcctacctgtatggcatcatctcctggggagatggctgcggccgcctgcacaagccaggagtgtacaccagggtggccaactacgtggactggatcaatgaccgcatccggcccccccggcggctggtggcccccagctag

SEQ ID NO: 155228 - DNA, 3807 bp, synthetic construct
  misc_feature 1..3807: note = Description of Artificial Sequence: Synthetic coding sequence
  source 1..3807: mol_type = other DNA
atgagctctgtggccgtgctgacccaggagagctttgctgagcacaggagcggcctggtgccccagcagatcaaggtggccaccctgaacagcgaggaggagagtgacccccccacctacaaggatgccttcccccccctgcctgagaaggccgcctgcctggagagcgcccaggagcccagcggggcctggggcaacaagatccggcccatcaaggccagcgtcatcacccaggtgttccacgtgcccctggaggagaggaagtacaaggacatgaaccagtttggagagggggagcaggccaagatctgcctggagatcatgcagaggactggagcccacctggagctgagcctggccaaggaccagggcctgagcatcatggtgtctgggaagctggatgctgtgatgaaggccaggaaggacatcgtggcccggctgcagacccaggccagcgccaccgtggccatccccaaggagcaccaccgcttcgtcatcggcaagaatggagagaagctgcaggacctggagctgaagacagccaccaagatccagatccccaggccagatgaccccagcaaccagatcaagatcaccggcaccaaggagggcatcgagaaggcccggcatgaggtgctgctgatctctgctgagcaggacaagagagctgtggagcggctggaggtggagaaggccttccaccccttcatcgccggcccctacaaccggctggtgggggagatcatgcaggagaccggcacccgcatcaacatccccccacccagcgtgaacagaacagagatcgtgttcaccggggagaaggagcagctggcccaggccgtggcccgcatcaagaagatctatgaggagaagaagaagaagaccaccaccatcgctgtggaggtgaagaagagccagcacaagtatgtgattggccccaagggcaacagcctgcaggagatcctggagaggactggagtgtctgtggagatcccccccagcgacagcatcagcgagaccgtcatcctgcggggggagcctgagaagctgggccaggccctgacagaggtgtatgccaaggccaacagcttcaccgtgtcctctgtggccgcccccagctggctgcaccgcttcatcatcggcaagaagggccagaacctggccaagatcacccagcagatgcccaaggtgcacatcgagttcacagaaggagaggacaagatcaccctggagggccccacagaagatgtgaatgtggcccaggagcagatcgagggcatggtgaaggacctgatcaacaggatggactatgtggagatcaacatcgaccacaagttccaccgccacctgattggcaagagcggggccaacatcaaccgcatcaaggaccagtacaaggtgtctgtgcgcatccccccagattctgagaagagcaacctgatcagaattgaaggagacccccagggcgtgcagcaggccaagcgggagctgctggagctggccagcaggatggagaatgaaagaaccaaggacctgatcatcgagcagcgcttccacaggaccatcatcggccagaagggggagcgcatccgggagatccgggacaagtttcctgaggtgatcatcaacttcccagaccctgcccagaagagtgacatcgtgcagctgcggggccccaagaatgaggtggagaagtgcaccaagtacatgcagaagatggtggccgacctggtggagaacagctacagcatctctgtgcccatcttcaagcagttccacaagaacatcattggaaaaggaggagccaacatcaagaagatccgggaggagagcaacaccaagattgacctgcctgctgagaacagcaacagcgagaccatcatcatcaccgggaagagggccaactgtgaggccgcccggagccgcatcctgagcatccagaaggacctggccaacattgctgaggtggaggtgtccatcccagccaagctgcacaacagcctgattggcaccaagggccgcctcatccgcagcatcatggaggagtgtggcggcgtgcacatccacttccctgtggagggcagcggcagtgacacagtggtgatccggggccccagcagtgatgtggagaaggccaagaagcagctgctgcacctggccgaggagaagcagaccaagagcttcaccgtggacatccgggccaagccagagtaccacaagttcctgattggaaaaggaggcggcaagatcaggaaggtgcgggacagcactggagcccgggtcatcttccctgctgctgaggacaaggaccaggacctgatcaccatcatcggcaaggaggatgctgtgcgggaggcccagaaggagctggaggccctgatccagaacctggacaacgtggtggaggacagcatgctggtggaccccaagcaccaccgccactttgtgatccggcggggccaggtgctgcgggagattgctgaggagtatggaggagtgatggtgtccttccccaggagcggcacccagagcgacaaggtgaccctgaagggggccaaggactgtgtggaggccgccaagaagaggatccaggagatcatcgaggacctggaggcccaggtgaccctggagtgtgccatcccccagaagttccacaggtctgtgatgggccccaagggcagccgcatccagcagatcacccgggacttctctgtgcagatcaagttcccagaccgggaggagaatgctgtgcacagcacagagcctgtggtgcaggagaatggagatgaagctggggagggccgggaggccaaggactgtgaccccggcagcccccggcgctgtgacatcatcatcatcagcggcaggaaggagaagtgtgaggccgccaaggaggccctggaggccctggtgcctgtgaccatcgaggtggaggtgccctttgacctgcaccgctacgtgattggccagaagggcagcggcatcaggaagatgatggatgaatttgaggtgaacatccacgtgcctgcccctgagctgcagagcgacatcatcgccatcaccggcctggccgccaacctggaccgggccaaggccggcctgctggagcgggtgaaggagctgcaggccgagcaggaggaccgggccctgcggagcttcaagctgtctgtgacagtggaccccaagtaccaccccaagatcatcggcaggaaaggagctgtgatcacccagatccggctggagcatgatgtgaacatccagttcccagacaaggatgatggcaaccagccccaggaccagatcaccatcaccggctatgagaagaacacagaggccgccagagatgccatcctgcgcatcgtgggggagctggagcagatggtgtctgaagatgtgcccctggaccaccgggtgcacgcccgcatcattggagcccggggcaaggccatcaggaagatcatggatgagttcaaggtggacatccgcttcccccagagcggggccccagaccccaactgtgtgacagtgacaggcctgcctgaaaatgtggaggaggccatcgaccacatcctgaacctggaggaggagtacctggctgatgtggtggacagcgaggccctgcaggtgtacatgaagcccccagcccacgaggaggccaaggcccccagccggggctttgtggtgagagatgccccctggacagccagcagcagcgagaaggccccagacatgagcagcagcgaggagttccccagctttggagcccaggtggcccccaagaccctgccctggggccccaagaggtag

SEQ ID NO: 155229 - DNA, 3807 bp, synthetic construct; identical to SEQ ID NO: 155228
  misc_feature 1..3807: note = Description of Artificial Sequence: Synthetic coding sequence
  source 1..3807: mol_type = other DNA

SEQ ID NO: 155230 - DNA, 3807 bp, synthetic construct; identical to SEQ ID NO: 155228
  misc_feature 1..3807: note = Description of Artificial Sequence: Synthetic coding sequence
  source 1..3807: mol_type = other DNA

SEQ ID NO: 155231 - DNA, 249 bp, synthetic construct
  misc_feature 1..249: note = Description of Artificial Sequence: Synthetic coding sequence
  source 1..249: mol_type = other DNA
atgagctctgtggccgtgctgacccaggagagctttgctgagcacaggagcggcctggtgccccagcagatcaaggtggccaccctgaacagcgaggaggagagtgacccccccacctacaaggatgccttcccccccctgcctgagaaggccgcctgcctggagagcgcccaggagcccagcggggcctggggcaacaagatccggcccatcaaggccagcgtcatcacccaggtgttccacgtgtag

SEQ ID NO: 155232 - DNA, 45 bp, synthetic construct
  misc_feature 1..45: note = Description of Artificial Sequence: Synthetic coding sequence
  source 1..45: mol_type = other DNA
atgagctctgtggccgtgctgacccaggagagctttgctgagtag

SEQ ID NO: 155233 - DNA, 210 bp, synthetic construct
  misc_feature 1..210: note = Description of Artificial Sequence: Synthetic coding sequence
  source 1..210: mol_type = other DNA
atgagctctgtggccgtgctgacccaggagagctttgctgagcacaggagcggcctggtgccccagcagatcaaggtggccaccctgaacagcgaggaggagagtgacccccccacctacaaggatgccttcccccccctgcctgagaaggccgcctgcctggagagcgcccaggagcccagcggggcctggggcaacaagatcagatag

SEQ ID NO: 155234 - DNA, 165 bp, synthetic construct
  misc_feature 1..165: note = Description of Artificial Sequence: Synthetic coding sequence
  source 1..165: mol_type = other DNA
atgagctctgtggccgtgctgacccaggagagctttgctgagcacaggagcggcctggtgccccagcagatcaaggtggccaccctgaacagcgaggaggagagtgacccccccacctacaaggatgccttcccccccctgcctgagaaggccgcctgcctgtag

SEQ ID NO: 155235 - DNA, 675 bp, synthetic construct
  misc_feature 1..675: note = Description of Artificial Sequence: Synthetic coding sequence
  source 1..675: mol_type = other DNA
atgagctctgtggccgtgctgacccaggagagctttgctgagcacaggagcggcctggtgccccagcagatcaaggtggccaccctgaacagcgaggaggagagtgacccccccacctacaaggatgccttcccccccctgcctgagaaggccgcctgcctggagagcgcccaggagcccagcggggcctggggcaacaagatccggcccatcaaggccagcgtcatcacccaggtgttccacgtgcccctggaggagaggaagtacaaggacatgaaccagtttggagagggggagcaggccaagatctgcctggagatcatgcagaggactggagcccacctggagctgagcctggccaaggaccagggcctgagcatcatggtgtctgggaagctggatgctgtgatgaaggccaggaaggacatcgtggcccggctgcagacccaggccagcgccaccgtggccatccccaaggagcaccaccgcttcgtcatcggcaagaatggagagaagctgcaggacctggagctgaagacagccaccaagatccagatccccaggccagatgaccccagcaaccagatcaagatcaccggcaccaaggagggcatcgagaaggcccggcatgaggtgctgctgatctctgctgagcaggacaagagagctgtgtag

SEQ ID NO: 155236 - DNA, 246 bp, synthetic construct
  misc_feature 1..246: note = Description of Artificial Sequence: Synthetic coding sequence
  source 1..246: mol_type = other DNA
atgagctctgtggccgtgctgacccaggagagctttgctgagcacaggagcggcctggtgccccagcagatcaaggtggccaccctgaacagcgaggaggagagtgacccccccacctacaaggatgccttcccccccctgcctgagaaggccgcctgcctggagagcgcccaggagcccagcggggcctggggcaacaagatccggcccatcaaggccagcgtcatcacccaggtgttccactag

SEQ ID NO: 155237 - DNA, 240 bp, synthetic construct
  misc_feature 1..240: note = Description of Artificial Sequence: Synthetic coding sequence
  source 1..240: mol_type = other DNA
atgagctctgtggccgtgctgacccaggagagctttgctgagcacaggagcggcctggtgccccagcagatcaaggtggccaccctgaacagcgaggaggagagtgacccccccacctacaaggatgccttcccccccctgcctgagaaggccgcctgcctggagagcgcccaggagcccagcggggcctggggcaacaagatccggcccatcaaggccagcgtcatcacccaggtgtag

SEQ ID NO: 155238 - DNA, 291 bp, synthetic construct
  misc_feature 1..291: note = Description of Artificial Sequence: Synthetic coding sequence
  source 1..291: mol_type = other DNA
atgagctctgtggccgtgctgacccaggagagctttgctgagcacaggagcggcctggtgccccagcagatcaaggtggccaccctgaacagcgaggaggagagtgacccccccacctacaaggatgccttcccccccctgcctgagaaggccgcctgcctggagagcgcccaggagcccagcggggcctggggcaacaagatccggcccatcaaggccagcgtcatcacccaggtgttccacgtgcccctggaggagaggaagtacaaggacatgaaccagtttggatag

SEQ ID NO: 155239 - DNA, 60 bp, synthetic construct
  misc_feature 1..60: note = Description of Artificial Sequence: Synthetic coding sequence
  source 1..60: mol_type = other DNA
atgagctctgtggccgtgctgacccaggagagctttgctgagcacaggagcggcctgtag

SEQ ID NO: 155240 - DNA, 3708 bp, synthetic construct
  misc_feature 1..3708: note = Description of Artificial Sequence: Synthetic coding sequence
  source 1..3708: mol_type = other DNA
atgcacctggccgagcgggaccgctggctgtttgtggccaccgtgatgatgcactttgtgtccatcaagagcggcttccctggcctgtgtgtgggcgtgcgcagcaccatgagctctgtggccgtgctgacccaggagagctttgctgagcacaggagcggcctggtgccccagcagatcaaggtggccaccctgaacagcgaggaggagagtgacccccccacctacaaggatgccttcccccccctgcctgagaaggccgcctgcctggagagcgcccaggagcccagcggggcctggggcaacaagatccggcccatcaaggccagcgtcatcacccaggtgttccacgtgcccctggaggagaggaagtacaaggacatgaaccagtttggagagggggagcaggccaagatctgcctggagatcatgcagaggactggagcccacctggagctgagcctggccaaggaccagggcctgagcatcatggtgtctgggaagctggatgctgtgatgaaggccaggaaggacatcgtggcccggctgcagacccaggccagcgccaccgtggccatccccaaggagcaccaccgcttcgtcatcggcaagaatggagagaagctgcaggacctggagctgaagacagccaccaagatccagatccccaggccagatgaccccagcaaccagatcaagatcaccggcaccaaggagggcatcgagaaggcccggcatgaggtgctgctgatctctgctgagcaggacaagagagctgtggagcggctggaggtggagaaggccttccaccccttcatcgccggcccctacaaccggctggtgggggagatcatgcaggagaccggcacccgcatcaacatccccccacccagcgtgaacagaacagagatcgtgttcaccggggagaaggagcagctggcccaggccgtggcccgcatcaagaagatctatgaggagaaggccaacagcttcaccgtgtcctctgtggccgcccccagctggctgcaccgcttcatcatcggcaagaagggccagaacctggccaagatcacccagcagatgcccaaggtgcacatcgagttcacagaaggagaggacaagatcaccctggagggccccacagaagatgtgaatgtggcccaggagcagatcgagggcatggtgaaggacctgatcaacaggatggactatgtggagatcaacatcgaccacaagttccaccgccacctgattggcaagagcggggccaacatcaaccgcatcaaggaccagtacaaggtgtctgtgcgcatccccccagacagcgagaagagcaacctgatccgcatcgagggggacccccagggcgtgcagcaggccaagcgggagctgctggagctggccagcaggatggagaatgaaagaaccaaggacctgatcatcgagcagcgcttccacaggaccatcatcggccagaagggggagcgcatccgggagatccgggacaagtttcctgaggtgatcatcaacttcccagaccctgcccagaagagtgacatcgtgcagctgcggggccccaagaatgaggtggagaagtgcaccaagtacatgcagaagatggtggccgacctggtggagaacagctacagcatctctgtgcccatcttcaagcagttccacaagaacatcatcggcaagggcggggccaacatcaagaagatccgggaggagagcaacaccaagattgacctgcctgctgagaacagcaacagcgagaccatcatcatcaccgggaagagggccaactgtgaggccgcccggagccgcatcctgagcatccagaaggacctggccaacattgctgaggtggaggtgtccatcccagccaagctgcacaacagcctcatcggcaccaagggccgcctcatccgcagcatcatggaggagtgtggcggcgtgcacatccacttccctgtggagggcagcggcagtgacacagtggtgatccggggccccagcagtgatgtggagaaggccaagaagcagctgctgcacctggccgaggagaagcagaccaagagcttcaccgtggacatccgggccaagccagagtaccacaagttcctgattggcaagggcggcggcaagatcaggaaggtgcgggacagcactggagcccgggtcatcttccctgctgctgaggacaaggaccaggacctgatcaccatcatcggcaaggaggatgctgtgcgggaggcccagaaggagctggaggccctgatccagaacctggacaacgtggtggaggacagcatgctggtggaccccaagcaccaccgccacttcgtcatcagaagaggccaggtgctgcgggagattgctgaggagtatggaggagtgatggtgtccttccccaggagcggcacccagagcgacaaggtgaccctgaagggggccaaggactgtgtggaggccgccaagaagaggatccaggagatcatcgaggacctggaggcccaggtgaccctggagtgtgccatcccccagaagttccacaggtctgtgatgggccccaagggcagccgcatccagcagatcacccgggacttctctgtgcagatcaagttcccagaccgggaggagaatgctgtgcacagcacagagcctgtggtgcaggagaatggagatgaggccggggagggccgggaggccaaggactgtgaccccggcagcccccggcgctgtgacatcatcatcatcagcggcaggaaggagaagtgtgaggccgccaaggaggccctggaggccctggtgcctgtgaccatcgaggtggaggtgccctttgacctgcacagatatgtgattggccagaagggcagcggcatcaggaagatgatggatgaatttgaggtgaacatccacgtgcctgcccctgagctgcagagcgacatcatcgccatcaccggcctggccgccaacctggaccgggccaaggccggcctgctggagcgggtgaaggagctgcaggccgagcaggaggaccgggccctgcgctccttcaagctgtctgtgacagtggaccccaagtaccaccccaagatcattggaaggaagggggccgtcatcacccagatccggctggagcatgatgtgaacatccagttcccagacaaggatgatggcaaccagccccaggaccagatcaccatcaccggctatgagaagaacacagaagctgccagagatgccatcctgagaattgtgggggagctggagcagatggtgtctgaagatgtgcccctggaccaccgggtgcacgcccgcatcatcggggcccggggcaaggccatcaggaagatcatggatgagttcaaggtggacatccgcttcccccagagcggggccccagaccccaactgtgtgacagtgacaggcctgcctgaaaatgtggaggaggccatcgaccacatcctgaacctggaggaggagtacctggctgatgtggtggacagcgaggccctgcaggtgtacatgaagcccccagcccacgaggaggccaaggcccccagccggggctttgtggtgagagatgccccctggacagccagcagcagcgagaaggccccagacatgagcagcagcgaggagttccccagctttggagcccaggtggcccccaagaccctgccctggggccccaagaggtag

SEQ ID NO: 155241 - DNA, 666 bp, synthetic construct
  misc_feature 1..666: note = Description of Artificial Sequence: Synthetic coding sequence
  source 1..666: mol_type = other DNA
atgagctctgtggccgtgctgacccaggagagctttgctgagcacaggagcggcctggtgccccagcagatcaaggtggccaccctgaacagcgaggaggagagtgacccccccacctacaaggatgccttcccccccctgcctgagaaggccgcctgcctggagagcgcccaggagcccagcggggcctggggcaacaagatccggcccatcaaggccagcgtcatcacccaggtgttccacgtgcccctggaggagaggaagtacaaggacatgaaccagtttggagagggggagcaggccaagatctgcctggagatcatgcagaggactggagcccacctggagctgagcctggccaaggaccagggcctgagcatcatggtgtctgggaagctggatgctgtgatgaaggccaggaaggacatcgtggcccggctgcagacccaggccagcgccaccgtggccatccccaaggagcaccaccgcttcgtcatcggcaagaatggagagaagctgcaggacctggagctgaagacagccaccaagatccagatccccaggccagatgaccccagcaaccagatcaagatcaccggcaccaaggagggcatcgagaaggcccggcatgaggtgctgctgatctctgctgagcaggacaagtag

SEQ ID NO: 155242 - DNA, 426 bp, synthetic construct
  misc_feature 1..426: note = Description of Artificial Sequence: Synthetic coding sequence
  source 1..426: mol_type = other DNA
atgagctctgtggccgtgctgacccaggagagctttgctgagcacaggagcggcctggtgccccagcagatcaaggtggccaccctgaacagcgaggaggagagtgacccccccacctacaaggatgccttcccccccctgcctgagaaggccgcctgcctggagagcgcccaggagcccagcggggcctggggcaacaagatccggcccatcaaggccagcgtcatcacccaggtgttccacgtgcccctggaggagaggaagtacaaggacatgaaccagtttggagagggggagcaggccaagatctgcctggagatcatgcagaggactggagcccacctggagctgagcctggccaaggaccagggcctgagcatcatggtgtctgggaagctggatgctgtgatgaaggccaggaagtag

SEQ ID NO: 155243 - DNA, 381 bp, synthetic construct
  misc_feature 1..381: note = Description of Artificial Sequence: Synthetic coding sequence
  source 1..381: mol_type = other DNA
atgagctctgtggccgtgctgacccaggagagctttgctgagcacaggagcggcctggtgccccagcagatcaaggtggccaccctgaacagcgaggaggagagtgacccccccacctacaaggatgccttcccccccctgcctgagaaggccgcctgcctggagagcgcccaggagcccagcggggcctggggcaacaagatccggcccatcaaggccagcgtcatcacccaggtgttccacgtgcccctggaggagaggaagtacaaggacatgaaccagtttggagagggggagcaggccaagatctgcctggagatcatgcagaggactggagcccacctggagctgagcctggccaaggaccagggcctgtcctag

SEQ ID NO: 155244 - DNA, 444 bp, synthetic construct
  misc_feature 1..444: note = Description of Artificial Sequence: Synthetic coding sequence
  source 1..444: mol_type = other DNA
atgagctctgtggccgtgctgacccaggagagctttgctgagcacaggagcggcctggtgccccagcagatcaaggtggccaccctgaacagcgaggaggagagtgacccccccacctacaaggatgccttcccccccctgcctgagaaggccgcctgcctggagagcgcccaggagcccagcggggcctggggcaacaagatccggcccatcaaggccagcgtcatcacccaggtgttccacgtgcccctggaggagaggaagtacaaggacatgaaccagtttggagagggggagcaggccaagatctgcctggagatcatgcagaggactggagcccacctggagctgagcctggccaaggaccagggcctgagcatcatggtgtctgggaagctggatgctgtgatgaaggccaggaaggacatcgtggcccggctgtag

SEQ ID NO: 155245 - DNA, 54 bp, synthetic construct
  misc_feature 1..54: note = Description of Artificial Sequence: Synthetic coding sequence
  source 1..54: mol_type = other DNA
atgagctctgtggccgtgctgacccaggagagctttgctgagcacaggagctag

SEQ ID NO: 155246 - DNA, 495 bp, synthetic construct
  misc_feature 1..495: note = Description of Artificial Sequence: Synthetic coding sequence
  source 1..495: mol_type = other DNA
atgagctctgtggccgtgctgacccaggagagctttgctgagcacaggagcggcctggtgccccagcagatcaaggtggccaccctgaacagcgaggaggagagtgacccccccacctacaaggatgccttcccccccctgcctgagaaggccgcctgcctggagagcgcccaggagcccagcggggcctggggcaacaagatccggcccatcaaggccagcgtcatcacccaggtgttccacgtgcccctggaggagaggaagtacaaggacatgaaccagtttggagagggggagcaggccaagatctgcctggagatcatgcagaggactggagcccacctggagctgagcctggccaaggaccagggcctgagcatcatggtgtctgggaagctggatgctgtgatgaaggccaggaaggacatcgtggcccggctgcagacccaggccagcgccaccgtggccatccccaaggagcaccaccgcttctag

SEQ ID NO: 155247 - DNA, 144 bp, synthetic construct
  misc_feature 1..144: note = Description of Artificial Sequence: Synthetic coding sequence
  source 1..144: mol_type = other DNA
atgagctctgtggccgtgctgacccaggagagctttgctgagcacaggagcggcctggtgccccagcagatcaaggtggccaccctgaacagcgaggaggagagtgacccccccacctacaaggatgccttcccccccctgtag

SEQ ID NO: 155248 - DNA, 1044 bp, synthetic construct
  misc_feature 1..1044: note = Description of Artificial Sequence: Synthetic coding sequence
  source 1..1044: mol_type = other DNA
atggagaacctgatgaccagcagcaccctgccccccctgtttgctgatgaagatggcagcaaggagagcaatgacctggccaccaccggcctgaaccaccctgaggtgccctacagcagcggggccaccagcagcaccaacaaccctgagtttgtggaggacctgagccagggccagctgctgcagagcgagagcagcaatgctgctgagggcaatgagcagagacatgaagatgagcagaggagcaagagaggaggctggagcaaaggaaggaagaggaagaagcccctgcgggacagcaatgcccccaagagccccctgaccggctacgtgcgcttcatgaatgaaagaagagagcagctgcgggccaagaggcctgaggtgcccttccctgagatcaccaggatgctgggcaatgagtggagcaagctgcccccagaggagaagcagcgctacctggatgaggccgaccgggacaaggagcgctacatgaaggagctggagcagtaccagaagacagaggcctacaaggtgttcagcaggaagacccaggaccggcagaagggcaagagccaccggcaggatgctgcccggcaggccacccatgaccacgagaaggagacagaggtgaaggagaggtctgtgtttgacatccccatcttcacagaggagttcctgaaccacagcaaggcccgggaggccgagctgcggcagctgaggaagagcaacatggagtttgaggagagaaatgctgccctgcagaagcacgtggagagcatgaggacagctgtggagaagctggaggtggatgtgatccaggagaggagcaggaacacagtgctgcagcagcacctggagaccctgcggcaggtgctgaccagcagctttgcctccatgcccctgcccggcagcggggagacccccaccgtggacaccatcgacagctacatgaaccggctgcacagcatcatcctggccaacccccaggacaatgaaaacttcatcgccaccgtgcgggaggtggtgaaccggctggacagatag

SEQ ID NO: 155249 - DNA, 1044 bp, synthetic construct; identical to SEQ ID NO: 155248
  misc_feature 1..1044: note = Description of Artificial Sequence: Synthetic coding sequence
  source 1..1044: mol_type = other DNA

SEQ ID NO: 155250 - DNA, 471 bp, synthetic construct
  misc_feature 1..471: note = Description of Artificial Sequence: Synthetic coding sequence
  source 1..471: mol_type = other DNA
atggagaacctgatgaccagcagcaccctgccccccctgtttgctgatgaagatggcagcaaggagagcaatgacctggccaccaccggcctgaaccaccctgaggtgccctacagcagcggggccaccagcagcaccaacaaccctgagtttgtggaggacctgagccagggccagctgctgcagagcgagagcagcaatgctgctgagggcaatgagcagagacatgaagatgagcagaggagcaagagaggaggctggagcaaaggaaggaagaggaagaagcccctgcgggacagcaatgcccccaagagccccctgaccggctacgtgcgcttcatgaatgaaagaagagagcagctgcgggccaagaggcctgaggtgcccttccctgagatcaccaggatgctgggcaatgagtggagcaagctgcccccagaggagaagcagcgctacctggatgaggcctag

SEQ ID NO: 155251 - DNA, 303 bp, synthetic construct
  misc_feature 1..303: note = Description of Artificial Sequence: Synthetic coding sequence
  source 1..303: mol_type = other DNA
atggagaacctgatgaccagcagcaccctgccccccctgtttgctgatgaagatggcagcaaggagagcaatgacctggccaccaccggcctgaaccaccctgaggtgccctacagcagcggggccaccagcagcaccaacaaccctgagtttgtggaggacctgagccagggccagctgctgcagagcgagagcagcaatgctgctgagggcaatgagcagagacatgaagatgagcagaggagcaagagaggaggctggagcaaaggaaggaagaggaagaagcccctgcgggacagctag

SEQ ID NO: 155252 - DNA, 489 bp, synthetic construct
  misc_feature 1..489: note = Description of Artificial Sequence: Synthetic coding sequence
  source 1..489: mol_type = other DNA
atggagaacctgatgaccagcagcaccctgccccccctgtttgctgatgaagatggcagcaaggagagcaatgacctggccaccaccggcctgaaccaccctgaggtgccctacagcagcggggccaccagcagcaccaacaaccctgagtttgtggaggacctgagccagggccagctgctgcagagcgagagcagcaatgctgctgagggcaatgagcagagacatgaagatgagcagaggagcaagagaggaggctggagcaaaggaaggaagaggaagaagcccctgcgggacagcaatgcccccaagagccccctgaccggctacgtgcgcttcatgaatgaaagaagagagcagctgcgggccaagaggcctgaggtgcccttccctgagatcaccaggatgctgggcaatgagtggagcaagctgcccccagaggagaagcagcgctacctggatgaggccgaccgggacaaggagaggtag

SEQ ID NO: 155253 - DNA, 954 bp, synthetic construct
  misc_feature 1..954: note = Description of Artificial Sequence: Synthetic coding sequence
  source 1..954: mol_type = other DNA
atgagccacggccccaagcagcccggggctgctgctgccccagctgggggcaaggcccctggccagcacggcggctttgtggtgacagtgaagcaggagcggggggagggcccccgggccggggagaagggcagccatgaggaggagcctgtgaagaagaggggctggcccaagggcaagaagaggaagaagatcctgcccaacggccccaaggcccctgtgacaggctacgtgcgcttcctgaatgaaagaagagagcagatccgcaccaggcacccagacctgcccttccctgagatcaccaagatgctgggcgctgagtggagcaagctgcagcccacagagaagcagcgctacctggatgaagctgagcgggagaagcagcagtacatgaaggagctgcgggcctaccagcagagcgaggcctacaagatgtgcacagagaagatccaggagaagaagatcaagaaggaggacagcagcagcggcctgatgaacaccctgctgaatggccacaagggcggggactgtgatggcttcagcacctttgatgtgcccatcttcacagaggagttcctggaccagaacaaggcccgggaggccgagctgcggcggctgaggaagatgaatgtggcctttgaggagcagaatgctgtgctgcagaggcacacccagagcatgagcagcgcccgggagcggctggagcaggagctggccctggaggagaggaggaccctggccctgcagcagcagctgcaggccgtgcggcaggccctgacagccagctttgccagcctgcctgtgcccggcactggagagacccccaccctgggcaccctggacttctacatggcccggctgcacggggccatcgagcgggaccctgcccagcacgagaagctgattgtgcgcatcaaggagatcctggcccaggtggccagcgagcacctgtag

SEQ ID NO: 155254 - DNA, 807 bp, synthetic construct
  misc_feature 1..807: note = Description of Artificial Sequence: Synthetic coding sequence
  source 1..807: mol_type = other DNA
atggacaccagggtgggcacagccatggccagcccccccagcatgttccccagcagcctgaagagctcctggaccaagaccaagagggtgagaagaagctttggagcagaagatgaatgtggcctgcggggagctgagcggggcacagctgaggcccacgccgagcacgagcagagggcccgggccagcggggccggggccggggccggcggcgcagaagatgctggagctgctgctgctgcccctggccgggcccctggggcccaccggcagctgcggctgacagctggggccggccacggcagaaatgcccacgccggccacagcggcctgctgcacggccctgccagccgcagccaccgggcccggcccaggcctgcccgggaggcccaccggccccaccagggcaaccctggccctggccggcagagggcccctgtgcgcagcggccgggcccatgatgctgaggagaagctgtgggcccggccctgccacaccccaccccggggccgggaggccggcggccccccaggccctggccccatcctgcacctgggcggcagcagcccccccaagatcaagttcctgcagcaccccttctccttccagagcccccagcccccagagcccgggaagagcacccgggacacccccaggaggaccagccagccccgggtgcccctgctgggcggccagacccgctacacaggcagccctggccacccccaggacaccggccagaccaagcccacccccagcacccggcaggacccccccaactacagcctgcggggagctgtgccctag

SEQ ID NO: 155255 - DNA, 648 bp, synthetic construct
  misc_feature 1..648: note = Description of Artificial Sequence: Synthetic coding sequence
  source 1..648: mol_type = other DNA
atgagccacggccccaagcagcccggggctgctgctgccccagctgggggcaaggcccctggccagcacggcggctttgtggtgacagtgaagcaggagcggggggagggcccccgggccggggagaagggcagccatgaggaggagcctgtgaagaagaggggctggcccaagggcaagaagaggaagaagatcctgcccaacggccccaaggcccctgtgacaggctacgtgcgcttcctgaatgaaagaagagagcagatccgcaccaggcacccagacctgcccttccctgagatcaccaagatgctgggcgctgagtggagcaagctgcagcccacagagaagcagcgctacctggatgaagctgagcgggagaagcagcagtacatgaaggagctgcgggcctaccagcagagcgaggcctacaagatgtgcacagagaagatccaggagaagaagatcaagaaggaggacagcagcagcggcctgatgaacaccctgctgaatggccacaagggcggggactgtgatggcttcagcacctttgatgtgcccatcttcacagaggagttcctggaccagaacaaggcccgggaggccgagctgcggcggctgaggaagatgaatgtggcctttgaggagtag

SEQ ID NO: 155256 - DNA, 429 bp, synthetic construct
  misc_feature 1..429: note = Description of Artificial Sequence: Synthetic coding sequence
  source 1..429: mol_type = other DNA
atgagccacggccccaagcagcccggggctgctgctgccccagctgggggcaaggcccctggccagcacggcggctttgtggtgacagtgaagcaggagcggggggagggcccccgggccggggagaagggcagccatgaggaggagcctgtgaagaagaggggctggcccaagggcaagaagaggaagaagatcctgcccaacggccccaaggcccctgtgacaggctacgtgcgcttcctgaatgaaagaagagagcagatccgcaccaggcacccagacctgcccttccctgagatcaccaagatgctgggcgctgagtggagcaagctgcagcccacagagaagcagcgctacctggatgaagctgagcgggagaagcagcagtacatgaaggagctgcgggcctaccagcagagcgaggcctag

SEQ ID NO: 155257 - DNA, 324 bp, synthetic construct
  misc_feature 1..324: note = Description of Artificial Sequence: Synthetic coding sequence
  source 1..324: mol_type = other DNA
atgtctgagagcagcagcaagagcagccagcccctggccagcaagcaggagaaggatggaacagagaagaggggccggggccggcccaggaagcagccccctgtgtccccaggcacagccctggtgggcagccagaaggagcccagcgaggtgcccacccccaagaggccccggggccggcccaagggcagcaagaacaagggagctgccaagaccaggaagaccaccaccaccccaggcaggaagccccggggccggcccaagaagctggagaaggaggaggaggagggcatcagccaggagagcagcgaggaggagcagtag

SEQ ID NO: 155258 - DNA, 291 bp, synthetic construct
  misc_feature 1..291: note = Description of Artificial Sequence: Synthetic coding sequence
  source 1..291: mol_type = other DNA
atgtctgagagcagcagcaagagcagccagcccctggccagcaagcaggagaaggatggaacagagaagaggggccggggccggcccaggaagcagccccccaaggagcccagcgaggtgcccacccccaagaggccccggggccggcccaagggcagcaagaacaagggggccgccaagaccaggaagaccaccaccaccccaggcaggaagccccggggccggcccaagaagctggagaaggaggaggaggagggcatcagccaggagagcagcgaggaggagcagtag

SEQ ID NO: 155259 - DNA, 291 bp, synthetic construct; identical to SEQ ID NO: 155258
  misc_feature 1..291: note = Description of Artificial Sequence: Synthetic coding sequence
  source 1..291: mol_type = other DNA

SEQ ID NO: 155260 - DNA, 324 bp, synthetic construct; identical to SEQ ID NO: 155257
  misc_feature 1..324: note = Description of Artificial Sequence: Synthetic coding sequence
  source 1..324: mol_type = other DNA

SEQ ID NO: 155261 - DNA, 291 bp, synthetic construct; identical to SEQ ID NO: 155258
  misc_feature 1..291: note = Description of Artificial Sequence: Synthetic coding sequence
  source 1..291: mol_type = other DNA

SEQ ID NO: 155262 - DNA, 987 bp, synthetic construct
  misc_feature 1..987: note = Description of Artificial Sequence: Synthetic coding sequence
  source 1..987: mol_type = other DNA
atgtctgagagcagcagcaagagcagccagcccctggccagcaagcaggagaaggatggaacagagaagaggggccggggccggcccaggaagcagccccctgtgtccccaggcacagccctggtgggcagccagaaggagcccagcgaggtgcccacccccaagaggccccggggccggcccaagggcagcaagaacaagggggagggcggccggggcggccacctggccggcgtgctgggcggcggcgctgtgacccacgcctgccgcctgctgctgaccggcggggccgccagcttctgggactggacagccctgctgcggagccaccggccccaccccttcccccggcccaccatcaccacagccagcggccgccacccccacctgccccctgtgcccagccccccccactacacagcccaccagcccctgcagggcagccacggcctgagcggggagcagttcagccctggcctgagcagccagctgcccccacccacccacgcctacacccacgccctgctggacaaggccaacatccccctgagcaggaccctgcacctgctgcggccccacagcctgggcggcggggacatcgccctgtgggccttcggcctgggcgcccccagcctgctgctgcactgcagcctgtggctgcccatcgtgggccctggccgggtgcccctggccctgaagggggcccaggcccccagccaccctggcaccccctacagcacagccctggccgccgccggcgtggccaacggcggcggctgctggcccccaggcttcccccagcccaactgcctgtgccaccacgtgggcctgaccttccaccccagccccaccagcctggtgcctgtgctgggctggacagcccccttcggctacaggaaggccggcggcgtgagccccctgctgcccctgcactgcggccacagccccctggccctgcggctgggcagcgagtacatcctgtggtag

SEQ ID NO: 155263 - DNA, 291 bp, synthetic construct; identical to SEQ ID NO: 155258
  misc_feature 1..291: note = Description of Artificial Sequence: Synthetic coding sequence
  source 1..291: mol_type = other DNA

SEQ ID NO: 155264 - DNA, 324 bp, synthetic construct; identical to SEQ ID NO: 155257
  misc_feature 1..324: note = Description of Artificial Sequence: Synthetic coding sequence
  source 1..324: mol_type = other DNA

SEQ ID NO: 155265 - DNA, 321 bp, synthetic construct
  misc_feature 1..321: note = Description of Artificial Sequence: Synthetic coding sequence
  source 1..321: mol_type = other DNA
atgtctgcccggggggagggcgccggccagcccagcaccagcgcccagggccagcctgctgccccagccccccagaagaggggccggggccggcccaggaagcagcagcaggagcccaccggggagcccagccccaagaggccccggggccggcccaagggcagcaagaacaagagccccagcaaggccgcccagaagaaggccgaggccactggagagaagaggccccggggccggcccaggaagtgggacaacctgctgcccaggaccagcagcaagaagaagaccagcctgggcaacagcaccaagaggagccactag

SEQ ID NO: 155266 - DNA, 357 bp, synthetic construct
  misc_feature 1..357: note = Description of Artificial Sequence: Synthetic coding sequence
  source 1..357: mol_type = other DNA
atgtctgcccggggggagggcgccggccagcccagcaccagcgcccagggccagcctgctgccccagccccccagaagaggggccggggccggcccaggaagcagcagcaggagcccaccggggagcccagccccaagaggccccggggccggcccaagggcagcaagaacaagagccccagcaaggccgcccagaagaaggccgaggccactggagagaagaggccccggggccggcccaggaagtggccccagcaggtggtgcagaagaagccagcccaggtgaatgtggccctgcccgggaaggaccaccctggcaacctgatctacctgctcttcagcaagaatgccacctag

SEQ ID NO: 155267 - DNA, 273 bp, synthetic construct
  misc_feature 1..273: note = Description of Artificial Sequence: Synthetic coding sequence
  source 1..273: mol_type = other DNA
atgtctgcccggggggagggcgccggccagcccagcaccagcgcccagggccagcctgctgccccagccccccagaagaggggccggggccggcccaggaagcagcagcaggagcccaccggggagcccagccccaagaggccccggggccggcccaagggcagcaagaacaagagccccagcaaggccgcccagaagaaggccgaggccactggagagaagaggccccggggccggcccaggaagtgggaggagttctacatcgccgcctag

SEQ ID NO: 155268 - DNA, 330 bp, synthetic construct
  misc_feature 1..330: note = Description of Artificial Sequence: Synthetic coding sequence
  source 1..330: mol_type = other DNA
atgtctgcccggggggagggcgccggccagcccagcaccagcgcccagggccagcctgctgccccagccccccagaagaggggccggggccggcccaggaagcagcagcaggagcccaccggggagcccagccccaagaggccccggggccggcccaagggcagcaagaacaagagccccagcaaggccgcccagaagaaggccgaggccactggagagaagaggccccggggccggcccaggaagtggccccagcaggtggtgcagaagaagccagcccaggaggagacagaggagaccagcagccaggagagcgctgaggaggactag

SEQ ID NO: 155269 - DNA, 279 bp, synthetic construct
  misc_feature 1..279: note = Description of Artificial Sequence: Synthetic coding sequence
  source 1..279: mol_type = other DNA
atgtctgcccggggggagggcgccggccagcccagcaccagcgcccagggccagcctgctgccccagccccccagaagaggggccggggccggcccaggaagcagcagcaggagcccaccggggagcccagccccaagaggccccggggccggcccaagggcagcaagaacaagagccccagcaaggccgcccagaagaaggccgaggccactggagagaagaggccccggggccggcccaggaagtggtggctgctgatgaagagcccctgctggtag

SEQ ID NO: 155270 - DNA, 312 bp, synthetic construct
  misc_feature 1..312: note = Description of Artificial Sequence: Synthetic coding sequence
  source 1..312: mol_type = other DNA
atgtctgcccggggggagggcgccggccagcccagcaccagcgcccagggccagcctgctgccccagccccccagaagaggggccggggccggcccaggaagcagcagcaggagcccaccggggagcccagccccaagaggccccggggccggcccaagggcagcaagaacaagagccccagcaaggccgcccagaagaaggccgaggccactggagagaagaggccccggggccggcccaggaagtggctgcgggcccaggccctggacagtgatggcctgggcagcaacagcggccccagcctgtcctag

SEQ ID NO: 155271 - DNA, 261 bp, synthetic construct
  misc_feature 1..261: note = Description of Artificial Sequence: Synthetic coding sequence
  source 1..261: mol_type = other DNA
atgtctgcccggggggagggcgccggccagcccagcaccagcgcccagggccagcctgctgccccagccccccagaagaggggccggggccggcccaggaagcagcagcaggagcccaccggggagcccagccccaagaggccccggggccggcccaagggcagcaagaacaagagccccagcaaggccgcccagaagaaggccgaggccactggagagaagaggccccggggccggcccaggaagtggctgcagaactag

SEQ ID NO: 155272 - DNA, 300 bp, synthetic construct
  misc_feature 1..300: note = Description of Artificial Sequence: Synthetic coding sequence
  source 1..300: mol_type = other DNA
atgtctgcccggggggagggcgccggccagcccagcaccagcgcccagggccagcctgctgccccagccccccagaagaggggccggggccggcccaggaagcagcagcaggagcccaccggggagcccagccccaagaggccccggggccggcccaagggcagcaagaacaagagccccagcaaggccgcccagaagaaggccgaggccactggagagaagaggccccggggccggcccaggaagtggccccagcaggtggtgcagaagaagccagcccaggtgcgccacagccactag

SEQ ID NO: 155273 - DNA, 477 bp, synthetic construct
  misc_feature 1..477: note = Description of Artificial Sequence: Synthetic coding sequence
  source 1..477: mol_type = other DNA
atgggcaaaggagaccccaagaagccccggggcaagatgagcagctatgccttctttgtgcagacctgccgggaggagcacaagaagaagcacccagatgcctctgtgaacttcagcgagttcagcaagaagtgcagcgagcgctggaagaccatgtctgccaaggagaagggcaagtttgaggacatggccaaggctgacaaggcccgctatgagcgggagatgaagacctacatcccccccaagggggagaccaagaagaagttcaaggaccccaatgcccccaagaggcctcccagcgccttcttcctgttctgcagcgagtaccggcccaagatcaagggggagcaccctggcctgagcattggagatgtggccaagaagctgggggagatgtggaacaacacagctgctgatgacaagcagccctatgagaagaaggccgccaagctgaaggagaagtatgagaagttctag

SEQ ID NO: 155274 - DNA, 648 bp, synthetic construct
  misc_feature 1..648: note = Description of Artificial Sequence: Synthetic coding sequence
  source 1..648: mol_type = other DNA
atgggcaaaggagaccccaagaagccccggggcaagatgagcagctatgccttctttgtgcagacctgccgggaggagcacaagaagaagcacccagatgcctctgtgaacttcagcgagttcagcaagaagtgcagcgagcgctggaagaccatgtctgccaaggagaagggcaagtttgaggacatggccaaggctgacaaggcccgctatgagcgggagatgaagacctacatcccccccaagggggagaccaagaagaagttcaaggaccccaatgcccccaagaggcctcccagcgccttcttcctgttctgcagcgagtaccggcccaagatcaagggggagcaccctggcctgagcattggagatgtggccaagaagctgggggagatgtggaacaacacagctgctgatgacaagcagccctatgagaagaaggccgccaagctgaaggagaagtatgagaaggacattgctgcctaccgggccaagggcaagccagatgctgccaagaagggcgtggtgaaggccgagaagagcaagaagaagaaggaggaggaggaggatgaggaggatgaagaagatgaggaggaggaggaggatgaggaggatgaagatgaggaggaggatgatgatgatgaatag

SEQ ID NO: 155275 - DNA, 648 bp, synthetic construct; identical to SEQ ID NO: 155274
  misc_feature 1..648: note = Description of Artificial Sequence: Synthetic coding sequence
  source 1..648: mol_type = other DNA

SEQ ID NO: 155276 - DNA, 294 bp, synthetic construct
  misc_feature 1..294: note = Description of Artificial Sequence: Synthetic coding sequence
  source 1..294: mol_type = other DNA
atgggcaaaggagaccccaagaagccccggggcaagatgagcagctatgccttctttgtgcagacctgccgggaggagcacaagaagaagcacccagatgcctctgtgaacttcagcgagttcagcaagaagtgcagcgagcgctggaagaccatgtctgccaaggagaagggcaagtttgaggacatggccaaggctgacaaggcccgctatgagcgggagatgaagacctacatcccccccaagggggagaccaagaagaagttcaaggaccccaatgcccccaagaggtag

SEQ ID NO: 155277 - DNA, 477 bp, synthetic construct; identical to SEQ ID NO: 155273
  misc_feature 1..477: note = Description of Artificial Sequence: Synthetic coding sequence
  source 1..477: mol_type = other DNA

SEQ ID NO: 155278 - DNA, 648 bp, synthetic construct; identical to SEQ ID NO: 155274
  misc_feature 1..648: note = Description of Artificial Sequence: Synthetic coding sequence
  source 1..648: mol_type = other DNA

SEQ ID NO: 155279 - DNA, 648 bp, synthetic construct; identical to SEQ ID NO: 155274
  misc_feature 1..648: note = Description of Artificial Sequence: Synthetic coding sequence
  source 1..648: mol_type = other DNA

SEQ ID NO: 155280 - DNA, 489 bp, synthetic construct
  misc_feature 1..489: note = Description of Artificial Sequence: Synthetic coding sequence
  source 1..489: mol_type = other DNA
atgggcaaaggagaccccaagaagccccggggcaagatgagcagctatgccttctttgtgcagacctgccgggaggagcacaagaagaagcacccagatgcctctgtgaacttcagcgagttcagcaagaagtgcagcgagcgctggaagaccatgtctgccaaggagaagggcaagtttgaggacatggccaaggctgacaaggcccgctatgagcgggagatgaagacctacatcccccccaagggggagaccaagaagaagttcaaggaccccaatgcccccaagaggcctcccagcgccttcttcctgttctgcagcgagtaccggcccaagatcaagggggagcaccctggcctgagcattggagatgtggccaagaagctgggggagatgtggaacaacacagctgctgatgacaagcagccctatgagaagatcctgctgcacatcgagctgaaggagagcctgatgcagcagaagaggtag

SEQ ID NO: 155281 - DNA, 630 bp, synthetic construct
  misc_feature 1..630: note = Description of Artificial Sequence: Synthetic coding sequence
  source 1..630: mol_type = other DNA
atgggcaaaggagaccccaacaagccccggggcaagatgagcagctatgccttctttgtgcagacctgccgggaggagcacaagaagaagcacccagacagctctgtgaactttgctgagttcagcaagaagtgcagcgagcgctggaagaccatgtctgccaaggagaagagcaagtttgaggacatggccaagagtgacaaggcccgctatgaccgggagatgaagaactacgtgccccccaagggggacaagaagggcaagaagaaggaccccaatgcccccaagaggcctcccagcgccttcttcctgttctgcagcgagcaccggcccaagatcaagtctgagcaccctggcctgagcatcggggacacagccaagaagctgggggagatgtggagcgagcagagcgccaaggacaagcagccctatgagcagaaggccgccaagctgaaggagaagtatgagaaggacattgctgcctaccgggccaagggcaagtctgaggccggcaagaagggccctggccggcccaccggcagcaagaagaagaatgaaccagaagatgaggaggaggaggaggaggaggaggatgaagatgaggaggaggaggatgaagatgaggagtag

SEQ ID NO: 155282 - DNA, 630 bp, synthetic construct; identical to SEQ ID NO: 155281
  misc_feature 1..630: note = Description of Artificial Sequence: Synthetic coding sequence
  source 1..630: mol_type = other DNA

SEQ ID NO: 155283 - DNA, 630 bp, synthetic construct; identical to SEQ ID NO: 155281
  misc_feature 1..630: note = Description of Artificial Sequence: Synthetic coding sequence
  source 1..630: mol_type = other DNA

SEQ ID NO: 155284 - DNA, 405 bp, synthetic construct
  misc_feature 1..405: note = Description of Artificial Sequence: Synthetic coding sequence
  source 1..405: mol_type = other DNA
atgggcaaaggagaccccaacaagccccggggcaagatgagcagctatgccttctttgtgcagacctgccgggaggagcacaagaagaagcacccagacagctctgtgaactttgctgagttcagcaagaagtgcagcgagcgctggaagaccatgtctgccaaggagaagagcaagtttgaggacatggccaagagtgacaaggcccgctatgaccgggagatgaagaactacgtgccccccaagggggacaagaagggcaagaagaaggaccccaatgcccccaagaggcctcccagcgccttcttcctgttctgcagcgagcaccggcccaagatcaagtctgagcaccctggcctgagcatcggggacacagccaagaagctgggggagatgtggagctag

SEQ ID NO: 155285 - DNA, 603 bp, synthetic construct
  misc_feature 1..603: note = Description of Artificial Sequence: Synthetic coding sequence
  source 1..603: mol_type = other DNA
atggccaagggggaccccaagaagcccaagggcaagatgtctgcctatgccttctttgtgcagacctgccgggaggagcacaagaagaagaaccctgaggtgcctgtgaactttgctgagttcagcaagaagtgcagcgagcgctggaagaccatgtctgggaaggagaagagcaagtttgatgagatggccaaggctgacaaggtgcgctatgaccgggagatgaaggactatggccctgccaagggcggcaagaagaagaaggaccccaatgcccccaagaggcctcccagcggcttcttcctgttctgcagcgagttccggcccaagatcaagagcaccaaccctggcatcagcattggagatgtggccaagaagctgggggagatgtggaacaacctgaatgattctgagaagcagccctacatcaccaaggccgccaagctgaaggagaagtatgagaaggatgtggccgactacaagagcaagggcaagtttgatggagccaagggccctgccaaggtggccaggaagaaggtggaggaggaggatgaggaggaggaggaggaggaggaggaggaggaggaggaggaggatgaatag

SEQ ID NO: 155286 - DNA, 567 bp, synthetic construct
  misc_feature 1..567: note = Description of Artificial Sequence: Synthetic coding sequence
  source 1..567: mol_type = other DNA
atggccaagggggaccccaagaagcccaagggcaagatgtctgcctatgccttctttgtgcagacctgccgggaggagcacaagaagaagaaccctgaggtgcctgtgaactttgctgagttcagcaagaagtgcagcgagcgctggaagaccatgtctgggaaggagaagagcaagtttgatgagatggccaaggctgacaaggtgcgctatgaccgggagatgaaggactatggccctgccaagggcggcaagaagaagaaggaccccaatgcccccaagaggcctcccagcggcttcttcctgttctgcagcgagttccggcccaagatcaagagcaccaaccctggcatcagcattggagatgtggccaagaagctgggggagatgtggaacaacctgaatgattctgagaagcagccctacatcaccaaggccgccaagctgaaggagaagtatgagaaggatgtggccgactacaagagcaagggcaagtttgatggagccaagggccctgccaaggtggccaggaagaaggtggaggaggaggatgaggaggaggagtag

SEQ ID NO: 155287 - DNA, 462 bp, synthetic construct
  misc_feature 1..462: note = Description of Artificial Sequence: Synthetic coding sequence
  source 1..462: mol_type = other DNA
atggccaagggggaccccaagaagcccaagggcaagatgtctgcctatgccttctttgtgcagacctgccgggaggagcacaagaagaagaaccctgaggtgcctgtgaactttgctgagttcagcaagaagtgcagcgagcgctggaagaccatgtctgggaaggagaagagcaagtttgatgagatggccaaggctgacaaggtgcgctatgaccgggagatgaaggactatggccctgccaagggcggcaagaagaagaaggaccccaatgcccccaagaggcctcccagcggcttcttcctgttctgcagcgagttccggcccaagatcaagagcaccaaccctggcatcagcattggagatgtggccaagaagctgggggagatgtggaacaacctgaatgattctgagaagcagccctacatcaccaaggccgccaagctgaaggagaagtactag

SEQ ID NO: 155288 - DNA, 603 bp, synthetic construct; identical to SEQ ID NO: 155285
  misc_feature 1..603: note = Description of Artificial Sequence: Synthetic coding sequence
  source 1..603: mol_type = other DNA

SEQ ID NO: 155289 - DNA, 582 bp, synthetic construct
  misc_feature 1..582: note = Description of Artificial Sequence: Synthetic coding sequence
  source 1..582: mol_type = other DNA
atggccaagggggaccccaagaagcccaagggcaagatgtctgcctatgccttctttgtgcagacctgccgggaggagcacaagaagaagaaccctgaggtgcctgtgaactttgctgagttcagcaagaagtgcagcgagcgctggaagaccatgtctgggaaggagaagagcaagtttgatgagatggccaaggctgacaaggtgcgctatgaccgggagatgaaggactatggccctgccaagggcggcaagaagaagaaggaccccaatgcccccaagaggcctcccagcggcttcttcctgttctgcagcgagttccggcccaagatcaagagcaccaaccctggcatcagcattggagatgtggccaagaagctgggggagatgtggaacaacctgaatgattctgagaagcagccctacatcaccaaggccgccaagctgaaggagaagtatgagaaggatgtggccgactacaagagcaagggcaagtttgatggagccaagggccctgccaaggtggccaggaagaaggtggaggaggaggatgaggaggaggaggaggaggaggaggagtag

SEQ ID NO: 155290 - DNA, 273 bp, synthetic construct
  misc_feature 1..273: note = Description of Artificial Sequence: Synthetic coding sequence
  source 1..273: mol_type = other DNA
atgcccaagaggaaggccgagggagatgccaagggggacaaggccaaggtgaaggatgagccccagaggagaagtgcccggctgagcgccaagccagccccacccaagccagagcccaagcccaagaaggccccagccaagaagggggagaaggtgcccaagggcaagaagggcaaggcagatgctgggaaggagggcaacaacccagcagaaaatggagatgccaagacagaccaggcccagaaggccgagggcgctggagatgccaagtag

SEQ ID NO: 155291 - DNA, 234 bp, synthetic construct
  misc_feature 1..234: note = Description of Artificial Sequence: Synthetic coding sequence
  source 1..234: mol_type = other DNA
atgcccaagaggaagagccctgagaacacagagggcaaggatggcagcaaggtgaccaagcaggagcccaccaggagaagtgcccggctgagcgccaagccagccccacccaagccagagcccaagcccaggaagaccagcgccaagaaggagcccggggccaagatcagcagaggagccaagggcaagaaggaggagaagcaggaggccggcaaggagggcacagagaactag

SEQ ID NO: 155292 - DNA, 300 bp, synthetic construct
  misc_feature 1..300: note = Description of Artificial Sequence: Synthetic coding sequence
  source 1..300: mol_type = other DNA
atgcccaagaggaagagccctgagaacacagagggcaaggatggcagcaaggtgaccaagcaggagcccaccaggagaagtgcccggctgagcgccaagccagccccacccaagccagagcccaagcccaggaagaccagcgccaagaaggagcccggggccaagatcagcagaggagccaagggcaagaaggaggagaagcaggaggccggcaaggagggcacagcccccagtgaaaatggagagaccaaggccgaggaggcccagaagacagaatctgtggacaatgaaggagagtag

SEQ ID NO: 155293 - DNA, 507 bp, synthetic construct
  misc_feature 1..507: note = Description of Artificial Sequence: Synthetic coding sequence
  source 1..507: mol_type = other DNA
atggtgctcttcttccgcatcaacctgcagaccaagaagtgcaagcagaagggcaaaggagagcagcgggagaaccggcccaagtggctgaccaagaagctgaagaagacctacctgaggaagacaggcaagaggcggctgcggcgggtgcagcccctgatgaagcaggagaggaagaagcccagcctcatcaacaaccacatcccctgcctgatcagcggcccctgcctgcccagctgcaccatccagaggaacatcttcatcaactactttgtgaatgccagcttcctggtggccctggagaccttcctgcggcggcgggagagccacctgatccccttcttcaagtgcaagtgcttcttcctgcggggggagatcatctgctggctgttcatcttctggtacaaccagaagatcgtgtgggacatcgagctgtgggaggccctgactgtgtctggagtgtccctgaccttccaccgctggggcgtgtccttctacatcctgtag

SEQ ID NO: 155294 - DNA, 303 bp, synthetic construct
  misc_feature 1..303: note = Description of Artificial Sequence: Synthetic coding sequence
  source 1..303: mol_type = other DNA
atgcccaagaggaaggtgagcagcgctgagggcgccgccaaggaggagcccaagagaagaagtgcccggctgagcgccaagcccccagccaaggtggaggccaagcccaagaaggccgccgccaaggacaagagcagtgacaagaaggtgcagaccaagggcaagagaggagccaagggcaagcaggccgaggtggccaaccaggagaccaaggaggacctgcctgcagaaaatggagagaccaagacagaggagagccctgccagtgatgaggccggggagaaggaggccaagagtgactag

SEQ ID NO: 155295 - DNA, 582 bp, synthetic construct
  misc_feature 1..582: note = Description of Artificial Sequence: Synthetic coding sequence
  source 1..582: mol_type = other DNA
atgggcaagcagaacagcaagctgcggcctgagatgctgcaggacctgcgggagaacacagagttcagcgagctggagctgcaggagtggtacaagggcttcctgaaggactgccccaccggcatcctgaatgtggatgagttcaagaagatctatgccaacttcttcccctatggagatgccagcaagtttgctgagcacgtgttccgcacctttgacaccaacagtgatggcaccatcgacttccgggagttcatcatcgccctgtctgtgaccagccggggccgcctggagcagaagctgatgtgggccttctccatgtatgacctggatggaaatggctacatcagccgggaggagatgctggagatcgtgcaggccatctacaagatggtgtcctctgtgatgaagatgccagaagatgagagcaccccagagaagaggacagagaagatcttccggcagatggacaccaacaatgatggcaagctgagcctggaggagttcatccggggggccaagagtgaccccagcatcgtgcggctgctgcagtgtgaccccagcagcgccagccagttctag

SEQ ID NO: 155296 - DNA, 582 bp, synthetic construct
  misc_feature 1..582: note = Description of Artificial Sequence: Synthetic coding sequence
  source 1..582: mol_type = other DNA
atgggcaagcagaacagcaagctgcggcctgaggtgctgcaggacctgcgggagaacacagagttcacagaccacgagctgcaggagtggtacaagggcttcctgaaggactgccccaccggccacctgactgtggatgagttcaagaagatctatgccaacttcttcccctatggagatgccagcaagtttgctgagcacgtgttccgcacctttgacaccaatggagatggcaccatcgacttccgggagttcatcatcgccctgtctgtgaccagccggggcaagctggagcagaagctgaagtgggccttctccatgtatgacctggatggaaatggctacatcagccgctctgagatgctggagatcgtgcaggccatctacaagatggtgtcctctgtgatgaagatgccagaagatgagagcaccccagagaagaggacagacaagatcttccggcagatggacaccaacaatgatggcaagctgagcctggaggagttcatccggggggccaagagtgaccccagcatcgtgcggctgctgcagtgtgaccccagcagcgccagccagttctag

SEQ ID NO: 155297 - DNA, 582 bp, synthetic construct; identical to SEQ ID NO: 155296
  misc_feature 1..582: note = Description of Artificial Sequence: Synthetic coding sequence
  source 1..582: mol_type = other DNA

SEQ ID NO: 155298 - DNA, 93 bp, synthetic construct
  misc_feature 1..93: note = Description of Artificial Sequence: Synthetic coding sequence
  source 1..93: mol_type = other DNA
atgggcaagcagaacagcaagctgcggcctgaggtgctgcaggacctgcgggagaacacagagttcacagaccacgagctgcaggagtggtag

SEQ ID NO: 155299 - DNA, 3054 bp, synthetic construct
  misc_feature 1..3054: note = Description of Artificial Sequence: Synthetic coding sequence
  source 1..3054: mol_type = other DNA
atgaagctgctgaagcccacctgggtgaaccacaacgggaagcccatcttctctgtggacatccacccagatggcaccaagtttgccaccggcggccagggccaggacagcggcaaggtggtgatctggaacatgagccctgtgctgcaggaggatgatgagaaggatgagaacatccccaagatgctgtgccagatggacaaccacctggcctgtgtgaactgtgtgcgctggagcaacagcggcatgtacctggccagcggaggagatgacaagctgatcatggtgtggaagagggccacctacatcggccccagcacagtgtttggcagcagcggcaagctggccaacgtggagcagtggaggtgtgtgtccatcctgaggaaccacagcggagatgtgatggatgtggcctggagcccccatgatgcctggctggccagctgcagcgtggacaacacagtggtgatctggaatgctgtgaagtttcctgagatcctggccaccctgcggggccacagcggcctggtgaagggcctgacctgggaccctgtgggcaagtacatcgccagccaggctgatgacaggagcctgaaggtgtggaggaccctggactggcagctggagaccagcatcaccaagccctttgatgaatgtggcggcaccacccacgtgctgcggctgtcctggagcccagatggccactacctggtgtctgcccacgccatgaacaacagcggccccacagcccagatcatcgagcgggagggctggaagaccaacatggactttgtgggccacaggaaggctgtgacagtggtgaagttcaaccccaagatcttcaagaagaagcagaagaatggcagcagcgccaagcccagctgcccctactgctgctgtgctgtgggcagcaaggacaggagcctgtctgtgtggctgacctgcctgaagaggcccctggtggtgatccacgagctgtttgacaagagcatcatggacatctcctggaccctgaatggcctgggcatcctggtgtgcagcatggatggctctgtggccttcctggacttcagccaggatgagctgggggaccccctgtctgaggaggagaagagccgcatccaccagagcacctacggcaagagcctggccatcatgacagaggcccagctgagcacagctgtgattgaaaatcctgagatgctgaagtaccagaggcggcagcagcagcagcagctggaccagaagtctgctgccacccgggagatgggcagcgccacctctgtggccggcgtggtgaatggagagagcctggaggacatcaggaagaacctgctgaagaagcaggtggagaccaggacagcagatggaagaagacgcatcacccccctgtgcatcgcccagctggacacaggagacttcagcacagccttcttcaacagcatccccctgagcggcagcctggccggcaccatgctgagcagccacagcagcccccagctgctgcccctggacagcagcacccccaacagctttggagccagcaagccctgcacagagcctgtggtggccgccagcgcccggcctgctggggacagcgtgaacaaggacagcatgaatgccaccagcaccccagctgccctgagccccagcgtgctgaccacccccagcaagattgagcccatgaaggcctttgacagccgcttcacagagaggagcaaggccacccctggggccccagccctgacctccatgacccccacagctgtggagcggctgaaggagcagaacctggtgaaggagctgcggccccgggacctgctggagagcagcagtgacagtgatgagaaggtgcccctggccaaggccagcagcctgagcaagaggaagctggagctggaggtggagaccgtggagaagaagaagaagggccggcccaggaaggacagccggctgatgcctgtgtccctgtctgtgcagagccctgctgccctgacagctgagaaggaggccatgtgcctgagcgccccagccctggccctgaagctgcccatccccagcccccagagggccttcaccctgcaggtgtccagtgaccccagcatgtacatcgaggtggagaatgaggtgacagtggtgggcggcgtgaagctgagccggctgaagtgcaaccgggagggcaaggagtgggagaccgtgctgaccagccgcatcctgacagctgctggcagctgtgatgtggtgtgtgtggcctgtgagaagaggatgctgagcgtcttcagcacctgtggccgccgcctgctgagccccatcctgctgcccagccccatcagcaccctgcactgcaccggcagctatgtgatggccctgacagctgctgccaccctgtctgtgtgggatgtgcaccggcaggtggtggtggtgaaggaggagagcctgcacagcatcctggccggcagtgacatgacagtgtcccagatcctgctgacccagcacggcatccctgtgatgaacctgagtgatggcaaggcctactgcttcaaccccagcctgagcacctggaacctggtgtctgacaagcaggacagcctggcccagtgtgccgacttccgcagcagcctgcccagccaggatgccatgctgtgcagcggccccctggccatcatccagggccgcaccagcaacagcggccggcaggccgcccggctcttctctgtgccccacgtggtgcagcaggagaccaccctggcctacctggagaaccaggtggccgccgccctgaccctgcagagcagccatgagtaccgccactggctgctggtgtatgcccgctacctggtgaatgaaggatttgagtaccgcctgcgggagatctgcaaggacctgctgggccctgtgcactacagcacaggcagccagtgggagagcacagtggtgggcctgaggaagcgggagctgctgaaggagctgctgcccgtcatcggccagaacctgcgcttccagaggctcttcacagagtgccaggagcagctggacatcctgcgggacaagtag

SEQ ID NO: 155300 - DNA, 2433 bp, synthetic construct
  misc_feature 1..2433: note = Description of Artificial Sequence: Synthetic coding sequence
  source 1..2433: mol_type = other DNA
atgaagctgctgaagcccacctgggtgaaccacaacgggaagcccatcttctctgtggacatccacccagatggcaccaagtttgccaccggcggccagggccaggacagcggcaaggtggtgatctggaacatgagccctgtgctgcaggaggatgatgagaaggatgagaacatccccaagatgctgtgccagatggacaaccacctggcctgtgtgaactgtgtgcgctggagcaacagcggcatgtacctggccagcggaggagatgacaagctgatcatggtgtggaagagggccacctacatcggccccagcacagtgtttggcagcagcggcaagctggccaacgtggagcagtggaggtgtgtgtccatcctgaggaaccacagcggagatgtgatggatgtggcctggagcccccatgatgcctggctggccagctgcagcgtggacaacacagtggtgatctggaatgctgtgaagtttcctgagatcctggccaccctgcggggccacagcggcctggtgaagggcctgacctgggaccctgtgggcaagtacatcgccagccaggctgatgacaggagcctgaaggtgtggaggaccctggactggcagctggagaccagcatcaccaagccctttgatgaatgtggcggcaccacccacgtgctgcggctgtcctggagcccagatggccactacctggtgtctgcccacgccatgaacaacagcggccccacagcccagatcatcgagcgggagggctggaagaccaacatggactttgtgggccacaggaaggctgtgacagtggtgaagttcaaccccaagatcttcaagaagaagcagaagaatggcagcagcgccaagcccagctgcccctactgctgctgtgctgtgggcagcaaggacaggagcctgtctgtgtggctgacctgcctgaagaggcccctggtggtgatccacgagctgtttgacaagagcatcatggacatctcctggaccctgaatggcctgggcatcctggtgtgcagcatggatggctctgtggccttcctggacttcagccaggatgagctgggggaccccctgtctgaggaggagaagagccgcatccaccagagcacctacggcaagagcctggccatcatgacagaggcccagctgagcacagctgtgattgaaaatcctgagatgctgaagtaccagaggcggcagcagcagcagcagctggaccagaagtctgctgccacccgggagatgggcagcgccacctctgtggccggcgtggtgaatggagagagcctggaggacatcaggaagaacctgctgaagaagcaggtggagaccaggacagcagatggaagaagacgcatcacccccctgtgcatcgcccagctggacacaggagacttcagcacagccttcttcaacagcatccccctgagcggcagcctggccggcaccatgctgagcagccacagcagcccccagctgctgcccctggacagcagcacccccaacagctttggagccagcaagccctgcacagagcctgtggtggccgccagcgcccggcctgctggggacagcgtgaacaaggacagcatgaatgccaccagcaccccagctgccctgagccccagcgtgctgaccacccccagcaagattgagcccatgaaggcctttgacagccgcttcacagagaggagcaaggccacccctggggccccagccctgacctccatgacccccacagctgtggagagagatgtgcaccggcaggtggtggtggtgaaggaggagagcctgcacagcatcctggccggcagtgacatgacagtgtcccagatcctgctgacccagcacggcatccctgtgatgaacctgagtgatggcaaggcctactgcttcaaccccagcctgagcacctggaacctggtgtctgacaagcaggacagcctggcccagtgtgccgacttccgcagcagcctgcccagccaggatgccatgctgtgcagcggccccctggccatcatccagggccgcaccagcaacagcggccggcaggccgcccggctcttctctgtgccccacgtggtgcagcaggagaccaccctggcctacctggagaaccaggtggccgccgccctgaccctgcagagcagccatgagtaccgccactggctgctggtgtatgcccgctacctggtgaatgaaggatttgagtaccgcctgcgggagatctgcaaggacctgctgggccctgtgcactacagcacaggcagccagtgggagagcacagtggtgggcctgaggaagcgggagctgctgaaggagctgctgcctgtgattggccagaacctgcgcttccagaggctcttcacagagtgccaggagcagctggacatcctgcgggacaagtag

SEQ ID NO: 155301 - DNA, 1815 bp, synthetic construct
  misc_feature 1..1815: note = Description of Artificial Sequence: Synthetic coding sequence
  source 1..1815: mol_type = other DNA
atgctgagcagccacagcagcccccagctgctgcccctggacagcagcacccccaacagctttggagccagcaagccctgcacagagcctgtggtggccgccagcgcccggcctgctggggacagcgtgaacaaggacagcatgaatgccaccagcaccccagctgccctgagccccagcgtgctgaccacccccagcaagattgagcccatgaaggcctttgacagccgcttcacagagaggagcaaggccacccctggggccccagccctgacctccatgacccccacagctgtggagcggctgaaggagcagaacctggtgaaggagctgcggccccgggacctgctggagagcagcagtgacagtgatgagaaggtgcccctggccaaggccagcagcctgagcaagaggaagctggagctggaggtggagaccgtggagaagaagaagaagggccggcccaggaaggacagccggctgatgcctgtgtccctgtctgtgcagagccctgctgccctgacagctgagaaggaggccatgtgcctgagcgccccagccctggccctgaagctgcccatccccagcccccagagggccttcaccctgcaggtgtccagtgaccccagcatgtacatcgaggtggagaatgaggtgacagtggtgggcggcgtgaagctgagccggctgaagtgcaaccgggagggcaaggagtgggagaccgtgctgaccagccgcatcctgacagctgctggcagctgtgatgtggtgtgtgtggcctgtgagaagaggatgctgtctgtgttcagcacctgtggccggcggctgctgagccccatcctgctgcccagccccatcagcaccctgcactgcaccggcagctatgtgatggccctgacagctgctgccaccctgtctgtgtgggatgtgcaccggcaggtggtggtggtgaaggaggagagcctgcacagcatcctggccggcagtgacatgacagtgtcccagatcctgctgacccagcacggcatccctgtgatgaacctgagtgatggcaaggcctactgcttcaaccccagcctgagcacctggaacctggtgtctgacaagcaggacagcctggcccagtgtgccgacttccgcagcagcctgcccagccaggatgccatgctgtgcagcggccccctggccatcatccagggccgcaccagcaacagcggccggcaggccgcccggctcttctctgtgccccacgtggtgcagcaggagaccaccctggcctacctggagaaccaggtggccgccgccctgaccctgcagagcagccatgagtaccgccactggctgctggtgtatgcccgctacctggtgaatgaaggcagcgctgaggagggcgctgctgagggcgccgccaccagccacagagctgagccccccatcccagcccccctgcaccgggtgtctggaacagcccggcaccctgagggccaggtggcctgccccagcctgccctggctgcagcagggccagggccacaccctggccgcagatgacatgcaggaccggctgagcccagaccaggccgtgggcggcggggacacaggaagaagatgtgctgtgctgcaccagaggcagcccagcagcctgggccgctgtgccctgtgccccggcagtgacatcgccagcggcggcggcagcagcagcctgccccccagcccccgctgtggggcccgggccggggccctgccccgctgccctggggccagcaaggctgtgcccggcctgcccagccctgcccggccccagggcggccactag

SEQ ID NO: 155302 - DNA, 2922 bp, synthetic construct
  misc_feature 1..2922: note = Description of Artificial Sequence: Synthetic coding sequence
  source 1..2922: mol_type = other DNA
atgagccctgtgctgcaggaggatgatgagaaggatgagaacatccccaagatgctgtgccagatggacaaccacctggcctgtgtgaactgtgtgcgctggagcaacagcggcatgtacctggccagcggaggagatgacaagctgatcatggtgtggaagagggccacctacatcggccccagcacagtgtttggcagcagcggcaagctggccaacgtggagcagtggaggtgtgtgtccatcctgaggaaccacagcggagatgtgatggatgtggcctggagcccccatgatgcctggctggccagctgcagcgtggacaacacagtggtgatctggaatgctgtgaagtttcctgagatcctggccaccctgcggggccacagcggcctggtgaagggcctgacctgggaccctgtgggcaagtacatcgccagccaggctgatgacaggagcctgaaggtgtggaggaccctggactggcagctggagaccagcatcaccaagccctttgatgaatgtggcggcaccacccacgtgctgcggctgtcctggagcccagatggccactacctggtgtctgcccacgccatgaacaacagcggccccacagcccagatcatcgagcgggagggctggaagaccaacatggactttgtgggccacaggaaggctgtgacagtggtgaagttcaaccccaagatcttcaagaagaagcagaagaatggcagcagcgccaagcccagctgcccctactgctgctgtgctgtgggcagcaaggacaggagcctgtctgtgtggctgacctgcctgaagaggcccctggtggtgatccacgagctgtttgacaagagcatcatggacatctcctggaccctgaatggcctgggcatcctggtgtgcagcatggatggctctgtggccttcctggacttcagccaggatgagctgggggaccccctgtctgaggaggagaagagccgcatccaccagagcacctacggcaagagcctggccatcatgacagaggcccagctgagcacagctgtgattgaaaatcctgagatgctgaagtaccagaggcggcagcagcagcagcagctggaccagaagtctgctgccacccgggagatgggcagcgccacctctgtggccggcgtggtgaatggagagagcctggaggacatcaggaagaacctgctgaagaagcaggtggagaccaggacagcagatggaagaagacgcatcacccccctgtgcatcgcccagctggacacaggagacttcagcacagccttcttcaacagcatccccctgagcggcagcctggccggcaccatgctgagcagccacagcagcccccagctgctgcccctggacagcagcacccccaacagctttggagccagcaagccctgcacagagcctgtggtggccgccagcgcccggcctgctggggacagcgtgaacaaggacagcatgaatgccaccagcaccccagctgccctgagccccagcgtgctgaccacccccagcaagattgagcccatgaaggcctttgacagccgcttcacagagaggagcaaggccacccctggggccccagccctgacctccatgacccccacagctgtggagcggctgaaggagcagaacctggtgaaggagctgcggccccgggacctgctggagagcagcagtgacagtgatgagaaggtgcccctggccaaggccagcagcctgagcaagaggaagctggagctggaggtggagaccgtggagaagaagaagaagggccggcccaggaaggacagccggctgatgcctgtgtccctgtctgtgcagagccctgctgccctgacagctgagaaggaggccatgtgcctgagcgccccagccctggccctgaagctgcccatccccagcccccagagggccttcaccctgcaggtgtccagtgaccccagcatgtacatcgaggtggagaatgaggtgacagtggtgggcggcgtgaagctgagccggctgaagtgcaaccgggagggcaaggagtgggagaccgtgctgaccagccgcatcctgacagctgctggcagctgtgatgtggtgtgtgtggcctgtgagaagaggatgctgagcgtcttcagcacctgtggccgccgcctgctgagccccatcctgctgcccagccccatcagcaccctgcactgcaccggcagctatgtgatggccctgacagctgctgccaccctgtctgtgtgggatgtgcaccggcaggtggtggtggtgaaggaggagagcctgcacagcatcctggccggcagtgacatgacagtgtcccagatcctgctgacccagcacggcatccctgtgatgaacctgagtgatggcaaggcctactgcttcaaccccagcctgagcacctggaacctggtgtctgacaagcaggacagcctggcccagtgtgccgacttccgcagcagcctgcccagccaggatgccatgctgtgcagcggccccctggccatcatccagggccgcaccagcaacagcggccggcaggccgcccggctcttctctgtgccccacgtggtgcagcaggagaccaccctggcctacctggagaaccaggtggccgccgccctgaccctgcagagcagccatgagtaccgccactggctgctggtgtatgcccgctacctggtgaatgaaggatttgagtaccgcctgcgggagatctgcaaggacctgctgggccctgtgcactacagcacaggcagccagtgggagagcacagtggtgggcctgaggaagcgggagctgctgaaggagctgctgcccgtcatcggccagaacctgcgcttccagaggctcttcacagagtgccaggagcagctggacatcctgcgggacaagtag

SEQ ID NO: 155303 - DNA, 2421 bp, synthetic construct
  misc_feature 1..2421: note = Description of Artificial Sequence: Synthetic coding sequence
  source 1..2421: mol_type = other DNA
atgagccctgtgctgcaggaggatgatgagaaggatgagaacatccccaagatgctgtgccagatggacaaccacctggcctgtgtgaactgtgtgcgctggagcaacagcggcatgtacctggccagcggaggagatgacaagctgatcatggtgtggaagagggccacctacatcggccccagcacagtgtttggcagcagcggcaagctggccaacgtggagcagtggaggtgtgtgtccatcctgaggaaccacagcggagatgtgatggatgtggcctggagcccccatgatgcctggctggccagctgcagcgtggacaacacagtggtgatctggaatgctgtgaagtttcctgagatcctggccaccctgcggggccacagcggcctggtgaagggcctgacctgggaccctgtgggcaagtacatcgccagccaggctgatgacaggagcctgaaggtgtggaggaccctggactggcagctggagaccagcatcaccaagccctttgatgaatgtggcggcaccacccacgtgctgcggctgtcctggagcccagatggccactacctggtgtctgcccacgccatgaacaacagcggccccacagcccagatcatcgagcgggagggctggaagaccaacatggactttgtgggccacaggaaggctgtgacagtggtgaagttcaaccccaagatcttcaagaagaagcagaagaatggcagcagcgccaagcccagctgcccctactgctgctgtgctgtgggcagcaaggacaggagcctgtctgtgtggctgacctgcctgaagaggcccctggtggtgatccacgagctgtttgacaagagcatcatggacatctcctggaccctgaatggcctgggcatcctggtgtgcagcatggatggctctgtggccttcctggacttcagccaggatgagctgggggaccccctgtctgaggaggagaagagccgcatccaccagagcacctacggcaagagcctggccatcatgacagaggcccagctgagcacagctgtgattgaaaatcctgagatgctgaagtaccagaggcggcagcagcagcagcagctggaccagaagtctgctgccacccgggagatgggcagcgccacctctgtggccggcgtggtgaatggagagagcctggaggacatcaggaagaacctgctgaagaagcaggtggagaccaggacagcagatggaagaagacgcatcacccccctgtgcatcgcccagctggacacaggagacttcagcacagccttcttcaacagcatccccctgagcggcagcctggccggcaccatgctgagcagccacagcagcccccagctgctgcccctggacagcagcacccccaacagctttggagccagcaagccctgcacagagcctgtggtggccgccagcgcccggcctgctggggacagcgtgaacaaggacagcatgaatgccaccagcaccccagctgccctgagccccagcgtgctgaccacccccagcaagattgagcccatgaaggcctttgacagccgcttcacagagaggagcaaggccacccctggggccccagccctgacctccatgacccccacagctgtggagcggctgaaggagcagaacctggtgaaggagctgcggccccgggacctgctggagagcagcagtgacagtgatgagaaggtgcccctggccaaggccagcagcctgagcaagaggaagctggagctggaggtggagaccgtggagaagaagaagaagggccggcccaggaaggacagccggctgatgcctgtgtccctgtctgtgcagagccctgctgccctgacagctgagaaggaggccatgtgcctgagcgccccagccctggccctgaagctgcccatccccagcccccagagggccttcaccctgcaggtgtccagtgaccccagcatgtacatcgaggtggagaatgaggtgacagtggtgggcggcgtgaagctgagccggctgaagtgcaaccgggagggcaaggagtgggagaccgtgctgaccagccgcatcctgacagctgctggcagctgtgatgtggtgtgtgtggcctgtgagaagaggatgctgagcgtcttcagcacctgtggccgccgcctgctgagccccatcctgctgcccagccccatcagcaccctgcactgcaccggcagctatgtgatggccctgacagctgctgccaccctgtctgtgtgggatgtgcaccggcaggtggtggtggtgaaggaggagagcctgcacagcatcctggccggcacctggttcctgaccagcaggacccactggctgtctgtgcagaccctgggcgccgcctgccaccccaggaccccctgctgtgcccaggacagatag

SEQ ID NO: 155304 - DNA, 156 bp, synthetic construct
  misc_feature 1..156: note = Description of Artificial Sequence: Synthetic coding sequence
  source 1..156: mol_type = other DNA
atggccagctccatgaggagcctcttcagtgaccacggcaagtatgtggagagcttccgccgcttcctgaaccacagcacagagcaccagtgcatgcaggagttcatggacaagaagctgcccggcatcatcggccgctaccagaactgctgctag

SEQ ID NO: 155305 - DNA, 879 bp, synthetic construct
  misc_feature 1..879: note = Description of Artificial Sequence: Synthetic coding sequence
  source 1..879: mol_type = other DNA
atggccagctccatgaggagcctcttcagtgaccacggcaagtatgtggagagcttccgccgcttcctgaaccacagcacagagcaccagtgcatgcaggagttcatggacaagaagctgcccggcatcatcggcagaattggagacaccaagtctgagatcaagatcctgagcattggaggaggagctggggagattgacctgcagatcctgagcaaggtgcaggcccagtacccaggagtgtgcatcaacaatgaggtggtggagcccagcgctgagcagatcgccaagtacaaggagctggtggccaagaccagcaacctggagaatgtgaagtttgcctggcacaaggagaccagcagcgagtaccagagcaggatgctggagaagaaggagctgcagaagtgggacttcatccacatgatccagatgctgtactacgtgaaggacatcccagccaccctgaagttcttccacagcctgctgggcaccaatgccaagatgctgatcatcgtggtgtctggcagcagcggctgggacaagctgtggaagaagtatggcagccgcttcccccaggatgacctgtgccagtacatcaccagtgatgacctgacccagatgctggacaacctgggcctgaagtatgagtgctatgacctgctgagcaccatggacatcagtgactgcttcattgatggaaatgaaaatggagacctgctgtgggacttcctgacagagacctgcaacttcaatgccacagcccccccagacctgcgggcagagctgggcaaggacctgcaggagcctgagttcagcgccaagaaggagggcaaggtgctcttcaacaacaccctgtccttcatcgtcatcgaggcctag

SEQ ID NO: 155306 - DNA, 381 bp, synthetic construct
  misc_feature 1..381: note = Description of Artificial Sequence: Synthetic coding sequence
  source 1..381: mol_type = other DNA
atggccagctccatgaggagcctcttcagtgaccacggcaagtatgtggagagcttccgccgcttcctgaaccacagcacagagcaccagtgcatgcaggagttcatggacaagaagctgcccggcatcatcggcagaattggagacaccaagtctgagatcaagatcctgagcattggaggcggcgctgactgcctgatccggggcagcagccgggtgctgaagaggaacagctgcttcatcctgtgcagcacccggcagaaggacaagccaggcatgagaattcatgatgagaggagcagcgagctgccctttggagctgcccggctggagagcaagagcgccttccccagcttcctggtgtccttcatcctcttctag

SEQ ID NO: 155307 - DNA, 879 bp, synthetic construct; identical to SEQ ID NO: 155305
  misc_feature 1..879: note = Description of Artificial Sequence: Synthetic coding sequence
  source 1..879: mol_type = other DNA

SEQ ID NO: 155308 - DNA, 1464 bp, synthetic construct
  misc_feature 1..1464: note = Description of Artificial Sequence: Synthetic coding sequence
  source 1..1464: mol_type = other DNA
atgagcctgcccaacagcagctgcctgctggaggacaagatgtgtgagggcaacaagaccaccatggccagcccccagctgatgcccctggtggtggtgctgagcaccatctgcctggtgacagtgggcctgaacctgctggtgctgtatgctgtgcgctctgagaggaagctgcacacagtgggcaacctgtacatcgtgtccctgtctgtggccgacctgattgtgggcgctgtggtgatgcccatgaacatcctgtacctgctgatgagcaagtggagcctgggccggcccctgtgcctcttctggctgtccatggactatgtggccagcacagccagcatcttctctgtgttcatcctgtgcatcgaccgctacagatctgtgcagcagcccctgcgctacctgaagtaccgcaccaagacccgggccagcgccaccatcctgggcgcctggttcctgtccttcctgtgggtgatccccatcctgggctggaaccacttcatgcagcagacctctgtgagaagagaagataaatgtgaaacagacttctatgatgtgacctggttcaaggtgatgacagccatcatcaacttctacctgcccaccctgctgatgctgtggttctacgccaagatctacaaggctgtgcggcagcactgccagcaccgggagctgatcaacagaagcctgcccagcttcagcgagatcaagctgcggcctgagaaccccaagggagatgccaagaagccaggcaaggagagcccctgggaggtgctgaagaggaagcccaaggatgctgggggcggctctgtgctgaagagccccagccagacccccaaggagatgaagagccctgtggtgttcagccaggaggatgaccgggaggtggacaagctgtactgcttccccctggacatcgtgcacatgcaggccgctgctgagggcagcagccgggactatgtggccgtgaacagaagccacggccagctgaagacagatgagcagggcctgaacacccatggagccagcgagatcagcgaggaccagatgctgggggacagccagagcttcagcaggacagacagcgacaccaccacagaaacagcccctgggaagggcaagctgcggagcggcagcaacacaggcctggactacatcaagttcacctggaagaggctgcggagccacagccggcagtatgtgtctggcctgcacatgaaccgggagaggaaggccgccaagcagctgggcttcatcatggccgccttcatcctgtgctggatcccctacttcatcttcttcatggtgattgccttctgcaagaactgctgcaatgagcacctgcacatgttcaccatctggctgggctacatcaacagcaccctgaaccccctcatctaccccctgtgcaatgaaaacttcaagaagaccttcaagaggatcctgcacatccgctcctag

SEQ ID NO: 155309 - DNA, 39 bp, synthetic construct; identical to SEQ ID NO: 84513
  misc_feature 1..39: note = Description of Artificial Sequence: Synthetic coding sequence
  source 1..39: mol_type = other DNA

SEQ ID NO: 155310 - DNA, 1464 bp, synthetic construct; identical to SEQ ID NO: 155308
  misc_feature 1..1464: note = Description of Artificial Sequence: Synthetic coding sequence
  source 1..1464: mol_type = other DNA

SEQ ID NO: 155311 - DNA, 1464 bp, synthetic construct; identical to SEQ ID NO: 155308
  misc_feature 1..1464: note = Description of Artificial Sequence: Synthetic coding sequence
  source 1..1464: mol_type = other DNA

SEQ ID NO: 155312 - DNA, 816 bp, synthetic construct
  misc_feature 1..816: note = Description of Artificial Sequence: Synthetic coding sequence
  source 1..816: mol_type = other DNA
atggccgccccccaggatgtgcacgtgcgcatctgcaaccaggagatcgtgaagtttgacctggaggtgaaggccctgatccaggacatccgggactgcagcggccccctgagcgccctgacagagctgaacaccaaggtgaaggagaagttccagcagctgcggcaccgcatccagcctgtgctgtaccagagggccttcatctggacagccagcaccttcttcttcaagctgacctacagcctgacagacttcagcagcacccagcacgacttcaacagccccaccacccctgtgaccttcagtgacctggagcagctggccaaggagcaggacaaggagagcgagaagcagctgctgctgcaggaggtggagaaccacaagaagcagatgctgagcaaccaggcctcctggaggaaggccaacctgacctgcaagatcgccatcgacaacctggagaaggccgagctgctgcagggcggggacctgctgcggcagaggaagaccaccaaggagagcctggcccagaccagcagcaccatcacagagagcctgatgggcatcagcaggatgatggcccagcaggtgcagcagagcgaggaggccatgcagagcctggtgaccagcagcaggaccatcctggatgccaatgaggagttcaagtccatgagcggcaccatccagctgggcaggaagctgatcaccaagtacaacagaagagagctgacagacaagctgctgatcttcctggccctggccctcttcctggccaccgtgctgtacatcgtgaagaagaggctcttccccttcctgtag

SEQ ID NO: 155313 - DNA, 1194 bp, synthetic construct
  misc_feature 1..1194: note = Description of Artificial Sequence: Synthetic coding sequence
  source 1..1194: mol_type = other DNA
atggcccccaacggcacagccagcagcttctgcctggacagcacagcctgcaagatcaccatcaccgtggtgctggccgtgctgatcctgatcaccgtggccggaaatgtggtggtgtgcctggccgtgggcctgaacagaaggctgaggaacctgaccaactgcttcatcgtgtccctggccatcacagacctgctgctgggcctgctggtgctgcccttcagcgccatctaccagctgagctgcaagtggagctttgggaaggtgttctgcaacatctacaccagcctggatgtgatgctgtgcacagccagcatcctgaacctcttcatgatcagcctggaccgctactgtgctgtgatggaccccctgcgctaccctgtgctggtgacccctgtgcgggtggccatcagcctggtgctgatctgggtgatcagcatcaccctgtccttcctgagcatccacctgggctggaacagcagaaatgagaccagcaagggcaaccacaccaccagcaagtgcaaggtgcaggtgaatgaggtgtatggcctggtggatggcctggtgaccttctacctgcccctgctgatcatgtgcatcacctactaccgcatcttcaaggtggcccgggaccaggccaagaggatcaaccacatcagctcctggaaggccgccaccatccgggagcacaaggccaccgtgaccctggccgctgtgatgggcgccttcatcatctgctggttcccctacttcaccgcctttgtgtaccggggcctgcggggagatgatgccatcaatgaggtgctggaggccatcgtgctgtggctgggctacgccaacagcgccctgaaccccatcctgtatgctgccctgaacagagacttcagaacaggctaccagcagctgttctgctgccgcctggccaacagaaacagccacaagaccagcctgcggagcaatgccagccagctgagcaggacccagagccgggagccccggcagcaggaggagaagcccctgaagctgcaggtgtggagcggcacagaggtgacagccccccagggcgccacagaccggccctggctgtgcctgcctgagtgctggagcgtggagctgacccacagcttcatccacctgttcatccacagctttgccaacatccaccccatccccaccacctgccaggagctgtag

SEQ ID NO: 155314 - DNA, 1173 bp, synthetic construct
  misc_feature 1..1173: note = Description of Artificial Sequence: Synthetic coding sequence
  source 1..1173: mol_type = other DNA
atgccagacaccaacagcaccatcaacctgagcctgagcaccagggtgaccctggccttcttcatgagcctggtggcctttgccatcatgctgggcaatgccctggtgatcctggcctttgtggtggacaagaacctgcggcacaggagcagctacttcttcctgaacctggccatcagtgacttctttgtgggcgtcatcagcatccccctgtacatcccccacaccctgtttgagtgggactttgggaaggagatctgtgtgttctggctgaccacagactacctgctgtgcacagcctctgtgtacaacatcgtgctgatctcctatgaccgctacctgtctgtgtccaatgctgtgtcctaccgcacccagcacactggagtgctgaagatcgtgaccctgatggtggccgtgtgggtgctggccttcctggtgaatggccccatgatcctggtgtctgagagctggaaggatgagggctctgaatgtgagcccggcttcttcagcgagtggtacatcctggccatcaccagcttcctggagtttgtgattcctgtgatcctggtggcctacttcaacatgaacatctactggagcctgtggaagagggaccacctgagccgctgccagagccaccctggcctgacagctgtgagcagcaacatctgtggccacagcttccggggccgcctgagcagcagaagaagcctgagcgccagcacagaggtgcctgccagcttccacagcgagcggcagaggaggaagagcagcctgatgttcagcagcaggaccaagatgaacagcaacaccatcgccagcaagatgggcagcttcagccagagcgacagcgtggccctgcaccagcgggagcacgtggagctgctgcgggcccggcggctggccaagagcctggccatcctgctgggcgtgtttgctgtgtgctgggccccctacagcctcttcaccatcgtgctgtccttctacagcagcgccaccggccccaagtctgtgtggtaccgcatcgccttctggctgcagtggttcaacagctttgtgaaccccctgctgtaccccctgtgccacaagcgcttccagaaggccttcctgaagatcttctgcatcaagaagcagcccctgcccagccagcacagccgctctgtgagcagctag

SEQ ID NO: 155315 - DNA, 909 bp, synthetic construct
  misc_feature 1..909: note = Description of Artificial Sequence: Synthetic coding sequence
  source 1..909: mol_type = other DNA
atgccagacaccaacagcaccatcaacctgagcctgagcaccagggtgaccctggccttcttcatgagcctggtggcctttgccatcatgctgggcaatgccctggtgatcctggcctttgtggtggacaagaacctgcggcacaggagcagctacttcttcctgaacctggccatcagtgacttctttgtggtgtctgagagctggaaggatgagggctctgaatgtgagcccggcttcttcagcgagtggtacatcctggccatcaccagcttcctggagtttgtgattcctgtgatcctggtggcctacttcaacatgaacatctactggagcctgtggaagagggaccacctgagccgctgccagagccaccctggcctgacagctgtgagcagcaacatctgtggccacagcttccggggccgcctgagcagcagaagaagcctgagcgccagcacagaggtgcctgccagcttccacagcgagcggcagaggaggaagagcagcctgatgttcagcagcaggaccaagatgaacagcaacaccatcgccagcaagatgggcagcttcagccagagcgacagcgtggccctgcaccagcgggagcacgtggagctgctgcgggcccggcggctggccaagagcctggccatcctgctgggcgtgtttgctgtgtgctgggccccctacagcctcttcaccatcgtgctgtccttctacagcagcgccaccggccccaagtctgtgtggtaccgcatcgccttctggctgcagtggttcaacagctttgtgaaccccctgctgtaccccctgtgccacaagcgcttccagaaggccttcctgaagatcttctgcatcaagaagcagcccctgcccagccagcacagccgctctgtgagcagctag

SEQ ID NO: 155316 - DNA, 174 bp, synthetic construct
  misc_feature 1..174: note = Description of Artificial Sequence: Synthetic coding sequence
  source 1..174: mol_type = other DNA
atgaagttctttgtgtttgccctggtgctggccctgatgatctccatgatctctgctgacagccatgagaagaggcaccacggctacagaaggaagttccacgagaagcaccacagccaccgggagttccccttctacggggactatggcagcaactacctgtatgacaactag

SEQ ID NO: 155317 - DNA, 174 bp, synthetic construct; identical to SEQ ID NO: 155316
  misc_feature 1..174: note = Description of Artificial Sequence: Synthetic coding sequence
  source 1..174: mol_type = other DNA

SEQ ID NO: 155318 - DNA, 156 bp, synthetic construct
  misc_feature 1..156: note = Description of Artificial Sequence: Synthetic coding sequence
  source 1..156: mol_type = other DNA
atgaagttctttgtgtttgccctgatcctggccctgatgctgtccatgactggagctgacagccacgccaagaggcaccacggctacaagaggaagttccacgagaagcaccacagccaccggggctaccgcagcaactacctgtatgacaactag

SEQ ID NO: 155319 - DNA, 156 bp, synthetic construct; identical to SEQ ID NO: 155318
  misc_feature 1..156: note = Description of Artificial Sequence: Synthetic coding sequence
  source 1..156: mol_type = other DNA

SEQ ID NO: 155320 - DNA, 1989 bp, synthetic construct
  misc_feature 1..1989: note = Description of Artificial Sequence: Synthetic coding sequence
  source 1..1989: mol_type = other DNA
atgatggagcctgaggagtaccgggagcggggccgggagatggtggactacatctgccagtacctgagcacagtgcgggagcggcgggtgaccccagatgtgcagcccggctacctgcgggcccagctgcctgagagcgccccagaagatcctgacagctgggacagcatctttggagacatcgagcgcatcatcatgcctggggtggtgcactggcagagcccccacatgcacgcctactacccagccctgacctcctggcccagcctgctgggggacatgctggctgatgccatcaactgcctgggcttcacctgggccagcagccctgcctgcacagagctggagatgaatgtgatggactggctggccaagatgctgggcctgcctgagcacttcctgcaccaccaccccagcagccagggcggcggcgtgctgcagagcacagtgtctgagagcaccctcatcgccctgctggccgccaggaagaacaagatcctggagatgaagaccagcgagccagatgctgatgagagctgcctgaatgcccggctggtggcctatgccagtgaccaggcccacagctctgtggagaaggccggcctcatcagcctggtgaagatgaagttcctgcctgtggatgacaacttcagcctgcggggggaggccctgcagaaggccatcgaggaggacaagcagaggggcctggtgcctgtgtttgtgtgtgccaccctgggcaccaccggggtgtgtgcctttgactgcctgtctgagctgggccccatctgtgcccgggagggcctgtggctgcacattgatgctgcctatgccggcacagccttcctgtgcccagagttccggggcttcctgaagggcattgaatatgctgacagcttcaccttcaaccccagcaagtggatgatggtgcactttgactgcaccggcttctgggtgaaggacaagtacaagctgcagcagaccttctctgtgaaccccatctacctgcggcatgccaacagcggcgtggccacagacttcatgcactggcagatccccctgagccgccgcttccgctctgtgaagctgtggtttgtgatccgcagctttggagtgaagaacctgcaggcccacgtgcgccacggcacagagatggccaagtactttgagagcctggtgagaaatgaccccagctttgagatcccagccaagaggcacctgggcctggtggtgttccggctgaagggccccaactgcctgacagaaaatgtgctgaaggagatcgccaaggccggccgcctcttcctgatcccagccaccatccaggacaagctgatcatccgcttcaccgtgaccagccagttcaccaccagagatgacatcctgcgggactggaacctgatcagagatgctgccaccctcatcctgagccagcactgcaccagccagcccagcccccgggtgggcaacctgatcagccagatccggggggcccgggcctgggcctgtggcaccagcctgcagagcgtgtctggagctggagatgatcctgtgcaggccaggaagatcatcaagcagccccagagggtgggcgccggccccatgaagagagaaaatggcctgcacctggagaccctgctggaccctgtggatgactgcttcagcgaggaggccccagatgccaccaagcacaagctgagcagcttcctgttctcctacctgtctgtgcagaccaagaagaagacagtgcgcagcctgagctgcaacagcgtgcctgtgtctgcccagaagcccctgcccacagaggcctctgtgaagaatggaggcagcagccgggtgcgcatcttcagccgcttccctgaggacatgatgatgctgaagaagagcgccttcaagaagctgatcaagttctacagcgtgcccagcttccctgagtgcagcagccagtgtggcctgcagctgccctgctgccccctgcaggccatggtgtag

SEQ ID NO: 155321 - DNA, 2100 bp, synthetic construct
  misc_feature 1..2100: note = Description of Artificial Sequence: Synthetic coding sequence
  source 1..2100: mol_type = other DNA
atgggccaccaccggccctggctgcacgcctctgtgctgtgggccggcgtggccagcctgctgctgcccccagccatgacccagcagctgcggggagatggcctgggcttcaggaacagaaacaacagcactggagtggccggcctgtctgaggaggccagcgctgagctgcggcaccacctgcacagcccccgggaccacccagatgagaacaaggatgtgtccacagaaaatggccaccacttctggagccacccagaccgggagaaggaggatgaagatgtgtccaaggagtatggccacctgctgcccggccacaggagccaggaccacaaggtgggagatgaaggagtgtctggagaggaggtgtttgctgagcacggcggccaggcccggggccaccggggccacggcagcgaggacacagaagattctgctgagcaccgccaccacctgcccagccacaggagccacagccaccaggatgaagatgaagatgaggtggtgtcctctgagcaccaccaccacatcctgcggcacggccaccggggccatgatggagaagatgatgaaggagaggaggaggaggaggaggaggaggaggaggaggaggccagcacagaatatggccaccaggcccaccgccaccggggccacggctctgaagaagatgaagatgtgtctgatggccaccaccaccacggccccagccaccgccaccagggccatgaagaagatgatgatgatgatgatgatgatgatgatgatgatgatgatgatgatgtgtccattgagtaccgccaccaggcccaccgccaccagggccacggcatcgaggaggatgaagatgtgtctgatggccaccaccaccgggaccccagccaccgccacaggagccatgaggaggatgacaatgatgatgatgatgtgtccacagaatatggccaccaggcccaccgccaccaggaccacaggaaggaggaggtggaggccgtgtctggagagcaccaccaccacgtgcctgaccaccgccaccagggccacagagatgaggaggaggatgaagatgtgtccacagagcgctggcaccagggcccccagcacgtgcaccacggcctggtggatgaggaggaggaggaggaggagatcaccgtgcagtttggccactacgtggccagccaccagccccggggccacaagagtgatgaggaggacttccaggatgagtacaagacagaggtgccccaccaccaccaccaccgggtgccccgggaggaggatgaggaggtgtctgctgagctgggccaccaggcccccagccaccggcagagccaccaggatgaggagaccggccacggccagaggggcagcatcaaggagatgagccaccaccccccaggccacacagtggtgaaggacaggagccacctgaggaaggatgacagcgaggaggagaaggagaaggaggaggaccccggcagccatgaagaagatgatgagagcagcgagcagggcgagaagggcacccaccacggcagccgggaccaggaggatgaggaggatgaggaggagggccacggcctgagcctgaaccaggaggaggaggaggaggaggacaaggaggaggaggaggaggaggaggatgaggagcggcgggaggagcgggcagaggtgggcgcccccctgagcccagaccacagcgaggaggaggaggaggaggaggagggcctggaggaggatgagccccgcttcaccatcatccccaaccccctggacagaagagaggaggccggcggggccagcagcgaggaggagagcggggaggacaccggcccccaggatgcccaggagtatggcaactaccagcccggcagcctgtgtggctactgcagcttctgcaaccgctgcacagaatgtgagagctgccactgtgatgaggagaacatgggagagcactgtgaccagtgccagcactgccagttctgctacctgtgccccctggtgtgtgaaacagtgtgtgcccctggcagctatgtggactacttcagcagcagcctgtaccaggccctggccgacatgctggagaccccagagccctag

SEQ ID NO: 155322 - DNA, 1170 bp, synthetic construct
  misc_feature 1..1170: note = Description of Artificial Sequence: Synthetic coding sequence
  source 1..1170: mol_type = other DNA
gaagatgacaatgatgatgatgatgtgtccacagaatatggccaccaggcccaccgccaccaggaccacaggaaggaggaggtggaggccgtgtctggagagcaccaccaccacgtgcctgaccaccgccaccagggccacagagatgaggaggaggatgaagatgtgtccacagagcgctggcaccagggcccccagcacgtgcaccacggcctggtggatgaggaggaggaggaggaggagatcaccgtgcagtttggccactacgtggccagccaccagccccggggccacaagagtgatgaggaggacttccaggatgagtacaagacagaggtgccccaccaccaccaccaccgggtgccccgggaggaggatgaggaggtgtctgctgagctgggccaccaggcccccagccaccggcagagccaccaggatgaggagactggacatggccagaggggcagcatcaaggagatgagccaccaccccccaggccacacagtggtgaaggacaggagccacctgaggaaggatgattctgaggaggagaaggagaaggaggaggaccccggcagccatgaggaggatgatgagagcagcgagcagggcgagaagggcacccaccacggcagccgggaccaggaggatgaagaagatgaggaggagggccacggcctgagcctgaaccaggaggaggaggaggaggaggatgaggagcggcgggaggagcgggcagaggtgggcgcccccctgagcccagaccacagcgaggaggaggaggaggaggaggagggcctggaggaggatgagccccgcttcaccatcatccccaaccccctggacagaagagaggaggccggcggggccagcagcgaggaggagagcggggaggacaccggcccccaggatgcccaggagtatggcaactaccagcccggcagcctgtgtggctactgcagcttctgcaaccgctgcacagaatgtgagagctgccactgtgatgaggagaacatgggagagcactgtgaccagtgccagcactgccagttctgctacctgtgccccctggtgtgtgaaacagtgtgtgcccctggcagctatgtggactacttcagcagcagcctgtaccaggccctggccgacatgctggagaccccagagccctag

SEQ ID NO: 155323 - DNA, 1365 bp, synthetic construct
  misc_feature 1..1365: note = Description of Artificial Sequence: Synthetic coding sequence
  source 1..1365: mol_type = other DNA
atgggccaccaccggccctggctgcacgcctctgtgctgtgggccggcgtggccagcctgctgctgcccccagccatgacccagcagctgcggggagatggcctgggcttcaggaacagaaacaaggatgtgtccacagaaaatggccaccacttctggagccacccagaccgggagaaggaggatgaagatgtgtccaaggagtatggccacctgctgcccggccacaggagccaggaccacaaggtgggagatgaaggagtgtctggagaggaggtgtttgctgagcacggcggccaggcccggggccaccggggccacggcagcgaggacacagaagattctgctgagcaccgccaccacctgcccagccacaggagccacagccaccaggatgaagatgaagatgaggtggtgtcctctgagcaccaccaccacatcctgcggcacggccaccggggccatgatggagaagatgatgaaggagaggaggaggaggaggaggaggaggaggaggaggaggccagcacagaatatggccaccaggcccaccgccaccggggccacggctctgaagaagatgaagatgtgtctgatggccaccaccaccacggccccagccaccgccaccagggccatgaagaagatgatgatgatgatgatgatgatgatgatgatgatgatgatgatgatgtgtccattgagtaccgccaccaggcccaccgccaccagggccacggcatcgaggaggatgaagatgtgtctgatggccaccaccaccgggaccccagccaccgccacaggagccatgaggaggatgacaatgatgatgatgatgtgtccacagaatatggccaccaggcccaccgccaccaggaccacaggaaggaggaggtggaggccgtgtctggagagcaccaccaccacgtgcctgaccaccgccaccagggccacagagatgaggaggaggatgaagatgtgtccacagagcgctggcaccagggcccccagcacgtgcaccacggcctggtggatgaggaggaggaggaggaggagatcaccgtgcagtttggccactacgtggccagccaccagccccggggccacaagagtgatgaggaggacttccaggatgagtacaagacagaggtgccccaccaccaccaccaccgggtgccccgggaggaggatgaggaggtgtctgctgagctgggccaccaggcccccagccaccggcagagccaccaggatgaggagaccggccacggccagaggggcagcatcaaggagatgagccaccaccccccaggccacacagtggtgaaggacaggagccacctgaggaaggatgacagcgaggagtag

SEQ ID NO: 155324 - DNA, 381 bp, synthetic construct
  misc_feature 1..381: note = Description of Artificial Sequence: Synthetic coding sequence
  source 1..381: mol_type = other DNA
atggctgatgaaattgccaaggcccaggtggcccggcctggaggagacaccatctttgggaagatcatcaggaaggagatcccagccaagatcatctttgaagatgaccgctgcctggccttccatgacatcagcccccaggcccccacccacttcctggtgatccccaagaagcacatcagccagatctctgtggctgaagatgatgatgagagcctgctgggccacctgatgattgtgggcaagaagtgtgccgctgacctgggcctgaacaagggctacaggatggtggtgaatgaaggaagtgatggcggccagagcgtgtaccacgtgcacctgcacgtgctgggcggccggcagatgcactggcccccaggatag

SEQ ID NO: 155325 - DNA, 492 bp, synthetic construct
  misc_feature 1..492: note = Description of Artificial Sequence: Synthetic coding sequence
  source 1..492: mol_type = other DNA
atggctgctgctgtggtgctggccgccggcctgcgggccgccaggagagctgtggccgccactggagtgcggggcggccaggtgagaggagctgctggggtgacagatggaaatgaggtggccaaggcccagcaggccacccctgggggcgccgcccccaccatcttcagccgcatcctggacaagagcctgcctgctgacatcctgtatgaggaccagcagtgcctggtgttcagagatgtggccccccaggcccctgtgcacttcctggtgatccccaagaagcccatcccccgcatcagccaggccgaggaggaggaccagcagctgctgggccacctgctgctggtggccaagcagacagccaaggccgagggcctgggagatggctaccgcctggtgatcaatgatggcaagctgggcgcccagagcgtgtaccacctgcacatccacgtgctgggcggccggcagctgcagtggcccccaggatag

SEQ ID NO: 155326 - DNA, 615 bp, synthetic construct
  misc_feature 1..615: note = Description of Artificial Sequence: Synthetic coding sequence
  source 1..615: mol_type = other DNA
atggccaaggtgcaggtgaacaacgtggtggtgctggacaaccccagccccttctacaaccccttccagtttgagatcacctttgaatgtattgaggacctgtctgaggacctggagtggaagatcatctacgtgggcagcgctgagagcgaggagtatgaccaggtgctggacagcgtgctggtgggccctgtgcctgctggccgccacatgtttgtgttccaggctgatgcccccaaccctggcctcatcccagatgctgatgctgtgggcgtgacagtggtgctgatcacctgcacctaccggggccaggagttcatccgggtgggctactacgtgaacaatgagtacacagaaacagagctgcgggagaacccccctgtgaagccagacttcagcaagctgcagaggaacatcctggccagcaacccccgggtgacccgcttccacatcaactgggaggacaacacagagaagctggaggatgctgagagcagcaaccccaacctgcagagcctgctgagcacagatgccctgcccagcgccagcaagggctggagcaccagcgagaacagcctgaatgtgatgctggagagccacatggactgcatgtag

SEQ ID NO: 155327 - DNA, 1329 bp, synthetic construct
  misc_feature 1..1329: note = Description of Artificial Sequence: Synthetic coding sequence
  source 1..1329: mol_type = other DNA
atggccggggagggggaccagcaggatgctgcccacaacatgggcaaccacctgcccctgctgcctgctgagagcgaggaggaggatgagatggaggtggaggaccaggacagcaaggaggccaagaagcccaacatcatcaactttgacaccagcctgcccaccagccacacctacctgggcgctgacatggaggagttccacggccgcaccctgcatgatgatgacagctgccaggtgattcctgtgctgccccaggtgatgatgatcctgatccctggccagaccctgcccctgcagctgttccacccccaggaggtgtccatggtgaggaacctgatccagaaggacaggacctttgctgtgctggcctacagcaatgtgcaggagcgggaggcccagtttggcaccacagctgagatctatgcctaccgggaggagcaggactttggcatcgagatcgtgaaggtgaaggccatcggccggcagcgcttcaaggtgctggagctgcggacccagagtgatggcatccagcaggccaaggtgcagatcctgcctgaatgtgtgctgcccagcaccatgtctgctgtgcagctggagagcctgaacaagtgccagatcttccccagcaagcctgtgtcccgggaggaccagtgcagctacaagtggtggcagaagtaccagaagaggaagttccactgtgccaacctgacctcctggccccgctggctgtacagcctgtatgatgctgagaccctgatggaccgcatcaagaagcagctgcgggagtgggatgagaacctgaaggatgacagcctgcccagcaaccccatcgacttctcctacagagtggccgcctgcctgcccattgatgatgtgctgcgcatccagctgctgaagattggcagcgccatccagaggctgcgctgtgagctggacatcatgaacaagtgcaccagcctgtgctgcaagcagtgccaggagacagagatcaccaccaagaatgagatcttcagcctgagcctgtgtggccccatggccgcctacgtgaacccccacggctacgtgcatgagaccctgactgtgtacaaggcctgcaacctgaacctgattggccggcccagcacagagcacagctggttccctggctacgcctggacagtggcccagtgcaagatctgtgccagccacatcggctggaagttcaccgccaccaagaaggacatgagcccccagaagttctggggcctgaccaggtctgccctgctgcccaccatcccagacacagaagatgagatcagcccagacaaggtgatcctgtgcctgtag

SEQ ID NO: 155328 - DNA, 1308 bp, synthetic construct
  misc_feature 1..1308: note = Description of Artificial Sequence: Synthetic coding sequence
  source 1..1308: mol_type = other DNA
atggccgagagagctgccctggaggagctggtgaagctgcagggcgagcgggtgcggggcctgaagcagcagaaggccagcgctgagctgattgaggaggaggtggccaagctgctgaagctgaaggcccagctgggcccagatgagagcaagcagaagtttgtgctgaagacccccaagggcacccgggactacagcccccggcagatggctgtgcgggagaaggtgtttgatgtgatcatccgctgcttcaagagacatggagctgaggtgattgacacccctgtgtttgagctgaaggactttgatattgctggcaactttgaccccatgatcccagatgctgagtgcctgaagatcatgtgtgagatcctgagcagcctgcagatcggggacttcctggtgaaggtgaatgaccggcgcatcctggatggcatgtttgccatctgtggggtgtctgacagcaagttccgcaccatctgcagctctgtggacaagctggacaaggtgtcctgggaggaggtgaagaatgagatggtgggggagaagggcctggcccctgaggtggccgacagaattggagactatgtgcagcagcacggcggcgtgtccctggtggagcagctgctgcaggaccccaagctgagccagaacaagcaggccctggagggcctgggggacctgaagctgctgtttgagtacctgaccctgtttggaattgatgacaagatcagctttgacctgagcctggcccggggcctggactactacacaggagtcatctatgaggccgtgctgctgcagaccccagcccaggccggggaggagcccctgggcgtgggctctgtggccgccggcggccgctatgatggcctggtgggcatgtttgaccccaagggcaggaaggtgccctgtgtgggcctgagcattggagtggagcgcatcttcagcatcgtggagcagaggctggaggccctggaggagaagatccgcaccacagagacccaggtgctggtggccagcgcccagaagaagctgctggaggagcggctgaagctggtgtctgagctgtgggatgctggcatcaaggccgagctgctgtacaagaagaaccccaagctgctgaaccagctgcagtactgtgaggaggccggcatccccctggtggccatcatcggggagcaggagctgaaggatggagtcatcaagctgcggtctgtgaccagccgggaggaggtggatgtgcggcgggaggacctggtggaggagatcaagagaagaacaggccagcccctgtgcatctgctag

SEQ ID NO: 155329 - DNA, 1188 bp, synthetic construct
  misc_feature 1..1188: note = Description of Artificial Sequence: Synthetic coding sequence
  source 1..1188: mol_type = other DNA
atggccgagagagctgccctggaggagctggtgaagctgcagggcgagcgggtgcggggcctgaagcagcagaaggccagcgctgagctgattgaggaggaggtggccaagctgctgaagctgaaggcccagctgggcccagatgagagcaagcagaagtttgtgctgaagacccccaaggactttgatattgctggcaactttgaccccatgatcccagatgctgagtgcctgaagatcatgtgtgagatcctgagcagcctgcagatcggggacttcctggtgaaggtgaatgaccggcgcatcctggatggcatgtttgccatctgtggggtgtctgacagcaagttccgcaccatctgcagctctgtggacaagctggacaaggtgtcctgggaggaggtgaagaatgagatggtgggggagaagggcctggcccctgaggtggccgacagaattggagactatgtgcagcagcacggcggcgtgtccctggtggagcagctgctgcaggaccccaagctgagccagaacaagcaggccctggagggcctgggggacctgaagctgctgtttgagtacctgaccctgtttggaattgatgacaagatcagctttgacctgagcctggcccggggcctggactactacacaggagtcatctatgaggccgtgctgctgcagaccccagcccaggccggggaggagcccctgggcgtgggctctgtggccgccggcggccgctatgatggcctggtgggcatgtttgaccccaagggcaggaaggtgccctgtgtgggcctgagcattggagtggagcgcatcttcagcatcgtggagcagaggctggaggccctggaggagaagatccgcaccacagagacccaggtgctggtggccagcgcccagaagaagctgctggaggagcggctgaagctggtgtctgagctgtgggatgctggcatcaaggccgagctgctgtacaagaagaaccccaagctgctgaaccagctgcagtactgtgaggaggccggcatccccctggtggccatcatcggggagcaggagctgaaggatggagtcatcaagctgcggtctgtgaccagccgggaggaggtggatgtgcggcgggaggacctggtggaggagatcaagagaagaacaggccagcccctgtgcatctgctag

SEQ ID NO: 155330 - DNA, 1410 bp, synthetic construct
  misc_feature 1..1410: note = Description of Artificial Sequence: Synthetic coding sequence
  source 1..1410: mol_type = other DNA
atggccgagagagctgccctggaggagctggtgaagctgcagggcgagcgggtgcggggcctgaagcagcagaaggccagcgctgagctgattgaggaggaggtggccaagctgctgaagctgaaggcccagctgggcccagatgagagcaagcagaagtttgtgctgaagacccccaaggagaccctgatgggcaagtatggagaggacagcaagctgatctatgacctgaaggaccagggcggggagctgctgagcctgcgctatgacctgactgtgccctttgcccgctacctggccatgaacaagctgaccaacatcaagcgctaccacatcgccaaggtgtacagaagagacaacccagccatgacccggggccgctaccgggagttctaccagtgtgactttgatattgctggcaactttgaccccatgatcccagatgctgagtgcctgaagatcatgtgtgagatcctgagcagcctgcagatcggggacttcctggtgaaggtgaatgaccggcgcatcctggatggcatgtttgccatctgtggggtgtctgacagcaagttccgcaccatctgcagctctgtggacaagctggacaaggtgtcctgggaggaggtgaagaatgagatggtgggggagaagggcctggcccctgaggtggccgacagaattggagactatgtgcagcagcacggcggcgtgtccctggtggagcagctgctgcaggaccccaagctgagccagaacaagcaggccctggagggcctgggggacctgaagctgctgtttgagtacctgaccctgtttggaattgatgacaagatcagctttgacctgagcctggcccggggcctggactactacacaggagtcatctatgaggccgtgctgctgcagaccccagcccaggccggggaggagcccctgggcgtgggctctgtggccgccggcggccgctatgatggcctggtgggcatgtttgaccccaagggcaggaaggtgccctgtgtgggcctgagcattggagtggagcgcatcttcagcatcgtggagcagaggctggaggccctggaggagaagatccgcaccacagagacccaggtgctggtggccagcgcccagaagaagctgctggaggagcggctgaagctggtgtctgagctgtgggatgctggcatcaaggccgagctgctgtacaagaagaaccccaagctgctgaaccagctgcagtactgtgaggaggccggcatccccctggtggccatcatcggggagcaggagctgaaggatggagtcatcaagctgcggtctgtgaccagccgggaggaggtggatgtgcggcgggaggacctggtggaggagatcaagagaagaacaggccagcccctgtgcatctgctag

SEQ ID NO: 155331 - DNA, 945 bp, synthetic construct
  misc_feature 1..945: note = Description of Artificial Sequence: Synthetic coding sequence
  source 1..945: mol_type = other DNA
atgacccggggccgctaccgggagttctaccagtgtgactttgatattgctggcaactttgaccccatgatcccagatgctgagtgcctgaagatcatgtgtgagatcctgagcagcctgcagatcggggacttcctggtgaaggtgtcctgggaggaggtgaagaatgagatggtgggggagaagggcctggcccctgaggtggccgaccgcatcggggactatgtgcagcagcacggcggcgtgtccctggtggagcagctgctgcaggaccccaagctgagccagaacaagcaggccctggagggcctgggggacctgaagctgctgtttgagtacctgaccctgtttggaattgatgacaagatcagctttgacctgagcctggcccggggcctggactactacacaggagtcatctatgaagctgtgctgctgcagaccccagcccaggccggggaggagcccctgggcgtgggctctgtggccgccggcggccgctatgatggcctggtgggcatgtttgaccccaagggcaggaaggtgccctgtgtgggcctgagcattggagtggagcgcatcttcagcatcgtggagcagaggctggaggccctggaggagaagatccgcaccacagagacccaggtgctggtggccagcgcccagaagaagctgctggaggagcggctgaagctggtgtctgagctgtgggatgctggcatcaaggccgagctgctgtacaagaagaaccccaagctgctgaaccagctgcagtactgtgaggaggccggcatccccctggtggccatcattggagagcaggagctgaaggatggagtcatcaagctgcggtctgtgaccagccgggaggaggtggatgtgagaagagaggacctggtggaggagatcaagagaagaacaggccagcccctgtgcatctgctag

SEQ ID NO: 155332 - DNA, 1530 bp, synthetic construct
  misc_feature 1..1530: note = Description of Artificial Sequence: Synthetic coding sequence
  source 1..1530: mol_type = other DNA
atggccgagagagctgccctggaggagctggtgaagctgcagggcgagcgggtgcggggcctgaagcagcagaaggccagcgctgagctgattgaggaggaggtggccaagctgctgaagctgaaggcccagctgggcccagatgagagcaagcagaagtttgtgctgaagacccccaagggcacccgggactacagcccccggcagatggctgtgcgggagaaggtgtttgatgtgatcatccgctgcttcaagagacatggagctgaggtgattgacacccctgtgtttgagctgaaggagaccctgatgggcaagtatggagaggacagcaagctgatctatgacctgaaggaccagggcggggagctgctgagcctgcgctatgacctgactgtgccctttgcccgctacctggccatgaacaagctgaccaacatcaagcgctaccacatcgccaaggtgtacagaagagacaacccagccatgacccggggccgctaccgggagttctaccagtgtgactttgatattgctggcaactttgaccccatgatcccagatgctgagtgcctgaagatcatgtgtgagatcctgagcagcctgcagatcggggacttcctggtgaaggtgaatgaccggcgcatcctggatggcatgtttgccatctgtggggtgtctgacagcaagttccgcaccatctgcagctctgtggacaagctggacaaggtgtcctgggaggaggtgaagaatgagatggtgggggagaagggcctggcccctgaggtggccgacagaattggagactatgtgcagcagcacggcggcgtgtccctggtggagcagctgctgcaggaccccaagctgagccagaacaagcaggccctggagggcctgggggacctgaagctgctgtttgagtacctgaccctgtttggaattgatgacaagatcagctttgacctgagcctggcccggggcctggactactacacaggagtcatctatgaggccgtgctgctgcagaccccagcccaggccggggaggagcccctgggcgtgggctctgtggccgccggcggccgctatgatggcctggtgggcatgtttgaccccaagggcaggaaggtgccctgtgtgggcctgagcattggagtggagcgcatcttcagcatcgtggagcagaggctggaggccctggaggagaagatccgcaccacagagacccaggtgctggtggccagcgcccagaagaagctgctggaggagcggctgaagctggtgtctgagctgtgggatgctggcatcaaggccgagctgctgtacaagaagaaccccaagctgctgaaccagctgcagtactgtgaggaggccggcatccccctggtggccatcatcggggagcaggagctgaaggatggagtcatcaagctgcggtctgtgaccagccgggaggaggtggatgtgcggcgggaggacctggtggaggagatcaagagaagaacaggccagcccctgtgcatctgctag

SEQ ID NO: 155333 - DNA, 1323 bp, synthetic construct
  misc_feature 1..1323: note = Description of Artificial Sequence: Synthetic coding sequence
  source 1..1323: mol_type = other DNA
atggctgtgcgggagaaggtgtttgatgtgatcatccgctgcttcaagagacatggagctgaggtgattgacacccctgtgtttgagctgaaggagaccctgatgggcaagtacggggaggacagcaagctgatctatgacctgaaggaccagggcggggagctgctgagcctgcgctatgacctgactgtgccctttgcccgctacctggccatgaacaagctgaccaacatcaagcgctaccacatcgccaaggtgtaccgccgggacaacccagccatgacccggggccgctaccgggagttctaccagtgtgactttgatattgctggcaactttgaccccatgatcccagatgctgaatgtctgaagatcatgtgtgagatcctgagcagcctgcagattggagacttcctggtgaaggtgaatgaccggcgcatcctggatggcatgtttgccatctgtggggtgtctgacagcaagttccgcaccatctgcagctctgtggacaagctggacaaggtgtcctgggaggaggtgaagaatgagatggtgggggagaagggcctggcccctgaggtggccgaccgcatcggggactatgtgcagcagcacggcggcgtgtccctggtggagcagctgctgcaggaccccaagctgagccagaacaagcaggccctggagggcctgggggacctgaagctgctgtttgagtacctgaccctgtttggaattgatgacaagatcagctttgacctgagcctggcccggggcctggactactacacaggagtcatctatgaagctgtgctgctgcagaccccagcccaggccggggaggagcccctgggcgtgggctctgtggccgccggcggccgctatgatggcctggtgggcatgtttgaccccaagggcaggaaggtgccctgtgtgggcctgagcattggagtggagcgcatcttcagcatcgtggagcagaggctggaggccctggaggagaagatccgcaccacagagacccaggtgctggtggccagcgcccagaagaagctgctggaggagcggctgaagctggtgtctgagctgtgggatgctggcatcaaggccgagctgctgtacaagaagaaccccaagctgctgaaccagctgcagtactgtgaggaggccggcatccccctggtggccatcattggagagcaggagctgaaggatggagtcatcaagctgcggtctgtgaccagccgggaggaggtggatgtgagaagagaggacctggtggaggagatcaagagaagaacaggccagcccctgtgcatctgctag

SEQ ID NO: 155334 - DNA, 867 bp, synthetic construct
  misc_feature 1..867: note = Description of Artificial Sequence: Synthetic coding sequence
  source 1..867: mol_type = other DNA
atggccgagagagctgccctggaggagctggtgaagctgcagggcgagcgggtgcggggcctgaagcagcagaaggccagcgctgagctgattgaggaggaggtggccaagctgctgaagctgaaggcccagctgggcccagatgagagcaagcagaagtttgtgctgaagacccccaagggcacccgggactacagcccccggcagatggctgtgcgggagaaggtgtttgatgtgatcatccgctgcttcaagagacatggagctgaggtgattgacacccctgtgtttgagctgaaggtgaatgaccggcgcatcctggatggcatgtttgccatctgtggggtgtctgacagcaagttccgcaccatctgcagctctgtggacaagctggacaaggtgtcctgggaggaggtgaagaatgagatggtgggggagaagggcctggcccctgaggtggccgacagaattggagactatgtgcagcagcacggcggcgtgtccctggtggagcagctgctgcaggaccccaagctgagccagaacaagcaggccctggagggcctgggggacctgaagctgctgtttgagtacctgaccctgtttggaattgatgacaagatcagctttgacctgagcctggcccggggcctggactactacacaggagtcatctatgaggccgtgctgctgcagaccccagcccaggccggggaggagcccctgggcgtgggctctgtggccgccggcggccgctatgatggcctggtgggcatgtttgaccccaagggcaggaaggtgccctgtgtgggcctgagcattggagtggagcgcatcttcagcatcgtggagcagaggctggagtag

SEQ ID NO: 155335 - DNA, 1350 bp, synthetic construct
  misc_feature 1..1350: note = Description of Artificial Sequence: Synthetic coding sequence
  source 1..1350: mol_type = other DNA
atggccgagagagctgccctggaggagctggtgaagctgcagggcgagcgggtgcggggcctgaagcagcagaaggccagcgctgagctgattgaggaggaggtggccaagctgctgaagctgaaggcccagctgggcccagatgagagcaagcagaagtttgtgctgaagacccccaaggagaccctgatgggcaagtatggagaggacagcaagctgatctatgacctgaaggaccagggcggggagctgctgagcctgcgctatgacctgactgtgccctttgcccgctacctggccatgaacaagctgaccaacatcaagcgctaccacatcgccaaggactttgatattgctggcaactttgaccccatgatcccagatgctgagtgcctgaagatcatgtgtgagatcctgagcagcctgcagatcggggacttcctggtgaaggtgaatgaccggcgcatcctggatggcatgtttgccatctgtggggtgtctgacagcaagttccgcaccatctgcagctctgtggacaagctggacaaggtgtcctgggaggaggtgaagaatgagatggtgggggagaagggcctggcccctgaggtggccgacagaattggagactatgtgcagcagcacggcggcgtgtccctggtggagcagctgctgcaggaccccaagctgagccagaacaagcaggccctggagggcctgggggacctgaagctgctgtttgagtacctgaccctgtttggaattgatgacaagatcagctttgacctgagcctggcccggggcctggactactacacaggagtcatctatgaggccgtgctgctgcagaccccagcccaggccggggaggagcccctgggcgtgggctctgtggccgccggcggccgctatgatggcctggtgggcatgtttgaccccaagggcaggaaggtgccctgtgtgggcctgagcattggagtggagcgcatcttcagcatcgtggagcagaggctggaggccctggaggagaagatccgcaccacagagacccaggtgctggtggccagcgcccagaagaagctgctggaggagcggctgaagctggtgtctgagctgtgggatgctggcatcaaggccgagctgctgtacaagaagaaccccaagctgctgaaccagctgcagtactgtgaggaggccggcatccccctggtggccatcatcggggagcaggagctgaaggatggagtcatcaagctgcggtctgtgaccagccgggaggaggtggatgtgcggcgggaggacctggtggaggagatcaagagaagaacaggccagcccctgtgcatctgctag

SEQ ID NO: 155336 - DNA, 1470 bp, synthetic construct
  misc_feature 1..1470: note = Description of Artificial Sequence: Synthetic coding sequence
  source 1..1470: mol_type = other DNA
atggccgagagagctgccctggaggagctggtgaagctgcagggcgagcgggtgcggggcctgaagcagcagaaggccagcgctgagctgattgaggaggaggtggccaagctgctgaagctgaaggcccagctgggcccagatgagagcaagcagaagtttgtgctgaagacccccaagggcacccgggactacagcccccggcagatggctgtgcgggagaaggtgtttgatgtgatcatccgctgcttcaagagacatggagctgaggtgattgacacccctgtgtttgagctgaaggagaccctgatgggcaagtatggagaggacagcaagctgatctatgacctgaaggaccagggcggggagctgctgagcctgcgctatgacctgactgtgccctttgcccgctacctggccatgaacaagctgaccaacatcaagcgctaccacatcgccaaggactttgatattgctggcaactttgaccccatgatcccagatgctgagtgcctgaagatcatgtgtgagatcctgagcagcctgcagatcggggacttcctggtgaaggtgaatgaccggcgcatcctggatggcatgtttgccatctgtggggtgtctgacagcaagttccgcaccatctgcagctctgtggacaagctggacaaggtgtcctgggaggaggtgaagaatgagatggtgggggagaagggcctggcccctgaggtggccgacagaattggagactatgtgcagcagcacggcggcgtgtccctggtggagcagctgctgcaggaccccaagctgagccagaacaagcaggccctggagggcctgggggacctgaagctgctgtttgagtacctgaccctgtttggaattgatgacaagatcagctttgacctgagcctggcccggggcctggactactacacaggagtcatctatgaggccgtgctgctgcagaccccagcccaggccggggaggagcccctgggcgtgggctctgtggccgccggcggccgctatgatggcctggtgggcatgtttgaccccaagggcaggaaggtgccctgtgtgggcctgagcattggagtggagcgcatcttcagcatcgtggagcagaggctggaggccctggaggagaagatccgcaccacagagacccaggtgctggtggccagcgcccagaagaagctgctggaggagcggctgaagctggtgtctgagctgtgggatgctggcatcaaggccgagctgctgtacaagaagaaccccaagctgctgaaccagctgcagtactgtgaggaggccggcatccccctggtggccatcatcggggagcaggagctgaaggatggagtcatcaagctgcggtctgtgaccagccgggaggaggtggatgtgcggcgggaggacctggtggaggagatcaagagaagaacaggccagcccctgtgcatctgctag

SEQ ID NO: 155337 - DNA, 1017 bp, synthetic construct
  misc_feature 1..1017: note = Description of Artificial Sequence: Synthetic coding sequence
  source 1..1017: mol_type = other DNA
atgatggccatgaacagcaagcagcccttcggcatgcaccctgtgctgcaggagcccaagttcagcagcctgcacagcggcagcgaggccatgagaagagtgtgcctgcctgccccccagctgcagggcaacatcttcggcagctttgatgagagcctgctggcccgggcagaggccctggccgctgtggacatcgtgagccacggcaagaaccaccccttcaagccagatgccacctaccacaccatgagctctgtgccctgcaccagcaccagcagcacagtgcccatcagccaccctgctgccctgaccagccacccccaccacgctgtgcaccagggcctggagggggacctgctggagcacatcagccccaccctgtctgtgtctggcctgggcgcccctgagcacagcgtgatgcctgcccagatccacccccaccacctgggcgccatgggccacctgcaccaggccatgggcatgagccacccccacacagtggccccccacagcgccatgcctgcctgcctgagtgatgtggagagtgacccccgggagctggaggcctttgctgagcgcttcaagcagaggcgcatcaagctgggcgtgacccaggctgatgtgggcgccgccctggccaacctgaagatccctggggtgggcagcctgagccagagcaccatctgccgctttgagagcctgaccctgagccacaacaacatgattgccctgaagcctgtgctgcaggcctggctggaggaggccgaggccgcctaccgggagaagaacagcaagccagagctgttcaacggcagcgagaggaagaggaagaggaccagcattgctgcccctgagaagaggagcctggaggcctactttgccatccagccccggcccagcagcgagaagattgctgccatcgccgagaagctggacctgaagaagaatgtggtgcgggtgtggttctgcaaccagaggcagaagcagaagaggatgaagtacagcgctgtgcactag

SEQ ID NO: 155338 - DNA, 1038 bp, synthetic construct
  misc_feature 1..1038: note = Description of Artificial Sequence: Synthetic coding sequence
  source 1..1038: mol_type = other DNA
atgaccctgctggaggtgccctttgcccgctacctggccatgaacaaggtgaagaagatgaagcgctaccacgtgggcaaggtgtggaggcgggagagccccaccatcgtgcagggccgctaccgggagttctgccagtgtgactttgatattgctggccagtttgaccccatgatcccagatgctgaatgtctgaagatcatgtgtgagatcctgagcggcctgcagctgggggacttcctgatcaagatggcctggaaggatgtgagacatgagatggtggtgaagaagggcctggcccctgaggtggccgacagaattggagactatgtgcagtgccacggcggcgtgtccctggtggagcagatgttccaggacccccggctgagccagaacaagcaggccctggagggcctgggggacctgaagctgctgtttgagtacctgaccctgtttggaattgctgacaagatcagctttgacctgagcctggcccggggcctggactactacacaggagtcatctatgaggccgtgctgctgcagacccccacccaggccggggaggagcccctgaatgtgggctctgtggccgccggcggccgctatgatggcctggtgggcatgtttgaccccaagggccacaaggtgccctgtgtgggcctgagcattggagtggagcgcatcttctacatcgtggagcagaggatgaagaccaagggggagaaggtgaggaccacagagacccaggtgtttgtggccaccccccagaagaacttcctgcaggagcggctgaagctgattgctgagctgtgggacagcggcatcaaggccgagatgctgtacaagaacaaccccaagctgctgacccagctgcactactgtgagagcacaggcatccccctggtggtgatcatcggggagcaggagctgaaggagggcgtcatcaagatccgctctgtggccagccgggaggaggtggccatcaagcgggagaactttgtggccgagatccagaagaggctgtctgagagctag

SEQ ID NO: 155339 - DNA, 1179 bp, synthetic construct
  misc_feature 1..1179: note = Description of Artificial Sequence: Synthetic coding sequence
  source 1..1179: mol_type = other DNA
atgcccctgctgggcctgctgccccggcgggcctgggccagcctgctgagccagctgctgcggcccccctgtgccagctgcaccggggctgtgcgctgccagagccaggtggccgaggccgtgctgaccagccagctgaaggcccaccaggagaagcccaacttcatcatcaagacccccaaggactttgatattgctggccagtttgaccccatgatcccagatgctgaatgtctgaagatcatgtgtgagatcctgagcggcctgcagctgggggacttcctgatcaaggtgaatgacagaagaattgtggatggcatgtttgctgtgtgtggggtgcctgagagcaagttccgggccatctgcagcagcattgacaagctggacaagatggcctggaaggatgtgagacatgagatggtggtgaagaagggcctggcccctgaggtggccgaccgcatcggggactatgtgcagtgccacggcggcgtgtccctggtggagcagatgttccaggacccccggctgagccagaacaagcaggccctggagggcctgggggacctgaagctgctgtttgagtacctgaccctgtttggaattgctgacaagatcagctttgacctgagcctggcccggggcctggactactacacaggagtcatctatgaagctgtgctgctgcagacccccacccaggccggggaggagcccctgaatgtgggctctgtggccgccggcggccgctatgatggcctggtgggcatgtttgaccccaagggccacaaggtgccctgtgtgggcctgagcattggagtggagcgcatcttctacatcgtggagcagaggatgaagaccaagggggagaaggtgaggaccacagagacccaggtgtttgtggccaccccccagaagaacttcctgcaggagcggctgaagctgattgctgagctgtgggacagcggcatcaaggccgagatgctgtacaagaacaaccccaagctgctgacccagctgcactactgtgagagcacaggcatccccctggtggtgatcattggagagcaggagctgaaggagggcgtcatcaagatccgctctgtggccagccgggaggaggtggccatcaagagagaaaattttgtggccgagatccagaagaggctgtctgagagctag

SEQ ID NO: 155340 - DNA, 1401 bp, synthetic construct
  misc_feature 1..1401: note = Description of Artificial Sequence: Synthetic coding sequence
  source 1..1401: mol_type = other DNA
atgcccctgctgggcctgctgccccggcgggcctgggccagcctgctgagccagctgctgcggcccccctgtgccagctgcaccggggctgtgcgctgccagagccaggtggccgaggccgtgctgaccagccagctgaaggcccaccaggagaagcccaacttcatcatcaagacccccaaggagaccctgacagagaagtacggggaggacagcggcctgatgtatgacctgaaggaccagggcggggagctgctgagcctgcgctatgacctgactgtgccctttgcccgctacctggccatgaacaaggtgaagaagatgaagcgctaccacgtgggcaaggtgtggaggcgggagagccccaccatcgtgcagggccgctaccgggagttctgccagtgtgactttgatattgctggccagtttgaccccatgatcccagatgctgaatgtctgaagatcatgtgtgagatcctgagcggcctgcagctgggggacttcctgatcaaggtgaatgacagaagaattgtggatggcatgtttgctgtgtgtggggtgcctgagagcaagttccgggccatctgcagcagcattgacaagctggacaagatggcctggaaggatgtgagacatgagatggtggtgaagaagggcctggcccctgaggtggccgaccgcatcggggactatgtgcagtgccacggcggcgtgtccctggtggagcagatgttccaggacccccggctgagccagaacaagcaggccctggagggcctgggggacctgaagctgctgtttgagtacctgaccctgtttggaattgctgacaagatcagctttgacctgagcctggcccggggcctggactactacacaggagtcatctatgaagctgtgctgctgcagacccccacccaggccggggaggagcccctgaatgtgggctctgtggccgccggcggccgctatgatggcctggtgggcatgtttgaccccaagggccacaaggtgccctgtgtgggcctgagcattggagtggagcgcatcttctacatcgtggagcagaggatgaagaccaagggggagaaggtgaggaccacagagacccaggtgtttgtggccaccccccagaagaacttcctgcaggagcggctgaagctgattgctgagctgtgggacagcggcatcaaggccgagatgctgtacaagaacaaccccaagctgctgacccagctgcactactgtgagagcacaggcatccccctggtggtgatcattggagagcaggagctgaaggagggcgtcatcaagatccgctctgtggccagccgggaggaggtggccatcaagagagaaaattttgtggccgagatccagaagaggctgtctgagagctag

SEQ ID NO: 155341 - DNA, 1005 bp, synthetic construct
  misc_feature 1..1005: note = Description of Artificial Sequence: Synthetic coding sequence
  source 1..1005: mol_type = other DNA
atgcccctgctgggcctgctgccccggcgggcctgggccagcctgctgagccagctgctgcggcccccctgtgccagctgcaccggggctgtgcgctgccagagccaggactttgatattgctggccagtttgaccccatgatcccagatgctgagtgcctgaagatcatgtgtgagatcctgagcggcctgcagctgggggacttcctgatcaagatggcctggaaggatgtgagacatgagatggtggtgaagaagggcctggcccctgaggtggccgaccgcatcggggactatgtgcagtgccacggcggcgtgtccctggtggagcagatgttccaggacccccggctgagccagaacaagcaggccctggagggcctgggggacctgaagctgctgtttgagtacctgaccctgtttggaattgctgacaagatcagctttgacctgagcctggcccggggcctggactactacacaggagtcatctatgaagctgtgctgctgcagacccccacccaggccggggaggagcccctgaatgtgggctctgtggccgccggcggccgctatgatggcctggtgggcatgtttgaccccaagggccacaaggtgccctgtgtgggcctgagcattggagtggagcgcatcttctacatcgtggagcagaggatgaagaccaagggggagaaggtgaggaccacagagacccaggtgtttgtggccaccccccagaagaacttcctgcaggagcggctgaagctgattgctgagctgtgggacagcggcatcaaggccgagatgctgtacaagaacaaccccaagctgctgacccagctgcactactgtgagagcacaggcatccccctggtggtgatcattggagagcaggagctgaaggagggcgtcatcaagatccgctctgtggccagccgggaggaggtggccatcaagagagaaaattttgtggccgagatccagaagaggctgtctgagagctag

SEQ ID NO: 155342 - DNA, 1446 bp, synthetic construct
  misc_feature 1..1446: note = Description of Artificial Sequence: Synthetic coding sequence
  source 1..1446: mol_type = other DNA
atgcccctgctgggcctgctgccccggcgggcctgggccagcctgctgagccagctgctgcggcccccctgtgccagctgcaccggggctgtgcgctgccagagccagggcacccgggacctgagcccccagcacatggtggtgcgggagaagatcctggacctggtgatcagctgcttcaagagacatggagccaagggcatggacaccccagcctttgagctgaaggagaccctgacagagaagtatggagaagattctggcctgatgtatgacctgaaggaccagggcggggagctgctgagcctgcgctatgacctgactgtgccctttgcccgctacctggccatgaacaaggtgaagaagatgaagcgctaccacgtgggcaaggtgtggaggcgggagagccccaccatcgtgcagggccgctaccgggagttctgccagtgtgactttgatattgctggccagtttgaccccatgatcccagatgctgagtgcctgaagatcatgtgtgagatcctgagcggcctgcagctgggggacttcctgatcaaggtgaatgaccggcgcatcgtggatggcatgtttgctgtgtgtggggtgcctgagagcaagttccgggccatctgcagcagcattgacaagctggacaagatggcctggaaggatgtgagacatgagatggtggtgaagaagggcctggcccctgaggtggccgacagaattggagactatgtgcagtgccacggcggcgtgtccctggtggagcagatgttccaggacccccggctgagccagaacaagcaggccctggagggcctgggggacctgaagctgctgtttgagtacctgaccctgtttggaattgctgacaagatcagctttgacctgagcctggcccggggcctggactactacacaggagtcatctatgaggccgtgctgctgcagacccccacccaggccggggaggagcccctgaatgtgggctctgtggccgccggcggccgctatgatggcctggtgggcatgtttgaccccaagggccacaaggtgccctgtgtgggcctgagcattggagtggagcgcatcttctacatcgtggagcagaggatgaagaccaagggggagaaggtgaggaccacagagacccaggtgtttgtggccaccccccagaagaacttcctgcaggagcggctgaagctgattgctgagctgtgggacagcggcatcaaggccgagatgctgtacaagaacaaccccaagctgctgacccagctgcactactgtgagagcacaggcatccccctggtggtgatcatcggggagcaggagctgaaggagggcgtcatcaagatccgctctgtggccagccgggaggaggtggccatcaagcgggagaactttgtggccgagatccagaagaggctgtctgagagctag

SEQ ID NO: 155343 - DNA, 1185 bp, synthetic construct
  misc_feature 1..1185: note = Description of Artificial Sequence: Synthetic coding sequence
  source 1..1185: mol_type = other DNA
atggattctgccctgagtgacccccacaacggcagcgctgaggccggcggccccaccaacagcaccaccaggcctcccagcaccccagagggcatcgccctggcctacggcagcctgctgctgatggccctgctgcccatcttctttggagccctgcggtctgtgcgctgtgcccggggcaagaatgccagtgacatgcctgagaccatcaccagcagagatgctgcccgcttccccatcatcgccagctgcaccctgctgggcctgtacctgttcttcaagatcttcagccaggagtacatcaacctgctgctgtccatgtacttctttgtgctgggcatcctggccctgagccacaccatcagccccttcatgaacaagttcttccctgccagcttccccaaccggcagtaccagctgctcttcacccagggcagcggggagaacaaggaggagatcatcaactatgaatttgacaccaaggacctggtgtgcctgggcctgagcagcatcgtgggcgtgtggtacctgctgaggaagcactggatcgccaacaacctgtttggcctggccttcagcctgaatggagtggagctgctgcacctgaacaacgtgtccacaggctgcatcctgctgggcggcctcttcatctatgatgtgttctgggtgtttggcaccaacgtgatggtgacagtggccaagagctttgaggcccccatcaagctggtgttcccccaggacctgctggagaagggcctggaggccaacaactttgccatgctgggcctgggagatgtggtgattcctggcatcttcatcgccctgctgctgcgctttgacatcagcctgaagaagaacacccacacctacttctacaccagctttgctgcctacatcttcggcctgggcctgaccatcttcatcatgcacatcttcaagcacgcccagcctgccctgctgtacctggtgcctgcctgcatcggcttccctgtgctggtggccctggccaagggggaggtgacagagatgttctcctatgagagcagcgctgagatcctgccccacaccccccggctgacccacttccccaccgtgtctggcagccctgccagcctggccgacagcatgcagcagaagctggccggccccaggagaagaagaccccagaaccccagcgccatgtag

SEQ ID NO: 155344 - DNA, 1134 bp, synthetic construct
  misc_feature 1..1134: note = Description of Artificial Sequence: Synthetic coding sequence
  source 1..1134: mol_type = other DNA
atggattctgccctgagtgacccccacaacggcagcgctgaggccggcggccccaccaacagcaccaccaggcctcccagcaccccagagggcatcgccctggcctacggcagcctgctgctgatggccctgctgcccatcttctttggagccctgcggtctgtgcgctgtgcccggggcaagaatgccagtgacatgcctgagaccatcaccagcagagatgctgcccgcttccccatcatcgccagctgcaccctgctgggcctgtacctgttcttcaagatcttcagccaggagtacatcaacctgctgctgtccatgtacttctttgtgctgggcatcctggccctgagccacaccatcagccccttcatgaacaagttcttccctgccagcttccccaaccggcagtaccagctgctcttcacccagggcagcggggagaacaaggaggagatcatcaactatgaatttgacaccaaggacctggtgtgcctgggcctgagcagcatcgtgggcgtgtggtacctgctgaggaagcactggatcgccaacaacctgtttggcctggccttcagcctgaatggagtggagctgctgcacctgaacaacgtgtccacaggctgcatcctgctgggcggcctcttcatctatgatgtgttctgggtgtttggcaccaacgtgatggtgacagtggccaagagctttgaggcccccatcaagctggtgttcccccaggacctgctggagaagggcctggaggccaacaactttgccatgctgggcctgggagatgtggtgattcctggcatcttcatcgccctgctgctgcgctttgacatcagcctgaagaagaacacccacacctacttctacaccagctttgctgcctacatcttcggcctgggcctgaccatcttcatcatgcacatcttcaagcacgcccagcctgccctgctgtacctggtgcctgcctgcatcggcttccctgtgctggtggccctggccaagggggaggtgacagagatgttctcctatgaggagagcaaccccaaggaccctgctgctgtgacagagagcaaggagggcacagaggccagcgccagcaagggcctggagaagaaggagaagtag

SEQ ID NO: 155345 - DNA, 1008 bp, synthetic construct
  misc_feature 1..1008: note = Description of Artificial Sequence: Synthetic coding sequence
  source 1..1008: mol_type = other DNA
atggattctgccctgagtgacccccacaacggcagcgctgaggccggcggccccaccaacagcaccaccaggcctcccagcaccccagagggcatcgccctggcctacggcagcctgctgctgatggccctgctgcccatcttctttggagccctgcggtctgtgcgctgtgcccggggcaagaatgccagtgacatgcctgagaccatcaccagcagagatgctgcccgcttccccatcatcgccagctgcaccctgctgggcctgtacctgttcttcaagatcttcagccaggagtacatcaacctgctgctgtccatgtacttctttgtgctgggcatcctggccctgagccacaccatcagccccttcatgaacaagttcttccctgccagcttccccaaccggcagtaccagctgctcttcacccagggcagcggggagaacaaggaggagatcatcaactatgaatttgacaccaaggacctggtgtgcctgggcctgagcagcatcgtgggcgtgtggtacctgctgaggaaggtgtttggcaccaacgtgatggtgacagtggccaagagctttgaggcccccatcaagctggtgttcccccaggacctgctggagaagggcctggaggccaacaactttgccatgctgggcctgggagatgtggtgattcctggcatcttcatcgccctgctgctgcgctttgacatcagcctgaagaagaacacccacacctacttctacaccagctttgctgcctacatcttcggcctgggcctgaccatcttcatcatgcacatcttcaagcacgcccagcctgccctgctgtacctggtgcctgcctgcatcggcttccctgtgctggtggccctggccaagggggaggtgacagagatgttctcctatgaggagagcaaccccaaggaccctgctgctgtgacagagagcaaggagggcacagaggccagcgccagcaagggcctggagaagaaggagaagtag

SEQ ID NO: 155346 - DNA, 1281 bp, synthetic construct
  misc_feature 1..1281: note = Description of Artificial Sequence: Synthetic coding sequence
  source 1..1281: mol_type = other DNA
atggattctgccctgagtgacccccacaacggcagcgctgaggccggcggccccaccaacagcaccaccaggcctcccagcaccccagagggcatcgccctggcctacggcagcctgctgctgatggccctgctgcccatcttctttggagccctgcggtctgtgcgctgtgcccggggcaagaatgccagtgacatgcctgagaccatcaccagcagagatgctgcccgcttccccatcatcgccagctgcaccctgctgggcctgtacctgttcttcaagatcttcagccaggagtacatcaacctgctgctgtccatgtacttctttgtgctgggcatcctggccctgagccacaccatcagccccttcatgaacaagttcttccctgccagcttccccaaccggcagtaccagctgctcttcacccagggcagcggggagaacaaggaggagatcatcaactatgaatttgacaccaaggacctggtgtgcctgggcctgagcagcatcgtgggcgtgtggtacctgctgaggaagcactggatcgccaacaacctgtttggcctggccttcagcctgaatggagtggagctgctgcacctgaacaacgtgtccacaggctgcatcctgctgggcggcctcttcatctatgatgtgttctgggtgtttggcaccaacgtgatggtgacagtggccaagagctttgaggcccccatcaagctggtgttcccccaggacctgctggagaagggcctggaggccaacaactttgccatgctgggcctgggagatgtggtgattcctggcatcttcatcgccctgctgctgcgctttgacatcagcctgaagaagaacacccacacctacttctacaccagctttgctgcctacatcttcggcctgggcctgaccatcttcatcatgcacatcttcaagcacgcccagcctgccctgctgtacctggtgcctgcctgcatcggcttccctgtgctggtggccctggccaagggggaggtgacagagatgttctcctatgagagcagcgctgagatcctgccccacaccccccggctgacccacttccccaccgtgtctggcagccctgccagcctggccgacagcatgcagcagaagctggccggccccaggagaagaagaccccagaaccccagcgccatctatgaggagagcaaccccaaggaccctgctgctgtgacagagagcaaggagggcacagaggccagcgccagcaagggcctggagaagaaggagaagtag

SEQ ID NO: 155347 - DNA, 3411 bp, synthetic construct
  misc_feature 1..3411: note = Description of Artificial Sequence: Synthetic coding sequence
  source 1..3411: mol_type = other DNA
atgttcagcaggaagaagcgggagctgatgaagacccccagcatcagcaagaagaacagagctggcagccccagcccccagcccagcggggagctgcccaggaaggatggagcagatgctgtgtttcctggccccagcctggagcccccagctggcagcagcggcgtgaaggccaccggcaccctgaagaggcccaccagcctgagcagacatgccagcgctgctggcttccccctgagcggggccgcctcctggaccctgggccgcagccacaggagccccctgacagctgccagccctggagagctgcccacagaaggagctggcccagatgtggtggaggacatcagccacctgctggctgatgtggccaggtttgctgagggcctggagaagctgaaggaatgtgtgctgagagatgacctgctggaggcccggcggccccgggcccacgagtgcctgggggaggccctgcgggtgatgcaccagatcatcagcaagtaccccctgctgaacacagtggagaccctgacagctgctggcaccctcatcgccaaggtgaaggccttccactatgagagcaacaatgacctggagaagcaggagtttgagaaggccctggagaccatcgctgtggccttcagcagcacagtgtctgagttcctgatgggagaggtggacagcagcaccctgctggccgtgcccccaggggacagcagccagagcatggagagcctgtatggccctggcagcgagggcaccccacccagcctggaggactgtgatgctggctgcctgcctgctgaggaggtggatgtgctgctgcagagatgtgagggcggcgtggatgctgccctgctgtatgccaagaacatggccaagtacatgaaggacctgatctcctacctggagaagaggaccaccctggagatggagtttgccaagggcctgcagaagatcgcccacaactgccggcagagcgtgatgcaggagccccacatgcccctgctgagcatctacagcctggccctggagcaggacctggagtttggccacagcatggtgcaggccgtgggcaccctgcagacccagaccttcatgcagcccctgaccctgcggcggctggagcacgagaagaggaggaaggagatcaaggaggcctggcaccgggcccagaggaagctgcaggaggccgagagcaacctgaggaaggccaagcagggctacgtgcagagatgtgaggaccatgacaaggcccgcttcctggtggccaaggccgaggaggagcaggccggcagcgcccctggagctggcagcacagccaccaagaccctggacaagagaagaaggctggaggaggaggccaagaacaaggccgaggaggccatggccacctaccgcacctgtgtggctgatgccaagacccagaagcaggagctggaggacaccaaggtgacagccctgcggcagatccaggaggtgatccggcagagcgaccagaccatcaagagcgccaccatctcctactaccagatgatgcacatgcagacagcccccctgcctgtgcacttccagatgctgtgtgagagcagcaagctgtatgaccccggccagcagtatgccagccacgtgcggcagctgcagagggaccaggagccagatgtgcactatgactttgagccccacgtgtctgccaatgcctggagccctgtgatgagggccaggaagagcagcttcaacgtgtctgatgtggcccggcctgaggccgccggcagccccccagaggagggcggctgcacagagggcaccccagccaaggaccaccgggccggccggggccaccaggtgcacaagtcctggcccctgagcatcagtgacagcgacagcggcctggaccccggccctggagctggggacttcaagaagtttgagaggaccagcagcagcggcaccatgagcagcacagaggagctggtggaccctgatggaggagctggggccagcgcctttgagcaggccgacctgaatggcatgaccccagagctgcctgtggccgtgcccagcggccccttcagacatgagggcctgagcaaggccgcccggacccaccggctgaggaagctgcggaccccagccaagtgccgggagtgcaacagctatgtgtacttccagggcgcagaatgtgaggagtgctgcctggcctgccacaagaagtgcctggagaccctggccatccagtgtggccacaagaagctgcagggccgcctgcagctgtttggccaggacttcagccacgccgcccggagcgccccagatggagtgcccttcatcgtgaagaagtgtgtgtgtgaaattgaaagaagagccctgcggaccaagggcatctacagagtgaatggagtgaagaccagggtggagaagctgtgccaggcctttgaaaatggcaaggagctggtggagctgagccaggccagcccccatgacatcagcaatgtgctgaagctgtacctgcggcagctgcctgagcccctcatctccttccggctgtaccacgagctggtgggcctggccaaggacagcctgaaggccgaggccgaggccaaggccgccagccggggccggcaggacggcagcgagagcgaggccgtggccgtggccctggccggccgcctgcgggagctgctgcgggacctgcccccagaaaatagagccagcctgcagtacctgctgcggcacctgcggcgcatcgtggaggtggagcaggacaacaagatgaccccaggcaacctgggcatcgtgtttggccccaccctgctgcggccccggcccacagaggccaccgtgtccctgagcagcctggtggactacccccaccaggcccgggtgattgagaccctgattgtgcactacggcctggtgtttgaggaggagcctgaggagacccctgggggccaggatgagagcagcaaccagagagctgaggtggtggtgcaggtgccctacctggaggccggggaggccgtggtgtaccccctgcaggaggccgctgctgatggctgccgggagagccgggtggtgtccaatgacagcgacagcgacctggaggaggccagcgagctgctgagcagcagcgaggccagcgccctgggccacctgtccttcctggagcagcagcagagcgaggccagcctggaggtggccagcggcagccacagcggcagcgaggagcagctggaggccacagcccgggaggatggagatggagatgaagatggccctgcccagcagctgagcggcttcaacaccaaccagagcaacaacgtgctgcaggcccccctgccccccatgaggctgcggggcggccgcatgaccctgggcagctgccgggagcggcagcctgagtttgtgtag

SEQ ID NO: 155348 - DNA, 3393 bp, synthetic construct
  misc_feature 1..3393: note = Description of Artificial Sequence: Synthetic coding sequence
  source 1..3393: mol_type = other DNA
tcctacagcccctacagagctggccggcagggcccccagcagaggggccgggaccccggcatccagctgacagagctgcccaggaaggatggagcagatgctgtgtttcctggccccagcctggagcccccagctggcagcagcggcgtgaaggccaccggcaccctgaagaggcccaccagcctgagcagacatgccagcgctgctggcttccccctgagcggggccgcctcctggaccctgggccgcagccacaggagccccctgacagctgccagccctggagagctgcccacagaaggagctggcccagatgtggtggaggacatcagccacctgctggctgatgtggccaggtttgctgagggcctggagaagctgaaggaatgtgtgctgagagatgacctgctggaggcccggcggccccgggcccacgagtgcctgggggaggccctgcgggtgatgcaccagatcatcagcaagtaccccctgctgaacacagtggagaccctgacagctgctggcaccctcatcgccaaggtgaaggccttccactatgagagcaacaatgacctggagaagcaggagtttgagaaggccctggagaccatcgctgtggccttcagcagcacagtgtctgagttcctgatgggagaggtggacagcagcaccctgctggccgtgcccccaggggacagcagccagagcatggagagcctgtatggccctggcagcgagggcaccccacccagcctggaggactgtgatgctggctgcctgcctgctgaggaggtggatgtgctgctgcagagatgtgagggcggcgtggatgctgccctgctgtatgccaagaacatggccaagtacatgaaggacctgatctcctacctggagaagaggaccaccctggagatggagtttgccaagggcctgcagaagatcgcccacaactgccggcagagcgtgatgcaggagccccacatgcccctgctgagcatctacagcctggccctggagcaggacctggagtttggccacagcatggtgcaggccgtgggcaccctgcagacccagaccttcatgcagcccctgaccctgcggcggctggagcacgagaagaggaggaaggagatcaaggaggcctggcaccgggcccagaggaagctgcaggaggccgagagcaacctgaggaaggccaagcagggctacgtgcagagatgtgaggaccatgacaaggcccgcttcctggtggccaaggccgaggaggagcaggccggcagcgcccctggagctggcagcacagccaccaagaccctggacaagagaagaaggctggaggaggaggccaagaacaaggccgaggaggccatggccacctaccgcacctgtgtggctgatgccaagacccagaagcaggagctggaggacaccaaggtgacagccctgcggcagatccaggaggtgatccggcagagcgaccagaccatcaagagcgccaccatctcctactaccagatgatgcacatgcagacagcccccctgcctgtgcacttccagatgctgtgtgagagcagcaagctgtatgaccccggccagcagtatgccagccacgtgcggcagctgcagagggaccaggagccagatgtgcactatgactttgagccccacgtgtctgccaatgcctggagccctgtgatgagggccaggaagagcagcttcaacgtgtctgatgtggcccggcctgaggccgccggcagccccccagaggagggcggctgcacagagggcaccccagccaaggaccaccgggccggccggggccaccaggtgcacaagtcctggcccctgagcatcagtgacagcgacagcggcctggaccccggccctggagctggggacttcaagaagtttgagaggaccagcagcagcggcaccatgagcagcacagaggagctggtggaccctgatggaggagctggggccagcgcctttgagcaggccgacctgaatggcatgaccccagagctgcctgtggccgtgcccagcggccccttcagacatgagggcctgagcaaggccgcccggacccaccggctgaggaagctgcggaccccagccaagtgccgggagtgcaacagctatgtgtacttccagggcgcagaatgtgaggagtgctgcctggcctgccacaagaagtgcctggagaccctggccatccagtgtggccacaagaagctgcagggccgcctgcagctgtttggccaggacttcagccacgccgcccggagcgccccagatggagtgcccttcatcgtgaagaagtgtgtgtgtgaaattgaaagaagagccctgcggaccaagggcatctacagagtgaatggagtgaagaccagggtggagaagctgtgccaggcctttgaaaatggcaaggagctggtggagctgagccaggccagcccccatgacatcagcaatgtgctgaagctgtacctgcggcagctgcctgagcccctcatctccttccggctgtaccacgagctggtgggcctggccaaggacagcctgaaggccgaggccgaggccaaggccgccagccggggccggcaggacggcagcgagagcgaggccgtggccgtggccctggccggccgcctgcgggagctgctgcgggacctgcccccagaaaatagagccagcctgcagtacctgctgcggcacctgcggcgcatcgtggaggtggagcaggacaacaagatgaccccaggcaacctgggcatcgtgtttggccccaccctgctgcggccccggcccacagaggccaccgtgtccctgagcagcctggtggactacccccaccaggcccgggtgattgagaccctgattgtgcactacggcctggtgtttgaggaggagcctgaggagacccctgggggccaggatgagagcagcaaccagagagctgaggtggtggtgcaggtgccctacctggaggccggggaggccgtggtgtaccccctgcaggaggccgctgctgatggctgccgggagagccgggtggtgtccaatgacagcgacagcgacctggaggaggccagcgagctgctgagcagcagcgaggccagcgccctgggccacctgtccttcctggagcagcagcagagcgaggccagcctggaggtggccagcggcagccacagcggcagcgaggagcagctggaggccacagcccgggaggatggagatggagatgaagatggccctgcccagcagctgagcggcttcaacaccaaccagagcaacaacgtgctgcaggcccccctgccccccatgaggctgcggggcggccgcatgaccctgggcagctgccgggagcggcagcctgagtttgtgtag

SEQ ID NO: 155349 - DNA, 3015 bp, synthetic construct
  misc_feature 1..3015: note = Description of Artificial Sequence: Synthetic coding sequence
  source 1..3015: mol_type = other DNA
atgcaccagatcatcagcaagtaccccctgctgaacacagtggagaccctgacagctgctggcaccctcatcgccaaggtgaaggccttccactatgagagcaacaatgacctggagaagcaggagtttgagaaggccctggagaccatcgctgtggccttcagcagcacagtgtctgagttcctgatgggagaggtggacagcagcaccctgctggccgtgcccccaggggacagcagccagagcatggagagcctgtatggccctggcagcgagggcaccccacccagcctggaggactgtgatgctggctgcctgcctgctgaggaggtggatgtgctgctgcagagatgtgagggcggcgtggatgctgccctgctgtatgccaagaacatggccaagtacatgaaggacctgatctcctacctggagaagaggaccaccctggagatggagtttgccaagggcctgcagaagatcgcccacaactgccggcagagcgtgatgcaggagccccacatgcccctgctgagcatctacagcctggccctggagcaggacctggagtttggccacagcatggtgcaggccgtgggcaccctgcagacccagaccttcatgcagcccctgaccctgcggcggctggagcacgagaagaggaggaaggagatcaaggaggcctggcaccgggcccagaggaagctgcaggaggccgagagcaacctgaggaaggccaagcagggctacgtgcagagatgtgaggaccatgacaaggcccgcttcctggtggccaaggccgaggaggagcaggccggcagcgcccctggagctggcagcacagccaccaagaccctggacaagagaagaaggctggaggaggaggccaagaacaaggccgaggaggccatggccacctaccgcacctgtgtggctgatgccaagacccagaagcaggagctggaggacaccaaggtgacagccctgcggcagatccaggaggtgatccggcagagcgaccagaccatcaagagcgccaccatctcctactaccagatgatgcacatgcagacagcccccctgcctgtgcacttccagatgctgtgtgagagcagcaagctgtatgaccccggccagcagtatgccagccacgtgcggcagctgcagagggaccaggagccagatgtgcactatgactttgagccccacgtgtctgccaatgcctggagccctgtgatgagggccaggaagagcagcttcaacgtgtctgatgtggcccggcctgaggccgccggcagccccccagaggagggcggctgcacagagggcaccccagccaaggaccacagaggagaatgtcctgctggcccccggggcggccgctggctgcctgccacccaccctggccccagccctgagacccccctgagccctgctggccggggccaccaggtgcacaagtcctggcccctgagcatcagtgacagcgacagcggcctggaccccggccctggagctggggacttcaagaagtttgagaggaccagcagcagcggcaccatgagcagcacagaggagctggtggaccctgatggaggagctggggccagcgcctttgagcaggccgacctgaatggcatgaccccagagctgcctgtggccgtgcccagcggccccttcagacatgagggcctgagcaaggccgcccggacccaccggctgaggaagctgcggaccccagccaagtgccgggagtgcaacagctatgtgtacttccagggcgcagaatgtgaggagtgctgcctggcctgccacaagaagtgcctggagaccctggccatccagtgtggccacaagaagctgcagggccgcctgcagctgtttggccaggacttcagccacgccgcccggagcgccccagatggagtgcccttcatcgtgaagaagtgtgtgtgtgaaattgaaagaagagccctgcggaccaagggcatctacagagtgaatggagtgaagaccagggtggagaagctgtgccaggcctttgaaaatggcaaggagctggtggagctgagccaggccagcccccatgacatcagcaatgtgctgaagctgtacctgcggcagctgcctgagcccctcatctccttccggctgtaccacgagctggtgggcctggccaaggacagcctgaaggccgaggccgaggccaaggccgccagccggggccggcaggacggcagcgagagcgaggccgtggccgtggccctggccggccgcctgcgggagctgctgcgggacctgcccccagaaaatagagccagcctgcagtacctgctgcggcacctgcggcgcatcgtggaggtggagcaggacaacaagatgaccccaggcaacctgggcatcgtgtttggccccaccctgctgcggccccggcccacagaggccaccgtgtccctgagcagcctggtggactacccccaccaggcccgggtgattgagaccctgattgtgcactacggcctggtgtttgaggaggagcctgaggagacccctgggggccaggatgagagcagcaaccagagagctgaggtggtggtgcaggtgccctacctggaggccggggaggccgtggtgtaccccctgcaggaggccgctgctgatggctgccgggagagccgggtggtgtccaatgacagcgacagcgacctggaggaggccagcgagctgctgagcagcagcgaggccagcgccctgggccacctgtccttcctggagcagcagcagagcgaggccagcctggaggtggccagcggcagccacagcggcagcgaggagcagctggaggccacagcccgggaggatggagatggagatgaagatggccctgcccagcagctgagcggcttcaacaccaaccagagcaacaacgtgctgcaggcccccctgccccccatgaggctgcggggcggccgcatgaccctgggcagctgccgggagcggcagcctgagtttgtgtag

SEQ ID NO: 155350 - DNA, 3459 bp, synthetic construct
  misc_feature 1..3459: note = Description of Artificial Sequence: Synthetic coding sequence
  source 1..3459: mol_type = other DNA
atgagccggggccagagggtgctgaagggcctgctgggctgggtgtgcacctggacctgggcctggagggcccggctgggcgcccggggctgcggcctgcacgtgctgtgcccccgggacctgcccctgcccccagaggagctgcccaggaaggatggagcagatgctgtgtttcctggccccagcctggagcccccagctggcagcagcggcgtgaaggccaccggcaccctgaagaggcccaccagcctgagcagacatgccagcgctgctggcttccccctgagcggggccgcctcctggaccctgggccgcagccacaggagccccctgacagctgccagccctggagagctgcccacagaaggagctggcccagatgtggtggaggacatcagccacctgctggctgatgtggccaggtttgctgagggcctggagaagctgaaggaatgtgtgctgagagatgacctgctggaggcccggcggccccgggcccacgagtgcctgggggaggccctgcgggtgatgcaccagatcatcagcaagtaccccctgctgaacacagtggagaccctgacagctgctggcaccctcatcgccaaggtgaaggccttccactatgagagcaacaatgacctggagaagcaggagtttgagaaggccctggagaccatcgctgtggccttcagcagcacagtgtctgagttcctgatgggagaggtggacagcagcaccctgctggccgtgcccccaggggacagcagccagagcatggagagcctgtatggccctggcagcgagggcaccccacccagcctggaggactgtgatgctggctgcctgcctgctgaggaggtggatgtgctgctgcagagatgtgagggcggcgtggatgctgccctgctgtatgccaagaacatggccaagtacatgaaggacctgatctcctacctggagaagaggaccaccctggagatggagtttgccaagggcctgcagaagatcgcccacaactgccggcagagcgtgatgcaggagccccacatgcccctgctgagcatctacagcctggccctggagcaggacctggagtttggccacagcatggtgcaggccgtgggcaccctgcagacccagaccttcatgcagcccctgaccctgcggcggctggagcacgagaagaggaggaaggagatcaaggaggcctggcaccgggcccagaggaagctgcaggaggccgagagcaacctgaggaaggccaagcagggctacgtgcagagatgtgaggaccatgacaaggcccgcttcctggtggccaaggccgaggaggagcaggccggcagcgcccctggagctggcagcacagccaccaagaccctggacaagagaagaaggctggaggaggaggccaagaacaaggccgaggaggccatggccacctaccgcacctgtgtggctgatgccaagacccagaagcaggagctggaggacaccaaggtgacagccctgcggcagatccaggaggtgatccggcagagcgaccagaccatcaagagcgccaccatctcctactaccagatgatgcacatgcagacagcccccctgcctgtgcacttccagatgctgtgtgagagcagcaagctgtatgaccccggccagcagtatgccagccacgtgcggcagctgcagagggaccaggagccagatgtgcactatgactttgagccccacgtgtctgccaatgcctggagccctgtgatgagggccaggaagagcagcttcaacgtgtctgatgtggcccggcctgaggccgccggcagccccccagaggagggcggctgcacagagggcaccccagccaaggaccaccgggccggccggggccaccaggtgcacaagtcctggcccctgagcatcagtgacagcgacagcggcctggaccccggccctggagctggggacttcaagaagtttgagaggaccagcagcagcggcaccatgagcagcacagaggagctggtggaccctgatggaggagctggggccagcgcctttgagcaggccgacctgaatggcatgaccccagagctgcctgtggccgtgcccagcggccccttcagacatgagggcctgagcaaggccgcccggacccaccggctgaggaagctgcggaccccagccaagtgccgggagtgcaacagctatgtgtacttccagggcgcagaatgtgaggagtgctgcctggcctgccacaagaagtgcctggagaccctggccatccagtgtggccacaagaagctgcagggccgcctgcagctgtttggccaggacttcagccacgccgcccggagcgccccagatggagtgcccttcatcgtgaagaagtgtgtgtgtgaaattgaaagaagagccctgcggaccaagggcatctacagagtgaatggagtgaagaccagggtggagaagctgtgccaggcctttgaaaatggcaaggagctggtggagctgagccaggccagcccccatgacatcagcaatgtgctgaagctgtacctgcggcagctgcctgagcccctcatctccttccggctgtaccacgagctggtgggcctggccaaggacagcctgaaggccgaggccgaggccaaggccgccagccggggccggcaggacggcagcgagagcgaggccgtggccgtggccctggccggccgcctgcgggagctgctgcgggacctgcccccagaaaatagagccagcctgcagtacctgctgcggcacctgcggcgcatcgtggaggtggagcaggacaacaagatgaccccaggcaacctgggcatcgtgtttggccccaccctgctgcggccccggcccacagaggccaccgtgtccctgagcagcctggtggactacccccaccaggcccgggtgattgagaccctgattgtgcactacggcctggtgtttgaggaggagcctgaggagacccctgggggccaggatgagagcagcaaccagagagctgaggtggtggtgcaggtgccctacctggaggccggggaggccgtggtgtaccccctgcaggaggccgctgctgatggctgccgggagagccgggtggtgtccaatgacagcgacagcgacctggaggaggccagcgagctgctgagcagcagcgaggccagcgccctgggccacctgtccttcctggagcagcagcagagcgaggccagcctggaggtggccagcggcagccacagcggcagcgaggagcagctggaggccacagcccgggaggatggagatggagatgaagatggccctgcccagcagctgagcggcttcaacaccaaccagagcaacaacgtgctgcaggcccccctgccccccatgaggctgcggggcggccgcatgaccctgggcagctgccgggagcggcagcctgagtttgtgtag

SEQ ID NO: 155351 - DNA, 3060 bp, synthetic construct
  misc_feature 1..3060: note = Description of Artificial Sequence: Synthetic coding sequence
  source 1..3060: mol_type = other DNA
atgtgcatctgtggcacagcccaccctgtgctggatgagggccctgtgcgctgccgggccggcccccgggacctgctggaggcccggcggccccgggcccatgaatgtctgggggaggccctgcgggtgatgcaccagatcatcagcaagtaccccctgctgaacacagtggagaccctgacagctgctggcaccctgattgccaaggtgaaggccttccactatgagagcaacaatgacctggagaagcaggagtttgagaaggccctggagaccatcgctgtggccttcagcagcacagtgtctgagttcctgatgggagaggtggacagcagcaccctgctggccgtgcccccaggggacagcagccagagcatggagagcctgtatggccctggcagcgagggcaccccacccagcctggaggactgtgatgctggctgcctgcctgctgaggaggtggatgtgctgctgcagagatgtgagggcggcgtggatgctgccctgctgtatgccaagaacatggccaagtacatgaaggacctgatctcctacctggagaagaggaccaccctggagatggagtttgccaagggcctgcagaagatcgcccacaactgccggcagagcgtgatgcaggagccccacatgcccctgctgagcatctacagcctggccctggagcaggacctggagtttggccacagcatggtgcaggccgtgggcaccctgcagacccagaccttcatgcagcccctgaccctgcggcggctggagcacgagaagaggaggaaggagatcaaggaggcctggcaccgggcccagaggaagctgcaggaggccgagagcaacctgaggaaggccaagcagggctacgtgcagagatgtgaagatcatgacaaggcccgcttcctggtggccaaggccgaggaggagcaggccggcagcgcccctggggccggcagcacagccaccaagaccctggacaagagaagaaggctggaggaggaggccaagaacaaggccgaggaggccatggccacctaccgcacctgtgtggctgatgccaagacccagaagcaggagctggaggacaccaaggtgacagccctgcggcagatccaggaggtgatccggcagagcgaccagaccatcaagagcgccaccatctcctactaccagatgatgcacatgcagacagcccccctgcctgtgcacttccagatgctgtgtgagagcagcaagctgtatgaccccggccagcagtatgccagccacgtgcggcagctgcagagggaccaggagccagatgtgcactatgactttgagccccacgtgtctgccaatgcctggagccctgtgatgagggccaggaagagcagcttcaacgtgtctgatgtggcccggcctgaggccgccggcagccccccagaggagggcggctgcacagagggcaccccagccaaggaccacagagctggccggggccaccaggtgcacaagtcctggcccctgagcatcagtgacagcgacagcggcctggaccccggccctggggccggggacttcaagaagtttgagaggaccagcagcagcggcaccatgagcagcacagaggagctggtggaccctgatggaggagctggggccagcgcctttgagcaggccgacctgaatggcatgaccccagagctgcctgtggccgtgcccagcggccccttcagacatgagggcctgagcaaggccgcccggacccaccggctgaggaagctgcggaccccagccaagtgccgggagtgcaacagctatgtgtacttccagggcgcagaatgtgaggagtgctgcctggcctgccacaagaagtgcctggagaccctggccatccagtgtggccacaagaagctgcagggccgcctgcagctgtttggccaggacttcagccatgctgcccggagcgccccagatggagtgcccttcatcgtgaagaagtgtgtgtgtgaaattgaaagaagagccctgcggaccaagggcatctacagagtgaatggagtgaagaccagggtggagaagctgtgccaggcctttgaaaatggcaaggagctggtggagctgagccaggccagcccccatgacatcagcaatgtgctgaagctgtacctgcggcagctgcctgagcccctcatctccttccggctgtaccacgagctggtgggcctggccaaggacagcctgaaggccgaggccgaggccaaggccgccagccggggccggcaggacggcagcgagagcgaggccgtggccgtggccctggccggccgcctgcgggagctgctgcgggacctgcccccagagaacagagccagcctgcagtacctgctgcggcacctgcggagaattgtggaggtggagcaggacaacaagatgaccccaggcaacctgggcatcgtgtttggccccaccctgctgcggccccggcccacagaggccaccgtgtccctgagcagcctggtggactacccccaccaggcccgggtcatcgagaccctcatcgtgcactacggcctggtgtttgaggaggagcctgaggagaccccaggcggccaggatgagagcagcaaccagagagctgaggtggtggtgcaggtgccctacctggaggccggggaggccgtggtgtaccccctgcaggaggccgctgctgatggctgccgggagagccgggtggtgtccaatgacagcgacagcgacctggaggaggccagcgagctgctgagcagcagcgaggccagcgccctgggccacctgtccttcctggagcagcagcagagcgaggccagcctggaggtggccagcggcagccacagcggcagcgaggagcagctggaggccacagccagagaagatggagatggagatgaagatggccctgcccagcagctgagcggcttcaacaccaaccagagcaacaacgtgctgcaggcccccctgccccccatgaggctgcggggcggccgcatgaccctgggcagctgccgggagcggcagcctgagtttgtgtag

SEQ ID NO: 155352 - DNA, 2847 bp, synthetic construct
  misc_feature 1..2847: note = Description of Artificial Sequence: Synthetic coding sequence
  source 1..2847: mol_type = other DNA
atgttcagcaggaagaagcgggagctgatgaagacccccagcatcagcaagaagaacagagctggcagccccagcccccagcccagcggggagctgcccaggaaggatggagcagatgctgtgtttcctggccccagcctggagcccccagctggcagcagcggcgtgaaggccaccggcaccctgaagaggcccaccagcctgagcagacatgccagcgctgctggcttccccctgagcggggccgcctcctggaccctgggccgcagccacaggagccccctgacagctgccagccctggagagctgcccacagaaggagctggcccagatgtggtggaggacatcagccacctgctggctgatgtggccaggtttgctgagggcctggagaagctgaaggaatgtgtgctgagagatgacctgctggaggcccggcggccccgggcccacgagtgcctgggggaggccctgcgggtgatgcaccagatcatcagcaagtaccccctgctgaacacagtggagaccctgacagctgctggcaccctcatcgccaaggtgaaggccttccactatgagagcaacaatgacctggagaagcaggagtttgagaaggccctggagaccatcgctgtggccttcagcagcacagtgtctgagttcctgatgggagaggtggacagcagcaccctgctggccgtgcccccaggggacagcagccagagcatggagagcctgtatggccctggcagcgagggcaccccacccagcctggaggactgtgatgctggctgcctgcctgctgaggaggtggatgtgctgctgcagagatgtgagggcggcgtggatgctgccctgctgtatgccaagaacatggccaagtacatgaaggacctgatctcctacctggagaagaggaccaccctggagatggagtttgccaagggcctgcagaagatcgcccacaactgccggcagagcgtgatgcaggagccccacatgcccctgctgagcatctacagcctggccctggagcaggacctggagtttggccacagcatggtgcaggccgtgggcaccctgcagacccagaccttcatgcagcccctgaccctgcggcggctggagcacgagaagaggaggaaggagatcaaggaggcctggcaccgggcccagaggaagctgcaggaggccgagagcaacctgaggaaggccaagcagggctacgtgcagagatgtgaggaccatgacaaggcccgcttcctggtggccaaggccgaggaggagcaggccggcagcgcccctggagctggcagcacagccaccaagaccctggacaagagaagaaggctggaggaggaggccaagaacaaggccgaggaggccatggccacctaccgcacctgtgtggctgatgccaagacccagaagcaggagctggaggacaccaaggtgacagccctgcggcagatccaggaggtgatccggcagagcgaccagaccatcaagagcgccaccatctcctactaccagatgatgcacatgcagacagcccccctgcctgtgcacttccagatgctgtgtgagagcagcaagctgtatgaccccggccagcagtatgccagccacgtgcggcagctgcagagggaccaggagccagatgtgcactatgactttgagccccacgtgtctgccaatgcctggagccctgtgatgagggccaggaagagcagcttcaacgtgtctgatgtggcccggcctgaggccgccggcagccccccagaggagggcggctgcacagagggcaccccagccaaggaccaccgggccggccggggccaccaggtgcacaagtcctggcccctgagcatcagtgacagcgacagcggcctggaccccggccctggagctggggacttcaagaagtttgagaggaccagcagcagcggcaccatgagcagcacagaggagctggtggaccctgatggaggagctggggccagcgcctttgagcaggccgacctgaatggcatgaccccagagctgcctgtggccgtgcccagcggccccttcagacatgagggcctgagcaaggccgcccggacccaccggctgaggaagctgcggaccccagccaagtgccgggagtgcaacagctatgtgtacttccagggcgcagaatgtgaggagtgctgcctggcctgccacaagaagtgcctggagaccctggccatccagtgtggccacaagaagctgcagggccgcctgcagctgtttggccaggacttcagccacgccgcccggagcgccccagatggagtgcccttcatcgtgaagaagtgtgtgtgtgaaattgaaagaagagccctgcggaccaagggcatctacagagtgaatggagtgaagaccagggtggagaagctgtgccaggcctttgaaaatggcaaggagctggtggagctgagccaggccagcccccatgacatcagcaatgtgctgaagctgtacctgcggcagctgcctgagcccctcatctccttccggctgtaccacgagctggtgggcctggccaaggacagcctgaaggccgaggccgaggccaaggccgccagccggggccggcaggacggcagcgagagcgaggccgtggccgtggccctggccggccgcctgcgggagctgctgcgggacctgcccccagaaaatagagccagcctgcagtacctgctgcggcacctgcggcgcatcgtggaggtggagcaggacaacaagatgacccccatgaggctgcggggcggccgcatgaccctgggcagctgccgggagcggcagcctgagtttgtgtag

SEQ ID NO: 155353 - DNA, 3492 bp, synthetic construct
  misc_feature 1..3492: note = Description of Artificial Sequence: Synthetic coding sequence
  source 1..3492: mol_type = other DNA
atgttcagcaggaagaagcgggagctgatgaagacccccagcatcagcaagaagaacagagctggcagccccagcccccagcccagcggcccccacttcatctctggagaaacagaggccgtgtccaggcctgagaaccccttcaatgagctgcccagcgacctgcccaaggagctgcccaggaaggatggagcagatgctgtgtttcctggccccagcctggagcccccagctggcagcagtggagtgaaggccaccggcaccctgaagaggcccaccagcctgagcagacatgccagcgctgctggcttccccctgtctggagctgcctcctggaccctgggccgcagccacaggagccccctgacagctgccagccctggagagctgcccacagagggcgccggcccagatgtggtggaggacatcagccacctgctggctgatgtggccaggtttgctgagggcctggagaagctgaaggaatgtgtgctgagagatgacctgctggaggcccggcggccccgggcccatgaatgtctgggggaggccctgcgggtgatgcaccagatcatcagcaagtaccccctgctgaacacagtggagaccctgacagctgctggcaccctgattgccaaggtgaaggccttccactatgagagcaacaatgacctggagaagcaggagtttgagaaggccctggagaccatcgctgtggccttcagcagcacagtgtctgagttcctgatgggagaggtggacagcagcaccctgctggccgtgcccccaggggacagcagccagagcatggagagcctgtatggccctggcagcgagggcaccccacccagcctggaggactgtgatgctggctgcctgcctgctgaggaggtggatgtgctgctgcagagatgtgagggcggcgtggatgctgccctgctgtatgccaagaacatggccaagtacatgaaggacctgatctcctacctggagaagaggaccaccctggagatggagtttgccaagggcctgcagaagatcgcccacaactgccggcagagcgtgatgcaggagccccacatgcccctgctgagcatctacagcctggccctggagcaggacctggagtttggccacagcatggtgcaggccgtgggcaccctgcagacccagaccttcatgcagcccctgaccctgcggcggctggagcacgagaagaggaggaaggagatcaaggaggcctggcaccgggcccagaggaagctgcaggaggccgagagcaacctgaggaaggccaagcagggctacgtgcagagatgtgaagatcatgacaaggcccgcttcctggtggccaaggccgaggaggagcaggccggcagcgcccctggggccggcagcacagccaccaagaccctggacaagagaagaaggctggaggaggaggccaagaacaaggccgaggaggccatggccacctaccgcacctgtgtggctgatgccaagacccagaagcaggagctggaggacaccaaggtgacagccctgcggcagatccaggaggtgatccggcagagcgaccagaccatcaagagcgccaccatctcctactaccagatgatgcacatgcagacagcccccctgcctgtgcacttccagatgctgtgtgagagcagcaagctgtatgaccccggccagcagtatgccagccacgtgcggcagctgcagagggaccaggagccagatgtgcactatgactttgagccccacgtgtctgccaatgcctggagccctgtgatgagggccaggaagagcagcttcaacgtgtctgatgtggcccggcctgaggccgccggcagccccccagaggagggcggctgcacagagggcaccccagccaaggaccacagagctggccggggccaccaggtgcacaagtcctggcccctgagcatcagtgacagcgacagcggcctggaccccggccctggggccggggacttcaagaagtttgagaggaccagcagcagcggcaccatgagcagcacagaggagctggtggaccctgatggaggagctggggccagcgcctttgagcaggccgacctgaatggcatgaccccagagctgcctgtggccgtgcccagcggccccttcagacatgagggcctgagcaaggccgcccggacccaccggctgaggaagctgcggaccccagccaagtgccgggagtgcaacagctatgtgtacttccagggcgcagaatgtgaggagtgctgcctggcctgccacaagaagtgcctggagaccctggccatccagtgtggccacaagaagctgcagggccgcctgcagctgtttggccaggacttcagccatgctgcccggagcgccccagatggagtgcccttcatcgtgaagaagtgtgtgtgtgaaattgaaagaagagccctgcggaccaagggcatctacagagtgaatggagtgaagaccagggtggagaagctgtgccaggcctttgaaaatggcaaggagctggtggagctgagccaggccagcccccatgacatcagcaatgtgctgaagctgtacctgcggcagctgcctgagcccctcatctccttccggctgtaccacgagctggtgggcctggccaaggacagcctgaaggccgaggccgaggccaaggccgccagccggggccggcaggacggcagcgagagcgaggccgtggccgtggccctggccggccgcctgcgggagctgctgcgggacctgcccccagagaacagagccagcctgcagtacctgctgcggcacctgcggagaattgtggaggtggagcaggacaacaagatgaccccaggcaacctgggcatcgtgtttggccccaccctgctgcggccccggcccacagaggccaccgtgtccctgagcagcctggtggactacccccaccaggcccgggtcatcgagaccctcatcgtgcactacggcctggtgtttgaggaggagcctgaggagaccccaggcggccaggatgagagcagcaaccagagagctgaggtggtggtgcaggtgccctacctggaggccggggaggccgtggtgtaccccctgcaggaggccgctgctgatggctgccgggagagccgggtggtgtccaatgacagcgacagcgacctggaggaggccagcgagctgctgagcagcagcgaggccagcgccctgggccacctgtccttcctggagcagcagcagagcgaggccagcctggaggtggccagcggcagccacagcggcagcgaggagcagctggaggccacagccagagaagatggagatggagatgaagatggccctgcccagcagctgagcggcttcaacaccaaccagagcaacaacgtgctgcaggcccccctgccccccatgaggctgcggggcggccgcatgaccctgggcagctgccgggagcggcagcctgagtttgtgtag

SEQ ID NO: 155354 - DNA, 420 bp, synthetic construct
  misc_feature 1..420: note = Description of Artificial Sequence: Synthetic coding sequence
  source 1..420: mol_type = other DNA
atgagcatcagcagcgccctggccatggtgttcatgggcgccaagggcaacacagctgcccagatgagccaggccctgtgcttcagcaagattggaggagaagatggagacatccaccggggcttccagagcctgctggtggccatcaacagaacagacacagaatatgtgctgaggacagccaacggcctgtttggagagaagagctatgacttcctgaccggcttcacagacagctgtgggaagttctaccaggccaccatcaagcagctggactttgtgaatgacacagagaagagcaccaccagggtgaacagctgggtggccgacaagaccaagggggagaacatcctgctcttctactttgacaacatcctgaacagcttcatcgtgagcagcctgcagaactgccagatctag

SEQ ID NO: 155355 - DNA, 162 bp, synthetic construct
  misc_feature 1..162: note = Description of Artificial Sequence: Synthetic coding sequence
  source 1..162: mol_type = other DNA
atggagatcttcatcgaggtgttcagccacttcctgctgcagctgacagagctgaccctgaacatgtgcctggagctgcccaccggcagcctggagaagagcctgatgatcagcagccaggtgctgcagatccctgtggccaacagcaccaagcagaggtag

SEQ ID NO: 155356 - DNA, 648 bp, synthetic construct
  misc_feature 1..648: note = Description of Artificial Sequence: Synthetic coding sequence
  source 1..648: mol_type = other DNA
atgtctgagaccgtgcccccagccccagctgccagcgctgcccctgagaagcccctggccggcaagaaggccaagaagccagccaaggctgctgctgccagcaagaagaagccagctggccccagcgtgtctgagctgattgtgcaggccgccagcagcagcaaggagcggggcggcgtgtccctggccgccctgaagaaggccctggccgccgccggctatgatgtggagaagaacaacagccgcatcaagctgggcatcaagagcctggtgtccaagggcaccctggtgcagaccaagggcaccggggccagcggcagcttcaagctgaacaagaaggccagctctgtggagaccaagccaggggccagcaaggtggccaccaagaccaaggccactggagccagcaagaagctgaagaaggccactggagccagcaagaagtctgtgaagacccccaagaaggccaagaagccagctgccaccaggaagagcagcaagaaccccaagaagcccaagacagtgaagcccaagaaggtggccaagagccctgccaaggccaaggctgtgaagcccaaggccgccaaggcccgggtgaccaagcccaagacagccaagcccaagaaggccgcccccaagaagaagtag

SEQ ID NO: 155357 - DNA, 681 bp, synthetic construct
  misc_feature 1..681: note = Description of Artificial Sequence: Synthetic coding sequence
  source 1..681: mol_type = other DNA
atgtctgaaacagccccagctgagacagccaccccagcccctgtggagaagagccctgccaagaagaaggccaccaagaaggctgctggagctggagctgccaagaggaaggccactggacctcctgtgtctgagctgatcaccaaggctgtggccgccagcaaggagagaaatggcctgagcctggccgccctgaagaaggccctggccgccggcggctatgatgtggagaagaacaacagccgcatcaagctgggcctgaagagcctggtgtccaagggcaccctggtgcagaccaagggcaccggggccagcggcagcttcaagctgaacaagaaggccgccagcggggaggccaagcccaaggccaagaaggccggggccgccaaggccaagaagccagctggggccacccccaagaaggccaagaaggccgccggggccaagaaggctgtgaagaagacccccaagaaggccaagaagccagctgctgctggggtgaagaaggtggccaagagccccaagaaggccaaggccgccgccaagcccaagaaggccaccaagagccctgccaagcccaaggctgtgaagcccaaggccgccaagcccaaggccgccaagcccaaggccgccaagcccaaggccgccaaggccaagaaggccgccgccaagaagaagtag

SEQ ID NO: 155358 - DNA, 642 bp, synthetic construct
  misc_feature 1..642: note = Description of Artificial Sequence: Synthetic coding sequence
  source 1..642: mol_type = other DNA
atgtctgaaacagccccagctgccccagctgctgcccctcctgctgagaaggcccctgtgaagaagaaggccgccaagaaggccggcggcacccccaggaaggccagcggcccccctgtgtctgagctgatcaccaaggctgtggccgccagcaaggagaggtctggagtgtccctggccgccctgaagaaggccctggccgctgctggctatgatgtggagaagaacaacagccgcatcaagctgggcctgaagagcctggtgtccaagggcaccctggtgcagaccaagggcactggagccagcggcagcttcaagctgaacaagaaggccgccagcggggaggccaagcccaaggtgaagaaggccggcggcaccaagcccaagaagcctgtgggcgccgccaagaagcccaagaaggccgccggcggggccacccccaagaagagcgccaagaagacccccaagaaggccaagaagccagctgctgccaccgtgaccaagaaggtggccaagagccccaagaaggccaaggtggccaagcccaagaaggccgccaagtctgctgccaaggctgtgaagcccaaggccgccaagcccaaggtggtgaagcccaagaaggccgcccccaagaagaagtag

SEQ ID NO: 155359 - DNA, 666 bp, synthetic construct
  misc_feature 1..666: note = Description of Artificial Sequence: Synthetic coding sequence
  source 1..666: mol_type = other DNA
atgtctgaaacagcccccctggcccccaccatcccagccccagctgagaagacccctgtgaagaagaaggccaagaaggccggggccacagctgggaagaggaaggccagcggcccccctgtgtctgagctgatcaccaaggctgtggccgccagcaaggagaggtctggagtgtccctggccgccctgaagaaggccctggccgccgccggctatgatgtggagaagaacaacagccgcatcaagctgggcctgaagagcctggtgtccaagggcaccctggtgcagaccaagggcaccggggccagcggcagcttcaagctgaacaagaaggccgccagcggggagggcaagcccaaggccaagaaggccggggccgccaagcccaggaagccagctggagctgccaagaagcccaagaaggtggccggggccgccacccccaagaagagcatcaagaagacccccaagaaggtgaagaagccagccacagctgctggcaccaagaaggtggccaagagcgccaagaaggtgaagaccccccagcccaagaaggccgccaagagccctgccaaggccaaggcccccaagcccaaggccgccaagcccaagagcggcaagcccaaggtgaccaaggccaagaaggccgcccccaagaagaagtag

SEQ ID NO: 155360 - DNA, 660 bp, synthetic construct
  misc_feature 1..660: note = Description of Artificial Sequence: Synthetic coding sequence
  source 1..660: mol_type = other DNA
atgtctgaaacagccccagctgccccagctgccccagccccagctgagaagacccctgtgaagaagaaggccaggaagtctgctggggccgccaagaggaaggccagcggcccccctgtgtctgagctgatcaccaaggctgtggccgccagcaaggagaggtctggagtgtccctggccgccctgaagaaggccctggccgctgctggctatgatgtggagaagaacaacagccgcatcaagctgggcctgaagagcctggtgtccaagggcaccctggtgcagaccaagggcactggagccagcggcagcttcaagctgaacaagaaggccgccagcggggaggccaagcccaaggccaagaaggccggggccgccaaggccaagaagccagctggggccgccaagaagcccaagaaggccaccggggccgccacccccaagaagagcgccaagaagacccccaagaaggccaagaagccagctgctgctgctggggccaagaaggccaagagccccaagaaggccaaggccgccaagcccaagaaggcccccaagagccctgccaaggccaaggctgtgaagcccaaggccgccaagcccaagacagccaagcccaaggccgccaagcccaagaaggctgctgccaagaagaagtag

SEQ ID NO: 155361 - DNA, 624 bp, synthetic construct
  misc_feature 1..624: note = Description of Artificial Sequence: Synthetic coding sequence
  source 1..624: mol_type = other DNA
atgtctgagaccgtgcctgctgccagcgccagcgctggggtggccgccatggagaagctgcccaccaagaagaggggcaggaagccagctggcctcatcagcgccagcaggaaggtgcccaacctgtctgtgtccaagctgatcacagaggccctgtctgtgtcccaggagcgggtgggcatgagcctggtggccctgaagaaggccctggccgctgctggctatgatgtggagaagaacaacagccgcatcaagctgagcctgaagagcctggtgaacaagggcatcctggtgcagacccggggcactggagccagcggcagcttcaagctgagcaagaaggtgatccccaagagcaccaggagcaaggccaagaagtctgtgtctgccaagaccaagaagctggtgctgagccgggacagcaagagccccaagacagccaagaccaacaagagggccaagaagccccgggccaccacccccaagacagtgcgcagcggcaggaaggccaagggggccaagggcaagcagcagcagaagagccctgtgaaggcccgggccagcaagagcaagctgacccagcaccacgaggtgaatgtgaggaaggccaccagcaagaagtag

SEQ ID NO: 155362 - DNA, 393 bp, synthetic construct
  misc_feature 1..393: note = Description of Artificial Sequence: Synthetic coding sequence
  source 1..393: mol_type = other DNA
atgagcggccggggcaagcagggcggcaaggcccgggccaaggccaagaccaggagcagccgggccggcctgcagtttcctgtgggccgggtgcaccggctgctgaggaaaggaaactacagcgagcgggtgggcgctggggcccctgtgtacctggccgctgtgctggagtacctgacagctgagatcctggagctggccggaaatgctgcccgggacaacaagaagacccgcatcatccccaggcacctgcagctggccatcagaaatgatgaggagctgaacaagctgctgggccgggtgaccatcgcccagggcggcgtgctgcccaacatccaggccgtgctgctgcccaagaagacagagagccaccacaaggccaagggcaagtag

SEQ ID NO: 155363 - DNA, 393 bp, synthetic construct
  misc_feature 1..393: note = Description of Artificial Sequence: Synthetic coding sequence
  source 1..393: mol_type = other DNA
atgagcggccggggcaagcagggcggcaaggcccgggccaaggccaagagccgcagcagccgggccggcctgcagtttcctgtgggccgggtgcaccggctgctgaggaaaggaaattatgcagagcgggtgggcgctggggcccctgtgtacctggccgctgtgctggagtacctgacagctgagatcctggagctggccggaaatgctgcccgggacaacaagaagacccgcatcatccccaggcacctgcagctggccatcagaaatgatgaggagctgaacaagctgctgggccgggtgaccatcgcccagggcggcgtgctgcccaacatccaggccgtgctgctgcccaagaagacagagagccaccacaaggccaagggcaagtag

SEQ ID NO: 155364 - DNA, 393 bp, synthetic construct; identical to SEQ ID NO: 155363
  misc_feature 1..393: note = Description of Artificial Sequence: Synthetic coding sequence
  source 1..393: mol_type = other DNA

SEQ ID NO: 155365 - DNA, 393 bp, synthetic construct
  misc_feature 1..393: note = Description of Artificial Sequence: Synthetic coding sequence
  source 1..393: mol_type = other DNA
atgagcggccggggcaagcagggcggcaaggcccgggccaaggccaagaccaggagcagccgggccggcctgcagtttcctgtgggccgggtgcaccggctgctgaggaaaggaaactacagcgagcgggtgggcgctggggcccctgtgtacctggccgctgtgctggagtacctgacagctgagatcctggagctggccggaaatgctgcccgggacaacaagaagacccgcatcatccccaggcacctgcagctggccatcagaaatgatgaggagctgaacaagctgctgggcaaggtgaccatcgcccagggcggcgtgctgcccaacatccaggccgtgctgctgcccaagaagacagagagccaccacaaggccaagggcaagtag

SEQ ID NO: 155366 - DNA, 393 bp, synthetic construct; identical to SEQ ID NO: 155362
  misc_feature 1..393: note = Description of Artificial Sequence: Synthetic coding sequence
  source 1..393: mol_type = other DNA

SEQ ID NO: 155367 - DNA, 393 bp, synthetic construct
  misc_feature 1..393: note = Description of Artificial Sequence: Synthetic coding sequence
  source 1..393: mol_type = other DNA
atgagcggccggggcaagcagggcggcaaggcccgggccaaggccaagaccaggagcagccgggccggcctgcagtttcctgtgggccgggtgcaccggctgctgaggaaaggaaattatgcagagcgggtgggcgctggggcccctgtgtacctggccgctgtgctggagtacctgacagctgagatcctggagctggccggaaatgctgcccgggacaacaagaagacccgcatcatccccaggcacctgcagctggccatcagaaatgatgaggagctgaacaagctgctgggcaaggtgaccatcgcccagggcggcgtgctgcccaacatccaggccgtgctgctgcccaagaagacagagagccaccacaaggccaagggcaagtag

SEQ ID NO: 155368 - DNA, 387 bp, synthetic construct
  misc_feature 1..387: note = Description of Artificial Sequence: Synthetic coding sequence
  source 1..387: mol_type = other DNA
atgagcggccggggcaagcagggcggcaaggcccgggccaaggccaagaccaggagcagccgggccggcctgcagtttcctgtgggccgggtgcaccggctgctgaggaaaggaaattatgcagagcgggtgggcgctggggcccctgtgtacctggccgctgtgctggagtacctgacagctgagatcctggagctggccggaaatgctgcccgggacaacaagaagacccgcatcatccccaggcacctgcagctggccatcagaaatgatgaggagctgaacaagctgctgggcaaggtgaccatcgcccagggcggcgtgctgcccaacatccaggccgtgctgctgcccaagaagacagagagccaccacaagaccaagtag

SEQ ID NO: 155369 - DNA, 393 bp, synthetic construct; identical to SEQ ID NO: 155367
  misc_feature 1..393: note = Description of Artificial Sequence: Synthetic coding sequence
  source 1..393: mol_type = other DNA

SEQ ID NO: 155370 - DNA, 393 bp, synthetic construct; identical to SEQ ID NO: 155367
  misc_feature 1..393: note = Description of Artificial Sequence: Synthetic coding sequence
  source 1..393: mol_type = other DNA

SEQ ID NO: 155371 - DNA, 393 bp, synthetic construct; identical to SEQ ID NO: 155367
  misc_feature 1..393: note = Description of Artificial Sequence: Synthetic coding sequence
  source 1..393: mol_type = other DNA

SEQ ID NO: 155372 - DNA, 384 bp, synthetic construct
  misc_feature 1..384: note = Description of Artificial Sequence: Synthetic coding sequence
  source 1..384: mol_type = other DNA
atgcctgaggtgagcagcaaaggagccaccatcagcaagaagggcttcaagaaggctgtggtgaagacccagaagaaggagggcaagaagaggaagaggaccaggaaggagagctacagcatctacatctacaaggtgctgaagcaggtgcacccagacaccggcatcagcagcaaggccatgagcatcatgaacagctttgtgacagacatctttgaaagaattgccagcgaggccagccggctggcccactacagcaagaggagcaccatcagcagccgggagatccagacagctgtgcggctgctgctgcctggagagctggccaagcatgctgtgtctgagggcaccaaggctgtgaccaagtacaccagcagcaagtag

SEQ ID NO: 155373 - DNA, 381 bp, synthetic construct
  misc_feature 1..381: note = Description of Artificial Sequence: Synthetic coding sequence
  source 1..381: mol_type = other DNA
atgcctgagcccagcaagagcgccccagcccccaagaagggcagcaagaaggccatcaccaaggcccagaagaaggatggcaagaagaggaagaggagcaggaaggagagctacagcatctacgtgtacaaggtgctgaagcaggtgcacccagacaccggcatcagcagcaaggccatgggcatcatgaacagctttgtgaatgacatctttgaaagaattgctggggaggccagccggctggcccactacaacaagaggagcaccatcaccagccgggagatccagacagctgtgcggctgctgctgcccggggagctggccaagcatgctgtgtctgagggcaccaaggctgtgaccaagtacaccagcagcaagtag

SEQ ID NO: 155374 - DNA, 381 bp, synthetic construct
  misc_feature 1..381: note = Description of Artificial Sequence: Synthetic coding sequence
  source 1..381: mol_type = other DNA
atgcctgagcccgccaagagcgccccagcccccaagaagggcagcaagaaggctgtgaccaaggcccagaagaaggatggcaagaagaggaagaggagcaggaaggagagctacagcgtgtatgtgtacaaggtgctgaagcaggtgcacccagacaccggcatcagcagcaaggccatgggcatcatgaacagctttgtgaatgacatctttgaaagaattgctggggaggccagccggctggcccactacaacaagaggagcaccatcaccagccgggagatccagacagctgtgcggctgctgctgcccggggagctggccaagcatgctgtgtctgagggcaccaaggctgtgaccaagtacaccagcagcaagtag

SEQ ID NO: 155375 - DNA, 381 bp, synthetic construct; identical to SEQ ID NO: 155374
  misc_feature 1..381: note = Description of Artificial Sequence: Synthetic coding sequence
  source 1..381: mol_type = other DNA

SEQ ID NO: 155376 - DNA, 381 bp, synthetic construct
  misc_feature 1..381: note = Description of Artificial Sequence: Synthetic coding sequence
  source 1..381: mol_type = other DNA
atgcctgagcccaccaagagcgccccagcccccaagaagggcagcaagaaggctgtgaccaaggcccagaagaaggatggcaagaagaggaagaggagcaggaaggagagctacagcgtgtatgtgtacaaggtgctgaagcaggtgcacccagacaccggcatcagcagcaaggccatgggcatcatgaacagctttgtgaatgacatctttgaaagaattgctggggaggccagccggctggcccactacaacaagaggagcaccatcaccagccgggagatccagacagctgtgcggctgctgctgcccggggagctggccaagcatgctgtgtctgagggcaccaaggctgtgaccaagtacaccagcagcaagtag

SEQ ID NO: 155377 - DNA, 381 bp, synthetic construct; identical to SEQ ID NO: 155376
  misc_feature 1..381: note = Description of Artificial Sequence: Synthetic coding sequence
  source 1..381: mol_type = other DNA

SEQ ID NO: 155378 - DNA, 381 bp, synthetic construct; identical to SEQ ID NO: 155374
  misc_feature 1..381: note = Description of Artificial Sequence: Synthetic coding sequence
  source 1..381: mol_type = other DNA

SEQ ID NO: 155379 - DNA, 381 bp, synthetic construct; identical to SEQ ID NO: 155374
  misc_feature 1..381: note = Description of Artificial Sequence: Synthetic coding sequence
  source 1..381: mol_type = other DNA

SEQ ID NO: 155380 - DNA, 381 bp, synthetic construct; identical to SEQ ID NO: 155374
  misc_feature 1..381: note = Description of Artificial Sequence: Synthetic coding sequence
  source 1..381: mol_type = other DNA

SEQ ID NO: 155381 - DNA, 381 bp, synthetic construct
  misc_feature 1..381: note = Description of Artificial Sequence: Synthetic coding sequence
  source 1..381: mol_type = other DNA
atgccagaccctgccaagagcgccccagcccccaagaagggcagcaagaaggctgtgaccaaggcccagaagaaggatggcaagaagaggaagaggagcaggaaggagagctacagcgtgtatgtgtacaaggtgctgaagcaggtgcacccagacaccggcatcagcagcaaggccatgggcatcatgaacagctttgtgaatgacatctttgaaagaattgctggggaggccagccggctggcccactacaacaagaggagcaccatcaccagccgggagatccagacagctgtgcggctgctgctgcccggggagctggccaagcatgctgtgtctgagggcaccaaggctgtgaccaagtacaccagcagcaagtag

SEQ ID NO: 155382 - DNA, 381 bp, synthetic construct; identical to SEQ ID NO: 155374
  misc_feature 1..381: note = Description of Artificial Sequence: Synthetic coding sequence
  source 1..381: mol_type = other DNA

SEQ ID NO: 155383 - DNA, 381 bp, synthetic construct
  misc_feature 1..381: note = Description of Artificial Sequence: Synthetic coding sequence
  source 1..381: mol_type = other DNA
atgcctgagctggccaagagcgccccagcccccaagaagggcagcaagaaggctgtgaccaaggcccagaagaaggatggcaagaagaggaagaggagcaggaaggagagctacagcgtgtatgtgtacaaggtgctgaagcaggtgcacccagacaccggcatcagcagcaaggccatgggcatcatgaacagctttgtgaatgacatctttgagcgcatcgccagcgaggccagccggctggcccactacaacaagaggagcaccatcaccagccgggagatccagacagctgtgcggctgctgctgcccggggagctggccaagcatgctgtgtctgagggcaccaaggctgtgaccaagtacaccagcagcaagtag

SEQ ID NO: 155384 - DNA, 381 bp, synthetic construct
  misc_feature 1..381: note = Description of Artificial Sequence: Synthetic coding sequence
  source 1..381: mol_type = other DNA
atgcctgagcctgtgaagagcgcccctgtgcccaagaagggcagcaagaaggccatcaacaaggcccagaagaaggatggcaagaagaggaagaggagcaggaaggagagctacagcgtgtatgtgtacaaggtgctgaagcaggtgcacccagacaccggcatcagcagcaaggccatgggcatcatgaacagctttgtgaatgacatctttgaaagaattgctggggaggccagccggctggcccactacaacaagaggagcaccatcaccagccgggagatccagacagctgtgcggctgctgctgcccggggagctggccaagcatgctgtgtctgagggcaccaaggctgtgaccaagtacaccagcagcaagtag

SEQ ID NO: 155385 - DNA, 381 bp, synthetic construct
  misc_feature 1..381: note = Description of Artificial Sequence: Synthetic coding sequence
  source 1..381: mol_type = other DNA
atgcctgagcccagcaagagcgccccagcccccaagaagggcagcaagaaggctgtgaccaaggcccagaagaaggatggcaagaagaggaagaggagcaggaaggagagctacagcgtgtatgtgtacaaggtgctgaagcaggtgcacccagacaccggcatcagcagcaaggccatgggcatcatgaacagctttgtgaatgacatctttgaaagaattgctggggaggccagccggctggcccactacaacaagaggagcaccatcaccagccgggagatccagacagctgtgcggctgctgctgcccggggagctggccaagcatgctgtgtctgagggcaccaaggctgtgaccaagtacaccagcagcaagtag

SEQ ID NO: 155386 - DNA, 381 bp, synthetic construct; identical to SEQ ID NO: 155385
  misc_feature 1..381: note = Description of Artificial Sequence: Synthetic coding sequence
  source 1..381: mol_type = other DNA

SEQ ID NO: 155387 - DNA, 381 bp, synthetic construct
  misc_feature 1..381: note = Description of Artificial Sequence: Synthetic coding sequence
  source 1..381: mol_type = other DNA
atgccagaccctgccaagagcgccccagcccccaagaagggcagcaagaaggctgtgaccaaggcccagaagaaggatggcaagaagaggaagaggagcaggaaggagagctacagcatctacgtgtacaaggtgctgaagcaggtgcacccagacaccggcatcagcagcaaggccatgggcatcatgaacagctttgtgaatgacatctttgaaagaattgctggggaggccagccggctggcccactacaacaagaggagcaccatcaccagccgggagatccagacagctgtgcggctgctgctgcccggggagctggccaagcatgctgtgtctgagggcaccaaggctgtgaccaagtacaccagcagcaagtag

SEQ ID NO: 155388 - DNA, 411 bp, synthetic construct
  misc_feature 1..411: note = Description of Artificial Sequence: Synthetic coding sequence
  source 1..411: mol_type = other DNA
atggcccggaccaagcagacagccaggaagagcactggaggcaaggcccccaggaagcagctggccaccaaggccgccaggaagagcgccccagccactggaggagtgaagaagccccaccgctaccggcccggcaccgtggccctgcgggagatccgccgctaccagaagagcacagagctgctgatcaggaagctgcccttccagaggctggtgcgggagatcgcccaggacttcaagacagacctgcgcttccagagcagcgctgtgatggccctgcaggaggcctgtgaggcctacctggtgggcctgtttgaggacaccaacctgtgtgccatccacgccaagagggtgaccatcatgcccaaggacatccagctggcccggcgcatccggggggagcgggcctag

SEQ ID NO: 155389 - DNA, 411 bp, synthetic construct; identical to SEQ ID NO: 155388
  misc_feature 1..411: note = Description of Artificial Sequence: Synthetic coding sequence
  source 1..411: mol_type = other DNA

SEQ ID NO: 155390 - DNA, 411 bp, synthetic construct; identical to SEQ ID NO: 155388
  misc_feature 1..411: note = Description of Artificial Sequence: Synthetic coding sequence
  source 1..411: mol_type = other DNA

SEQ ID NO: 155391 - DNA, 411 bp, synthetic construct; identical to SEQ ID NO: 155388
  misc_feature 1..411: note = Description of Artificial Sequence: Synthetic coding sequence
  source 1..411: mol_type = other DNA

SEQ ID NO: 155392 - DNA, 411 bp, synthetic construct; identical to SEQ ID NO: 155388
  misc_feature 1..411: note = Description of Artificial Sequence: Synthetic coding sequence
  source 1..411: mol_type = other DNA

SEQ ID NO: 155393 - DNA, 411 bp, synthetic construct; identical to SEQ ID NO: 155388
  misc_feature 1..411: note = Description of Artificial Sequence: Synthetic coding sequence
  source 1..411: mol_type = other DNA

SEQ ID NO: 155394 - DNA, 411 bp, synthetic construct; identical to SEQ ID NO: 155388
  misc_feature 1..411: note = Description of Artificial Sequence: Synthetic coding sequence
  source 1..411: mol_type = other DNA

SEQ ID NO: 155395 - DNA, 411 bp, synthetic construct; identical to SEQ ID NO: 155388
  misc_feature 1..411: note = Description of Artificial Sequence: Synthetic coding sequence
  source 1..411: mol_type = other DNA

SEQ ID NO: 155396 - DNA, 411 bp, synthetic construct; identical to SEQ ID NO: 155388
  misc_feature 1..411: note = Description of Artificial Sequence: Synthetic coding sequence
  source 1..411: mol_type = other DNA

SEQ ID NO: 155397 - DNA, 411 bp, synthetic construct; identical to SEQ ID NO: 155388
  misc_feature 1..411: note = Description of Artificial Sequence: Synthetic coding sequence
  source 1..411: mol_type = other DNA

SEQ ID NO: 155398 - DNA, 411 bp, synthetic construct; identical to SEQ ID NO: 155388
  misc_feature 1..411: note = Description of Artificial Sequence: Synthetic coding sequence
  source 1..411: mol_type = other DNA

SEQ ID NO: 155399 - DNA, 339 bp, synthetic construct
  misc_feature 1..339: note = Description of Artificial Sequence: Synthetic coding sequence
  source 1..339: mol_type = other DNA
atgagcggccggggcaagggcggcaagggcctggccaaggccaagacctgcagcagcctgcccggcctgcagtttcctggccgggtgcgccacctgttcagaaaaggaaactactttgagcctgtgggcgctggggcccctgtgtacctgcagtacctggccgctgagatcctggagctggtgggcagcgccatccgggacaagaccaggagcatcatccccaggcacctgcagctggccatcagaaatgatgaggaggtgaacaagcagctgggcaatgtgaccatcgcccagggcggcgtgctgagcaacatccaggccgtgctgctgcccaagtag

SEQ ID NO: 155400 - DNA, 312 bp, synthetic construct
  misc_feature 1..312: note = Description of Artificial Sequence: Synthetic coding sequence
  source 1..312: mol_type = other DNA
atgagcggccggggcaagggcggcaagggcctgggcaaaggaggagccaagaggcacaggaaggtgctgcgggacaacatccagggcatcaccaagccagccatccggcggctggcccggcggggcggcgtgaagaggatcagcggcctcatctatgaggagacccggggcgtgctgaaggtgttcctggagaatgtcatcagagatgctgtgacctacacagagcacgccaagaggaagacagtgacagccatggatgtggtgtatgccctgaagaggcagggccgcaccctgtatggctttggaggatag

SEQ ID NO: 155401 - DNA, 312 bp, synthetic construct; identical to SEQ ID NO: 155400
  misc_feature 1..312: note = Description of Artificial Sequence: Synthetic coding sequence
  source 1..312: mol_type = other DNA

SEQ ID NO: 155402 - DNA, 312 bp, synthetic construct; identical to SEQ ID NO: 155400
  misc_feature 1..312: note = Description of Artificial Sequence: Synthetic coding sequence
  source 1..312: mol_type = other DNA

SEQ ID NO: 155403 - DNA, 312 bp, synthetic construct; identical to SEQ ID NO: 155400
  misc_feature 1..312: note = Description of Artificial Sequence: Synthetic coding sequence
  source 1..312: mol_type = other DNA

SEQ ID NO: 155404 - DNA, 312 bp, synthetic construct; identical to SEQ ID NO: 155400
  misc_feature 1..312: note = Description of Artificial Sequence: Synthetic coding sequence
  source 1..312: mol_type = other DNA

SEQ ID NO: 155405 - DNA, 312 bp, synthetic construct; identical to SEQ ID NO: 155400
  misc_feature 1..312: note = Description of Artificial Sequence: Synthetic coding sequence
  source 1..312: mol_type = other DNA

SEQ ID NO: 155406 - DNA, 297 bp, synthetic construct
  misc_feature 1..297: note = Description of Artificial Sequence: Synthetic coding sequence
  source 1..297: mol_type = other DNA
atgtctgtgcggggcaaggccggcaagggcctgggcaaaggaggagccaagtgccacaggaaggtgctgagtgacaacatccagggcatcaccaagtgcaccatccggcggctggcccggcatggaggagtgaagaggatcctgggcctcatctatgaggagacccggcgggtcttcaaggtgttcctggagaatgtcatctggtatgctgtgaccaacacagagcacgccaagaggaagacagtgacagccatggctgtggtgtatgtgctgaagaggcagggccgcaccctgtag

SEQ ID NO: 155407 - DNA, 312 bp, synthetic construct; identical to SEQ ID NO: 155400
  misc_feature 1..312: note = Description of Artificial Sequence: Synthetic coding sequence
  source 1..312: mol_type = other DNA

SEQ ID NO: 155408 - DNA, 312 bp, synthetic construct; identical to SEQ ID NO: 155400
  misc_feature 1..312: note = Description of Artificial Sequence: Synthetic coding sequence
  source 1..312: mol_type = other DNA

SEQ ID NO: 155409 - DNA, 312 bp, synthetic construct; identical to SEQ ID NO: 155400
  misc_feature 1..312: note = Description of Artificial Sequence: Synthetic coding sequence
  source 1..312: mol_type = other DNA

SEQ ID NO: 155410 - DNA, 312 bp, synthetic construct; identical to SEQ ID NO: 155400
  misc_feature 1..312: note = Description of Artificial Sequence: Synthetic coding sequence
  source 1..312: mol_type = other DNA

SEQ ID NO: 155411 - DNA, 312 bp, synthetic construct; identical to SEQ ID NO: 155400
  misc_feature 1..312: note = Description of Artificial Sequence: Synthetic coding sequence
  source 1..312: mol_type = other DNA

SEQ ID NO: 155412 - DNA, 312 bp, synthetic construct; identical to SEQ ID NO: 155400
  misc_feature 1..312: note = Description of Artificial Sequence: Synthetic coding sequence
  source 1..312: mol_type = other DNA

SEQ ID NO: 155413 - DNA, 390 bp, synthetic construct
  misc_feature 1..390: note = Description of Artificial Sequence: Synthetic coding sequence
  source 1..390: mol_type = other DNA
atgagcggccggggcaagcagggcggcaaggcccgggccaaggccaagagccgcagcagccgggccggcctgcagtttcctgtgggccgggtgcaccggctgctgaggaaaggaaattatgcagagcgggtgggcgctggggcccctgtgtacatggctgctgtgctggagtacctgacagctgagatcctggagctggccggaaatgctgcccgggacaacaagaagacccgcatcatccccaggcacctgcagctggccatcagaaatgatgaggagctgaacaagctgctgggcaaggtgaccatcgcccagggcggcgtgctgcccaacatccaggccgtgctgctgcccaagaagacagagagccacaaggccaagagcaagtag

SEQ ID NO: 155414 - DNA, 381 bp, synthetic construct
  misc_feature 1..381: note = Description of Artificial Sequence: Synthetic coding sequence
  source 1..381: mol_type = other DNA
atgcctgagcccgccaagagcgccccagcccccaagaagggcagcaagaaggctgtgaccaaggcccagaagaaggatggcaagaagaggaagaggagcaggaaggagagctacagcatctacgtgtacaaggtgctgaagcaggtgcacccagacaccggcatcagcagcaaggccatgggcatcatgaacagctttgtgaatgacatctttgaaagaattgctggggaggccagccggctggcccactacaacaagaggagcaccatcaccagccgggagatccagacagctgtgcggctgctgctgcccggggagctggccaagcatgctgtgtctgagggcaccaaggctgtgaccaagtacaccagcagcaagtag

SEQ ID NO: 155415 - DNA, 411 bp, synthetic construct
  misc_feature 1..411: note = Description of Artificial Sequence: Synthetic coding sequence
  source 1..411: mol_type = other DNA
atggcccggaccaagcagacagccaggaagagcactggaggcaaggcccccaggaagcagctggccaccaaggccgccaggaagagcgccccagccactggaggagtgaagaagccccaccgctaccggcccggcaccgtggccctgcgggagatccgccgctaccagaagagcacagagctgctgatcaggaagctgcccttccagaggctggtgcgggagatcgcccaggacttcaagacagacctgcgcttccagagcagcgctgtgatggccctgcaggaggccagcgaggcctacctggtgggcctgtttgaggacaccaacctgtgtgccatccacgccaagagggtgaccatcatgcccaaggacatccagctggcccggcgcatccggggggagcgggcctag

SEQ ID NO: 155416 - DNA, 411 bp, synthetic construct
  misc_feature 1..411: note = Description of Artificial Sequence: Synthetic coding sequence
  source 1..411: mol_type = other DNA
atggcccggaccaagcagacagccaggaagagcactggaggcaaggcccccaggaagcagctggccaccaaggtggccaggaagagcgccccagccactggaggagtgaagaagccccaccgctaccggcccggcaccgtggccctgcgggagatccgccgctaccagaagagcacagagctgctgatcaggaagctgcccttccagaggctgatgagagaaattgcccaggacttcaagacagacctgcgcttccagagcagcgctgtgatggccctgcaggaggcctgtgagagctacctggtgggcctgtttgaggacaccaacctgtgtgtgatccacgccaagagggtgaccatcatgcccaaggacatccagctggcccggcgcatccggggggagcgggcctag

SEQ ID NO: 155417 - DNA, 684 bp, synthetic construct
  misc_feature 1..684: note = Description of Artificial Sequence: Synthetic coding sequence
  source 1..684: mol_type = other DNA
atggagggccagagcggccgctgcaagatcgtggtggtgggagatgctgaatgtgggaagacagccctgctgcaggtgtttgccaaggatgcctacccaggcagctatgtgcccaccgtgtttgagaactacacagccagctttgaaattgacaagagaagaattgagctgaacatgtgggacaccagcggcagcagctactatgacaacgtgcggcccctggcctacccagacagtgatgctgtgctgatctgctttgacatcagcaggcctgagaccctggacagcgtgctgaagaagtggcagggcgagacccaggagttctgccccaatgccaaggtggtgctggtgggctgcaagctggacatgaggacagacctggccaccctgcgggagctgagcaagcagaggctcatccctgtgacccatgagcagggcaccgtgctggccaagcaggtgggcgctgtgtcctatgtggagtgcagcagccgcagcagcgagaggtctgtgagagatgtgttccacgtggccaccgtggccagcctgggccggggccaccggcagctgcggaggacagacagcagaagaggcatgcagaggtctgcccagctgagcggccgcccagacagaggaaatgaaggagagatccacaaggaccgggccaagagctgcaacctgatgtag

SEQ ID NO: 155418 - DNA, 3114 bp, synthetic construct
  misc_feature 1..3114: note = Description of Artificial Sequence: Synthetic coding sequence
  source 1..3114: mol_type = other DNA
atgaacagccccaatgaaagtgatggcatgagcggccgggagcccagcctggagatcctgcccaggaccagcctgcacagcatccctgtgacagtggaggtgaagcctgtgctgccccgggccatgcccagctccatgggcggcggcggcggcggcagccccagccctgtggagctgcggggggccctggtgggctctgtggaccccaccctgcgggagcagcagctgcagcaggagctgctggccctgaagcagcagcagcagctgcagaagcagctgctgtttgctgagttccagaagcagcacgaccacctgacccggcagcacgaggtgcagctgcagaagcacctgaagcagcagcaggagatgctggccgccaagcagcagcaggagatgctggccgccaagaggcagcaggagctggagcagcagaggcagcgggagcagcagaggcaggaggagctggagaagcagaggctggagcagcagctgctgatcctgaggaacaaggagaagagcaaggagagcgccatcgccagcacagaggtgaagctgcggctgcaggagttcctgctgagcaagagcaaggagcccacccctgggggcctgaaccacagcctgccccagcaccccaagtgctggggcgcccaccacgccagcctggaccagagcagccccccccagagcggccccccaggcaccccacccagctacaagctgcccctgcccggcccctatgacagcagagatgacttccccctgaggaagacagccagcgagcccaacctgaaggtgcgcagccggctgaagcagaaggtggccgagcggcgcagcagccccctgctgcggaggaaggatggcaccgtcatcagcaccttcaagaagagagctgtggagatcactggagctggccctggggccagctctgtgtgcaacagcgcccctggcagcggccccagcagccccaacagcagccacagcaccatcgcagaaaatggcttcaccggctctgtgcccaacatccccacagagatgctgccccagcaccgggccctgcccctggacagcagccccaaccagttcagcctgtacaccagccccagcctgcccaacatcagcctgggcctgcaggccaccgtgacagtgaccaacagccacctgacagccagccccaagctgagcacccagcaggaggccgagcggcaggccctgcagagcctgcggcagggcggcaccctgaccgggaagttcatgagcaccagcagcatccctggctgcctgctgggcgtggccctggagggagatggcagcccccacggccacgccagcctgctgcagcacgtgctgctgctggagcaggcccggcagcagagcaccctgattgctgtgcccctgcacggccagagccccctggtgactggagagcgggtggccacctccatgaggacagtgggcaagctgcccaggcaccggcccctgagcaggacccagagcagccccctgccccagagcccccaggccctgcagcagctggtgatgcagcagcagcaccagcagttcctggagaagcagaagcagcagcagctgcagctgggcaagatcctgaccaagacaggagagctgccccggcagcccaccacccaccctgaggagacagaggaggagctgacagagcagcaggaggtgctgctgggggagggcgccctgaccatgccccgggagggcagcacagaaagtgagagcacccaggaggacctggaggaggaggatgaggaggatgatggagaggaggaggaggactgcatccaggtgaaggatgaggagggggagagcggggctgaggagggccctgacctggaggagcccggggccggctacaagaagctgttcagtgatgcccagcccctgcagcccctgcaggtgtaccaggcccccctgagcctggccaccgtgccccaccaggccctgggccgcacccagagcagccctgctgcccctgggggcatgaagagccccccagaccagcctgtgaagcacctgttcaccaccggccccatcagccagaagatgtatgctgtgctgccctgtggcggcattggagtggacagcgacacagtgtggaatgagatgcacagcagcagcgctgtgaggatggctgtgggctgcctgctggagctggccttcaaggtggccgccggggagctgaagaatggatttgccatcatccggcccccaggccaccacgccgaggagagcacagccatgggcttctgcttcttcaacagcgtggccatcacagccaagctgctgcagcagaagctgaatgtgggcaaggtgctgattgtggactgggacatccaccacggcaatggcacccagcaggccttctacaatgaccccagcgtgctgtacatcagcctgcacagatatgacaatggaaacttcttccctggcagcggggcccctgaggaggtgggcggcggccctggggtgggctacaacgtgaatgtggcctggacaggaggagtggacccccccatcggagatgtggagtacctgacagccttcagaacagtggtgatgcccatcgcccacgagttctccccagatgtggtgctggtgtctgctggctttgatgctgtggagggccacctgagccccctgggcggctacagcgtgacagcccgctgcttcggccacctgacccggcagctgatgaccctggccggcggccgggtggtgctggccctggagggcggccatgacctgacagccatctgtgatgccagcgaggcctgtgtgtctgccctgctgtctgtggagctgcagcccctggatgaggccgtgctgcagcagaagcccaacatcaatgctgtggccaccctggagaaggtgattgagatccagagcaagcactggagctgtgtgcagaagtttgctgctggcctgggccgcagcctgcgggaggcccaggccggggagacagaggaggccgagaccgtgtctgccatggccctgctgtctgtgggcgctgagcaggcccaggccgccgccgcccgggagcacagccccaggcctgctgaggagcccatggagcaggagcccgccctgtag

SEQ ID NO: 155419 - DNA, 3369 bp, synthetic construct
  misc_feature 1..3369: note = Description of Artificial Sequence: Synthetic coding sequence
  source 1..3369: mol_type = other DNA
atgaacagccccaatgaaagtgatggcatgagcggccgggagcccagcctggagatcctgcccaggaccagcctgcacagcatccctgtgacagtggaggtgaagcctgtgctgccccgggccatgcccagctccatgggcggcggcggcggcggcagccccagccctgtggagctgcggggggccctggtgggctctgtggaccccaccctgcgggagcagcagctgcagcaggagctgctggccctgaagcagcagcagcagctgcagaagcagctgctgtttgctgagttccagaagcagcacgaccacctgacccggcagcacgaggtgcagctgcagaagcacctgaagcagcagcaggagatgctggccgccaagcagcagcaggagatgctggccgccaagaggcagcaggagctggagcagcagaggcagcgggagcagcagaggcaggaggagctggagaagcagaggctggagcagcagctgctgatcctgaggaacaaggagaagagcaaggagagcgccatcgccagcacagaggtgaagctgcggctgcaggagttcctgctgagcaagagcaaggagcccacccctgggggcctgaaccacagcctgccccagcaccccaagtgctggggcgcccaccacgccagcctggaccagagcagccccccccagagcggccccccaggcaccccacccagctacaagctgcccctgcccggcccctatgacagcagagatgacttccccctgaggaagacagccagcgagcccaacctgaaggtgcgcagccggctgaagcagaaggtggccgagcggcgcagcagccccctgctgcggaggaaggatggcaccgtcatcagcaccttcaagaagagagctgtggagatcactggagctggccctggggccagctctgtgtgcaacagcgcccctggcagcggccccagcagccccaacagcagccacagcaccatcgcagaaaatggcttcaccggctctgtgcccaacatccccacagagatgctgccccagcaccgggccctgcccctggacagcagccccaaccagttcagcctgtacaccagccccagcctgcccaacatcagcctgggcctgcaggccaccgtgacagtgaccaacagccacctgacagccagccccaagctgagcacccagcaggaggccgagcggcaggccctgcagagcctgcggcagggcggcaccctgaccgggaagttcatgagcaccagcagcatccctggctgcctgctgggcgtggccctggagggagatggcagcccccacggccacgccagcctgctgcagcacgtgctgctgctggagcaggcccggcagcagagcaccctgattgctgtgcccctgcacggccagagccccctggtgactggagagcgggtggccacctccatgaggacagtgggcaagctgcccaggcaccggcccctgagcaggacccagagcagccccctgccccagagcccccaggccctgcagcagctggtgatgcagcagcagcaccagcagttcctggagaagcagaagcagcagcagctgcagctgggcaagatcctgaccaagacaggagagctgccccggcagcccaccacccaccctgaggagacagaggaggagctgacagagcagcaggaggtgctgctgggggagggcgccctgaccatgccccgggagggcagcacagaaagtgagagcacccaggaggacctggaggaggaggatgaggaggatgatggagaggaggaggaggactgcatccaggtgaaggatgaggagggggagagcggggctgaggagggccctgacctggaggagcccggggccggctacaagaagctgttcagtgatgcccagcccctgcagcccctgcaggtgtaccaggcccccctgagcctggccaccgtgccccaccaggccctgggccgcacccagagcagccctgctgcccctgggggcatgaagagccccccagaccagcctgtgaagcacctgttcaccactggagtggtgtatgacaccttcatgctgaagcaccagtgcatgtgtggcaacacccacgtgcaccctgagcacgccggccgcatccagagcatctggagccggctgcaggagaccggcctgctgagcaaatgtgagcgcatccggggcaggaaggccaccctggatgagatccagacagtgcacagcgagtaccacaccctgctgtatggcaccagccccctgaaccggcagaagctggacagcaagaagctgctgggccccatcagccagaagatgtatgctgtgctgccctgtggcggcatcggcgtggacagcgacacagtgtggaatgagatgcacagcagcagcgctgtgaggatggctgtgggctgcctgctggagctggccttcaaggtggccgccggggagctgaagaatggatttgccatcatccggcccccaggccaccacgccgaggagagcacagccatgggcttctgcttcttcaacagcgtggccatcacagccaagctgctgcagcagaagctgaatgtgggcaaggtgctgattgtggactgggacatccaccacggcaatggcacccagcaggccttctacaatgaccccagcgtgctgtacatcagcctgcacagatatgacaatggaaacttcttccctggcagcggggcccctgaggaggtgggcggcggccctggggtgggctacaacgtgaatgtggcctggacaggaggagtggacccccccatcggagatgtggagtacctgacagccttcagaacagtggtgatgcccatcgcccacgagttctccccagatgtggtgctggtgtctgctggctttgatgctgtggagggccacctgagccccctgggcggctacagcgtgacagcccgctgcttcggccacctgacccggcagctgatgaccctggccggcggccgggtggtgctggccctggagggcggccatgacctgacagccatctgtgatgccagcgaggcctgtgtgtctgccctgctgtctgtggagctgcagcccctggatgaagctgtgctgcagcagaagcccaacatcaatgctgtggccaccctggagaaggtgattgagatccagagcaagcactggagctgtgtgcagaagtttgctgctggcctgggccgcagcctgcgggaggcccaggccggggagacagaggaggccgagaccgtgtctgccatggccctgctgtctgtgggcgctgagcaggcccaggccgctgctgcccgggagcacagccccaggcctgctgaggagcccatggagcaggagcccgccctgtag

SEQ ID NO: 155420 - DNA, 1776 bp, synthetic construct
  misc_feature 1..1776: note = Description of Artificial Sequence: Synthetic coding sequence
  source 1..1776: mol_type = other DNA
atgatgagcagccctgcccagagccgcagcccagacctgatgtggaacctggtgccctgggtgctcttctgtggctgctgccgcatcttcccagatggagtggccggccgggagcagctgctggcccagcagaggatgcacagcatgatcagctctgtggatgtgaagtctgaggtgcctgtgggcctggagcccatcagccccctggacctgaggacagacctgaggatgatgatgcctgtggtggaccctgtggtgcgggagaagcagctgcagcaggagctgctgctgatccagcagcagcagcagatccagaagcagctgctgattgctgagttccagaagcagcacgagaacctgacccggcagcaccaggcccagctgcaggagcacatcaaggagctgctggccatcaagcagcagcaggagctgctggagaaggagcagaagctggagcagcagaggcaggagcaggaggtggagcggcaccggcgggagcagcagctgccccccctgcggggcaaggaccggggccgggagagagctgtggccagcacagaggtgaagcagaagctgcaggagttcctgctgagcaagagcgccaccaaggacacccccaccaacgggaagaaccacagcgtgagccgccaccccaagctgtggtacacagctgcccaccacaccagcctggaccagagcagcccccccctgagcggcaccagccccagctacaagtacaccctgcccggggcccaggatgccaaggatgacttccccctgaggaagacagagagctctgtgagcagcagcagccctggcagcggccccagcagccccaacaacggccccaccggctctgtgacagaaaatgagacctctgtgctgccccccacccctcatgctgagcagatggtgtcccagcagaggatcctgattcatgaggacagcatgaacctgctgagcctgtacaccagccccagcctgcccaacatcaccctgggcctgcctgctgtgcccagccagctgaatgccagcaacagcctgaaggagaagcagaagtgtgagacccagaccctgcggcagggcgtgcccctgcccggccagtatggaggcagcatcccagccagcagcagccacccccacgtgaccctggagggcaagccacccaacagcagccaccaggccctgctgcagcacctgctgctgaaggagcagatgaggcagcagaagctgctggtggccggcggcgtgcccctgcacccccagagccccctggccaccaaggagcgcatcagccctggcatccggggcacccacaagctgcccaggcaccggcccctgaacagaacccagagcgcccccctgccccagagcaccctggcccagctggtgatccagcagcagcaccagcagttcctggagaagcagaagcagtaccagcagcagatccacatgaacaagctgctgagcaagagcattgagcagctgaagcagcccggcagccacctggaggaggccgaggaggagctgcagggcgaccaggccatgcaggaggaccgggcccccagcagcggcaacagcaccaggagtgacagcagcgcctgtgtggatgacaccctgggccaggtgggcgctgtgaaggtgaaggaggagcctgtggacagtgatgaagatgcccagatccaggagatggagagcggggagcaggccgccttcatgcagcaggtgattggcaaggacctggcccctggctttgtgatcaaggtgatcatctag

SEQ ID NO: 155421 - DNA, 2772 bp, synthetic construct
  misc_feature 1..2772: note = Description of Artificial Sequence: Synthetic coding sequence
  source 1..2772: mol_type = other DNA
ctgcacaagctgagcagcctggtggatgtgaagtctgaggtgcctgtgggcctggagcccatcagccccctggacctgaggacagacctgaggatgatgatgcctgtggtggaccctgtggtgcgggagaagcagctgcagcaggagctgctgctgatccagcagcagcagcagatccagaagcagctgctgattgctgagttccagaagcagcacgagaacctgacccggcagcaccaggcccagctgcaggagcacatcaaggagctgctggccatcaagcagcagcaggagctgctggagaaggagcagaagctggagcagcagaggcaggagcaggaggtggagcggcacagaagagagcagcagctgccccccctgcggggcaaggaccggggccgggagagagctgtggccagcacagaggtgaagcagaagctgcaggagttcctgctgagcaagagcgccaccaaggacacccccaccaacgggaagaaccacagcgtgagccgccaccccaagctgtggtacacagctgcccaccacaccagcctggaccagagcagcccccccctgagcggcaccagccccagctacaagtacaccctgcccggggcccaggatgccaaggatgacttccccctgaggaagacagccagcgagcccaacctgaaggtgcgcagccggctgaagcagaaggtggccgagaggaggagcagccccctgctgcggaggaaggatggaaatgtggtgaccagcttcaagaagaggatgtttgaggtgacagagagctctgtgagcagcagcagccctggcagcggccccagcagccccaacaacggccccactggatctgtgacagaaaatgagacctctgtgctgccccccacccctcatgctgagcagatggtgtcccagcagaggatcctgattcatgaagattccatgaacctgctgagcctgtacaccagccccagcctgcccaacatcaccctgggcctgcctgctgtgcccagccagctgaatgccagcaacagcctgaaggagaagcagaagtgtgagacccagaccctgcggcagggcgtgcccctgcccggccagtatggaggcagcatcccagccagcagcagccacccccacgtgaccctggagggcaagccacccaacagcagccaccaggccctgctgcagcacctgctgctgaaggagcagatgaggcagcagaagctgctggtggccggcggcgtgcccctgcacccccagagccccctggccaccaaggagcgcatcagccctggcatccggggcacccacaagctgcccaggcaccggcccctgaacagaacccagagcgcccccctgccccagagcaccctggcccagctggtgatccagcagcagcaccagcagttcctggagaagcagaagcagtaccagcagcagatccacatgaacaagcccttcctggagcccacccacacccgggccctgtctgtgcggcaggcccccctggccgctgtgggcatggatggcctggagaagcaccggctggtgtccaggacccacagcagccctgctgcctctgtgctgccccacccagccatggaccggcccctgcagcccggcagcgccactggaattgcctatgaccccctgatgctgaagcaccagtgtgtgtgtggcaacagcaccacccaccctgagcacgccggccgcatccagagcatctggagccggctgcaggagaccggcctgctgaacaagtgtgagcgcatccagggcaggaaggccagcctggaggagatccagctggtgcacagcgagcaccacagcctgctgtatggcaccaaccccctggatggccagaagctggacccccgcatcctgctgggagatgacagccagaagttcttcagcagcctgccctgtggcggcctgggcgtggacagcgacaccatctggaatgagctgcacagcagcggggccgccaggatggctgtgggctgtgtgattgagctggccagcaaggtggccagcggggagctgaagaatggatttgctgtggtgcggcccccaggccaccacgccgaggagagcacagccatgggcttctgcttcttcaacagcgtggccatcacagccaagtacctgcgggaccagctgaacatcagcaagatcctgattgtggacctggatgtgcaccacggcaatggcacccagcaggccttctatgctgaccccagcatcctgtacatcagcctgcacagatatgatgagggcaacttcttccctggcagcggggccccaaatgaggtgggcaccggcctgggggagggctacaacatcaacatcgcctggacaggaggcctggacccccccatgggagatgtggagtacctggaggccttccgcaccatcgtgaagcctgtggccaaggagtttgatcctgacatggtgctggtgtctgctggctttgatgccctggagggccacaccccacccctgggcggctacaaggtgacagccaagtgcttcggccacctgaccaagcagctgatgaccctggctgatggccgggtggtgctggccctggagggcggccatgacctgacagccatctgtgatgccagcgaggcctgtgtgaatgccctgctgggcaatgagctggagcccctggccgaggacatcctgcaccagagccccaacatgaatgctgtgatcagcctgcagaagatcatcgagatccagagcatgagcctgaagttctcctag

SEQ ID NO: 155422 - DNA, 3078 bp, synthetic construct
  misc_feature 1..3078: note = Description of Artificial Sequence: Synthetic coding sequence
  source 1..3078: mol_type = other DNA
atgcacagcatgatcagctctgtggatgtgaagtctgaggtgcctgtgggcctggagcccatcagccccctggacctgaggacagacctgaggatgatgatgcctgtggtggaccctgtggtgcgggagaagcagctgcagcaggagctgctgctgatccagcagcagcagcagatccagaagcagctgctgattgctgagttccagaagcagcacgagaacctgacccggcagcaccaggcccagctgcaggagcacatcaagctgcagcaggagctgctggccatcaagcagcagcaggagctgctggagaaggagcagaagctggagcagcagaggcaggagcaggaggtggagcggcaccggcgggagcagcagctgccccccctgcggggcaaggaccggggccgggagagagctgtggccagcacagaggtgaagcagaagctgcaggagttcctgctgagcaagagcgccaccaaggacacccccaccaacgggaagaaccacagcgtgagccgccaccccaagctgtggtacacagctgcccaccacaccagcctggaccagagcagcccccccctgagcggcaccagccccagctacaagtacaccctgcccggggcccaggatgccaaggatgacttccccctgaggaagacagagagctctgtgagcagcagcagccctggcagcggccccagcagccccaacaacggccccaccggctctgtgacagaaaatgagacctctgtgctgccccccacccctcatgctgagcagatggtgtcccagcagaggatcctgattcatgaggacagcatgaacctgctgagcctgtacaccagccccagcctgcccaacatcaccctgggcctgcctgctgtgcccagccagctgaatgccagcaacagcctgaaggagaagcagaagtgtgagacccagaccctgcggcagggcgtgcccctgcccggccagtatggaggcagcatcccagccagcagcagccacccccacgtgaccctggagggcaagccacccaacagcagccaccaggccctgctgcagcacctgctgctgaaggagcagatgaggcagcagaagctgctggtggccggcggcgtgcccctgcacccccagagccccctggccaccaaggagcgcatcagccctggcatccggggcacccacaagctgcccaggcaccggcccctgaacagaacccagagcgcccccctgccccagagcaccctggcccagctggtgatccagcagcagcaccagcagttcctggagaagcagaagcagtaccagcagcagatccacatgaacaagctgctgagcaagagcattgagcagctgaagcagcccggcagccacctggaggaggccgaggaggagctgcagggcgaccaggccatgcaggaggaccgggcccccagcagcggcaacagcaccaggagtgacagcagcgcctgtgtggatgacaccctgggccaggtgggcgctgtgaaggtgaaggaggagcctgtggacagtgatgaagatgcccagatccaggagatggagagcggggagcaggccgccttcatgcagcagcccttcctggagcccacccacacccgggccctgtctgtgcggcaggcccccctggccgctgtgggcatggatggcctggagaagcaccggctggtgtccaggacccacagcagccctgctgcctctgtgctgccccacccagccatggaccggcccctgcagcccggcagcgccaccggcatcgcctatgaccccctgatgctgaagcaccagtgtgtgtgtggcaacagcaccacccaccctgagcacgccggccgcatccagagcatctggagccggctgcaggagaccggcctgctgaacaagtgtgagcgcatccagggcaggaaggccagcctggaggagatccagctggtgcacagcgagcaccacagcctgctgtatggcaccaaccccctggatggccagaagctggacccccgcatcctgctgggagatgacagccagaagttcttcagcagcctgccctgtggcggcctgggcgtggacagcgacaccatctggaatgagctgcacagcagtggagctgccaggatggctgtgggctgcgtcatcgagctggccagcaaggtggccagcggggagctgaagaatggatttgctgtggtgcggcccccaggccaccacgccgaggagagcacagccatgggcttctgcttcttcaacagcgtggccatcacagccaagtacctgcgggaccagctgaacatcagcaagatcctgattgtggacctggatgtgcaccacggcaatggcacccagcaggccttctacgccgaccccagcatcctgtacatcagcctgcacagatatgatgagggcaacttcttccctggcagcggggccccaaatgaggtgggcaccggcctgggggagggctacaacatcaacatcgcctggacaggaggcctggacccccccatgggagatgtggagtacctggaggccttccgcaccatcgtgaagcctgtggccaaggagtttgatcctgacatggtgctggtgtctgctggctttgatgccctggagggccacaccccacccctgggcggctacaaggtgacagccaagtgcttcggccacctgaccaagcagctgatgaccctggctgatggccgggtggtgctggccctggagggcggccatgacctgacagccatctgtgatgccagcgaggcctgtgtgaatgccctgctgggcaatgagctggagcccctggccgaggacatcctgcaccagagccccaacatgaatgctgtgatcagcctgcagaagatcatcgagatccagagcaagtactggaagtctgtgaggatggtggccgtgccccggggctgtgccctggccggggcccagctgcaggaggagacagagaccgtgtctgccctggccagcctgactgtggatgtggagcagccctttgcccaggaggacagcaggacagctggggagcccatggaggaggagcccgccctgtag

SEQ ID NO: 155423 - DNA, 1773 bp, synthetic construct
  misc_feature 1..1773: note = Description of Artificial Sequence: Synthetic coding sequence
  source 1..1773: mol_type = other DNA
atgcacagcatgatcagctctgtggatgtgaagtctgaggtgcctgtgggcctggagcccatcagccccctggacctgaggacagacctgaggatgatgatgcctgtggtggaccctgtggtgcgggagaagcagctgcagcaggagctgctgctgatccagcagcagcagcagatccagaagcagctgctgattgctgagttccagaagcagcacgagaacctgacccggcagcaccaggcccagctgcaggagcacatcaaggagctgctggccatcaagcagcagcaggagctgctggagaaggagcagaagctggagcagcagaggcaggagcaggaggtggagcggcacagaagagagcagcagctgccccccctgcggggcaaggaccggggccgggagagagctgtggccagcacagaggtgaagcagaagctgcaggagttcctgctgagcaagagcgccaccaaggacacccccaccaacgggaagaaccacagcgtgagccgccaccccaagctgtggtacacagctgcccaccacaccagcctggaccagagcagcccccccctgagcggcaccagccccagctacaagtacaccctgcccggggcccaggatgccaaggatgacttccccctgaggaagacagccagcgagcccaacctgaaggtgcgcagccggctgaagcagaaggtggccgagaggaggagcagccccctgctgcggaggaaggatggaaatgtggtgaccagcttcaagaagaggatgtttgaggtgacagagagctctgtgagcagcagcagccctggcagcggccccagcagccccaacaacggccccactggatctgtgacagaaaatgagacctctgtgctgccccccacccctcatgctgagcagatggtgtcccagcagaggatcctgattcatgaagattccatgaacctgctgagcctgtacaccagccccagcctgcccaacatcaccctgggcctgcctgctgtgcccagccagctgaatgccagcaacagcctgaaggagaagcagaagtgtgagacccagaccctgcggcagggcgtgcccctgcccggccagtatggaggcagcatcccagccagcagcagccacccccacgtgaccctggagggcaagccacccaacagcagccaccaggccctgctgcagcacctgctgctgaaggagcagatgaggcagcagaagctgctggtggccggcggcgtgcccctgcacccccagagccccctggccaccaaggagcgcatcagccctggcatccggggcacccacaagctgcccaggcaccggcccctgaacagaacccagagcgcccccctgccccagagcaccctggcccagctggtgatccagcagcagcaccagcagttcctggagaagcagaagcagtaccagcagcagatccacatgaacaagctgctgagcaagagcattgagcagctgaagcagcccggcagccacctggaggaggccgaggaggagctgcagggcgaccaggccatgcaggaggaccgggcccccagcagcggcaacagcaccaggagtgacagcagcgcctgtgtggatgacaccctgggccaggtgggcgctgtgaaggtgaaggaggagcctgtggacagtgatgaagatgcccagatccaggagatggagagcggggagcaggccgccttcatgcagcaggtgattggcaaggacctggcccctggcttcgtcatcaaggtgatcatctag

SEQ ID NO: 155424 - DNA, 1734 bp, synthetic construct
  misc_feature 1..1734: note = Description of Artificial Sequence: Synthetic coding sequence
  source 1..1734: mol_type = other DNA
atgctgcagaccatctatgaaagtgacagctgcttcagcagtgatggagtggccggccgggagcagctgctggcccagcagaggatgcacagcatgatcagctctgtggatgtgaagtctgaggtgcctgtgggcctggagcccatcagccccctggacctgaggacagacctgaggatgatgatgcctgtggtggaccctgtggtgcgggagaagcagctgcagcaggagctgctgctgatccagcagcagcagcagatccagaagcagctgctgattgctgagttccagaagcagcacgagaacctgacccggcagcaccaggcccagctgcaggagcacatcaagctgcagcaggagctgctggccatcaagcagcagcaggagctgctggagaaggagcagaagctggagcagcagaggcaggagcaggaggtggagcggcaccggcgggagcagcagctgccccccctgcggggcaaggaccggggccgggagagagctgtggccagcacagaggtgaagcagaagctgcaggagttcctgctgagcaagagcgccaccaaggacacccccaccaacgggaagaaccacagcgtgagccgccaccccaagctgtggtacacagctgcccaccacaccagcctggaccagagcagcccccccctgagcggcaccagccccagctacaagtacaccctgcccggggcccaggatgccaaggatgacttccccctgaggaagacagagagctctgtgagcagcagcagccctggcagcggccccagcagccccaacaacggccccaccggctctgtgacagaaaatgagacctctgtgctgccccccacccctcatgctgagcagatggtgtcccagcagaggatcctgattcatgaggacagcatgaacctgctgagcctgtacaccagccccagcctgcccaacatcaccctgggcctgcctgctgtgcccagccagctgaatgccagcaacagcctgaaggagaagcagaagtgtgagacccagaccctgcggcagggcgtgcccctgcccggccagtatggaggcagcatcccagccagcagcagccacccccacgtgaccctggagggcaagccacccaacagcagccaccaggccctgctgcagcacctgctgctgaaggagcagatgaggcagcagaagctgctggtggccggcggcgtgcccctgcacccccagagccccctggccaccaaggagcgcatcagccctggcatccggggcacccacaagctgcccaggcaccggcccctgaacagaacccagagcgcccccctgccccagagcaccctggcccagctggtgatccagcagcagcaccagcagttcctggagaagcagaagcagtaccagcagcagatccacatgaacaagctgctgagcaagagcattgagcagctgaagcagcccggcagccacctggaggaggccgaggaggagctgcagggcgaccaggccatgcaggaggaccgggcccccagcagcggcaacagcaccaggagtgacagcagcgcctgtgtggatgacaccctgggccaggtgggcgctgtgaaggtgaaggaggagcctgtggacagtgatgaagatgcccagatccaggagatggagagcggggagcaggccgccttcatgcagcaggtgattggcaaggacctggcccctggctttgtgatcaaggtgatcatctag

SEQ ID NO: 155425 - DNA, 3201 bp, synthetic construct
  misc_feature 1..3201: note = Description of Artificial Sequence: Synthetic coding sequence
  source 1..3201: mol_type = other DNA
atgcacagcatgatcagctctgtggatgtgaagtctgaggtgcctgtgggcctggagcccatcagccccctggacctgaggacagacctgaggatgatgatgcctgtggtggaccctgtggtgcgggagaagcagctgcagcaggagctgctgctgatccagcagcagcagcagatccagaagcagctgctgattgctgagttccagaagcagcacgagaacctgacccggcagcaccaggcccagctgcaggagcacatcaaggagctgctggccatcaagcagcagcaggagctgctggagaaggagcagaagctggagcagcagaggcaggagcaggaggtggagcggcacagaagagagcagcagctgccccccctgcggggcaaggaccggggccgggagagagctgtggccagcacagaggtgaagcagaagctgcaggagttcctgctgagcaagagcgccaccaaggacacccccaccaacgggaagaaccacagcgtgagccgccaccccaagctgtggtacacagctgcccaccacaccagcctggaccagagcagcccccccctgagcggcaccagccccagctacaagtacaccctgcccggggcccaggatgccaaggatgacttccccctgaggaagacagccagcgagcccaacctgaaggtgcgcagccggctgaagcagaaggtggccgagaggaggagcagccccctgctgcggaggaaggatggaaatgtggtgaccagcttcaagaagaggatgtttgaggtgacagagagctctgtgagcagcagcagccctggcagcggccccagcagccccaacaacggccccactggatctgtgacagaaaatgagacctctgtgctgccccccacccctcatgctgagcagatggtgtcccagcagaggatcctgattcatgaagattccatgaacctgctgagcctgtacaccagccccagcctgcccaacatcaccctgggcctgcctgctgtgcccagccagctgaatgccagcaacagcctgaaggagaagcagaagtgtgagacccagaccctgcggcagggcgtgcccctgcccggccagtatggaggcagcatcccagccagcagcagccacccccacgtgaccctggagggcaagccacccaacagcagccaccaggccctgctgcagcacctgctgctgaaggagcagatgaggcagcagaagctgctggtggccggcggcgtgcccctgcacccccagagccccctggccaccaaggagcgcatcagccctggcatccggggcacccacaagctgcccaggcaccggcccctgaacagaacccagagcgcccccctgccccagagcaccctggcccagctggtgatccagcagcagcaccagcagttcctggagaagcagaagcagtaccagcagcagatccacatgaacaagctgctgagcaagagcattgagcagctgaagcagcccggcagccacctggaggaggccgaggaggagctgcagggcgaccaggccatgcaggaggaccgggcccccagcagcggcaacagcaccaggagtgacagcagcgcctgtgtggatgacaccctgggccaggtgggcgctgtgaaggtgaaggaggagcctgtggacagtgatgaagatgcccagatccaggagatggagagcggggagcaggccgccttcatgcagcagcccttcctggagcccacccacacccgggccctgtctgtgcggcaggcccccctggccgctgtgggcatggatggcctggagaagcaccggctggtgtccaggacccacagcagccctgctgcctctgtgctgccccacccagccatggaccggcccctgcagcccggcagcgccactggaattgcctatgaccccctgatgctgaagcaccagtgtgtgtgtggcaacagcaccacccaccctgagcacgccggccgcatccagagcatctggagccggctgcaggagaccggcctgctgaacaagtgtgagcgcatccagggcaggaaggccagcctggaggagatccagctggtgcacagcgagcaccacagcctgctgtatggcaccaaccccctggatggccagaagctggacccccgcatcctgctgggagatgacagccagaagttcttcagcagcctgccctgtggcggcctgggcgtggacagcgacaccatctggaatgagctgcacagcagcggggccgccaggatggctgtgggctgtgtgattgagctggccagcaaggtggccagcggggagctgaagaatggatttgctgtggtgcggcccccaggccaccacgccgaggagagcacagccatgggcttctgcttcttcaacagcgtggccatcacagccaagtacctgcgggaccagctgaacatcagcaagatcctgattgtggacctggatgtgcaccacggcaatggcacccagcaggccttctatgctgaccccagcatcctgtacatcagcctgcacagatatgatgagggcaacttcttccctggcagcggggccccaaatgaggtgggcaccggcctgggggagggctacaacatcaacatcgcctggacaggaggcctggacccccccatgggagatgtggagtacctggaggccttccgcaccatcgtgaagcctgtggccaaggagtttgatcctgacatggtgctggtgtctgctggctttgatgccctggagggccacaccccacccctgggcggctacaaggtgacagccaagtgcttcggccacctgaccaagcagctgatgaccctggctgatggccgggtggtgctggccctggagggcggccatgacctgacagccatctgtgatgccagcgaggcctgtgtgaatgccctgctgggcaatgagctggagcccctggccgaggacatcctgcaccagagccccaacatgaatgctgtgatcagcctgcagaagatcatcgagatccagagcaagtactggaagtctgtgaggatggtggccgtgccccggggctgtgccctggccggggcccagctgcaggaggagacagaaacagtgtctgccctggccagcctgactgtggatgtggagcagccctttgcccaggaggacagcaggacagctggggagcccatggaggaggagcccgccctgtag

SEQ ID NO: 155426 - DNA, 447 bp, synthetic construct
  misc_feature 1..447: note = Description of Artificial Sequence: Synthetic coding sequence
  source 1..447: mol_type = other DNA
atgcacagcatgatcagctctgtggatgtgaagtctgaggtgcctgtgggcctggagcccatcagccccctggacctgaggacagacctgaggatgatgatgcctgtggtggaccctgtggtgcgggagaagcagctgcagcaggagctgctgctgatccagcagcagcagcagatccagaagcagctgctgattgctgagttccagaagcagcacgagaacctgacccggcagcaccaggcccagctgcaggagcacatcaagctgcagcaggagctgctggccatcaagcagcagcaggagctgctggagaaggagcagaagctggagcagcagaggcaggagcaggaggtggagcggcaccggcgggagcagcagctgccccccctgcggggcaaggaccggggccgggagagagctgtggccagcacagaggtgaagcagtag

SEQ ID NO: 155427 - DNA, 417 bp, synthetic construct
  misc_feature 1..417: note = Description of Artificial Sequence: Synthetic coding sequence
  source 1..417: mol_type = other DNA
atgcacagcatgatcagctctgtggatgtgaagtctgaggtgcctgtgggcctggagcccatcagccccctggacctgaggacagacctgaggatgatgatgcctgtggtggaccctgtggtgcgggagaagcagctgcagcaggagctgctgctgatccagcagcagcagcagatccagaagcagctgctgattgctgagttccagaagcagcacgagaacctgacccggcagcaccaggcccagctgcaggagcacatcaagctgcagcaggagctgctggccatcaagcagcagcaggagctgctggagaaggagcagaagctggagcagcagaggcaggagcaggaggtggagcggcaccggcgggagcagcagctgccccccctgcggggcaaggaccggggccgggagtag

SEQ ID NO: 155428 - DNA, 1767 bp, synthetic construct
  misc_feature 1..1767: note = Description of Artificial Sequence: Synthetic coding sequence
  source 1..1767: mol_type = other DNA
atgatgagcagccctgcccagcctgacctgatgtggaacctggtgccctgggtgctcttctgtggctgctgccgcatcttcccagatggagtggccggccgggagcagctgctggcccagcagaggatgcacagcatgatcagctctgtggatgtgaagtctgaggtgcctgtgggcctggagcccatcagccccctggacctgaggacagacctgaggatgatgatgcctgtggtggaccctgtggtgcgggagaagcagctgcagcaggagctgctgctgatccagcagcagcagcagatccagaagcagctgctgattgctgagttccagaagcagcacgagaacctgacccggcagcaccaggcccagctgcaggagcacatcaaggagctgctggccatcaagcagcagcaggagctgctggagaaggagcagaagctggagcagcagaggcaggagcaggaggtggagcggcacagaagagagcagcagctgccccccctgcggggcaaggaccggggccgggagagagctgtggccagcacagaggtgaagcagaagctgcaggagttcctgctgagcaagagcgccaccaaggacacccccaccaacgggaagaaccacagcgtgagccgccaccccaagctgtggtacacagctgcccaccacaccagcctggaccagagcagcccccccctgagcggcaccagccccagctacaagtacaccctgcccggggcccaggatgccaaggatgacttccccctgaggaagacagagagctctgtgagcagcagcagccctggcagcggccccagcagccccaacaacggccccactggatctgtgacagaaaatgagacctctgtgctgccccccacccctcatgctgagcagatggtgtcccagcagaggatcctgattcatgaagattccatgaacctgctgagcctgtacaccagccccagcctgcccaacatcaccctgggcctgcctgctgtgcccagccagctgaatgccagcaacagcctgaaggagaagcagaagtgtgagacccagaccctgcggcagggcgtgcccctgcccggccagtatggaggcagcatcccagccagcagcagccacccccacgtgaccctggagggcaagccacccaacagcagccaccaggccctgctgcagcacctgctgctgaaggagcagatgaggcagcagaagctgctggtggccggcggcgtgcccctgcacccccagagccccctggccaccaaggagcgcatcagccctggcatccggggcacccacaagctgcccaggcaccggcccctgaacagaacccagagcgcccccctgccccagagcaccctggcccagctggtgatccagcagcagcaccagcagttcctggagaagcagaagcagtaccagcagcagatccacatgaacaagctgctgagcaagagcattgagcagctgaagcagcccggcagccacctggaggaggccgaggaggagctgcagggcgaccaggccatgcaggaggaccgggcccccagcagcggcaacagcaccaggagtgacagcagcgcctgtgtggatgacaccctgggccaggtgggcgctgtgaaggtgaaggaggagcctgtggacagtgatgaagatgcccagatccaggagatggagagcggggagcaggccgccttcatgcagcaggtgattggcaaggacctggcccctggcttcgtcatcaaggtgatcatctag

SEQ ID NO: 155429 - DNA, 1641 bp, synthetic construct
  misc_feature 1..1641: note = Description of Artificial Sequence: Synthetic coding sequence
  source 1..1641: mol_type = other DNA
atgcacagcatgatcagctctgtggatgtgaagtctgaggtgcctgtgggcctggagcccatcagccccctggacctgaggacagacctgaggatgatgatgcctgtggtggaccctgtggtgcgggagaagcagctgcagcaggagctgctgctgatccagcagcagcagcagatccagaagcagctgctgattgctgagttccagaagcagcacgagaacctgacccggcagcaccaggcccagctgcaggagcacatcaaggagctgctggccatcaagcagcagcaggagctgctggagaaggagcagaagctggagcagcagaggcaggagcaggaggtggagcggcacagaagagagcagcagctgccccccctgcggggcaaggaccggggccgggagagagctgtggccagcacagaggtgaagcagaagctgcaggagttcctgctgagcaagagcgccaccaaggacacccccaccaacgggaagaaccacagcgtgagccgccaccccaagctgtggtacacagctgcccaccacaccagcctggaccagagcagcccccccctgagcggcaccagccccagctacaagtacaccctgcccggggcccaggatgccaaggatgacttccccctgaggaagacagagagctctgtgagcagcagcagccctggcagcggccccagcagccccaacaacggccccactggatctgtgacagaaaatgagacctctgtgctgccccccacccctcatgctgagcagatggtgtcccagcagaggatcctgattcatgaagattccatgaacctgctgagcctgtacaccagccccagcctgcccaacatcaccctgggcctgcctgctgtgcccagccagctgaatgccagcaacagcctgaaggagaagcagaagtgtgagacccagaccctgcggcagggcgtgcccctgcccggccagtatggaggcagcatcccagccagcagcagccacccccacgtgaccctggagggcaagccacccaacagcagccaccaggccctgctgcagcacctgctgctgaaggagcagatgaggcagcagaagctgctggtggccggcggcgtgcccctgcacccccagagccccctggccaccaaggagcgcatcagccctggcatccggggcacccacaagctgcccaggcaccggcccctgaacagaacccagagcgcccccctgccccagagcaccctggcccagctggtgatccagcagcagcaccagcagttcctggagaagcagaagcagtaccagcagcagatccacatgaacaagctgctgagcaagagcattgagcagctgaagcagcccggcagccacctggaggaggccgaggaggagctgcagggcgaccaggccatgcaggaggaccgggcccccagcagcggcaacagcaccaggagtgacagcagcgcctgtgtggatgacaccctgggccaggtgggcgctgtgaaggtgaaggaggagcctgtggacagtgatgaagatgcccagatccaggagatggagagcggggagcaggccgccttcatgcagcaggtgattggcaaggacctggcccctggcttcgtcatcaaggtgatcatctag

SEQ ID NO: 155430 - DNA, 3036 bp, synthetic construct
  misc_feature 1..3036: note = Description of Artificial Sequence: Synthetic coding sequence
  source 1..3036: mol_type = other DNA
atgcacagcatgatcagctctgtggatgtgaagtctgaggtgcctgtgggcctggagcccatcagccccctggacctgaggacagacctgaggatgatgatgcctgtggtggaccctgtggtgcgggagaagcagctgcagcaggagctgctgctgatccagcagcagcagcagatccagaagcagctgctgattgctgagttccagaagcagcacgagaacctgacccggcagcaccaggcccagctgcaggagcacatcaaggagctgctggccatcaagcagcagcaggagctgctggagaaggagcagaagctggagcagcagaggcaggagcaggaggtggagcggcacagaagagagcagcagctgccccccctgcggggcaaggaccggggccgggagagagctgtggccagcacagaggtgaagcagaagctgcaggagttcctgctgagcaagagcgccaccaaggacacccccaccaacgggaagaaccacagcgtgagccgccaccccaagctgtggtacacagctgcccaccacaccagcctggaccagagcagcccccccctgagcggcaccagccccagctacaagtacaccctgcccggggcccaggatgccaaggatgacttccccctgaggaagacagccagcgagcccaacctgaaggtgcgcagccggctgaagcagaaggtggccgagaggaggagcagccccctgctgcggaggaaggatggaaatgtggtgaccagcttcaagaagaggatgtttgaggtgacagagagctctgtgagcagcagcagccctggcagcggccccagcagccccaacaacggccccactggatctgtgacagaaaatgagacctctgtgctgccccccacccctcatgctgagcagatggtgtcccagcagaggatcctgattcatgaagattccatgaacctgctgagcctgtacaccagccccagcctgcccaacatcaccctgggcctgcctgctgtgcccagccagctgaatgccagcaacagcctgaaggagaagcagaagtgtgagacccagaccctgcggcagggcgtgcccctgcccggccagtatggaggcagcatcccagccagcagcagccacccccacgtgaccctggagggcaagccacccaacagcagccaccaggccctgctgcagcacctgctgctgaaggagcagatgaggcagcagaagctgctggtggccggcggcgtgcccctgcacccccagagccccctggccaccaaggagcgcatcagccctggcatccggggcacccacaagctgcccaggcaccggcccctgaacagaacccagagcgcccccctgccccagagcaccctggcccagctggtgatccagcagcagcaccagcagttcctggagaagcagaagcagtaccagcagcagatccacatgaacaagctgctgagcaagagcattgagcagctgaagcagcccggcagccacctggaggaggccgaggaggagctgcagggcgaccaggccatgcaggaggaccgggcccccagcagcggcaacagcaccaggagtgacagcagcgcctgtgtggatgacaccctgggccaggtgggcgctgtgaaggtgaaggaggagcctgtggacagtgatgaagatgcccagatccaggagatggagagcggggagcaggccgccttcatgcagcagcccttcctggagcccacccacacccgggccctgtctgtgcggcaggcccccctggccgctgtgggcatggatggcctggagaagcaccggctggtgtccaggacccacagcagccctgctgcctctgtgctgccccacccagccatggaccggcccctgcagcccggcagcgccactggaattgcctatgaccccctgatgctgaagcaccagtgtgtgtgtggcaacagcaccacccaccctgagcacgccggccgcatccagagcatctggagccggctgcaggagaccggcctgctgaacaagtgtgagcgcatccagggcaggaaggccagcctggaggagatccagctggtgcacagcgagcaccacagcctgctgtatggcaccaaccccctggatggccagaagctggacccccgcatcctgctgggagatgacagccagaagttcttcagcagcctgccctgtggcggcctgggcgtggacagcgacaccatctggaatgagctgcacagcagcggggccgccaggatggctgtgggctgtgtgattgagctggccagcaaggtggccagcggggagctgaagaatggatttgctgtggtgcggcccccaggccaccacgccgaggagagcacagccatgggcttctgcttcttcaacagcgtggccatcacagccaagtacctgcgggaccagctgaacatcagcaagatcctgattgtggacctggatgtgcaccacggcaatggcacccagcaggccttctatgctgaccccagcatcctgtacatcagcctgcacagatatgatgagggcaacttcttccctggcagcggggccccaaatgaggtgggcaccggcctgggggagggctacaacatcaacatcgcctggacaggaggcctggacccccccatgggagatgtggagtacctggaggccttccgcaccatcgtgaagcctgtggccaaggagtttgatcctgacatggtgctggtgtctgctggctttgatgccctggagggccacaccccacccctgggcggctacaaggtgacagccaagtgcttcggccacctgaccaagcagctgatgaccctggctgatggccgggtggtgctggccctggagggcggccatgacctgacagccatctgtgatgccagcgaggcctgtgtgaatgccctgctgggcaatgagctggagcccctggccgaggacatcctgcaccagagccccaacatgaatgctgtgatcagcctgcagaagatcatcgagatccagagcatgagcctgaagttctcctag

SEQ ID NO: 155431 - DNA, 72 bp, synthetic construct
  misc_feature 1..72: note = Description of Artificial Sequence: Synthetic coding sequence
  source 1..72: mol_type = other DNA
atgcacagcatgatcagctctgtggatgtgaagtctgaggtgcctgtgggcctggagcccatcagcccctag

SEQ ID NO: 155432 - DNA, 3210 bp, synthetic construct
  misc_feature 1..3210: note = Description of Artificial Sequence: Synthetic coding sequence
  source 1..3210: mol_type = other DNA
atgcacagcatgatcagctctgtggatgtgaagtctgaggtgcctgtgggcctggagcccatcagccccctggacctgaggacagacctgaggatgatgatgcctgtggtggaccctgtggtgcgggagaagcagctgcagcaggagctgctgctgatccagcagcagcagcagatccagaagcagctgctgattgctgagttccagaagcagcacgagaacctgacccggcagcaccaggcccagctgcaggagcacatcaagctgcagcaggagctgctggccatcaagcagcagcaggagctgctggagaaggagcagaagctggagcagcagaggcaggagcaggaggtggagcggcaccggcgggagcagcagctgccccccctgcggggcaaggaccggggccgggagagagctgtggccagcacagaggtgaagcagaagctgcaggagttcctgctgagcaagagcgccaccaaggacacccccaccaacgggaagaaccacagcgtgagccgccaccccaagctgtggtacacagctgcccaccacaccagcctggaccagagcagcccccccctgagcggcaccagccccagctacaagtacaccctgcccggggcccaggatgccaaggatgacttccccctgaggaagacagccagcgagcccaacctgaaggtgcgcagccggctgaagcagaaggtggccgagcggcgcagcagccccctgctgcggaggaaggatggaaatgtggtgaccagcttcaagaagaggatgtttgaggtgacagagagctctgtgagcagcagcagccctggcagcggccccagcagccccaacaacggccccaccggctctgtgacagaaaatgagacctctgtgctgccccccacccctcatgctgagcagatggtgtcccagcagaggatcctgattcatgaggacagcatgaacctgctgagcctgtacaccagccccagcctgcccaacatcaccctgggcctgcctgctgtgcccagccagctgaatgccagcaacagcctgaaggagaagcagaagtgtgagacccagaccctgcggcagggcgtgcccctgcccggccagtatggaggcagcatcccagccagcagcagccacccccacgtgaccctggagggcaagccacccaacagcagccaccaggccctgctgcagcacctgctgctgaaggagcagatgaggcagcagaagctgctggtggccggcggcgtgcccctgcacccccagagccccctggccaccaaggagcgcatcagccctggcatccggggcacccacaagctgcccaggcaccggcccctgaacagaacccagagcgcccccctgccccagagcaccctggcccagctggtgatccagcagcagcaccagcagttcctggagaagcagaagcagtaccagcagcagatccacatgaacaagctgctgagcaagagcattgagcagctgaagcagcccggcagccacctggaggaggccgaggaggagctgcagggcgaccaggccatgcaggaggaccgggcccccagcagcggcaacagcaccaggagtgacagcagcgcctgtgtggatgacaccctgggccaggtgggcgctgtgaaggtgaaggaggagcctgtggacagtgatgaagatgcccagatccaggagatggagagcggggagcaggccgccttcatgcagcagcccttcctggagcccacccacacccgggccctgtctgtgcggcaggcccccctggccgctgtgggcatggatggcctggagaagcaccggctggtgtccaggacccacagcagccctgctgcctctgtgctgccccacccagccatggaccggcccctgcagcccggcagcgccaccggcatcgcctatgaccccctgatgctgaagcaccagtgtgtgtgtggcaacagcaccacccaccctgagcacgccggccgcatccagagcatctggagccggctgcaggagaccggcctgctgaacaagtgtgagcgcatccagggcaggaaggccagcctggaggagatccagctggtgcacagcgagcaccacagcctgctgtatggcaccaaccccctggatggccagaagctggacccccgcatcctgctgggagatgacagccagaagttcttcagcagcctgccctgtggcggcctgggcgtggacagcgacaccatctggaatgagctgcacagcagtggagctgccaggatggctgtgggctgcgtcatcgagctggccagcaaggtggccagcggggagctgaagaatggatttgctgtggtgcggcccccaggccaccacgccgaggagagcacagccatgggcttctgcttcttcaacagcgtggccatcacagccaagtacctgcgggaccagctgaacatcagcaagatcctgattgtggacctggatgtgcaccacggcaatggcacccagcaggccttctacgccgaccccagcatcctgtacatcagcctgcacagatatgatgagggcaacttcttccctggcagcggggccccaaatgaggtgggcaccggcctgggggagggctacaacatcaacatcgcctggacaggaggcctggacccccccatgggagatgtggagtacctggaggccttccgcaccatcgtgaagcctgtggccaaggagtttgatcctgacatggtgctggtgtctgctggctttgatgccctggagggccacaccccacccctgggcggctacaaggtgacagccaagtgcttcggccacctgaccaagcagctgatgaccctggctgatggccgggtggtgctggccctggagggcggccatgacctgacagccatctgtgatgccagcgaggcctgtgtgaatgccctgctgggcaatgagctggagcccctggccgaggacatcctgcaccagagccccaacatgaatgctgtgatcagcctgcagaagatcatcgagatccagagcaagtactggaagtctgtgaggatggtggccgtgccccggggctgtgccctggccggggcccagctgcaggaggagacagagaccgtgtctgccctggccagcctgactgtggatgtggagcagccctttgcccaggaggacagcaggacagctggggagcccatggaggaggagcccgccctgtag

SEQ ID NO: 155433 - DNA, 1689 bp, synthetic construct
  misc_feature 1..1689: note = Description of Artificial Sequence: Synthetic coding sequence
  source 1..1689: mol_type = other DNA
atgatgatgcctgtggtggaccctgtggtgcgggagaagcagctgcagcaggagctgctgctgatccagcagcagcagcagatccagaagcagctgctgattgctgagttccagaagcagcacgagaacctgacccggcagcaccaggcccagctgcaggagcacatcaagctgcagcaggagctgctggccatcaagcagcagcaggagctgctggagaaggagcagaagctggagcagcagaggcaggagcaggaggtggagcggcacagaagagagcagcagctgccccccctgcggggcaaggaccggggccgggagagagctgtggccagcacagaggtgaagcagaagctgcaggagttcctgctgagcaagagcgccaccaaggacacccccaccaacgggaagaaccacagcgtgagccgccaccccaagctgtggtacacagctgcccaccacaccagcctggaccagagcagcccccccctgagcggcaccagccccagctacaagtacaccctgcccggggcccaggatgccaaggatgacttccccctgaggaagacagccagcgagcccaacctgaaggtgcgcagccggctgaagcagaaggtggccgagaggaggagcagccccctgctgcggaggaaggatggaaatgtggtgaccagcttcaagaagaggatgtttgaggtgacagagagctctgtgagcagcagcagccctggcagcggccccagcagccccaacaacggccccactggatctgtgacagaaaatgagacctctgtgctgccccccacccctcatgctgagcagatggtgtcccagcagaggatcctgattcatgaagattccatgaacctgctgagcctgtacaccagccccagcctgcccaacatcaccctgggcctgcctgctgtgcccagccagctgaatgccagcaacagcctgaaggagaagcagaagtgtgagacccagaccctgcggcagggcgtgcccctgcccggccagtatggaggcagcatcccagccagcagcagccacccccacgtgaccctggagggcaagccacccaacagcagccaccaggccctgctgcagcacctgctgctgaaggagcagatgaggcagcagaagctgctggtggccggcggcgtgcccctgcacccccagagccccctggccaccaaggagcgcatcagccctggcatccggggcacccacaagctgcccaggcaccggcccctgaacagaacccagagcgcccccctgccccagagcaccctggcccagctggtgatccagcagcagcaccagcagttcctggagaagcagaagcagtaccagcagcagatccacatgaacaagctgctgagcaagagcattgagcagctgaagcagcccggcagccacctggaggaggccgaggaggagctgcagggcgaccaggccatgcaggaggaccgggcccccagcagcggcaacagcaccaggagtgacagcagcgcctgtgtggatgacaccctgggccaggtgggcgctgtgaaggtgaaggaggagcctgtggacagtgatgaagatgcccagatccaggagatggagagcggggagcaggccgccttcatgcagcaggtgattggcaaggacctggcccctggcttcgtcatcaaggtgatcatctag

SEQ ID NO: 155434 - DNA, 1542 bp, synthetic construct
  misc_feature 1..1542: note = Description of Artificial Sequence: Synthetic coding sequence
  source 1..1542: mol_type = other DNA
atgatgatgcctgtggtggaccctgtggtgcgggagaagcagctgcagcaggagctgctgctgatccagcagcagcagcagatccagaagcagctgctgattgctgagttccagaagcagcacgagaacctgacccggcagcaccaggcccagctgcaggagcacatcaaggagctgctggccatcaagcagcagcaggagctgctggagaaggagcagaagctggagcagcagaggcaggagcaggaggtggagcggcaccggcgggagcagcagctgccccccctgcggggcaaggaccggggccgggagagagctgtggccagcacagaggtgaagcagaagctgcaggagttcctgctgagcaagagcgccaccaaggacacccccaccaacgggaagaaccacagcgtgagccgccaccccaagctgtgggccgcccaccacaccagcctggaccagagcagcccccccctgagcggcaccagccccagctacaagtacaccctgcccggggcccaggatgccaaggatgacttccccctgaggaagacagagagctctgtgagcagcagcagccctggcagcggccccagcagccccaacaacggccccaccggctctgtgacagaaaatgagacctctgtgctgccccccacccctcatgctgagcagatggtgtcccagcagaggatcctgattcatgaggacagcatgaacctgctgagcctgtacaccagccccagcctgcccaacatcaccctgggcctgcctgctgtgcccagccagctgaatgccagcaacagcctgaaggagaagcagaagtgtgagacccagaccctgcggcagggcgtgcccctgcccggccagtatggaggcagcatcccagccagcagcagccacccccacgtgaccctggagggcaagccacccaacagcagccaccaggccctgctgcagcacctgctgctgaaggagcagatgaggcagcagaagctgctggtggccggcggcgtgcccctgcacccccagagccccctggccaccaaggagcgcatcagccctggcatccggggcacccacaagctgcccaggcaccggcccctgaacagaacccagagcgcccccctgccccagagcaccctggcccagctggtgatccagcagcagcaccagcagttcctggagaagcagaagcagtaccagcagcagatccacatgaacaagctgctgagcaagagcattgagcagctgaagcagcccggcagccacctggaggaggccgaggaggagctgcagggcgaccaggccatgcaggaggaccgggcccccagcagcggcaacagcaccaggagtgacagcagcgcctgtgtggatgacaccctgggccaggtgggcgctgtgaaggtgaaggaggagcctgtggacagtgatgaagatgcccagatccaggagatggagagcggggagcaggccgccttcatgcagcaggtgattggcaaggacctggcccctggctttgtgatcaaggtgatcatctag

SEQ ID NO: 155435 - DNA, 1980 bp, synthetic construct
  misc_feature 1..1980: note = Description of Artificial Sequence: Synthetic coding sequence
  source 1..1980: mol_type = other DNA
atgagggtgaaccacacagtgtccaccatgctgcccacctgcatggtgcaccggcagaccatgagctgcagcggggccggcggcatcacagcctttgtggccttcagagatgtggccgtgtacttcacccaggaggagtggaggctgctgagccctgcccagaggaccctgcaccgggaggtgatgctggagacctacaaccacctggtgtccctggagatccccagcagcaagcccaagctgattgcccagctggagcggggggaggccccctggagggaggagaggaaatgtcccctggacctgtgcccagagagcaagccagagatccagctgagccccagctgccccctcatcttcagcagccagcaggccctgagccagcacgtgtggctgagccacctgagccagctgttcagcagcctgtgggccggcaaccccctgcacctgggcaagcactacccagaggaccagaagcagcagcaggaccccttctgcttcagcggcaaggccgagtggatccaggagggggaggacagccggctgctgtttggccgggtgtccaagaatggcaccagcaaggccctgagcagccccccagaggagcagcagcctgcccagagcaaggaggacaacacagtggtggacatcggcagcagccctgagaggagagctgacctggaggagacagacaaggtgctgcacggcctggaggtgtctggctttggagagatcaagtatgaggagtttggacctggcttcatcaaggagagcaacctgctgagcctgcagaagacccagacaggagagaccccctacatgtacacagagtggggagacagctttggctccatgtctgtgctgatcaagaaccccaggacccacagcggcggcaagccctacgtgtgcagagaatgtggccggggcttcacctggaagagcaacctgatcacccaccagaggacccacagcggggagaagccctacgtgtgcaaggactgtggccggggcttcacctggaagagcaacctcttcacccaccagaggacccacagcggcctgaagccctacgtgtgcaaggaatgtggccagagcttcagcctgaagagcaacctgatcacccaccagagggcccacactggagagaagccctacgtgtgcagagaatgtggccggggcttccggcagcacagccacctggtgcgccacaagaggacccacagcggggagaagccctacatctgcagagaatgtgagcagggcttcagccagaagagccacctgatccgccacctgcggacccacactggagagaagccctacgtgtgcacagaatgtggccgccacttctcctggaagagcaacctgaagacccaccagaggacccacagcggcgtgaagccctacgtgtgcctggagtgtggccagtgcttcagcctgaagagcaacctgaacaagcaccagaggagccacactggagagaagccctttgtgtgcacagaatgtggccggggcttcaccaggaagagcaccctgagcacccaccagaggacccacagcggggagaagccctttgtgtgtgctgaatgtggccggggcttcaatgacaagagcaccctcatcagccaccagaggacccacagcggggagaagcccttcatgtgcagagaatgtggccgccgcttccggcagaagcccaacctcttccgccacaagagggcccacagcggggcctttgtgtgcagagaatgtggccagggcttctgtgccaagctgaccctcatcaagcaccagagggcccacgccggcggcaagccccacgtgtgcagagaatgtggccagggcttcagccggcagagccacctgatccgccaccagaggacccacagcggggagaagccctacatctgcaggaaatgtggccggggcttcagcaggaagagcaacctgatccgccaccagaggacccacagcggctag

SEQ ID NO: 155436 - DNA, 1923 bp, synthetic construct
  misc_feature 1..1923: note = Description of Artificial Sequence: Synthetic coding sequence
  source 1..1923: mol_type = other DNA
atggccaccggcctgctgcgggccaagaaggaggcctttgtggccttcagagatgtggccgtgtacttcacccaggaggagtggaggctgctgagccctgcccagaggaccctgcaccgggaggtgatgctggagacctacaaccacctggtgtccctggagatccccagcagcaagcccaagctgattgcccagctggagcggggggaggccccctggagggaggagaggaagtgccccctggacctgtgcccagagagcaagccagagatccagctgagccccagctgccccctcatcttcagcagccagcaggccctgagccagcacgtgtggctgagccacctgagccagctgttcagcagcctgtgggccggcaaccccctgcacctgggcaagcactacccagaggaccagaagcagcagcaggaccccttctgcttcagcggcaaggccgagtggatccaggagggggaggacagccggctgctgtttggccgggtgtccaagaatggcaccagcaaggccctgagcagccccccagaggagcagcagcctgcccagagcaaagaagacaacacagtggtggacatcggcagcagccctgagcggcgggctgacctggaggagacagacaaggtgctgcacggcctggaggtgtctggctttggagagatcaagtatgaggagtttggacctggcttcatcaaggagagcaacctgctgagcctgcagaagacccagacaggagagaccccctacatgtacacagagtggggagacagctttggctccatgtctgtgctgatcaagaaccccaggacccacagcggcggcaagccctacgtgtgccgggagtgtggccggggcttcacctggaagagcaacctgatcacccaccagaggacccacagcggggagaagccctacgtgtgcaaggactgtggccggggcttcacctggaagagcaacctcttcacccaccagaggacccacagcggcctgaagccctacgtgtgcaaggaatgtggccagagcttcagcctgaagagcaacctgatcacccaccagagggcccacactggagagaagccctacgtgtgccgggagtgtggccggggcttccggcagcacagccacctggtgcgccacaagaggacccacagcggggagaagccctacatctgccgggagtgtgagcagggcttcagccagaagagccacctgatccgccacctgcggacccacactggagagaagccctacgtgtgcacagaatgtggccgccacttctcctggaagagcaacctgaagacccaccagaggacccacagcggcgtgaagccctacgtgtgcctggagtgtggccagtgcttcagcctgaagagcaacctgaacaagcaccagaggagccacactggagagaagccctttgtgtgcacagaatgtggccggggcttcaccaggaagagcaccctgagcacccaccagaggacccacagcggggagaagccctttgtgtgtgccgagtgtggccggggcttcaatgacaagagcaccctcatcagccaccagaggacccacagcggggagaagcccttcatgtgccgggagtgtggccgccgcttccggcagaagcccaacctcttccgccacaagagggcccacagcggggcctttgtgtgccgggagtgtggccagggcttctgtgccaagctgaccctcatcaagcaccagagggcccatgctgggggcaagccccacgtgtgccgggagtgtggccagggcttcagccggcagagccacctgatccgccaccagaggacccacagcggggagaagccctacatctgcaggaaatgtggccggggcttcagcaggaagagcaacctgatccgccaccagaggacccacagcggctag

SEQ ID NO: 155437 - DNA, 1317 bp, synthetic construct
  misc_feature 1..1317: note = Description of Artificial Sequence: Synthetic coding sequence
  source 1..1317: mol_type = other DNA
atgctggagacctacaaccacctggtgtccctggagatccccagcagcaagcccaagctgattgcccagctggagcggggggaggccccctggagggaggagaggaagtgccccctggacctgtgcccagagagcaagccagagatccagctgagccccagctgccccctcatcttcagcagccagcaggccctgagccagcacgtgtggctgagccacctgagccagctgttcagcagcctgtgggccggcaaccccctgcacctgggcaagcactacccagaggaccagaagcagcagcaggaccccttctgcttcagcggcaaggccgagtggatccaggagggggaggacagccggctgctgtttggccgggtgtccaagaatggcaccagcaaggccctgagcagccccccagaggagcagcagcctgcccagagcaaagaagacaacacagtggtggacatcggcagcagccctgagcggcgggctgacctggaggagacagacaaggtgctgcacggcctggaggtgtctggctttggagagatcaagtatgaggagtttggacctggcttcatcaaggagagcaacctgctgagcctgcagaagagccacctgatccgccacctgcggacccacactggagagaagccctacgtgtgcacagaatgtggccgccacttctcctggaagagcaacctgaagacccaccagaggacccacagcggcgtgaagccctacgtgtgcctggagtgtggccagtgcttcagcctgaagagcaacctgaacaagcaccagaggagccacactggagagaagccctttgtgtgcacagaatgtggccggggcttcaccaggaagagcaccctgagcacccaccagaggacccacagcggggagaagccctttgtgtgtgccgagtgtggccggggcttcaatgacaagagcaccctcatcagccaccagaggacccacagcggggagaagcccttcatgtgccgggagtgtggccgccgcttccggcagaagcccaacctcttccgccacaagagggcccacagcggggcctttgtgtgccgggagtgtggccagggcttctgtgccaagctgaccctcatcaagcaccagagggcccatgctgggggcaagccccacgtgtgccgggagtgtggccagggcttcagccggcagagccacctgatccgccaccagaggacccacagcggggagaagccctacatctgcaggaaatgtggccggggcttcagcaggaagagcaacctgatccgccaccagaggacccacagcggctag

SEQ ID NO: 155438 - DNA, 1797 bp, synthetic construct
  misc_feature 1..1797: note = Description of Artificial Sequence: Synthetic coding sequence
  source 1..1797: mol_type = other DNA
atgctggagacctacaaccacctggtgtccctggagatccccagcagcaagcccaagctgattgcccagctggagcggggggaggccccctggagggaggagaggaagtgccccctggacctgtgcccagagagcaagccagagatccagctgagccccagctgccccctcatcttcagcagccagcaggccctgagccagcacgtgtggctgagccacctgagccagctgttcagcagcctgtgggccggcaaccccctgcacctgggcaagcactacccagaggaccagaagcagcagcaggaccccttctgcttcagcggcaaggccgagtggatccaggagggggaggacagccggctgctgtttggccgggtgtccaagaatggcaccagcaaggccctgagcagccccccagaggagcagcagcctgcccagagcaaagaagacaacacagtggtggacatcggcagcagccctgagcggcgggctgacctggaggagacagacaaggtgctgcacggcctggaggtgtctggctttggagagatcaagtatgaggagtttggacctggcttcatcaaggagagcaacctgctgagcctgcagaagacccagacaggagagaccccctacatgtacacagagtggggagacagctttggctccatgtctgtgctgatcaagaaccccaggacccacagcggcggcaagccctacgtgtgccgggagtgtggccggggcttcacctggaagagcaacctgatcacccaccagaggacccacagcggggagaagccctacgtgtgcaaggactgtggccggggcttcacctggaagagcaacctcttcacccaccagaggacccacagcggcctgaagccctacgtgtgcaaggaatgtggccagagcttcagcctgaagagcaacctgatcacccaccagagggcccacactggagagaagccctacgtgtgccgggagtgtggccggggcttccggcagcacagccacctggtgcgccacaagaggacccacagcggggagaagccctacatctgccgggagtgtgagcagggcttcagccagaagagccacctgatccgccacctgcggacccacactggagagaagccctacgtgtgcacagaatgtggccgccacttctcctggaagagcaacctgaagacccaccagaggacccacagcggcgtgaagccctacgtgtgcctggagtgtggccagtgcttcagcctgaagagcaacctgaacaagcaccagaggagccacactggagagaagccctttgtgtgcacagaatgtggccggggcttcaccaggaagagcaccctgagcacccaccagaggacccacagcggggagaagccctttgtgtgtgccgagtgtggccggggcttcaatgacaagagcaccctcatcagccaccagaggacccacagcggggagaagcccttcatgtgccgggagtgtggccgccgcttccggcagaagcccaacctcttccgccacaagagggcccacagcggggcctttgtgtgccgggagtgtggccagggcttctgtgccaagctgaccctcatcaagcaccagagggcccatgctgggggcaagccccacgtgtgccgggagtgtggccagggcttcagccggcagagccacctgatccgccaccagaggacccacagcggggagaagccctacatctgcaggaaatgtggccggggcttcagcaggaagagcaacctgatccgccaccagaggacccacagcggctag

SEQ ID NO: 155439 - DNA, 2190 bp, synthetic construct
  misc_feature 1..2190: note = Description of Artificial Sequence: Synthetic coding sequence
  source 1..2190: mol_type = other DNA
tcctggctgggccctgggaaggccagcctgctgcgctccttcccccacctgtgcaccctgctgcctgacttccggctgcaggacccccagagggccccagccttccacctgagcagcgagaccctgcccttcagcaggaagagcacccaggagaccaggaagatggccaccggcctgctgcgggccaagaaggaggcctttgtggccttcagagatgtggccgtgtacttcacccaggaggagtggaggctgctgagccctgcccagaggaccctgcaccgggaggtgatgctggagacctacaaccacctggtgtccctggagatccccagcagcaagcccaagctgattgcccagctggagcggggggaggccccctggagggaggagaggaagtgccccctggacctgtgcccagctgagagcaagccagagatccagctgagccccagctgccccctcatcttcagcagccagcaggccctgagccagcacgtgtggctgagccacctgagccagctgttcagcagcctgtgggccggcaaccccctgcacctgggcaagcactacccagaggaccagaagcagcagcaggaccccttctgcttcagcggcaaggccgagtggatccaggagggggaggacagccggctgctgtttggccgggtgtccaagaatggcaccagcaaggccctgagcagccccccagaggagcagcagcctgcccagagcaaggaggacaacacagtggtggacatcggcagcagccctgagaggagagctgacctggaggagacagacaaggtgctgcacggcctggaggtgtctggctttggagagatcaagtatgaggagtttggacctggcttcatcaaggagagcaacctgctgagcctgcagaagacccagacaggagagaccccctacatgtacacagagtggggagacagctttggctccatgtctgtgctgatcaagaaccccaggacccacagcggcggcaagccctacgtgtgcagagaatgtggccggggcttcacctggaagagcaacctgatcacccaccagaggacccacagcggggagaagccctacgtgtgcaaggactgtggccggggcttcacctggaagagcaacctcttcacccaccagaggacccacagcggcctgaagccctacgtgtgcaaggaatgtggccagagcttcagcctgaagagcaacctgatcacccaccagagggcccacactggagagaagccctacgtgtgcagagaatgtggccggggcttccggcagcacagccacctggtgcgccacaagaggacccacagcggggagaagccctacatctgcagagaatgtgagcagggcttcagccagaagagccacctgatccgccacctgcggacccacactggagagaagccctacgtgtgcacagaatgtggccgccacttctcctggaagagcaacctgaagacccaccagaggacccacagcggcgtgaagccctacgtgtgcctggagtgtggccagtgcttcagcctgaagagcaacctgaacaagcaccagaggagccacactggagagaagccctttgtgtgcacagaatgtggccggggcttcaccaggaagagcaccctgagcacccaccagaggacccacagcggggagaagccctttgtgtgtgctgaatgtggccggggcttcaatgacaagagcaccctcatcagccaccagaggacccacagcggggagaagcccttcatgtgcagagaatgtggccgccgcttccggcagaagcccaacctcttccgccacaagagggcccacagcggggcctttgtgtgcagagaatgtggccagggcttctgtgccaagctgaccctcatcaagcaccagagggcccatggaggcagcctgatgtgtgccggctctgtgggcaaggccctggccggcagccacaccagcctggacacccggggccacatccaggagaggagcctcatctttgctgagagcgtggatggagccctggtgggcagccccaccctgagtgacatccggggccacacccaggacaggaacttcatgtgcattggaaatgtggtgcagcccctggcccggagccacaccagcagtgacacccggggccacacccagtgctgcggcttcttcagccactgctag

SEQ ID NO: 155440 - DNA, 1161 bp, synthetic construct
  misc_feature 1..1161: note = Description of Artificial Sequence: Synthetic coding sequence
  source 1..1161: mol_type = other DNA
atgtacacagagtggggagacagctttggctccatgtctgtgctgatcaagaaccccaggacccacagcggcggcaagccctacgtgtgccgggagtgtggccggggcttcacctggaagagcaacctgatcacccaccagaggacccacagcggggagaagccctacgtgtgcaaggactgtggccggggcttcacctggaagagcaacctcttcacccaccagaggacccacagcggcctgaagccctacgtgtgcaaggaatgtggccagagcttcagcctgaagagcaacctgatcacccaccagagggcccacactggagagaagccctacgtgtgccgggagtgtggccggggcttccggcagcacagccacctggtgcgccacaagaggacccacagcggggagaagccctacatctgccgggagtgtgagcagggcttcagccagaagagccacctgatccgccacctgcggacccacactggagagaagccctacgtgtgcacagaatgtggccgccacttctcctggaagagcaacctgaagacccaccagaggacccacagcggcgtgaagccctacgtgtgcctggagtgtggccagtgcttcagcctgaagagcaacctgaacaagcaccagaggagccacactggagagaagccctttgtgtgcacagaatgtggccggggcttcaccaggaagagcaccctgagcacccaccagaggacccacagcggggagaagccctttgtgtgtgccgagtgtggccggggcttcaatgacaagagcaccctcatcagccaccagaggacccacagcggggagaagcccttcatgtgccgggagtgtggccgccgcttccggcagaagcccaacctcttccgccacaagagggcccacagcggggcctttgtgtgccgggagtgtggccagggcttctgtgccaagctgaccctcatcaagcaccagagggcccatgctgggggcaagccccacgtgtgccgggagtgtggccagggcttcagccggcagagccacctgatccgccaccagaggacccacagcggggagaagccctacatctgcaggaaatgtggccggggcttcagcaggaagagcaacctgatccgccaccagaggacccacagcggctag

SEQ ID NO: 155441 - DNA, 612 bp, synthetic construct
  misc_feature 1..612: note = Description of Artificial Sequence: Synthetic coding sequence
  source 1..612: mol_type = other DNA
atgggcggcagcctgcgggtggccgtgctgggcgcccctggggtgggcaagacagccatcatccggcagttcctgtttggagactacccagagcggcaccggcccacagatggcccccggctgtacagacctgctgtgctgctggatggagctgtgtatgacctgagcatcagagatggagatgtggccggccctggcagcagccctgggggccctgaggagtggccagatgccaaggactggagcctgcaggacacagatgcctttgtgctggtgtatgacatctgcagcccagacagctttgattatgtgaaggccctgcggcagagaattgctgagaccaggcctgctggggcccctgaggcccccatcctggtggtgggcaacaagagggaccggcagaggctgcgcttcggcccccggcgggccctggccgccctggtgagaagaggctggaggtgtggctacctggagtgcagcgccaagtacaactggcacgtgctgcggctcttccgggagctgctgcgctgtgccctggtgcgggcccggcctgcccacccagccctgcggctgcagggcgccctgcacccagcccgctgcagcctgatgtag

SEQ ID NO: 155442 - DNA, 1479 bp, synthetic construct
  misc_feature 1..1479: note = Description of Artificial Sequence: Synthetic coding sequence
  source 1..1479: mol_type = other DNA
atggacctgctgaaggccatcaccagccccctggccgccggcagcaagcccagcaagaagacaggagagaagagcagcggcagcagcagccacagcgagagcaagaaggagcaccacaggaagaaggtgtctggcagcagtggagagctgcccctggaggatggcggcagccacaagagcaagaagatgaagcccctgtatgtgaacacagagaccctgaccctgcgggagccagatggcctgaagatgaagctgatcctgagccccaaggagaagggcagcagctctgtggatgaggagagcttccagtaccccagccagcaggccaccgtgaagaagagcagcaagaagagcgccagagatgagcagggcgccctgctgctgggccacgagctgcagagcttcctgaagacagccaggaagaagcacaagagcagcagtgatgcccacagcagccctggccctgagggctgcggcagtgatgccagccagtttgctgagagccacagcgccaacctggacctgagcggcctggagcccatcctggtggagagtgacagcagcagtggaggagagctggaggccggggagctggtgattgatgacagctaccgggagatcaagaagaagaagaagagcaagaagagcaagaagaagaaggacaaggagaagcacaaggagaagaggcacagcaagagcaagaggagcctgggcctgtctgctgtgcctgtgggggaggtgacagtgaccagcggccccccacccagcatcccctatgctggagctgctgccccacccctgcccctgcccggcctgcacacagatggccacagcgagaagaagaagaagaaggaggagaaggacaaggagcgggagcggggggagaagcccaagaagaagaacatgtctgcctaccaggtgttctgcaaggagtacagagtgaccatcgtggccgaccaccctggcatcgactttggagagctgagcaagaagctggccgaggtgtggaagcagctgcctgagaaggacaagctgatctggaagcagaaggcccagtacctgcagcacaagcagaacaaggccgaggccaccaccgtgaagaggaaggccagcagcagcgagggctccatgaaggtgaaggccagctctgtgggcgtgctgagcccccagaagaagagcccccccaccaccatgctgctgcctgccagccctgccaaggcccctgagacagagcccattgatgtggccgcccacctgcagctgctgggggagagcctgagcctgattggccaccggctgcaggagacagagggcatggtggccgtgtctggcagcctgtctgtgctgctggacagcatcatctgtgccctgggccccctggcctgcctgaccacccagctgcctgagctgaatggctgccccaagcaggtgctgagcaacaccctggacaacatcgcctacatcatgcctggcctgtag

SEQ ID NO: 155443 - DNA, 1896 bp, synthetic construct
  misc_feature 1..1896: note = Description of Artificial Sequence: Synthetic coding sequence
  source 1..1896: mol_type = other DNA
atggtgtccaagctgagccagctgcagacagagctgctggccgccctgctggagagcggcctgagcaaggaggccctgatccaggccctgggggagcccggcccctacctgctggccggggagggccccctggacaagggggagagctgtggcggcggccgcggggagctggccgagctgcccaacggcctgggggagacccggggctctgaagatgaaacagatgatgatggagaggacttcaccccacccatcctgaaggagctggagaacctgagccctgaggaggccgcccaccagaaggctgtggtggagaccctgctgcaggaggacccctggagggtggccaagatggtgaagagctacctgcagcagcacaacatcccccagcgggaggtggtggacaccaccggcctgaaccagagccacctgagccagcacctgaacaagggcacccccatgaagacccagaagagagctgccctgtacacctggtacgtgaggaagcagcgggaggtggcccagcagttcacccacgccggccagggcggcctcatcgaggagcccactggagatgagctgcccaccaagaagggcagaagaaaccgcttcaagtggggccctgccagccagcagatcctcttccaggcctatgaaaggcagaagaaccccagcaaggaggagcgggagaccctggtggaggagtgcaacagagctgagtgcatccagaggggcgtgagccccagccaggcccagggcctgggcagcaacctggtgacagaggtgcgggtgtacaactggtttgccaacagaaggaaggaggaggccttccgccacaagctggccatggacacctacagcggccccccacctggccctggccctggccctgccctgcctgcccacagcagccctggcctgcccccaccagccctgagccccagcaaggtgcacggcgtgcgctatggccagcctgccaccagcgagacagctgaggtgcccagcagcagcggcggccccctggtgacagtgtccacccccctgcaccaggtgagccccaccggcctggagcccagccacagcctgctgagcacagaggccaagctggtgtctgctgctgggggccccctgccccctgtgtccaccctgacagccctgcacagcctggagcagaccagccctggcctgaaccagcagccccagaacctgatcatggccagcctgcccggggtgatgaccatcggccctggagagcccgccagcctgggccccaccttcaccaacacaggagccagcaccctggtgattggcctggccagcacccaggcccagagcgtgcctgtgatcaacagcatgggcagcagcctgaccaccctgcagcctgtgcagttcagccagcccctgcaccccagctaccagcagcccctgatgcctcctgtgcagagccacgtgacccagagccccttcatggccaccatggcccagctgcagagcccccacgccctgtacagccacaagccagaggtggcccagtacacccacacaggcctgctgccccagaccatgctgatcacagacaccaccaacctgagcgccctggccagcctgacccccaccaagcaggtgttcaccagtgacacagaggccagcagcgagagcggcctgcacaccccagccagccaggccaccaccctgcacgtgcccagccaggaccctgccagcatccagcacctgcagcctgcccaccggctgagcgccagccccaccgtgagcagcagcagcctggtgctgtaccagagcagtgacagcagcaatggccagagccacctgctgcccagcaaccacagcgtcatcgagaccttcatcagcacccagatggccagcagcagccagtag

SEQ ID NO: 155444 - DNA, 1719 bp, synthetic construct
  misc_feature 1..1719: note = Description of Artificial Sequence: Synthetic coding sequence
  source 1..1719: mol_type = other DNA
atggtgtccaagctgagccagctgcagacagagctgctggccgccctgctggagagcggcctgagcaaggaggccctgatccaggccctgggggagcccggcccctacctgctggccggggagggccccctggacaagggggagagctgtggcggcggccgcggggagctggccgagctgcccaacggcctgggggagacccggggctctgaagatgaaacagatgatgatggagaggacttcaccccacccatcctgaaggagctggagaacctgagccctgaggaggccgcccaccagaaggctgtggtggagaccctgctgcaggaggacccctggagggtggccaagatggtgaagagctacctgcagcagcacaacatcccccagcgggaggtggtggacaccaccggcctgaaccagagccacctgagccagcacctgaacaagggcacccccatgaagacccagaagagagctgccctgtacacctggtacgtgaggaagcagcgggaggtggcccagcagttcacccacgccggccagggcggcctcatcgaggagcccactggagatgagctgcccaccaagaagggcagaagaaaccgcttcaagtggggccctgccagccagcagatcctcttccaggcctatgaaaggcagaagaaccccagcaaggaggagcgggagaccctggtggaggagtgcaacagagctgagtgcatccagaggggcgtgagccccagccaggcccagggcctgggcagcaacctggtgacagaggtgcgggtgtacaactggtttgccaacagaaggaaggaggaggccttccgccacaagctggccatggacacctacagcggccccccacctggccctggccctggccctgccctgcctgcccacagcagccctggcctgcccccaccagccctgagccccagcaaggtgcacggcgtgcgctatggccagcctgccaccagcgagacagctgaggtgcccagcagcagcggcggccccctggtgacagtgtccacccccctgcaccaggtgagccccaccggcctggagcccagccacagcctgctgagcacagaggccaagctggtgtctgctgctgggggccccctgccccctgtgtccaccctgacagccctgcacagcctggagcagaccagccctggcctgaaccagcagccccagaacctgatcatggccagcctgcccggggtgatgaccatcggccctggagagcccgccagcctgggccccaccttcaccaacacaggagccagcaccctggtgattggcctggccagcacccaggcccagagcgtgcctgtgatcaacagcatgggcagcagcctgaccaccctgcagcctgtgcagttcagccagcccctgcaccccagctaccagcagcccctgatgcctcctgtgcagagccacgtgacccagagccccttcatggccaccatggcccagctgcagagcccccacggggagaggcctgtgccccacacagctggagatgatgaccggggctggctgtccatggatgctggggagcggggggcctggcaggccctgcagagcgcctgtgtgtctggcacctctgtgttcccctacagcagcaatggccagagccacctgctgcccagcaaccacagcgtgattgagaccttcatcagcacccagatggccagcagcagccagtag

SEQ ID NO: 155445 - DNA, 1566 bp, synthetic construct
  misc_feature 1..1566: note = Description of Artificial Sequence: Synthetic coding sequence
  source 1..1566: mol_type = other DNA
atggtgtccaagctgagccagctgcagacagagctgctggccgccctgctggagagcggcctgagcaaggaggccctgatccaggccctgggggagcccggcccctacctgctggccggggagggccccctggacaagggggagagctgtggcggcggccgcggggagctggccgagctgcccaacggcctgggggagacccggggctctgaagatgaaacagatgatgatggagaggacttcaccccacccatcctgaaggagctggagaacctgagccctgaggaggccgcccaccagaaggctgtggtggagaccctgctgcaggaggacccctggagggtggccaagatggtgaagagctacctgcagcagcacaacatcccccagcgggaggtggtggacaccaccggcctgaaccagagccacctgagccagcacctgaacaagggcacccccatgaagacccagaagagagctgccctgtacacctggtacgtgaggaagcagcgggaggtggcccagcagttcacccacgccggccagggcggcctcatcgaggagcccactggagatgagctgcccaccaagaagggcagaagaaaccgcttcaagtggggccctgccagccagcagatcctcttccaggcctatgaaaggcagaagaaccccagcaaggaggagcgggagaccctggtggaggagtgcaacagagctgagtgcatccagaggggcgtgagccccagccaggcccagggcctgggcagcaacctggtgacagaggtgcgggtgtacaactggtttgccaacagaaggaaggaggaggccttccgccacaagctggccatggacacctacagcggccccccacctggccctggccctggccctgccctgcctgcccacagcagccctggcctgcccccaccagccctgagccccagcaaggtgcacggcgtgcgctatggccagcctgccaccagcgagacagctgaggtgcccagcagcagcggcggccccctggtgacagtgtccacccccctgcaccaggtgagccccaccggcctggagcccagccacagcctgctgagcacagaggccaagctggtgtctgctgctgggggccccctgccccctgtgtccaccctgacagccctgcacagcctggagcagaccagccctggcctgaaccagcagccccagaacctgatcatggccagcctgcccggggtgatgaccatcggccctggagagcccgccagcctgggccccaccttcaccaacacaggagccagcaccctggtgattggcaagctggtgggcatgggcggccacctgggcggccgcctgatgggccagccccagaaccctggagctggccgggccaccggcacccacagcttcatccaccagcacgtgttcatccagtgcctgctgtggaccagccactgtgccaccagcgtcatccctggggacagcagcaatggccagagccacctgctgcccagcaaccacagcgtcatcgagaccttcatcagcacccagatggccagcagcagccagtag

SEQ ID NO: 155446 - DNA, 1572 bp, synthetic construct
  misc_feature 1..1572: note = Description of Artificial Sequence: Synthetic coding sequence
  source 1..1572: mol_type = other DNA
atggtgtccaagctgagccagctgcagacagagctgctggccgccctgctggagagcggcctgagcaaggaggccctgatccaggccctgggggagcccggcccctacctgctggccggggagggccccctggacaagggggagagctgtggcggcggccgcggggagctggccgagctgcccaacggcctgggggagacccggggctctgaagatgaaacagatgatgatggagaggacttcaccccacccatcctgaaggagctggagaacctgagccctgaggaggccgcccaccagaaggctgtggtggagaccctgctgcaggaggacccctggagggtggccaagatggtgaagagctacctgcagcagcacaacatcccccagcgggaggtggtggacaccaccggcctgaaccagagccacctgagccagcacctgaacaagggcacccccatgaagacccagaagagagctgccctgtacacctggtacgtgaggaagcagcgggaggtggcccagcagttcacccacgccggccagggcggcctcatcgaggagcccactggagatgagctgcccaccaagaagggcagaagaaaccgcttcaagtggggccctgccagccagcagatcctcttccaggcctatgaaaggcagaagaaccccagcaaggaggagcgggagaccctggtggaggagtgcaacagagctgagtgcatccagaggggcgtgagccccagccaggcccagggcctgggcagcaacctggtgacagaggtgtctgctgctgggggccccctgccccctgtgtccaccctgacagccctgcacagcctggagcagaccagccctggcctgaaccagcagccccagaacctgatcatggccagcctgcccggggtgatgaccatcggccctggagagcccgccagcctgggccccaccttcaccaacacaggagccagcaccctggtgattggcctggccagcacccaggcccagagcgtgcctgtgatcaacagcatgggcagcagcctgaccaccctgcagcctgtgcagttcagccagcccctgcaccccagctaccagcagcccctgatgcctcctgtgcagagccacgtgacccagagccccttcatggccaccatggcccagctgcagagcccccacgccctgtacagccacaagccagaggtggcccagtacacccacacaggcctgctgccccagaccatgctgatcacagacaccaccaacctgagcgccctggccagcctgacccccaccaagcaggtgttcaccagtgacacagaggccagcagcgagagcggcctgcacaccccagccagccaggccaccaccctgcacgtgcccagccaggaccctgccagcatccagcacctgcagcctgcccaccggctgagcgccagccccaccgtgagcagcagcagcctggtgctgtaccagagcagtgacagcagcaatggccagagccacctgctgcccagcaaccacagcgtcatcgagaccttcatcagcacccagatggccagcagcagccagtag

SEQ ID NO: 155447 - DNA, 1812 bp, synthetic construct
  misc_feature 1..1812: note = Description of Artificial Sequence: Synthetic coding sequence
  source 1..1812: mol_type = other DNA
atggtgtccaagctgagccagctgcagacagagctgctggccgccctgctggagagcggcctgagcaaggaggccctgatccaggccctgggggagcccggcccctacctgctggccggggagggccccctggacaagggggagagctgtggcggcggccgcggggagctggccgagctgcccaacggcctgggggagacccggggctctgaagatgaaacagatgatgatggagaggacttcaccccacccatcctgaaggagctggagaacctgagccctgaggaggccgcccaccagaaggctgtggtggagaccctgctgcaggaggacccctggagggtggccaagatggtgaagagctacctgcagcagcacaacatcccccagcgggaggtggtggacaccaccggcctgaaccagagccacctgagccagcacctgaacaagggcacccccatgaagacccagaagagagctgccctgtacacctggtacgtgaggaagcagcgggaggtggcccagcagttcacccacgccggccagggcggcctcatcgaggagcccactggagatgagctgcccaccaagaagggcagaagaaaccgcttcaagtggggccctgccagccagcagatcctcttccaggcctatgaaaggcagaagaaccccagcaaggaggagcgggagaccctggtggaggagtgcaacagagctgagtgcatccagaggggcgtgagccccagccaggcccagggcctgggcagcaacctggtgacagaggtgcgggtgtacaactggtttgccaacagaaggaaggaggaggccttccgccacaagctggccatggacacctacagcggccccccacctggccctggccctggccctgccctgcctgcccacagcagccctggcctgcccccaccagccctgagccccagcaaggtgcacggcgtgcgctatggccagcctgccaccagcgagacagctgaggtgcccagcagcagcggcggccccctggtgacagtgtccacccccctgcaccaggtgagccccaccggcctggagcccagccacagcctgctgagcacagaggccaagctggtgtctgctgctgggggccccctgccccctgtgtccaccctgacagccctgcacagcctggagcagaccagccctggcctgaaccagcagccccagaacctgatcatggccagcctgcccggggtgatgaccatcggccctggagagcccgccagcctgggccccaccttcaccaacacaggagccagcaccctggtgattggcctggccagcacccaggcccagagcgtgcctgtgatcaacagcatgggcagcagcctgaccaccctgcagcctgtgcagttcagccagcccctgcaccccagctaccagcagcccctgatgcctcctgtgcagagccacgtgacccagagccccttcatggccaccatggcccagctgcagagcccccacgccctgtacagccacaagccagaggtggcccagtacacccacacaggcctgctgccccagaccatgctgatcacagacaccaccaacctgagcgccctggccagcctgacccccaccaagcaggtgttcaccagtgacacagaggccagcagcgagagcggcctgcacaccccagccagccaggccaccaccctgcacgtgcccagccaggaccctgccagcatccagcacctgcagcctgcccaccggctgagcgccagccccaccgtgagcagcagcagcctggtgctgtaccagagcctgggcctgtag

SEQ ID NO: 155448 - DNA, 837 bp, synthetic construct
  misc_feature 1..837: note = Description of Artificial Sequence: Synthetic coding sequence
  source 1..837: mol_type = other DNA
atggtgtccaagctgagccagctgcagacagagctgctggccgccctgctggagagcggcctgagcaaggaggccctgatccaggccctgggggagcccggcccctacctgctggccggggagggccccctggacaagggggagagctgtggcggcggccgcggggagctggccgagctgcccaacggcctgggggagacccggggctctgaagatgaaacagatgatgatggagaggacttcaccccacccatcctgaaggagctggagaacctgagccctgaggaggccgcccaccagaaggctgtggtggagaccctgctgcaggaggacccctggagggtggccaagatggtgaagagctacctgcagcagcacaacatcccccagcgggaggtggtggacaccaccggcctgaaccagagccacctgagccagcacctgaacaagggcacccccatgaagacccagaagagagctgccctgtacacctggtacgtgaggaagcagcgggaggtggcccagaggagaaatgccagccgggagggctgcccccaccaccgccaccggggctgggcccccaccagcagccgccgctgtgtgtccaccaccggcctgcccaccggggccaagaagaagcccagcggcacctcctggccctggaccaggacagctggccccccccagggccaggcccgggacctgcgctgccccctgacagcccccctggcctgcctgcacctgcccagcccccctgtgcgcagcacagtgtgtgccatggacagcctgcggcctgtgcggctgcagaagtacccccaggccgctgctgtgccctag

SEQ ID NO: 155449 - DNA, 360 bp, synthetic construct
  misc_feature 1..360: note = Description of Artificial Sequence: Synthetic coding sequence
  source 1..360: mol_type = other DNA
atggtgtccaagctgagccagctgcagacagagctgctggccgccctgctggagagcggcctgagcaaggaggccctgatccaggccctgggggagcccggcccctacctgctggccggggagggccccctggacaagggggagagctgtggcggcggccgcggggagctggccgagctgcccaacggcctgggggagacccggggctctgaagatgaaacagatgatgatggagaggacttcaccccacccatcctgaaggagctggagaacctgagccctgaggaggccgcccaccagaaggctgtggtggagaccctgctgcaggtgcacccctgcagagctggccgggctgactag

SEQ ID NO: 155450 - DNA, 1989 bp, synthetic construct
  misc_feature 1..1989: note = Description of Artificial Sequence: Synthetic coding sequence
  source 1..1989: mol_type = other DNA
atggtgtccaagctgagccagctgcagacagagctgctggccgccctgctggagagcggcctgagcaaggaggccctgatccaggccctgggggagcccggcccctacctgctggccggggagggccccctggacaagggggagagctgtggcggcggccgcggggagctggccgagctgcccaacggcctgggggagacccggggctctgaagatgaaacagatgatgatggagaggacttcaccccacccatcctgaaggagctggagaacctgagccctgaggaggccgcccaccagaaggctgtggtggagaccctgctgcaggaggacccctggagggtggccaagatggtgaagagctacctgcagcagcacaacatcccccagcgggaggtggtggacaccaccggcctgaaccagagccacctgagccagcacctgaacaagggcacccccatgaagacccagaagagagctgccctgtacacctggtacgtgaggaagcagcgggaggtggcccagcagttcacccacgccggccagggcggcctcatcgaggagcccactggagatgagctgcccaccaagaagggcagaagaaaccgcttcaagtggggccctgccagccagcagatcctcttccaggcctatgaaaggcagaagaaccccagcaaggaggagcgggagaccctggtggaggagtgcaacagagctgagtgcatccagaggggcgtgagccccagccaggcccagggcctgggcagcaacctggtgacagaggtgcgggtgtacaactggtttgccaacagaaggaaggaggaggccttccgccacaagctggccatggacacctacagcggccccccacctggccctggccctggccctgccctgcctgcccacagcagccctggcctgcccccaccagccctgagccccagcaaggtgcacggcgtgcgctatggccagcctgccaccagcgagacagctgaggtgcccagcagcagcggcggccccctggtgacagtgtccacccccctgcaccaggtgagccccaccggcctggagcccagccacagcctgctgagcacagaggccaagctggtgtctgctgctgggggccccctgccccctgtgtccaccctgacagccctgcacagcctggagcagaccagccctggcctgaaccagcagccccagaacctgatcatggccagcctgcccggggtgatgaccatcggccctggagagcccgccagcctgggccccaccttcaccaacacaggagccagcaccctggtgattggcctggccagcacccaggcccagagcgtgcctgtgatcaacagcatgggcagcagcctgaccaccctgcagcctgtgcagttcagccagcccctgcaccccagctaccagcagcccctgatgcctcctgtgcagagccacgtgacccagagccccttcatggccaccatggcccagctgcagagcccccacgccctgtacagccacaagccagaggtggcccagtacacccacacaggcctgctgccccagaccatgctgatcacagacaccaccaacctgagcgccctggccagcctgacccccaccaagcaggtgcgcagcaggcctgctggcccccccctggcctgtgaccgggccccccacccccacatcccccgggcccaggaggccgccctgctgccccaggtgttcaccagtgacacagaggccagcagcgagagcggcctgcacaccccagccagccaggccaccaccctgcacgtgcccagccaggaccctgccagcatccagcacctgcagcctgcccaccggctgagcgccagccccaccgtgagcagcagcagcctggtgctgtaccagagcagtgacagcagcaatggccagagccacctgctgcccagcaaccacagcgtgattgagaccttcatcagcacccagatggccagcagcagccagtag

SEQ ID NO: 155451 - DNA, 744 bp, synthetic construct
  misc_feature 1..744: note = Description of Artificial Sequence: Synthetic coding sequence
  source 1..744: mol_type = other DNA
atggtgtccaagctgagccagctgcagacagagctgctggccgccctgctggagagcggcctgagcaaggaggccctgatccaggccctgggggagcccggcccctacctgctggccggggagggccccctggacaagggggagagctgtggcggcggccgcggggagctggccgagctgcccaacggcctgggggagacccggggctctgaagatgaaacagatgatgatggagaggacttcaccccacccatcctgaaggagctggagaacctgagccctgaggaggccgcccaccagaaggctgtggtggagaccctgctgcaggaggacccctggagggtggccaagatggtgaagagctacctgcagcagcacaacatcccccagcgggaggtggtggacaccaccggcctgaaccagagccacctgagccagcacctgaacaagggcacccccatgaagacccagaagagagctgccctgtacacctggtacgtgaggaagcagcgggaggtggcccagcagttcacccacgccggccagggcggcctcatcgaggagcccactggagatgagctgcccaccaagaagggcagaagaaaccgcttcaagtggggccctgccagccagcagatcctcttccaggcctatgaaaggcagaagaaccccagcaaggaggagcgggagaccctggtggaggagtgcaacagatgtgccctgtggacagcctgtgaccagtag

SEQ ID NO: 155452 - DNA, 1359 bp, synthetic construct
  misc_feature 1..1359: note = Description of Artificial Sequence: Synthetic coding sequence
  source 1..1359: mol_type = other DNA
atggtgtccaagctgagccagctgcagacagagctgctggccgccctgctggagagcggcctgagcaaggaggccctgatccaggccctgggggagcccggcccctacctgctggccggggagggccccctggacaagggggagagctgtggcggcggccgcggggagctggccgagctgcccaacggcctgggggagacccggggctctgaagatgaaacagatgatgatggagaggacttcaccccacccatcctgaaggagctggagaacctgagccctgaggaggccgcccaccagaaggctgtggtggagaccctgctgcaggaggacccctggagggtggccaagatggtgaagagctacctgcagcagcacaacatcccccagcgggaggtggtggacaccaccggcctgaaccagagccacctgagccagcacctgaacaagggcacccccatgaagacccagaagagagctgccctgtacacctggtacgtgaggaagcagcgggaggtggcccagcagttcacccacgccggccagggcggcctcatcgaggagcccactggagatgagctgcccaccaagaagggcagaagaaaccgcttcaagtggggccctgccagccagcagaccagccctggcctgaaccagcagccccagaacctgatcatggccagcctgcccggggtgatgaccatcggccctggagagcccgccagcctgggccccaccttcaccaacacaggagccagcaccctggtgattggcctggccagcacccaggcccagagcgtgcctgtgatcaacagcatgggcagcagcctgaccaccctgcagcctgtgcagttcagccagcccctgcaccccagctaccagcagcccctgatgcctcctgtgcagagccacgtgacccagagccccttcatggccaccatggcccagctgcagagcccccacgccctgtacagccacaagccagaggtggcccagtacacccacacaggcctgctgccccagaccatgctgatcacagacaccaccaacctgagcgccctggccagcctgacccccaccaagcaggtgttcaccagtgacacagaggccagcagcgagagcggcctgcacaccccagccagccaggccaccaccctgcacgtgcccagccaggaccctgccagcatccagcacctgcagcctgcccaccggctgagcgccagccccaccgtgagcagcagcagcctggtgctgtaccagagcagtgacagcagcaatggccagagccacctgctgcccagcaaccacagcgtgattgagaccttcatcagcacccagatggccagcagcagccagtag

SEQ ID NO: 155453 - DNA, 1212 bp, synthetic construct
  misc_feature 1..1212: note = Description of Artificial Sequence: Synthetic coding sequence
  source 1..1212: mol_type = other DNA
atggtgaagagctacctgcagcagcacaacatcccccagcgggaggtggtggacaccaccggcctgaaccagagccacctgagccagcacctgaacaagggcacccccatgaagacccagaagagagctgccctgtacacctggtacgtgaggaagcagcgggaggtggcccagcagttcacccatgctggccagggcggcctgattgaggagcccactggagatgagctgcccaccaagaagggcagaagaaaccgcttcaagtggggccctgccagccagcagatcctcttccaggcctatgagcggcagaagaaccccagcaaggaggagcgggagaccctggtggaggagtgcaacagagctgagtgcatccagaggggcgtgagccccagccaggcccagggcctgggcagcaacctggtgacagaggtgcgggtgtacaactggtttgccaacagaaggaaggaggaggccttccgccacaagctggccatggacacctacagcggccccccacctggccctggccctggccctgccctgcctgcccacagcagccctggcctgcccccaccagccctgagccccagcaaggtgcatggagtgcgctatggccagcctgccaccagcgagacagctgaggtgcccagcagcagcggcggccccctggtgacagtgtccacccccctgcaccaggtgagccccaccggcctggagcccagccacagcctgctgagcacagaggccaagctggtgtctgctgctgggggccccctgccccctgtgtccaccctgacagccctgcacagcctggagcagaccagccctggcctgaaccagcagccccagaacctgatcatggccagcctgcccggggtgatgaccatcggccctggagagcccgccagcctgggccccaccttcaccaacacaggagccagcaccctggtgattggcaagctggtgggcatgggcggccacctgggcggccgcctgatgggccagccccagaaccctggggccggccgggccaccggcacccacagcttcatccacaccacctgcatctaccctgtgcccaccctggaccagagcctgtgctacatcagtgacacctgggtgaaccagacagaccagaacctgagcaacagcagccgggaggccggcaccaagcacaacaccagcatcctgtggtacctgcggaggtag

SEQ ID NO: 155454 - DNA, 1185 bp, synthetic construct
  misc_feature 1..1185: note = Description of Artificial Sequence: Synthetic coding sequence
  source 1..1185: mol_type = other DNA
atggtgtccaagctgagccagctgcagacagagctgctggccgccctgctggagagcggcctgagcaaggaggccctgatccaggccctgggggagcccggcccctacctgctggccggggagggccccctggacaagggggagagctgtggcggcggccgcggggagctggccgagctgcccaacggcctgggggagacccggggctctgaagatgaaacagatgatgatggagaggacttcaccccacccatcctgaaggagctggagaacctgagccctgaggaggccgcccaccagaaggctgtggtggagaccctgctgcaggaggacccctggagggtggccaagatggtgaagagctacctgcagcagcacaacatcccccagcgggaggtggtggacaccaccggcctgaaccagagccacctgagccagcacctgaacaagggcacccccatgaagacccagaagagagctgccctgtacacctggtacgtgaggaagcagcgggaggtggcccagcagttcacccacgccggccagggcggcctcatcgaggagcccactggagatgagctgcccaccaagaagggcagaagaaaccgcttcaagtggggccctgccagccagcagatcctcttccaggcctatgaaaggcagaagaaccccagcaaggaggagcgggagaccctggtggaggagtgcaacagagctgagtgcatccagaggggcgtgagccccagccaggcccagggcctgggcagcaacctggtgacagaggtgcgggtgtacaactggtttgccaacagaaggaaggaggaggccttccgccacaagctggccatggacacctacagcggccccccacctggccctggccctggccctgccctgcctgcccacagcagccctggcctgcccccaccagccctgagccccagcaaggtgcacggcgtgcgctatggccagcctgccaccagcgagacagctgaggtgcccagcagcagcggcggccccctggtgacagtgtccacccccctgcaccaggtgagccccaccggcctggagcccagccacagcctgctgagcacagaggccaagctggtgtctgctgctgggggccccctgcccccagctgcctgcagccagcccggccgggtggcccggctcttcaacttctag

SEQ ID NO: 155455 - DNA, 1917 bp, synthetic construct
  misc_feature 1..1917: note = Description of Artificial Sequence: Synthetic coding sequence
  source 1..1917: mol_type = other DNA
atggtgtccaagctgagccagctgcagacagagctgctggccgccctgctggagagcggcctgagcaaggaggccctgatccaggccctgggggagcccggcccctacctgctggccggggagggccccctggacaagggggagagctgtggcggcggccgcggggagctggccgagctgcccaacggcctgggggagacccggggctctgaagatgaaacagatgatgatggagaggacttcaccccacccatcctgaaggagctggagaacctgagccctgaggaggccgcccaccagaaggctgtggtggagaccctgctgcaggaggacccctggagggtggccaagatggtgaagagctacctgcagcagcacaacatcccccagcgggaggtggtggacaccaccggcctgaaccagagccacctgagccagcacctgaacaagggcacccccatgaagacccagaagagagctgccctgtacacctggtacgtgaggaagcagcgggaggtggcccagcagttcacccacgccggccagggcggcctcatcgaggagcccactggagatgagctgcccaccaagaagggcagaagaaaccgcttcaagtggggccctgccagccagcagatcctcttccaggcctatgaaaggcagaagaaccccagcaaggaggagcgggagaccctggtggaggagtgcaacagagctgagtgcatccagaggggcgtgagccccagccaggcccagggcctgggcagcaacctggtgacagaggtgcgggtgtacaactggtttgccaacagaaggaaggaggaggccttccgccacaagctggccatggacacctacagcggccccccacctggccctggccctggccctgccctgcctgcccacagcagccctggcctgcccccaccagccctgagccccagcaaggtgcacggcgtgcgctatggccagcctgccaccagcgagacagctgaggtgcccagcagcagcggcggccccctggtgacagtgtccacccccctgcaccaggtgagccccaccggcctggagcccagccacagcctgctgagcacagaggccaagctggtgtctgctgctgggggccccctgccccctgtgtccaccctgacagccctgcacagcctggagcagaccagccctggcctgaaccagcagccccagaacctgatcatggccagcctgcccggggtgatgaccatcggccctggagagcccgccagcctgggccccaccttcaccaacacaggagccagcaccctggtgattggcctggccagcacccaggcccagagcgtgcctgtgatcaacagcatgggcagcagcctgaccaccctgcagcctgtgcagttcagccagcccctgcaccccagctaccagcagcccctgatgcctcctgtgcagagccacgtgacccagagccccttcatggccaccatggcccagctgcagagcccccacgccctgtacagccacaagccagaggtggcccagtacacccacacaggcctgctgccccagaccatgctgatcacagacaccaccaacctgagcgccctggccagcctgacccccaccaagcaggaggccgccctgctgccccaggtgttcaccagtgacacagaggccagcagcgagagcggcctgcacaccccagccagccaggccaccaccctgcacgtgcccagccaggaccctgccagcatccagcacctgcagcctgcccaccggctgagcgccagccccaccgtgagcagcagcagcctggtgctgtaccagagcagtgacagcagcaatggccagagccacctgctgcccagcaaccacagcgtgattgagaccttcatcagcacccagatggccagcagcagccagtag

SEQ ID NO: 155456 - DNA, 1416 bp, synthetic construct
  misc_feature 1..1416: note = Description of Artificial Sequence: Synthetic coding sequence
  source 1..1416: mol_type = other DNA
atggtgtccaagctgagccagctgcagacagagctgctggccgccctgctggagagcggcctgagcaaggaggccctgatccaggccctgggggagcccggcccctacctgctggccggggagggccccctggacaagggggagagctgtggcggcggccgcggggagctggccgagctgcccaacggcctgggggagacccggggctctgaagatgaaacagatgatgatggagaggacttcaccccacccatcctgaaggagctggagaacctgagccctgaggaggccgcccaccagaaggctgtggtggagaccctgctgcaggaggacccctggagggtggccaagatggtgaagagctacctgcagcagcacaacatcccccagcgggaggtggtggacaccaccggcctgaaccagagccacctgagccagcacctgaacaagggcacccccatgaagacccagaagagagctgccctgtacacctggtacgtgaggaagcagcgggaggtggcccagcagttcacccacgccggccagggcggcctcatcgaggagcccactggagatgagctgcccaccaagaagggcagaagaaaccgcttcaagtggggccctgccagccagcagatcctcttccaggcctatgaaaggcagaagaaccccagcaaggaggagcgggagaccctggtggaggagtgcaacagagctgagtgcatccagaggggcgtgagccccagccaggcccagggcctgggcagcaacctggtgacagaggtgcgggtgtacaactggtttgccaacagaaggaaggaggaggccttccgccacaagctggccatggacacctacagcggccccccacctggccctggccctggccctgccctgcctgcccacagcagccctggcctgcccccaccagccctgagccccagcaaggtgcacggcgtgcgctatggccagcctgccaccagcgagacagctgaggtgcccagcagcagcggcggccccctggtgacagtgtccacccccctgcaccaggtgagccccaccggcctggagcccagccacagcctgctgagcacagaggccaagctggtgtctgctgctgggggccccctgccccctgtgtccaccctgacagccctgcacagcctggagcagaccagccctggcctgaaccagcagccccagaacctgatcatggccagcctgcccggggtgatgaccatcggccctggagagcccgccagcctgggccccaccttcaccaacacaggagccagcaccctggtgattggcctggccagcacccaggcccagagcgtgcctgtgatcaacagcatgggcagcagcctgaccaccctgcagcctgtgcagttcagccagcagggccccagcagctag

SEQ ID NO: 155457 - DNA, 1359 bp, synthetic construct
  misc_feature 1..1359: note = Description of Artificial Sequence: Synthetic coding sequence
  source 1..1359: mol_type = other DNA
atggtgtccaagctgagccagctgcagacagagctgctggccgccctgctggagagcggcctgagcaaggaggccctgatccaggccctgggggagcccggcccctacctgctggccggggagggccccctggacaagggggagagctgtggcggcggccgcggggagctggccgagctgcccaacggcctgggggagacccggggctctgaagatgaaacagatgatgatggagaggacttcaccccacccatcctgaaggagctggagaacctgagccctgaggaggccgcccaccagaaggctgtggtggagaccctgctgcaggaggacccctggagggtggccaagatggtgaagagctacctgcagcagcacaacatcccccagcgggaggtggtggacaccaccggcctgaaccagagccacctgagccagcacctgaacaagggcacccccatgaagacccagaagagagctgccctgtacacctggtacgtgaggaagcagcgggaggtggcccagcagttcacccacgccggccagggcggcctcatcgaggagcccactggagatgagctgcccaccaagaagggcagaagaaaccgcttcaagtggggccctgccagccagcagatcctcttccaggcctatgaaaggcagaagaaccccagcaaggaggagcgggagaccctggtggaggagtgcaacagagctgagtgcatccagaggggcgtgagccccagccaggcccagggcctgggcagcaacctggtgacagaggtgcgggtgtacaactggtttgccaacagaaggaaggaggaggccttccgccacaagctggccatggacacctacagcggccccccacctggccctggccctggccctgccctgcctgcccacagcagccctggcctgcccccaccagccctgagccccagcaaggtgcacggcgtgcgctatggccagcctgccaccagcgagacagctgaggtgcccagcagcagcggcggccccctggtgacagtgtccacccccctgcaccaggtgagccccaccggcctggagcccagccacagcctgctgagcacagaggccaagctggtgtctgctgctgggggccccctgccccctgtgtccaccctgacagccctgcacagcctggagcagaccagccctggcctgaaccagcagccccagaacctgatcatggccagcctgcccggggtgatgaccatcggccctggagagcccgccagcctgggccccaccttcaccaacacaggagccagcaccctgcccctgtttggagctggggtggccgagctgacccggcagcagggccccagcagctag

SEQ ID NO: 155458 - DNA, 1071 bp, synthetic construct
  misc_feature 1..1071: note = Description of Artificial Sequence: Synthetic coding sequence
  source 1..1071: mol_type = other DNA
tgatggctggtgggcttctggggcggcagcggctgcaaggagtttggcctgtgcctgcctgctggccggcagacccagcccacccgctggggccggcggctggcctggtggacccgggccgcctggccctgtggcagccgggccatggtgtccaagctgagccagctgcagacagagctgctggccgccctgctggagagcggcctgagcaaggaggccctgatccaggccctgggggagcccggcccctacctgctggccggggagggccccctggacaagggggagagctgtggcggcggccgcggggagctggccgagctgcccaacggcctgggggagacccggggctctgaagatgaaacagatgatgatggagaggacttcaccccacccatcctgaaggagctggagaacctgagccctgaggaggccgcccaccagaaggctgtggtggagaccctgctgcaggaggacccctggagggtggccaagatggtgaagagctacctgcagcagcacaacatcccccagcgggaggtggtggacaccaccggcctgaaccagagccacctgagccagcacctgaacaagggcacccccatgaagacccagaagagagctgccctgtacacctggtacgtgaggaagcagcgggaggtggcccagcagttcacccacgccggccagggcggcctcatcgaggagcccactggagatgagctgcccaccaagaagggcagaagaaaccgcttcaagtggggccctgccagccagcagatcctcttccaggcctatgaaaggcagaagaaccccagcaaggaggagcgggagaccctggtggaggagtgcaacagagctgagtgcatccagaggggcgtgagccccagccagccccagcctgctgagtaccgcagccaggccggcctgagctcctggggccccccaccaccctgccagcacccagacagcacagcccagctgggcgctgacatcccccggccccagcctgctgcccctgagccccaccacggcctgacctcctggggccatgaccaccgggcctggtag

SEQ ID NO: 155459 - DNA, 2247 bp, synthetic construct
  misc_feature 1..2247: note = Description of Artificial Sequence: Synthetic coding sequence
  source 1..2247: mol_type = other DNA
atgctgggcaccctgcgggccatggagggagaagatgtggaggatgaccagctgctgcagaagctgcgggccagcagaagacgcttccagaggaggatgcagaggctgattgagaagtacaaccagccctttgaggacacccctgtggtgcagatggccaccctgacctatgagaccccccagggcctgcgcatctggggcggccgcctcatcaaggagagaaatgaaggagagatccaggacagctccatgaagccagctgacagaacagatggctctgtgcaggccgccgcctggggccctgagctgcccagccacaggacagtgctgggcgctgacagcaagagcggggaggtggatgccaccagtgaccaggaggagagcgtggcctgggccctggccccagctgtgccccagagccccctgaagaatgagctgcggaggaagtacctgacccaggtggacatcctgctgcagggcgctgagtactttgaatgtgccggcaacagagctggaagagatgtgcgggtgacccccctgcccagcctggccagccctgctgtgcctgcccctggctactgcagccgcatcagcaggaagagccctggggaccctgccaagccagccagcagcccccgggagtgggaccccctgcaccccagcagcacagacatggccctggtgcccagaaatgacagcctgagcctgcaggagaccagcagcagcagcttcctgagcagccagccctttgaagatgatgacatctgcaatgtgaccatcagtgacctgtatgccggcatgctgcacagcatgagccggctgctgagcaccaagcccagcagcatcatcagcaccaagaccttcatcatgcagaactggaacagcagaagaagacaccgctacaagagcaggatgaacaagacctactgcaagggggcccggcgcagccagaggagcagcaaggagaacttcatcccctgcagcgagcctgtgaagggcaccggggccctgcgggactgcaagaatgtgctggatgtgtcctgcaggaagacaggcctgaagctggagaaggccttcctggaggtgaaccggccccagatccacaagctggaccccagctggaaggagaggaaggtgacccccagcaagtacagcagcctcatctactttgacagcagcgccacctacaacctggatgaagaaaatcgcttccgcaccctgaagtggctgatcagccctgtgaagatcgtgtcccggcccaccatccggcagggccacggggagaaccggcagcgggagattgagatccgctttgaccagctgcaccgggagtactgcctgagccccaggaaccagcccaggaggatgtgcctgcctgacagctgggccatgaacatgtacagaggaggccctgccagccctgggggcctgcagggcctggagacccggcggctgagcctgcccagcagcaaggccaaggccaagagcctgtctgaggcctttgagaacctgggcaagaggagcctggaggccggccgctgcctgcccaagagtgacagcagcagcagcctgcccaagaccaaccccacccacagcgccacccggccccagcagaccagtgacctgcacgtgcagggcaacagcagcggcatcttcaggaagtctgtgagccccagcaagaccctgtctgtgcctgacaaggaggtgcccggccacggcaggaacagatatgatgagatcaaggaggagtttgacaagctgcaccagaagtactgcctgaagagccctggccagatgacagtgcccctgtgcattggagtgtccacagacaaggcctccatggaggtgcgctaccagacagagggcttcctgggcaagctgaacccagacccccacttccagggcttccagaagctgcccagcagccccctgggctgcaggaagagcctgctgggcagcacagccatcgaggcccccagcagcacctgtgtggcccgggccatcaccagagatggcacccgggaccaccagtttcctgccaagaggccccggctgtctgagccccagggcagcggccggcagggcaacagcctgggcgccagtgatggagtggacaacacagtgcggcctggggaccagggcagcagcagccagcccaacagcgaggagcggggggagaacaccagctacaggatggaggagaagagtgacttcatgctggagaagctggagaccaagtctgtgtag

SEQ ID NO: 155460 - DNA, 2085 bp, synthetic construct
  misc_feature 1..2085: note = Description of Artificial Sequence: Synthetic coding sequence
  source 1..2085: mol_type = other DNA
atgctgggcaccctgcgggccatggagggagaagatgtggaggatgaccagctgctgcagaagctgcgggccagcagaagacgcttccagaggaggatgcagaggctgattgagaagtacaaccagccctttgaggacacccctgtggtgcagatggccaccctgacctatgagaccccccagggcctgcgcatctggggcggccgcctcatcaaggagagaaatgaaggagagatccagcctgctgtgccccagagccccctgaagaatgagctgcggaggaagtacctgacccaggtggacatcctgctgcagggcgctgagtactttgaatgtgccggcaacagagctggaagagatgtgcgggtgacccccctgcccagcctggccagccctgctgtgcctgcccctggctactgcagccgcatcagcaggaagagccctggggaccctgccaagccagccagcagcccccgggagtgggaccccctgcaccccagcagcacagacatggccctggtgcccagaaatgacagcctgagcctgcaggagaccagcagcagcagcttcctgagcagccagccctttgaagatgatgacatctgcaatgtgaccatcagtgacctgtatgccggcatgctgcacagcatgagccggctgctgagcaccaagcccagcagcatcatcagcaccaagaccttcatcatgcagaactggaacagcagaagaagacaccgctacaagagcaggatgaacaagacctactgcaagggggcccggcgcagccagaggagcagcaaggagaacttcatcccctgcagcgagcctgtgaagggcaccggggccctgcgggactgcaagaatgtgctggatgtgtcctgcaggaagacaggcctgaagctggagaaggccttcctggaggtgaaccggccccagatccacaagctggaccccagctggaaggagaggaaggtgacccccagcaagtacagcagcctcatctactttgacagcagcgccacctacaacctggatgaagaaaatcgcttccgcaccctgaagtggctgatcagccctgtgaagatcgtgtcccggcccaccatccggcagggccacggggagaaccggcagcgggagattgagatccgctttgaccagctgcaccgggagtactgcctgagccccaggaaccagcccaggaggatgtgcctgcctgacagctgggccatgaacatgtacagaggaggccctgccagccctgggggcctgcagggcctggagacccggcggctgagcctgcccagcagcaaggccaaggccaagagcctgtctgaggcctttgagaacctgggcaagaggagcctggaggccggccgctgcctgcccaagagtgacagcagcagcagcctgcccaagaccaaccccacccacagcgccacccggccccagcagaccagtgacctgcacgtgcagggcaacagcagcggcatcttcaggaagtctgtgagccccagcaagaccctgtctgtgcctgacaaggaggtgcccggccacggcaggaacagatatgatgagatcaaggaggagtttgacaagctgcaccagaagtactgcctgaagagccctggccagatgacagtgcccctgtgcattggagtgtccacagacaaggcctccatggaggtgcgctaccagacagagggcttcctgggcaagctgaacccagacccccacttccagggcttccagaagctgcccagcagccccctgggctgcaggaagagcctgctgggcagcacagccatcgaggcccccagcagcacctgtgtggcccgggccatcaccagagatggcacccgggaccaccagtttcctgccaagaggccccggctgtctgagccccagggcagcggccggcagggcaacagcctgggcgccagtgatggagtggacaacacagtgcggcctggggaccagggcagcagcagccagcccaacagcgaggagcggggggagaacaccagctacaggatggaggagaagagtgacttcatgctggagaagctggagaccaagtctgtgtag

SEQ ID NO: 155461 - DNA, 1992 bp, synthetic construct
  misc_feature 1..1992: note = Description of Artificial Sequence: Synthetic coding sequence
  source 1..1992: mol_type = other DNA
atgctgggcaccctgcgggccatggagggagaagatgtggaggatgaccagctgctgcagaagctgcgggccagcagaagacgcttccagaggaggatgcagaggctgattgagaagtacaaccagccctttgaggacacccctgtggtgcagatggccaccctgacctatgagaccccccagggcctgcgcatctggggcggccgcctcatcaaggagagaaatgaaggagagatccagtgtgccggcaacagagctggaagagatgtgcgggtgacccccctgcccagcctggccagccctgctgtgcctgcccctggctactgcagccgcatcagcaggaagagccctggggaccctgccaagccagccagcagcccccgggagtgggaccccctgcaccccagcagcacagacatggccctggtgcccagaaatgacagcctgagcctgcaggagaccagcagcagcagcttcctgagcagccagccctttgaagatgatgacatctgcaatgtgaccatcagtgacctgtatgccggcatgctgcacagcatgagccggctgctgagcaccaagcccagcagcatcatcagcaccaagaccttcatcatgcagaactggaacagcagaagaagacaccgctacaagagcaggatgaacaagacctactgcaagggggcccggcgcagccagaggagcagcaaagaaaacttcatcccctgcagcgagcctgtgaagggcactggagccctgcgggactgcaagaatgtgctggatgtgtcctgcaggaagacaggcctgaagctggagaaggccttcctggaggtgaaccggccccagatccacaagctggaccccagctggaaggagaggaaggtgacccccagcaagtacagcagcctcatctactttgacagcagcgccacctacaacctggatgaggagaaccgcttccgcaccctgaagtggctgatcagccctgtgaagatcgtgtcccggcccaccatccggcagggccatggagaaaatcggcagcgggagattgagatccgctttgaccagctgcaccgggagtactgcctgagccccaggaaccagcccaggaggatgtgcctgcctgacagctgggccatgaacatgtaccggggcggccctgccagccctgggggcctgcagggcctggagacccggcggctgagcctgcccagcagcaaggccaaggccaagagcctgtctgaggcctttgagaacctgggcaagaggagcctggaggccggccgctgcctgcccaagagtgacagcagcagcagcctgcccaagaccaaccccacccacagcgccacccggccccagcagaccagtgacctgcacgtgcagggcaacagcagcggcatcttcaggaagtctgtgagccccagcaagaccctgtctgtgcctgacaaggaggtgcccggccatggaagaaacagatatgatgagatcaaggaggagtttgacaagctgcaccagaagtactgcctgaagagccctggccagatgacagtgcccctgtgcatcggcgtgtccacagacaaggcctccatggaggtgcgctaccagacagagggcttcctgggcaagctgaacccagacccccacttccagggcttccagaagctgcccagcagccccctgggctgcaggaagagcctgctgggcagcacagccatcgaggcccccagcagcacctgtgtggcccgggccatcaccagagatggcacccgggaccaccagtttcctgccaagaggccccggctgtctgagccccagggcagcggccggcagggcaacagcctgggcgccagtgatggagtggacaacacagtgcggcctggggaccagggcagcagcagccagcccaacagcgaggagagaggagagaacaccagctacaggatggaggagaagagtgacttcatgctggagaagctggagaccaagtctgtgtag

SEQ ID NO: 155462 - DNA, 2181 bp, synthetic construct
  misc_feature 1..2181: note = Description of Artificial Sequence: Synthetic coding sequence
  source 1..2181: mol_type = other DNA
atggaggaccggctgcacatggacaatggcctggtgccccagaagatcgtgtctgtgcacctgcaggacagcaccctgaaggaggtgaaggaccaggtgagcaacaagcaggcccagatcctggagcccaagccagagcccagcctggagatcaagccagagcaggacggcatggagcacgtgggcagagatgaccccaaggccctgggggaggagcccaagcagaggcggggcagcgccagcggcagcgagcctgctggggacagcgaccggggcggcggccctgtggagcactaccacctgcacctgagcagctgccacgagtgcctggagctggagaacagcaccattgaatctgtgaagtttgccagcgctgagaacatcccagacctgccctatgactacagcagcagcctggagagcgtggctgatgagaccagccctgagcgggagggcagaagagtgaacctgaccgggaaggcccccaacatcctgctgtatgtgggcagtgacagccaggaggccctgggccgcttccacgaggtgcgctctgtgctggccgactgtgtggacatcgacagctacatcctgtaccacctgctggaggacagcgccctgcgggacccctggacagacaactgcctgctgctggtgattgccacccgggagagcatcccagaagatctctaccagaagttcatggcctacctgagccagggcggcaaggtgctgggcctgagcagcagcttcaccttcggcggcttccaggtgaccagcaagggggccctgcacaagacagtgcagaacctggtgttcagcaaggctgaccagagcgaggtgaagctgtctgtgctgagcagcggctgccgctaccaggagggccctgtgcggctgagccctggccgcctgcagggccacctggagaatgaagacaaggacaggatgattgtgcacgtgcccttcggcacccggggcggggaggccgtgctgtgccaggtgcacctggagctgccccccagcagcaacatcgtgcagaccccagaggacttcaacctgctgaagagcagcaacttcagaagatatgaggtgctgcgggagatcctgaccaccctgggcctgagctgtgacatgaagcaggtgcctgccctgacccccctgtacctgctgtctgctgctgaggagatccgggaccccctgatgcagtggctgggcaagcacgtggacagcgagggggagatcaagagcggccagctgagcctgcgctttgtgtcctcctatgtgtctgaggtggagatcacccccagctgcatccctgtggtgaccaacatggaggccttcagcagcgagcacttcaacctggagatctaccggcagaacctgcagaccaagcagctgggcaaggtgatcctgtttgctgaggtgacccccaccaccatgaggctgctggatggcctgatgttccagaccccccaggagatgggcctcatcgtgattgctgcccggcagacagagggcaagggccggggcggcaatgtgtggctgagccctgtgggctgtgccctgagcaccctgctgatcagcatccccctgcggagccagctgggccagaggatcccctttgtgcagcacctgatgtctgtggccgtggtggaggccgtgcgcagcatccctgagtaccaggacatcaacctgcgggtgaagtggcccaatgacatctactacagcgacctgatgaagattggaggagtgctggtgaacagcaccctgatgggagagaccttctacatcctgattggctgcggcttcaacgtgaccaacagcaaccccaccatctgcatcaatgacctgatcacagagtacaacaagcagcacaaggccgagctgaagcccctgcgggctgactacctgattgcccgggtggtgacagtgctggagaagctgatcaaggagttccaggacaagggccccaacagcgtgctgcccctgtactaccgctactgggtgcacagcggccagcaggtgcacctgggcagcgctgagggccccaaggtgtccatcgtgggcctggatgacagcggcttcctgcaggtgcaccaggagggcggggaggtggtgacagtgcacccagatggcaacagctttgacatgctgaggaacctgatcctgcccaagagaagatag

SEQ ID NO: 155463 - DNA, 2181 bp, synthetic construct; identical to SEQ ID NO: 155462
  misc_feature 1..2181: note = Description of Artificial Sequence: Synthetic coding sequence
  source 1..2181: mol_type = other DNA

SEQ ID NO: 155464 - DNA, 264 bp, synthetic construct
  misc_feature 1..264: note = Description of Artificial Sequence: Synthetic coding sequence
  source 1..264: mol_type = other DNA
atggaggaccggctgcacatggacaatggcctggtgccccagaagatcgtgtctgtgcacctgcaggacagcaccctgaaggaggtgaaggaccaggtgagcaacaagcaggcccagatcctggagcccaagccagagcccagcctggagatcaagccagagcaggacggcatggagcacgtgggcagagatgaccccaaggccctgggggaggagcccaagcagaggcggggcagcgccagcggcagcgagcccgccggctag

SEQ ID NO: 155465 - DNA, 234 bp, synthetic construct
  misc_feature 1..234: note = Description of Artificial Sequence: Synthetic coding sequence
  source 1..234: mol_type = other DNA
atggaggaccggctgcacatggacaatggcctggtgccccagaagatcgtgtctgtgcacctgcaggacagcaccctgaaggaggtgaaggaccaggtgagcaacaagcaggcccagatcctggagcccaagccagagcccagcctggagatcaagccagagcaggacggcatggagcacgtgggcagagatgaccccaaggccctgggggaggagcccaagcagaggaggtag

SEQ ID NO: 155466 - DNA, 279 bp, synthetic construct
  misc_feature 1..279: note = Description of Artificial Sequence: Synthetic coding sequence
  source 1..279: mol_type = other DNA
atggaggaccggctgcacatggacaatggcctggtgccccagaagatcgtgtctgtgcacctgcaggacagcaccctgaaggaggtgaaggaccaggtgagcaacaagcaggcccagatcctggagcccaagccagagcccagcctggagatcaagccagagcaggacggcatggagcacgtgggcagagatgaccccaaggccctgggggaggagcccaagcagaggcggggcagcgccagcggcagcgagcctgctggggacagcgaccggggctag

SEQ ID NO: 155467 - DNA, 807 bp, synthetic construct
  misc_feature 1..807: note = Description of Artificial Sequence: Synthetic coding sequence
  source 1..807: mol_type = other DNA
atgggcctgagccccagcgccccagctgtggccgtgcaggccagcaatgccagcgccagccccccatctggctgccccatgcatgagggcaagatgaagggctgccctgtgaacacagagcccagcggccccacctgtgagaagaagacctacagcgtgcctgcccaccaggagcgggcctatgaatatgtggagtgccccatccggggcacagctgctgagaacaaggagaacctggaccccagcaacctgatgcccccacccaaccagaccccagccccagaccagccctttgccctgagcacagtgcgggaggagagcagcatccccagggctgacagcgagaagaagtgggtgtaccccagcgagcagatgttctggaatgccatgctgaagaagggctggaagtggaaggatgaggacatcagccagaaggacatgtacaacatcatccgcatccacaaccagaacaatgagcaggcctggaaggagatcctgaagtgggaggccctgcatgctgctgaatgtccctgtggccccagcctcatccgctttggaggcaaggccaaggagtacagcccccgggcccgcatccgctcctggatgggctatgagctgccctttgacagacatgactggatcatcaacagatgtggcacagaggtgcgctacgtgattgactactatgatggaggagaggtgaacaaggactaccagttcaccatcctggatgtgcggcctgccctggacagcctgtctgctgtgtgggacaggatgaaggtggcctggtggcgctggaccagctag

SEQ ID NO: 155468 - DNA, 807 bp, synthetic construct; identical to SEQ ID NO: 155467
  misc_feature 1..807: note = Description of Artificial Sequence: Synthetic coding sequence
  source 1..807: mol_type = other DNA

SEQ ID NO: 155469 - DNA, 807 bp, synthetic construct; identical to SEQ ID NO: 155467
  misc_feature 1..807: note = Description of Artificial Sequence: Synthetic coding sequence
  source 1..807: mol_type = other DNA

SEQ ID NO: 155470 - DNA, 1008 bp, synthetic construct
  misc_feature 1..1008: note = Description of Artificial Sequence: Synthetic coding sequence
  source 1..1008: mol_type = other DNA
atggacaatgccaggatgaacagcttcctggagtaccccatcctgagcagcggggacagcggcacctgcagcgcccgggcctaccccagcgaccaccgcatcaccaccttccagagctgtgctgtgtctgccaacagctgtggaggagatgaccgcttcctggtgggccggggcgtgcagatcggcagcccccaccaccaccaccaccaccaccaccgccacccccagcctgccacctaccagaccagcggcaacctgggcgtgtcctacagccacagcagctgtggccccagctatggcagccagaacttcagcgccccctacagcccctatgccctgaaccaggaggctgatgtgtctgggggctacccccagtgtgccccagctgtgtacagcggcaacctgagcagccccatggtgcagcaccaccaccaccaccagggctacgccggcggcgctgtgggcagcccccagtacatccaccacagctatggccaggagcaccagagcctggccctggccacctacaacaacagcctgagccccctgcacgccagccaccaggaggcctgccgcagccctgccagcgagaccagcagccctgcccagacctttgactggatgaaggtgaagaggaacccccccaagacaggcaaggtgggggagtatggctacctgggccagcccaatgctgtgaggaccaacttcaccaccaagcagctgacagagctggagaaggagttccacttcaacaagtacctgacccgggcccggcgggtggagattgctgccagcctgcagctgaatgagacccaggtgaagatctggttccagaacagaaggatgaagcagaagaagcgggagaaggagggcctgctgcccatcagccctgccaccccacctggaaatgatgagaaggccgaggagagcagcgagaagagcagcagcagcccctgtgtgcccagccctggcagcagcaccagtgacaccctgaccaccagccactag

SEQ ID NO: 155471 - DNA, 414 bp, synthetic construct
  misc_feature 1..414: note = Description of Artificial Sequence: Synthetic coding sequence
  source 1..414: mol_type = other DNA
atggacaatgccaggatgaacagcttcctggagtaccccatcctgagcagcggggacagcggcacctgcagcgcccgggcctaccccagcgaccaccgcatcaccaccttccagagctgtgctgtgtctgccaacagctgtggaggagatgaccgcttcctggtgggccggggcgtgcagatcggcagcccccaccaccaccaccaccaccaccaccgccacccccagcctgccacctaccagaccagcggcaacctgggcgtgtcctacagccacagcagctgtggccccagctatggcagccagaacttcagcgccccctacagcccctatgccctgaaccaggaggccgaccccccaagaagcctgagcctgccccgcatcggggacatcttcagcagcgctgacttctag

SEQ ID NO: 155472 - DNA, 1233 bp, synthetic construct
  misc_feature 1..1233: note = Description of Artificial Sequence: Synthetic coding sequence
  source 1..1233: mol_type = other DNA
atgtctgccaggaagggctacctgctgcccagccccaactaccccaccaccatgagctgcagcgagagccctgctgccaacagcttcctggtggacagcctcatcagcagcggccgcggggaggccggcggcggcggcggcggggccggcggcggcggcggcggcggctactatgcccacggcggcgtgtacctgcccccagctgctgacctgccctacggcctgcagagctgtggcctcttccccaccctgggcggcaagagaaatgaagctgccagccctggcagcggcggcggcggcggcggcctgggccctggggcccacggctacggccccagccccatcgacctgtggctggatgcccccaggagctgcaggatggagcccccagatggccccccacctccaccccagcagcagcccccacctccaccccagcccccccagcctgccccccaggccaccagctgcagctttgcccagaacatcaaggaggagagcagctactgcctgtatgacagcgctgacaagtgccccaaggtgtctgccacagctgctgagctggcccccttcccccggggccccccaccagatggctgtgccctgggcaccagcagcggcgtgcctgtgcccggctacttccggctgagccaggcctacggcacagccaagggctacggcagcggcggcggcggggcccagcagctgggcgccggccccttccctgcccagcccccaggccggggctttgacctgcccccagccctggccagcggcagcgcagatgctgccaggaaggagcgggccctggacagccccccaccacccaccctggcctgtggcagcggcggcggcagccagggagatgaggaggcccacgccagcagcagcgctgctgaggagctgagccctgcccccagcgagagcagcaaggccagccctgagaaggacagcctgggcaacagcaaaggagaaaatgctgccaactggctgacagccaagagcggcaggaagaagcgctgcccctacaccaagcaccagaccctggagctggagaaggagttcctgttcaacatgtacctgacccgggagcggcggctggagatcagccgctctgtgcacctgacagaccggcaggtgaagatctggttccagaacagaaggatgaagctgaagaagatgaacagagaaaatcgcatccgggagctgacagccaacttcaacttctcctag

SEQ ID NO: 155473 - DNA, 609 bp, synthetic construct
  misc_feature 1..609: note = Description of Artificial Sequence: Synthetic coding sequence
  source 1..609: mol_type = other DNA
atgagctgcagcgagagccctgctgccaacagcttcctggtggacagcctcatcagcagcggccgcggggaggccggcggcggcggcggcggggccggcggcggcggcggcggcggctactatgcccatggaggagtgtacctgcccccagctgctgacctgccctacggcctgcagagctgtggcctcttccccaccctgggcggcaagagaaatgaggccgccagccctggcagcggcggcggcggcggcggcctgggccctggggcccacggctacggccccagccccatcgacctgtggctggatgcccccaggagctgcagaagaagagctgccacccggggctggcctgtgccccgggccgcccctggggcccgcttccgcagccctgcccgggccagcctgcggctgggccgctgtggccctgagggcgccagccccaggtttgctgctgcccctcatgctggcctgcggcagaggcggggcctggccggcagaagaggaggagcccgggtggtgctgggccggggcggggccctgcccggccccttccgggagcagcagagcctggccggggagggcttccctggccagttccagaggtag

SEQ ID NO: 155474 - DNA, 285 bp, synthetic construct
  misc_feature 1..285: note = Description of Artificial Sequence: Synthetic coding sequence
  source 1..285: mol_type = other DNA
atgtgccagggcaacagcaaaggagaaaatgctgccaactggctgacagccaagagcggcaggaagaagcgctgcccctacaccaagcaccagaccctggagctggagaaggagttcctgttcaacatgtacctgacccgggagcggcggctggagatcagccgctctgtgcacctgacagaccggcaggtgaagatctggttccagaacagaaggatgaagctgaagaagatgaacagagaaaatcgcatccgggagctgacagccaacttcaacttctcctag

SEQ ID NO: 155475 - DNA, 942 bp, synthetic construct
  misc_feature 1..942: note = Description of Artificial Sequence: Synthetic coding sequence
  source 1..942: mol_type = other DNA
atggactttgatgagcggggcccctgcagcagcaacatgtacctgcccagctgcacctactacgtgtctggccctgacttcagcagcctgcccagcttcctgccccagacccccagcagccggcccatgacctacagctacagcagcaacctgccccaggtgcagcctgtgcgggaggtgaccttccgggagtatgccattgaaccagccaccaagtggcacccccggggcaacctggcccactgctacagcgctgaggagctggtgcaccgggactgcctgcaggcccccagcgctgctggggtgcctggagatgtgctggccaagagcagcgccaacgtgtaccaccaccccaccccagctgtgagcagcaacttctacagcacagtgggcagaaatggagtgctgccccaggcctttgaccagttctttgaaacagcctacggcaccccagagaacctggccagcagtgactacccaggggacaagtctgctgagaagggccccccagctgccacagccaccagcgctgctgctgctgctgctgccaccggggccccagccaccagcagcagtgacagcggcggcggcggcggctgccgggagacagctgctgctgctgaggagaaggagaggagaagaagacctgagagcagcagcagccctgagagcagcagcggccacacagaggacaaggccggcggcagcagcggccagaggaccaggaagaagcgctgcccctacaccaagtaccagatccgggagctggagcgggagttcttcttctctgtgtacatcaacaaggagaagaggctgcagctgagcaggatgctgaacctgacagaccggcaggtgaagatctggttccagaacagaaggatgaaggagaagaagatcaacagagaccggctgcagtactacagcgccaaccccctgctgtag

SEQ ID NO: 155476 - DNA, 918 bp, synthetic construct
  misc_feature 1..918: note = Description of Artificial Sequence: Synthetic coding sequence
  source 1..918: mol_type = other DNA
atggcccgggaggacagcgtgaagtgcctgcgctgcctgctgtatgccctgaacctgctcttctggctgatgagcatctctgtgctggccgtgtctgcctggatgagggactacctgaacaacgtgctgaccctgacagctgagaccagggtggaggaggccgtcatcctgacctacttccctgtggtgcaccctgtgatgattgctgtgtgctgcttcctgatcatcgtgggcatgctgggctactgcggcaccgtgaagaggaacctgctgctgctggcctggtacttcggcagcctgctggtgatcttctgtgtggagctggcctgtggggtgtggacctatgagcaggagctgatggtgcctgtgcagtggagcgacatggtgaccctgaaggccaggatgaccaactacggcctgccccgctaccgctggctgacccacgcctggaacttcttccagcgggagttcaagtgctgcggcgtggtgtacttcacagactggctggagatgacagagatggactggcccccagacagctgctgcgtgcgggagttccctggctgcagcaagcaggcccaccaggaggacctgagtgacctgtaccaggagggctgtgggaagaagatgtacagcttcctgcggggcaccaagcagctgcaggtgctgcgcttcctgggcatcagcattggagtgacccagatcctggccatgatcctgaccatcaccctgctgtgggccctgtactatgaccggcgggagcctggaacagaccagatgatgagcctgaagaatgacaacagccagcacctgagctgccccagcgtggagctgctgaagcccagcctgagccgcatctttgagcacacctccatggccaacagcttcaacacccactttgagatggaggagctgtag

SEQ ID NO: 155477 - DNA, 489 bp, synthetic construct
  misc_feature 1..489: note = Description of Artificial Sequence: Synthetic coding sequence
  source 1..489: mol_type = other DNA
atgggcctggagacagagaaggcagatgtgcagctgttcatggatgatgacagctacagccaccacagcggcctggagtatgctgaccctgagaagtttgctgacagcgaccaggaccgggacccccaccggctgaacagccacctgaagctgggctttgaagatgtgattgctgagcctgtgaccacccacagctttgacaaggtgtggatctgcagccacgccctgtttgagatcagcaaatatgtgatgtacaagttcctgactgtgttcctggccatccccctggccttcatcgccggcatcctgtttgccaccctgagctgcctgcacatctggatcctgatgccctttgtgaagacctgcctgatggtgctgcccagcgtgcagaccatctggaagtctgtgacagatgtgatcatcgcccccctgtgcacctctgtgggccgctgcttcagctctgtgtccctgcagctgagccaggactag

SEQ ID NO: 155478 - DNA, 963 bp, synthetic construct
  misc_feature 1..963: note = Description of Artificial Sequence: Synthetic coding sequence
  source 1..963: mol_type = other DNA
atgaccatgagcagcttcctgatcaacagcaactacatcgagcccaagttccccccatttgaggagtatgcccagcacagcggcagcggcggcgcagatggcggccctgggggcggccctggctaccagcagcccccagccccacccacccagcacctgcccctgcagcagccccagctgccccatgctgggggcggccgggagcccacagccagctactatgcccccaggacagcccgggagcccgcctacccagctgctgccctgtacccagcccatggagctgctgacacagcctacccctacggctaccggggcggggccagccctggccggcccccccagcctgagcagcccccagcccaggccaagggccctgcccacggcctgcacgccagccacgtgctgcagccccagctgcccccacccctgcagcccagggctgtgcccccagctgccccccggcgctgtgaggccgccccagccaccccaggagtgcctgctgggggcagcgccccagcctgccccctgctgctggccgacaagagccccctgggcctgaagggcaaggagcctgtggtgtacccctggatgaagaagatccacgtgtctgctgtgaaccccagctacaatggaggagagcccaagaggagcaggacagcctacacccggcagcaggtgctggagctggagaaggagttccacttcaaccgctacctgaccaggagaagacgcatcgagatcgcccacaccctgtgcctgtctgagcggcaggtgaagatctggttccagaacagaaggatgaagtggaagaaggaccacaagctgcccaacaccaagatgaggagcagcaacagcgccagcgccagcgctggccccccaggcaaggcccagacccagagcccccacctgcacccccacccccaccccagcaccagcacccctgtgcccagcagcatctag

SEQ ID NO: 155479 - DNA, 963 bp, synthetic construct; identical to SEQ ID NO: 155478
  misc_feature 1..963: note = Description of Artificial Sequence: Synthetic coding sequence
  source 1..963: mol_type = other DNA

SEQ ID NO: 155480 - DNA, 1140 bp, synthetic construct
  misc_feature 1..1140: note = Description of Artificial Sequence: Synthetic coding sequence
  source 1..1140: mol_type = other DNA
atgctgaagagatgtggccgccgcctgctgctggccctggccggggccctgctggcctgcctgctggtgctgacagctgaccccccacctccacccctgcctgctgagcggggcagaagagccctgcggagcctggccggccctgctggagctgccccagcccctggcctgggcgctgctgctgctgcccctggggccctggtgagagatgtgcacagcctgtctgagtacttcagcctgctgacccgggccaggagagatgctggccccccacctggggccgcccccaggcctgcagatggccacccccggcccctggccgagcccctggcccccagagatgtgttcatcgctgtgaagaccaccaagaagttccaccgggcccggctggacctgctgctggagacctggatcagccgccacaaggagatgaccttcatcttcacagatggagaagatgaggccctggcccggcacactggaaatgtggtgatcaccaactgcagcgctgcccacagccggcaggccctgagctgcaagatggctgtggagtatgaccgcttcattgaaagtggcaggaagtggttctgccacgtggatgatgacaactacgtgaacctgcgggccctgctgcggctgctggccagctacccccacaccagagatgtgtatgtgggcaagcccagcctggaccggcccatccaggccatggagcgggtgtctgagaacaaggtgcggcctgtgcacttctggtttgccaccggcggggccggcttctgcatcagccggggcctggccctgaagatgagcccctgggccagcggcggccacttcatgaacacagctgagcgcatccggctgcctgatgactgcaccatcggctacatcgtggaggccctgctgggcgtgcccctcatccgcagcggcctcttccacagccacctggagaacctgcagcaggtgcccaccagcgagctgcacgagcaggtgaccctgtcctatggcatgtttgagaacaagagaaatgctgtgcacgtgaagggccccttctctgtggaggccgaccccagccgcttccgcagcatccactgccacctgtacccagacaccccctggtgccccaggacagccatcttctag

SEQ ID NO: 155481 - DNA, 813 bp, synthetic construct
  misc_feature 1..813: note = Description of Artificial Sequence: Synthetic coding sequence
  source 1..813: mol_type = other DNA
atgagcagctactttgtgaacagcttctgtggccgctacccaaatggaccagactaccagctgcacaactacggggaccacagctctgtgtctgagcagttccgggacagcgcctccatgcacagcggccgctatggctacggctacaacggcatggacctgtctgtgggccgcagcggcagcggccacttcggcagcggggagcgggcccggagctatgctgccagcgccagcgctgccccagctgagccccgctacagccagcctgccaccagcacccacagcccccagcctgaccccctgccctgcagcgctgtggcccccagccctggcagtgacagccaccacggcggcaagaacagcctgagcaacagcagcggggccagcgcagatgctggcagcacccacatcagcagccgggagggcgtgggcacagccagcggggctgaagaagatgccccagccagcagcgagcaggccagcgcccagagcgagcccagccctgcccccccagcccagccccagatctacccctggatgaggaagctgcacatcagccatgacaacatcggcggccctgagggcaagagggccaggacagcctacacccgctaccagaccctggagctggagaaggagttccacttcaaccgctacctgaccaggagaagacgcatcgagatcgcccacgccctgtgcctgtctgagcggcagatcaagatctggttccagaacagaaggatgaagtggaagaaggacaacaagctgaagtccatgtccatggctgctgctgggggcgccttccggccctag

SEQ ID NO: 155482 - DNA, 693 bp, synthetic construct
  misc_feature 1..693: note = Description of Artificial Sequence: Synthetic coding sequence
  source 1..693: mol_type = other DNA
atgagcagcagctactacgtgaatgccctcttcagcaagtacacagctggggccagcctcttccagaatgctgagcccaccagctgcagctttgcccccaacagccagaggagcggctacggggccggggccggggcctttgccagcacagtgcccggcctgtacaacgtgaacagccccctgtaccagagcccctttgccagcggctacggcctgggcgcagatgcctacggcaacctgccctgtgccagctatgaccagaacatccctggcctgtgcagcgacctggccaagggggcctgtgacaagacagatgaaggagccctgcacggggctgctgaggccaacttccgcatctacccctggatgaggagcagcggccctgacaggaagaggggccggcagacctacacccgctaccagaccctggagctggagaaggagttccacttcaaccgctacctgaccaggagaagaagaattgaaattgcccacgccctgtgcctgacagagcggcagatcaagatctggttccagaacagaaggatgaagtggaagaaggagcacaaggatgagggccccacagctgctgctgcccctgagggcgctgtgcccagcgctgctgccacagctgctgctgacaaggcagatgaagaagatgatgatgaggaggaggaggatgaggaggagtag

SEQ ID NO: 155483 - DNA, 93 bp, synthetic construct
  misc_feature 1..93: note = Description of Artificial Sequence: Synthetic coding sequence
  source 1..93: mol_type = other DNA
atgagcagcagctactacgtgaatgccctcttcagcaagtacacagctggggccagcctcttccagaatgctgagcccaccagctgcagctag

SEQ ID NO: 155484 - DNA, 792 bp, synthetic construct
  misc_feature 1..792: note = Description of Artificial Sequence: Synthetic coding sequence
  source 1..792: mol_type = other DNA
caccactggggcggcaactactacgtggacagcttcctgctgggcgcagatgctgctgatgagctgtctgtgggcatgagaagaggcccctggccaccccggcaggccgccaccctggccgagcacccagacttcagcccctgcagcttccagagcaaggccaccgtgtttggagcctcctggaaccctgtgcaccgggcccccaccctgtaccctgtgtaccaccaccaccaccaccacccctacgtgcacccccaggcccctgtggccgccgccgccccagatggccgctacatgaggtcctggctggagcccacccctggggccctgagctttgctggcctgcccagcagccggccctacggcatcaagccagagcccctgagcgccaggagaggagactgccccaccctggacacccacaccctgagcctgacagattatgcctgtggcagcccccctgtggaccgggagaagcagcccagcgagggcgccttcagcgagaacaatgcagaaaatgaaagtggaggagacaagccacccatcgaccccaacaacccagctgccaactggctgcacgcccggagcaccaggaagaagcgctgcccctacaccaagcaccagaccctggagctggagaaggagttcctgttcaacatgtacctgacccgggaccggcgctatgaggtggcccggctgctgaacctgacagagcggcaggtgaagatctggttccagaacagaaggatgaagatgaagaagatcaacaaggaccgggccaaggatgaatag

SEQ ID NO: 155485 - DNA, 819 bp, synthetic construct
  misc_feature 1..819: note = Description of Artificial Sequence: Synthetic coding sequence
  source 1..819: mol_type = other DNA
atggccaccaccggggccctgggcaactactacgtggacagcttcctgctgggcgcagatgctgctgatgagctgtctgtgggccgctatgcccctggcaccctgggccagcccccccggcaggccgccaccctggccgagcacccagacttcagcccctgcagcttccagagcaaggccaccgtgtttggagcctcctggaaccctgtgcacgccgccggggccaatgctgtgcctgctgctgtgtaccaccaccaccaccaccacccctacgtgcacccccaggcccctgtggccgctgctgccccagatggccgctacatgaggtcctggctggagcccacccctggggccctgagctttgctggcctgcccagcagccggccctacggcatcaagccagagcccctgagcgcccggcggggggactgccccaccctggacacccacaccctgagcctgacagattatgcctgtggcagcccccctgtggaccgggagaagcagcccagcgagggcgccttctctgaaaataatgcagaaaatgaaagtggaggagacaagccacccatcgaccccaacaacccagctgccaactggctgcacgcccggagcaccaggaagaagcgctgcccctacaccaagcaccagaccctggagctggagaaggagttcctgttcaacatgtacctgacccgggacagaagatatgaggtggcccggctgctgaacctgacagagcggcaggtgaagatctggttccagaacagaaggatgaagatgaagaagatcaacaaggaccgggccaaggatgaatag

SEQ ID NO: 155486 - DNA, 591 bp, synthetic construct
  misc_feature 1..591: note = Description of Artificial Sequence: Synthetic coding sequence
  source 1..591: mol_type = other DNA
atggccggcttcagcccctggaggcggcggcagaggagaagaagaagaagaagaagagcccggcagagcagagctgcccctgagctggtgggggacctgggcagcttcctgctgctgggcagcaccttcctgagcacagcccggcactgcttcatcacctctgtggagatcgtgagccgctacctgtgtgcccggggcagcggccgggccggccaccacggccctggccgggcccggcctgctgtggccaccagcgccttccctgcccaggagcccagggtcttcctgcggagcgccctgcctgctggccgcctgagccccagcaccacccacctgcacctggtgacagctgacaacccagctgccaactggctgcacgcccggagcaccaggaagaagcgctgcccctacaccaagcaccagaccctggagctggagaaggagttcctgttcaacatgtacctgacccgggacagaagatatgaggtggcccggctgctgaacctgacagagcggcaggtgaagatctggttccagaacagaaggatgaagatgaagaagatcaacaaggaccgggccaaggatgaatag

SEQ ID NO: 155487 - DNA, 906 bp, synthetic construct
  misc_feature 1..906: note = Description of Artificial Sequence: Synthetic coding sequence
  source 1..906: mol_type = other DNA
atggactacaacaggatgaacagcttcctggagtaccccctgtgcaacagaggccccagcgcctacagcgcccacagcgcccccaccagcttcccccccagcagcgcccaggccgtggacagctatgccagcgagggccgctatggaggcggcctgagcagccctgccttccagcagaacagcggctacccagcccagcagccccccagcaccctgggcgtgcccttccccagcagcgcccccagcggctacgccccagctgcctgcagccccagctatggccccagccagtactaccccctgggccagagtgaaggagatggcggctacttccaccccagcagctatggagcccagctgggcggcctgagtgatggctatggagctggaggagctggccctggcccctacccaccccagcaccccccctatggaaatgagcagacagccagctttgccccagcctatgctgacctgctgtctgaggacaaggagaccccctgccccagcgagcccaacacccccacagcccggacctttgactggatgaaggtgaagagaaatccacccaagacagccaaggtgtctgagcccggcctgggcagccccagcggcctgcggaccaacttcaccacccggcagctgacagagctggagaaggagttccacttcaacaagtacctgagccgggcccggcgggtggagattgctgccaccctggagctgaatgagacccaggtgaagatctggttccagaacagaaggatgaagcagaagaagcgggagcgggaggagggccgggtgcccccagcccctcctggctgccccaaggaggccgctggagatgccagtgaccagagcacctgcaccagccctgaggccagccccagctctgtgaccagctag

SEQ ID NO: 155488 - DNA, 855 bp, synthetic construct
  misc_feature 1..855: note = Description of Artificial Sequence: Synthetic coding sequence
  source 1..855: mol_type = other DNA
atggagcccggcaactatgccaccctggatggagccaaggacatcgagggcctgctgggcgccggcggcggcaggaacctggtggcccacagccccctgaccagccaccctgctgcccccaccctgatgcctgctgtgaactatgcccccctggacctgcccggcagcgctgagccccccaagcagtgccacccctgccctggggtgccccagggcaccagccctgcccctgtgccctacggctactttggaggcggctactacagctgccgggtgagccgcagcagcctgaagccctgtgcccaggccgccaccctggccgcctacccagctgagacccccacagctggggaggagtaccccagccggcccacagaatttgccttctacccaggctacccaggcacctaccagcccatggccagctacctggatgtgtctgtggtgcagaccctgggcgcccctggagagcccaggcatgacagcctgctgcctgtggacagctaccagagctgggccctggccggcggctggaacagccagatgtgctgccagggcgagcagaaccccccaggccccttctggaaggccgcctttgctgacagcagcggccagcaccccccagatgcctgtgccttccggcggggcaggaagaagaggatcccctacagcaagggccagctgcgggagctggagcgggagtatgctgccaacaagttcatcaccaaggacaagaggaggaagatctctgctgccaccagcctgtctgagcggcagatcaccatctggttccagaacagaagagtgaaggagaagaaggtgctggccaaggtgaagaacagcgccaccccctag

SEQ ID NO: 155489 - DNA, 531 bp, synthetic construct
  misc_feature 1..531: note = Description of Artificial Sequence: Synthetic coding sequence
  source 1..531: mol_type = other DNA
ccccgctgccccccaggcccccgggtgcccctggatgagcgggaggagatccggcaggagacccagcccatccgccacgtgtccttcagcggccgcctgcggcgcagcggcggcgtgggcagccctgcagatggcctgggccggcggctggtggccgccggccaggccgcccacggcctgcaccagcacgccgccgccggcaccggggagttccacttcaacaagtacctgtgccggcccaggagagtggagattgctgccctgctggacctgacagagcggcaggtgaaggtgtggttccagaacagaaggatgaagcacaagaggcagacccagcaccgggagcccccagatggagagcccgcctgccctggggccctggaggacatctgtgaccctgctgaggagcctgctgccagccctgggggccccctggccggcggcgtgggcagcctgctgagccctgctgggggcggggccggcggcctgaagaggggccccccagccttcagccgcagcctgcggggctag

SEQ ID NO: 155490 - DNA, 1071 bp, synthetic construct
  misc_feature 1..1071: note = Description of Artificial Sequence: Synthetic coding sequence
  source 1..1071: mol_type = other DNA
atgaactttgaatttgagcgggagatcggcttcatcaacagccagcccagcctggccgagtgcctgaccagcttccctgctgtgctggagaccttccagaccagcagcatcaaggagagcaccctcatccccccacctcctccatttgagcagaccttccccagcctgcagcccggggccagcaccctgcagaggcccaggagccagaagagagcagaagatggccctgccctgcccccacctcctcctccacccctgcctgctgcccccccagcccctgagttcccctggatgaaggagaagaagagcgccaagaagcccagccagagcgccaccagccccagccctgctgccagcgctgtgcctgccagcggcgtgggcagccctgcagatggcctgggcctgcctgaggccggcggcggcggggcccggcggctgaggacagcctacaccaacacccagctgctggagctggagaaggagttccacttcaacaagtacctgtgccggccccggcgggtggagattgctgccctgctggacctgacagagcggcaggtgaaggtgtggttccagaacagaaggatgaagcacaagaggcagacccagcaccgggagcccccagatggagagcccgcctgccctggggccctggaggacatctgtgaccctgctgaggagcctgctgccagccctgggggccccagcgccagccgggccgcctgggaggcctgctgccaccccccagaggtggtgcctggggccctgtctgctgacccccggcccctggccgtgcggctggagggcgctggggccagcagccctggctgtgccctgcggggggccggcggcctggagcccggccccctgcctgaagatgtgttcagcggccggcaggacagccccttcctgcctgacctgaacttctttgctgctgacagctgcctgcagctgagcggcggcctgagccccagcctgcagggcagcctggacagccctgtgcccttcagcgaggaggagctggacttcttcaccagcaccctgtgtgccatcgacctgcagttcccctag

SEQ ID NO: 155491 - DNA, 1296 bp, synthetic construct
  misc_feature 1..1296: note = Description of Artificial Sequence: Synthetic coding sequence
  source 1..1296: mol_type = other DNA
atgcagaaggccacctactatgacaatgctgctgctgccctgtttggaggctacagcagctacccaggcagcaatggatttggatttgatgtgcccccccagccccccttccaggccgccacccacctggagggggactaccagaggtctgcctgcagcctgcagagcctgggcaatgctgcccctcatgccaagagcaaggagctgaatggcagctgcatgaggcctggcctggcccctgagcccctgagcgcccctcctggcagccccccaccttctgctgcccccaccagcgccaccagcaacagcagcaatggaggcggccccagcaagagcggcccccccaagtgtggccctggcaccaacagcaccctgaccaagcagatcttcccctggatgaaggagagccggcagaccagcaagctgaagaacaacagccctggaacagctgagggctgcggcggcggcggcggcggcggcggcggcggcggcagcggcggcagcggcggcggcggcggcggcggcggcggcggggacaagagccccccaggcagcgctgccagcaagagggccaggacagcctacaccagcgcccagctggtggagctggagaaggagttccacttcaaccgctacctgtgccggcccaggagagtggagatggccaacctgctgaacctgtctgagcggcagatcaagatctggttccagaacagaaggatgaagtacaagaaggaccagaaggccaagggcctggccagcagcagcggcggccccagccctgctggcagccccccccagcccatgcagagcacagctggcttcatgaatgccctgcacagcatgacccccagctatgagagccccagccccccagccttcggcaaggcccaccagaatgcctatgccctgcccagcaactaccagccccccctgaagggctgtggggccccccagaagtacccacccaccccagccccagaatatgagccccacgtgctgcaggccaatggaggagcctacggcacccccaccatgcagggcagccctgtgtatgtgggcggcggcggctatgctgaccccctgcccccacctgctggccccagcctgtatggcctgaaccacctgagccaccaccccagcggcaacctggactacaatggagccccacccatggcccccagccagcaccacggcccctgtgagccccaccccacctacacagacctgagcagccaccacgcccccccaccccagggccgcatccaggaggcccccaagctgacccacctgtag

SEQ ID NO: 155492 - DNA, 900 bp, synthetic construct
  misc_feature 1..900: note = Description of Artificial Sequence: Synthetic coding sequence
  source 1..900: mol_type = other DNA
atgaaggagagccggcagaccagcaagctgaagaacaacagccctggaacagctgagggctgcggcggcggcggcggcggcggcggcggcggcggcagcggcggcagcggcggcggcggcggcggcggcggcggcggggacaagagccccccaggcagcgctgccagcaagagggccaggacagcctacaccagcgcccagctggtggagctggagaaggagttccacttcaaccgctacctgtgccggcccaggagagtggagatggccaacctgctgaacctgtctgagcggcagatcaagatctggttccagaacagaaggatgaagtacaagaaggaccagaaggccaagggcctggccagcagcagcggcggccccagccctgctggcagccccccccagcccatgcagagcacagctggcttcatgaatgccctgcacagcatgacccccagctatgagagccccagccccccagccttcggcaaggcccaccagaatgcctatgccctgcccagcaactaccagccccccctgaagggctgtggggccccccagaagtacccacccaccccagccccagaatatgagccccacgtgctgcaggccaatggaggagcctacggcacccccaccatgcagggcagccctgtgtatgtgggcggcggcggctatgctgaccccctgcccccacctgctggccccagcctgtatggcctgaaccacctgagccaccaccccagcggcaacctggactacaatggagccccacccatggcccccagccagcaccacggcccctgtgagccccaccccacctacacagacctgagcagccaccacgcccccccaccccagggccgcatccaggaggcccccaagctgacccacctgtag

SEQ ID NO: 155493 - DNA, 1296 bp, synthetic construct; identical to SEQ ID NO: 155491
  misc_feature 1..1296: note = Description of Artificial Sequence: Synthetic coding sequence
  source 1..1296: mol_type = other DNA

SEQ ID NO: 155494 - DNA, 1077 bp, synthetic construct
  misc_feature 1..1077: note = Description of Artificial Sequence: Synthetic coding sequence
  source 1..1077: mol_type = other DNA
atgaggcctggcctggcccctgagcccctgagcgcccctcctggcagccccccacccagcgctgcccccaccagcgccaccagcaacagcagcaatggaggcggccccagcaagagcggcccccccaagtgtggccctggcaccaacagcaccctgaccaagcagatcttcccctggatgaaggagagccggcagaccagcaagctgaagaacaacagccctggaacagctgagggctgcggcggcggcggcggcggcggcggcggcggcggcagcggcggcagcggcggcggcggcggcggcggcggcggcggggacaagagccccccaggcagcgctgccagcaagagggccaggacagcctacaccagcgcccagctggtggagctggagaaggagttccacttcaaccgctacctgtgccggccccggcgggtggagatggccaacctgctgaacctgtctgagcggcagatcaagatctggttccagaacagaaggatgaagtacaagaaggaccagaaggccaagggcctggccagcagcagcggcggccccagccctgctggcagccccccccagcccatgcagagcacagctggcttcatgaatgccctgcacagcatgacccccagctatgagagccccagccccccagccttcggcaaggcccaccagaatgcctatgccctgcccagcaactaccagccccccctgaagggctgtggggccccccagaagtacccacccaccccagccccagaatatgagccccacgtgctgcaggccaacggcggggcctacggcacccccaccatgcagggcagccctgtgtatgtgggcggcggcggctacgccgaccccctgcccccacctgctggccccagcctgtatggcctgaaccacctgagccaccaccccagcggcaacctggactacaacggggccccacccatggcccccagccagcaccacggcccctgtgagccccaccccacctacacagacctgagcagccaccacgcccccccaccccagggccgcatccaggaggcccccaagctgacccacctgtag

SEQ ID NO: 155495 - DNA, 1296 bp, synthetic construct; identical to SEQ ID NO: 155491
  misc_feature 1..1296: note = Description of Artificial Sequence: Synthetic coding sequence
  source 1..1296: mol_type = other DNA

SEQ ID NO: 155496 - DNA, 900 bp, synthetic construct; identical to SEQ ID NO: 155492
  misc_feature 1..900: note = Description of Artificial Sequence: Synthetic coding sequence
  source 1..900: mol_type = other DNA

SEQ ID NO: 155497 - DNA, 1077 bp, synthetic construct; identical to SEQ ID NO: 155494
  misc_feature 1..1077: note = Description of Artificial Sequence: Synthetic coding sequence
  source 1..1077: mol_type = other DNA

SEQ ID NO: 155498 - DNA, 1296 bp, synthetic construct; identical to SEQ ID NO: 155491
  misc_feature 1..1296: note = Description of Artificial Sequence: Synthetic coding sequence
  source 1..1296: mol_type = other DNA

SEQ ID NO: 155499 - DNA, 756 bp, synthetic construct
  misc_feature 1..756: note = Description of Artificial Sequence: Synthetic coding sequence
  source 1..756: mol_type = other DNA
atggccatgagcagcttcctgatcaacagcaactacgtggaccccaagttccccccctgtgaggagtacagccagagcgactacctgcccagcgaccacagccctggctactatgccggcggccagaggcgggagagcagcttccagcctgaggccggcttcggccggcgggccgcctgcaccgtgcagagatatgctgcctgccgggaccccggccccccacctcctcctcctcctcctcctcctcctcctcctcctcctggcctgagcccccgggccccagcccctcctcctgctggggccctgctgcctgagcccggccagagatgtgaggccgtgagcagcagccccccacctccaccctgtgcccagaaccccctgcaccccagccccagccacagcgcctgcaaggagcctgtggtgtacccctggatgaggaaggtgcacgtgtccacagtgaaccccaactatgctggaggagagcccaagaggagcaggacagcctacacccggcagcaggtgctggagctggagaaggagttccactacaaccgctacctgaccaggagaagaagagtggagatcgcccacgccctgtgcctgtctgagcggcagatcaagatctggttccagaacagaaggatgaagtggaagaaggaccacaagctgcccaacaccaagatccgcagcggcggggccgccggcagcgctgggggccccccaggccggcccaatggaggcccccgggccctgtag

SEQ ID NO: 155500 - DNA, 810 bp, synthetic construct
  misc_feature 1..810: note = Description of Artificial Sequence: Synthetic coding sequence
  source 1..810: mol_type = other DNA
atgagcagctactttgtgaacagcttcagcggccgctacccaaatggaccagactaccagctgctgaactacggcagcggcagcagcctgagcggcagctacagagatcctgctgccatgcacacaggcagctatggctacaactacaacggcatggacctgtctgtgaacagaagcagcgccagcagcagccactttggagctgtgggggagagcagccgggccttccctgccccagcccaggagccccgcttccggcaggccgccagcagctgcagcctgagcagccctgagagcctgccctgcaccaacggggacagccacggggccaagcccagcgccagcagccccagcgaccaggccaccagcgccagcagcagcgccaacttcacagaaattgatgaggccagcgccagcagcgagcctgaggaggccgccagccagctgagcagccccagcctggcccgggcccagcctgagcccatggccaccagcacagctgcccctgagggccagaccccccagatcttcccctggatgaggaagctgcacatcagccatgacatgacaggcccagatggcaagagggccaggacagcctacacccgctaccagaccctggagctggagaaggagttccacttcaaccgctacctgaccaggagaagaagaattgaaattgcccacgccctgtgcctgtctgagcggcagatcaagatctggttccagaacagaaggatgaagtggaagaaggacaacaagctgaagtccatgagcctggccacagctggcagcgccttccagccctag

SEQ ID NO: 155501 - DNA, 1179 bp, synthetic construct
  misc_feature 1..1179: note = Description of Artificial Sequence: Synthetic coding sequence
  source 1..1179: mol_type = other DNA
atggccgccctgcggcagccccaggtggccgagctgctggccgaggcccggcgggccttccgggaggagtttggagctgagcctgagctggccgtgtctgcccctggccgggtgaacctgattggagagcacacagactacaaccagggcctggtgctgcccatggccctggagctgatgacagtgctggtgggcagccccaggaaggatggcctggtgtccctgctgaccaccagcgagggcgcagatgagccccagaggctgcagttccccctgcccacagcccagaggagcctggagcccggcaccccccgctgggccaactacgtgaagggcgtcatccagtactacccagctgcccccctgcccggcttctctgctgtggtggtgtcctctgtgcccctgggcggcggcctgagcagcagcgccagcctggaggtggccacctacaccttcctgcagcagctgtgcccagacagcggcaccatcgccgcccgggcccaggtgtgccagcaggccgagcacagctttgctggcatgccctgtggcatcatggaccagttcatcagcctgatgggccagaagggccacgccctgctgattgactgccgcagcctggagaccagcctggtgcccctgagtgaccccaagctggccgtgctgatcaccaacagcaatgtgcgccacagcctggccagcagcgagtaccctgtgagaagacggcagtgtgaggaggtggcccgggccctgggcaaggagagcctgcgggaggtgcagctggaggagctggaggccgcccgggacctggtgtccaaggagggcttccggcgggcccggcacgtggtgggggagatccggaggacagcccaggccgctgctgccctgcggcggggggactaccgggccttcggccgcctgatggtggagagccacaggagcctgagagatgattatgaggtgtcctgcccagagctggaccagctggtggaggccgccctggccgtgcctggggtgtatggcagcaggatgactggaggcggctttggaggctgcaccgtgaccctgctggaggccagcgctgcccctcatgccatgaggcacatccaggagcactacggcggcacagccaccttctacctgagccaggccgcagatggagccaaggtgctgtgcctgtag

SEQ ID NO: 155502 - DNA, 675 bp, synthetic construct
  misc_feature 1..675: note = Description of Artificial Sequence: Synthetic coding sequence
  source 1..675: mol_type = other DNA
atgagcagctactttgtgaacagcaccttccctgtgaccctggccagcggccaggagagcttcctgggccagctgcccctgtacagcagcggctatgctgaccccctgcggcactacccagccccctacggccctggccctggccaggacaagggctttgccaccagcagctactaccccccagctgggggcggctacggccgggccgccccctgtgactatggccctgccccagccttctaccgggagaaggagagcgcctgtgccctgtctggagcagatgagcagccccccttccaccctgagcccaggaagagtgactgtgcccaggacaagtctgtgtttggagaaacagaggagcagaagtgcagcacccctgtgtacccctggatgcagaggatgaacagctgcaacagcagcagctttggccccagcggcagaagaggccggcagacctacacccgctaccagaccctggagctggagaaggagttccactacaaccgctacctgaccaggagaagaagaattgaaattgcccacgccctgtgcctgacagagcggcagatcaagatctggttccagaacagaaggatgaagtggaagaaggagagcaagctgctgagcgccagccagctgtctgctgaggaggaggaggagaagcaggccgagtag

SEQ ID NO: 155503 - DNA, 654 bp, synthetic construct
  misc_feature 1..654: note = Description of Artificial Sequence: Synthetic coding sequence
  source 1..654: mol_type = other DNA
atgagcagcctgtactatgccaacaccctcttcagcaagtacccagccagcagctctgtgtttgccactggagccttccctgagcagaccagctgtgcctttgccagcaacccccagaggcctggctatggagctggcagcggggccagctttgctgcctccatgcagggcctgtacccaggcggcggcggcatggccggccagagcgctgctggggtgtatgctgctggctacggcctggagcccagcagcttcaacatgcactgtgccccctttgagcagaacctgtctggagtgtgccctggggacagcgccaaggccgccggggccaaggagcagagggacagcgacctggccgctgagagcaacttccgcatctacccctggatgaggagcagcggcacagacaggaagaggggccggcagacctacacccgctaccagaccctggagctggagaaggagttccactacaaccgctacctgaccaggagaagacgcatcgagatcgcccacaccctgtgcctgacagagcggcagatcaagatctggttccagaacagaaggatgaagtggaagaaggagaacaagacagctggccctggcaccaccggccaggacagagctgaggccgaggaggaggaggaggagtag

SEQ ID NO: 155504 - DNA, 87 bp, synthetic construct
  misc_feature 1..87: note = Description of Artificial Sequence: Synthetic coding sequence
  source 1..87: mol_type = other DNA
atgaagtggaagaaggagaacaagacagctggccctggcaccaccggccaggacagagctgaggccgaggaggaggaggaggagtag

SEQ ID NO: 155505 - DNA, 732 bp, synthetic construct
  misc_feature 1..732: note = Description of Artificial Sequence: Synthetic coding sequence
  source 1..732: mol_type = other DNA
atgagcagctactttgtgaacagcctcttcagcaagtacaagacaggagagagcctgcggcccaactactatgactgtggctttgcccaggacctgggcggccggcccaccgtggtgtatggccccagcagcggcggcagcttccagcaccccagccagatccaggagttctaccacggccccagcagcctgagcacagccccctaccagcagaacccctgtgctgtggcctgccacggggaccccggcaacttctacggctatgaccccctgcagaggcagagcctgtttggagcccaggaccctgacctggtgcagtatgctgactgcaagctggccgccgccagcggcctgggggaggaggccgagggcagcgagcagagccccagccccacccagctgttcccctggatgaggccccaggccgccgccggcagaagaagaggccggcagacctacagccgctaccagaccctggagctggagaaggagttcctgttcaacccctacctgaccaggaagagaagaattgaggtgtcccatgccctgggcctgacagagcggcaggtgaagatctggttccagaacagaaggatgaagtggaagaaggagaacaacaaggacaagttccccagcagcaaatgtgagcaggaggagctggagaagcagaagctggagcgggcccctgaggccgcagatgaaggagatgcccagaagggggacaagaagtag

SEQ ID NO: 155506 - DNA, 753 bp, synthetic construct
  misc_feature 1..753: note = Description of Artificial Sequence: Synthetic coding sequence
  source 1..753: mol_type = other DNA
atgagcatcagcggcaccctgagcagctactacgtggacagcatcatcagccatgaaagtgaagatgcccccccagccaagttccccagcggccagtatgccagcagccggcagcccggccacgccgagcacctggagttccccagctgcagcttccagcccaaggcccctgtgtttggagcctcctgggcccccctgagcccccacgccagcggcagcctgcccagcgtgtaccacccctacatccagccccagggcgtgcccccagctgagagccgctacctgcggacctggctggagcccgcccccagaggagaggccgcccctggccagggccaggccgctgtgaaggccgagcccctgctgggcgcccctggagagctgctgaagcagggcaccccagagtacagcctggagaccagcgctggccgggaggccgtgctgagcaaccagaggcctggctatggagacaacaagatctgtgagggcagcgaggacaaggagaggccagaccagaccaaccccagcgccaactggctgcacgcccggagcagcaggaagaagcgctgcccctacaccaagtaccagaccctggagctggagaaggagttcctgttcaacatgtacctgacccgggacagaagacatgaggtggcccggctgctgaacctgtctgagcggcaggtgaagatctggttccagaacagaaggatgaagatgaagaagatgaacaaggagcagggcaaggagtag

SEQ ID NO: 155507 - DNA, 387 bp, synthetic construct
  misc_feature 1..387: note = Description of Artificial Sequence: Synthetic coding sequence
  source 1..387: mol_type = other DNA
atgagcatcagcggcaccctgagcagctactacgtggacagcatcatcagccatgaaagtgaagatgcccccccagccaagttccccagcggccagtatgccagcagccggcagcccggccacgccgagcacctggagttccccagctgcagcttccagcccaaggcccctgtgtttggagcctcctgggcccccctgagcccccacgccagcggcagcctgcccagcgtgtaccacccctacatccagccccagggcgtgcccccagctgagagccgctacctgcggacctggctggagcccgccccccggggcggggccgcccagacaggccacgcccgggtgcagtttggaaactttggaggccagggcggccgggctgtgtag

SEQ ID NO: 155508 - DNA, 1029 bp, synthetic construct
  misc_feature 1..1029: note = Description of Artificial Sequence: Synthetic coding sequence
  source 1..1029: mol_type = other DNA
atgacctgccccagaaatgtgacccccaacagctatgcagagcccctggccgcccctgggggcggggagcgctacagccgctctgctggcatgtacatgcagagcggcagtgacttcaactgtggggtgatgaggggctgcggcctggcccccagcctgagcaagagagatgagggcagcagccccagcctggccctgaacacctaccccagctacctgagccagctggacagctggggagaccccaaggccgcctaccgcctggagcagcctgtgggccggcccctgagcagctgcagctacccacccagcgtgaaggaggagaatgtgtgctgcatgtacagcgctgagaagagggccaagagcggccctgaggccgccctgtacagccaccccctgcctgagagctgcctgggggagcacgaggtgcctgtgcccagctactaccgggccagccccagctacagcgccctggacaagaccccccactgcagcggggccaatgactttgaggccccctttgagcagagggccagcctgaaccccagggctgagcacctggagagcccccagctgggcggcaaggtgtccttccctgagacccccaagagtgacagccagacccccagccccaatgagatcaagacagagcagagcctggccggccccaagggcagccccagcgagagcgagaaggagcgggccaaggctgctgacagcagcccagacaccagtgacaatgaggccaaggaggagatcaaggccgagaacaccactggaaactggctgacagccaagagcggcaggaagaagcgctgcccctacaccaagcaccagaccctggagctggagaaggagttcctgttcaacatgtacctgacccgggagcggcggctggagatcagcaagaccatcaacctgacagaccggcaggtgaagatctggttccagaacagaaggatgaagctgaagaagatgaacagagaaaatcgcatccgggagctgaccagcaacttcaacttcacctag

SEQ ID NO: 155509 - DNA, 915 bp, synthetic construct
  misc_feature 1..915: note = Description of Artificial Sequence: Synthetic coding sequence
  source 1..915: mol_type = other DNA
atgttcaacagcgtgaacctgggcaacttctgcagccccagcaggaaggagagaggagctgactttggagagcggggcagctgtgccagcaacctgtacctgcccagctgcacctactacatgcctgagttcagcacagtgtcctccttcctgccccaggcccccagccggcagatctcctacccctacagcgcccaggtgccccctgtgcgggaggtgtcctatggcctggagcccagcggcaagtggcaccacaggaacagctacagcagctgctacgccgctgctgatgagctgatgcacagagaatgtctgccccccagcacagtgacagagatcctgatgaagaatgaaggcagctatggaggccaccaccaccccagcgcccctcatgccaccccagctggcttctacagctctgtgaacaagaacagcgtgctgccccaggcctttgaccgcttctttgacaatgcctactgcggcggcggggaccccccagctgagcccccctgcagcggcaagggggaggccaagggggagcctgaggcccccccagccagcggcctggccagcagagctgaggccggggctgaggccgaggccgaggaggagaacaccaaccccagcagcagcggcagcgcccacagcgtggccaaggagcccgccaagggagctgccccaaatgcccccaggaccaggaagaagcgctgcccctacagcaagttccagatccgggagctggagcgggagttcttcttcaacgtgtacatcaacaaggagaagaggctgcagctgagcaggatgctgaacctgacagaccggcaggtgaagatctggttccagaacagaaggatgaaggagaagaagctgagccgggaccggctgcagtacttcagcggcaaccccctgctgtag

SEQ ID NO: 155510 - DNA, 849 bp, synthetic construct
  misc_feature 1..849: note = Description of Artificial Sequence: Synthetic coding sequence
  source 1..849: mol_type = other DNA
atgggagagcacaacctgctgaaccctggctttgtgggccccctggtgaacatccacactggagacaccttctacttccccaacttccgggccagcggggcccagctgcccggcctgcccagcctgagctacccccggcgggacaacgtgtgcagcctgtcctggcccagcgctgagccctgcaatggctacccccagccctacctgggcagccctgtgtccctgaaccccccatttggaagaacctgtgagctggcccgggtggaggatggcaagggctactaccgggagccctgtgccgagggcggcggcggcggcctgaagcgggaggagcggggccgggaccccggggccggccctggggccgccctgctgcccctggagcccagcggccccccagccctgggcttcaagtatgactatgctgctgggggcggcggcggagatggcggcggcggggccggcccccctcatgacccccccagctgccagagcctggagagtgacagcagcagcagcctgctgaatgaaggcaacaagggggccggggccggggaccccggcagcctggtgagccccctgaaccctgggggcggcctgagcgccagcggggccccctggtaccccatcaacagccgcagcaggaagaagaggaagccctacagcaagctgcagctggccgagctggagggggagttcctggtgaatgagttcatcacccggcagaggcggcgggagctgagtgaccggctgaacctgagtgaccagcaggtgaagatctggttccagaacagaaggatgaagaagaagaggctgctgctgcgggagcaggccctgtccttcttctag

SEQ ID NO: 155511 - DNA, 993 bp, synthetic construct
  misc_feature 1..993: note = Description of Artificial Sequence: Synthetic coding sequence
  source 1..993: mol_type = other DNA
atgaccaccagcctgctgctgcacccccgctggccagagagcctgatgtatgtgtatgaggacagcgctgctgagagcggcatcggcggcggcggcggcggcggcggcggcggcactggaggagctgggggcggctgcagcggggccagccctgggaaggcccccagcatggatggcctgggcagcagctgcccagccagccactgccgggacctgctgccccaccctgtgctgggccggcccccagcccccctgggcgccccccagggcgctgtgtacacagacatcccagcccctgaggccgcccggcagtgtgcccctcctccagccccacccaccagcagcagcgccaccctgggctacggctacccctttggaggcagctactacggctgccgcctgagccacaacgtgaacctgcagcagaagccctgtgcctaccaccctggggacaagtacccagagcccagcggggccctgcctggagatgacctgagcagccgggccaaggagtttgccttctaccccagctttgccagcagctaccaggccatgcctggctacctggatgtgtctgtggtgcccggcatcagcggccaccctgagcccaggcatgatgccctgatccctgtggagggctaccagcactgggccctgagcaatggctgggacagccaggtgtactgcagcaaggagcagagccagagcgcccacctgtggaagagccccttcccagatgtggtgcccctgcagcctgaggtgagcagctaccgccggggcaggaagaagagggtgccctacaccaaggtgcagctgaaggagctggagaaggagtatgctgccagcaagttcatcaccaaggagaagagaagacgcatcagcgccaccaccaacctgtctgagcggcaggtgaccatctggttccagaacagaagagtgaaggagaagaaggtggtgtccaagagcaaggccccccacctgcacagcacctag

SEQ ID NO: 155512 - DNA, 795 bp, synthetic construct
  misc_feature 1..795: note = Description of Artificial Sequence: Synthetic coding sequence
  source 1..795: mol_type = other DNA
atgatcatgagcagctacctgatggacagcaactacatcgaccccaagttccccccctgtgaggagtacagccagaacagctacatccctgagcacagccctgagtactacggccgcacccgggagagcggcttccagcaccaccaccaggagctgtacccacctcctccaccccggcccagctacccagagcggcagtacagctgcaccagcctgcagggccctggcaacagccggggccacggccctgcccaggccggccaccaccaccctgagaagagccagagcctgtgtgagcccgcccccctgagcggggccagcgccagccccagccctgcccccccagcctgcagccagcctgccccagaccaccccagcagcgctgccagcaagcagcccatcgtgtacccctggatgaagaagatccacgtgtccacagtgaaccccaactacaacggcggggagcccaagaggagcaggacagcctacacccggcagcaggtgctggagctggagaaggagttccactacaaccgctacctgaccaggagaagaagaattgaaattgcccacagcctgtgcctgtctgagcggcagatcaagatctggttccagaacagaaggatgaagtggaagaaggaccaccggctgcccaacaccaaggtgcgcagcgcccccccagctggggccgcccccagcaccctgtctgctgccaccccaggcaccagcgaggaccacagccagagcgccaccccacctgagcagcagagagctgaggacatcacccggctgtag

SEQ ID NO: 155513 - DNA, 795 bp, synthetic construct; identical to SEQ ID NO: 155512
  misc_feature 1..795: note = Description of Artificial Sequence: Synthetic coding sequence
  source 1..795: mol_type = other DNA

SEQ ID NO: 155514 - DNA, 669 bp, synthetic construct
  misc_feature 1..669: note = Description of Artificial Sequence: Synthetic coding sequence
  source 1..669: mol_type = other DNA
atgagcagctatgtggccaacagcttctacaagcagagccccaacatcccagcctacaacatgcagacctgtggcaactacggcagcgccagcgaggtgcaggccagccgctactgctacggcggcctggacctgagcatcaccttccccccaccagcccccagcaacagcctgcatggagtggacatggccgccaacccccgggcccacccagacaggcctgcctgcagcgctgctgctgcccctggccacgcccctggaagagatgaagctgcccccctgaaccctggcatgtacagccagaaggccgcccggcctgccctggaggagcgggccaagagcagtggagagatcaaggaggagcaggcccagacaggccagcctgctggcctgagccagcccccagccccaccccagatctacccctggatgaccaagctgcacatgagccatgaaacagatggcaagaggagcaggaccagctacacccgctaccagaccctggagctggagaaggagttccacttcaaccgctacctgaccaggagaagacgcatcgagatcgccaacaacctgtgcctgaatgaaaggcagatcaagatctggttccagaacagaaggatgaagtggaagaaggacagcaagatgaagagcaaggaggccctgtag

SEQ ID NO: 155515 - DNA, 708 bp, synthetic construct
  misc_feature 1..708: note = Description of Artificial Sequence: Synthetic coding sequence
  source 1..708: mol_type = other DNA
atgaacagctacttcaccaaccccagcctgagctgccacctggccggcggccaggatgtgctgcccaacgtggccctgaacagcacagcctatgaccctgtgcgccacttcagcacctacggggctgctgtggcccagaaccgcatctacagcacccccttctacagcccccaggagaatgtggtgttcagcagcagccggggcccctatgactatggcagcaacagcttctaccaggagaaggacatgctgagcaactgccggcagaacaccctgggccacaacacccagaccagcatcgcccaggacttcagcagcgagcagggccgcacagccccccaggaccagaaggccagcatccagatctacccctggatgcagaggatgaacagccacagcggcgtgggctatggagctgacagaagaagaggccggcagatctacagccgctaccagaccctggagctggagaaggagttccacttcaaccgctacctgaccaggagaagacgcatcgagatcgccaatgccctgtgcctgacagagcggcagatcaagatctggttccagaacagaaggatgaagtggaagaaggagagcaacctgaccagcaccctgagcggcggcggcggcggggccacagctgacagcctgggcggcaaggaggagaagcgggaggagacagaggaggagaagcagaaggagtag

SEQ ID NO: 155516 - DNA, 462 bp, synthetic construct
  misc_feature 1..462: note = Description of Artificial Sequence: Synthetic coding sequence
  source 1..462: mol_type = other DNA
atgctgagcaactgccggcagaacaccctgggccacaacacccagaccagcatcgcccaggacttcagcagcgagcagggccgcacagccccccaggaccagaaggccagcatccagatctacccctggatgcagaggatgaacagccacagcggcgtgggctatggagctgacagaagaagaggccggcagatctacagccgctaccagaccctggagctggagaaggagttccacttcaaccgctacctgaccaggagaagacgcatcgagatcgccaatgccctgtgcctgacagagcggcagatcaagatctggttccagaacagaaggatgaagtggaagaaggagagcaacctgaccagcaccctgagcggcggcggcggcggggccacagctgacagcctgggcggcaaggaggagaagcgggaggagacagaggaggagaagcagaaggagtag

SEQ ID NO: 155517 - DNA, 159 bp, synthetic construct
  misc_feature 1..159: note = Description of Artificial Sequence: Synthetic coding sequence
  source 1..159: mol_type = other DNA
atgctgagcaactgccggcagaacaccctgggccacaacacccagaccagcatcgcccaggacttcagcagcgagcagggccgcacagccccccaggaccagaaggccagcatccagatctacccctggatgcagaggatgaacagccacagcggctag

SEQ ID NO: 155518 - DNA, 216 bp, synthetic construct
  misc_feature 1..216: note = Description of Artificial Sequence: Synthetic coding sequence
  source 1..216: mol_type = other DNA
atgctgagcaactgccggcagaacaccctgggccacaacacccagaccagcatcgcccaggacttcagcagcgagcagggccgcacagccccccaggaccagaaggccagcatccagatctacccctggatgcagaggatgaacagccacagcgtgtgctttgtgcccggcagcctgggcgtgggctatggagctgacagaagaagaggaagatag

SEQ ID NO: 155519 - DNA, 729 bp, synthetic construct
  misc_feature 1..729: note = Description of Artificial Sequence: Synthetic coding sequence
  source 1..729: mol_type = other DNA
atgagcagctactttgtgaaccccctcttcagcaagtacaaggccggggagagcctggagcccgcctactatgactgccgcttcccccagagcgtgggccgcagccacgccctggtgtatggccctgggggcagcgcccctggcttccagcacgccagccaccacgtgcaggacttcttccaccacggcaccagcggcatcagcaacagcggctaccagcagaacccctgcagcctgagctgccacggagatgccagcaagttctacggctatgaggccctgccccggcagagcctgtatggagcccagcaggaggcctctgtggtgcagtacccagactgcaagagcagcgccaacaccaacagcagcgagggccagggccacctgaaccagaacagcagccccagcctgatgttcccctggatgaggcctcatgcccctggaagaagaagtggccggcagacctacagccgctaccagaccctggagctggagaaggagttcctgttcaacccctacctgaccaggaagaggcgcatcgaggtgagccacgccctgggcctgacagagcggcaggtgaagatctggttccagaacagaaggatgaagtggaagaaggagaacaacaaggacaagctgcccggggccagagatgaggagaaggtggaggaggagggcaatgaggaggaggagaaggaggaggaggagaaggaggagaacaaggactag

SEQ ID NO: 155520 - DNA, 783 bp, synthetic construct
  misc_feature 1..783: note = Description of Artificial Sequence: Synthetic coding sequence
  source 1..783: mol_type = other DNA
atgtctgccaccggccccatcagcaactactacgtggacagcctcatcagccatgacaatgaagacctgctggccagccgcttccctgccactggagcccaccctgctgctgcccggcccagcggcctggtgcctgactgcagcgacttccccagctgcagctttgcccccaagccagctgtgttcagcacctcctgggcccctgtgcccagccagagctctgtggtgtaccacccctacggcccccagccccacctgggcgctgacacccgctacatgaggacctggctggagcccctgtctggagctgtgtccttccccagcttccctgctgggggccgccactacgccctgaagccagatgcctacccaggccggcgggctgactgtggccctggagagggccgcagctacccagactacatgtatggcagccctggagagctgcgggaccgggccccccagaccctgcccagccctgaggctgatgccctggccggcagcaagcacaaggaggagaaggctgacctggaccccagcaaccctgtggccaactggatccacgcccggagcaccaggaagaagcgctgcccctacaccaagtaccagaccctggagctggagaaggagttcctgttcaacatgtacctgacccgggacagaagatatgaggtggcccgggtgctgaacctgacagagcggcaggtgaagatctggttccagaacagaaggatgaagatgaagaagatgaacaaggagaagacagacaaggagcagagctag

SEQ ID NO: 155521 - DNA, 783 bp, synthetic construct; identical to SEQ ID NO: 155520
  misc_feature 1..783: note = Description of Artificial Sequence: Synthetic coding sequence
  source 1..783: mol_type = other DNA

SEQ ID NO: 155522 - DNA, 987 bp, synthetic construct
  misc_feature 1..987: note = Description of Artificial Sequence: Synthetic coding sequence
  source 1..987: mol_type = other DNA
atgagcagctacctggagtatgtgtcctgcagcagcagtggaggagtgggcggagatgtgctgagcctggcccccaagttctgccgcagtgatgcccggcctgtggccctgcagcctgccttccccctgggcaatggagatggagcctttgtgtcctgcctgcccctggccgccgcccggcccagccccagccccccagctgccccagcccggcccagcgtgcccccacctgctgccccccagtatgcccagtgcaccctggagggcgcctatgagcctggagctgccccagctgctgctgctggaggagctgactatggcttcctgggcagcggccctgcctatgacttccctggggtgctgggccgggctgctgatgatggcggcagccacgtgcactacgccaccagcgctgtgttttctgggggcggcagcttcctgctgagcggccaggtggactatgctgcctttggagagcccggccccttccctgcctgcctgaaggccagcgcagatggccaccctggggccttccagacagccagccctgcccctggcacctaccccaagtctgtgtccccagccagcggcctgcctgctgccttcagcacctttgagtggatgaaggtgaagagaaatgccagcaagaagggcaagctggccgagtatggagctgccagccccagcagcgccatccgcaccaacttcagcaccaagcagctgacagagctggagaaggagttccacttcaacaagtacctgacccgggcccggcgcatcgagatcgccaactgcctgcacctgaatgacacccaggtgaagatctggttccagaacagaaggatgaagcagaagaagcgggagcgggagggcctgctggccacagccatccctgtggcccccctgcagctgcccctgagcggcaccacccccaccaagttcatcaagaaccctggcagccccagccagagccaggagcccagctag

SEQ ID NO: 155523 - DNA, 630 bp, synthetic construct
  misc_feature 1..630: note = Description of Artificial Sequence: Synthetic coding sequence
  source 1..630: mol_type = other DNA
ctggagcgggccgcccgggtggagcgggccggcggggccgcccagacagctgctgtgctgctgagcctgtgcccagccccctacagcggccctggcctgcggccccacctggcctttgcccctggccggcccagggctgctgtgaggacagccagcggccgggcccctgtgcgggctgtgcaccctgggggcggcctgcggacctggtgcaggacctgccggggctcctggggccggggcctgcggctgcccggggtgcgggccggcgtgcggctgcccggccgggccggggccggcggccccttccctgcctgcctgaaggccagcgcagatggccaccctggggccttccagacagccagccctgcccctggcacctaccccaagtctgtgtccccagccagcggcctgcctgctgccttcagcacctttgagtggatgaaggtgaagagaaatgccagcaagaaggacagcggcctgggctttgtggaggagaccaggagccgggccaacagcatggagagcgccagcagcacagattctgaaaatgtgcccggcatcgagaagatcagcggccgcagcagcccctggaacttctcctggcagacccggcgggtgtggggccgctag

SEQ ID NO: 155524 - DNA, 1023 bp, synthetic construct
  misc_feature 1..1023: note = Description of Artificial Sequence: Synthetic coding sequence
  source 1..1023: mol_type = other DNA
atgtccttccccaacagcagccctgctgccaacaccttcctggtggacagcctcatcagcgcctgccgcagtgacagcttctacagcagcagcgcctccatgtacatgcccccacccagcgctgacatgggcacctacggcatgcagacctgtggcctgctgcccagcctggccaagcgggaggtgaaccaccagaacatgggcatgaatgtgcacccctacatcccccaggtggacagctggacagaccccaacagaagctgccgcatcgagcagcctgtgacccagcaggtgcccacctgcagcttcaccaccaacatcaaggaggagagcaactgctgcatgtacagcgacaagaggaacaagctgatctctgctgaggtgcccagctaccagaggctggtgcctgagagctgccctgtggagaaccctgaggtgcctgtgcccggctacttccggctgagccagacctacgccaccgggaagacccaggagtacaacaacagccctgagggcagcagcacagtgatgctgcagctgaaccccagaggagctgccaagccccagctgtctgctgcccagctgcagatggagaagaagatgaatgaacctgtgtctggccaggagcccaccaaggtgtcccaggtggagagccctgaggccaagggcggcctgcctgaggagaggagctgcctggccgaggtgtctgtgagcagccctgaggtgcaggagaaggagagcaaggaggagatcaagagtgacacccccaccagcaactggctgacagccaagagcggcaggaagaagcgctgcccctacaccaagcaccagaccctggagctggagaaggagttcctgttcaacatgtacctgacccgggagcggcggctggagatcagcaagtctgtgaacctgacagaccggcaggtgaagatctggttccagaacagaaggatgaagctgaagaagatgagcagagaaaatcgcatccgggagctgacagccaacctgaccttctcctag

SEQ ID NO: 155525 - DNA, 1017 bp, synthetic construct
  misc_feature 1..1017: note = Description of Artificial Sequence: Synthetic coding sequence
  source 1..1017: mol_type = other DNA
atgaatgactttgatgaatgtggccagagcgctgcctccatgtacctgcccggctgtgcctactacgtggcccccagcgactttgccagcaagcccagcttcctgagccagcccagcagctgccagatgaccttcccctacagcagcaacctggccccccacgtgcagcctgtgcgggaggtggccttccgggactatggcctggagcgggccaagtggccctacagaggaggcggcggcggcggcagcgctgggggcggcagcagcggcggcggccctgggggcggcggcggcggggccggcggctacgccccctactatgctgctgctgctgctgctgctgctgctgctgctgctgctgaggaggccgccatgcagcgggagctgctgcccccagctggaagaagaccagatgtgctcttcaaggcccctgagcctgtgtgtgccgcccctggcccccctcatggccctgctggggccgccagcaacttctacagcgctgtgggcagaaatggcatcctgccccagggctttgaccagttctatgaggccgcccctggccccccatttgctggcccccagcccccacctcctccagccccaccccagcctgagggcgctgctgacaagggggaccccaggactggagctgggggcggcggcggcagcccctgcaccaaggccaccccaggcagcgagcccaagggagctgctgagggcagcggaggagatggagagggccccccaggagaggccggggctgagaagagcagcagcgctgtggccccccagaggagcaggaagaagcgctgcccctacaccaagtaccagatccgggagctggagcgggagttcttcttcaacgtgtacatcaacaaggagaagaggctgcagctgagcaggatgctgaacctgacagaccggcaggtgaagatctggttccagaacagaaggatgaaggagaagaagctgaacagagaccggctgcagtacttcaccggcaaccccctcttctag

SEQ ID NO: 155526 - DNA, 480 bp, synthetic construct
  misc_feature 1..480: note = Description of Artificial Sequence: Synthetic coding sequence
  source 1..480: mol_type = other DNA
atgtacctgcccggctgtgcctactacgtggcccccagcgactttgccagcaagcccagcttcctgagccagcccagcagctgccagatgaccttcccctacagcagcaacctggcccctgggggcggcagcccctgcaccaaggccaccccaggcagcgagcccaagggagctgctgagggcagcggaggagatggagagggccccccaggagaggccggggctgagaagagcagcagcgctgtggccccccagaggagcaggaagaagcgctgcccctacaccaagtaccagatccgggagctggagcgggagttcttcttcaacgtgtacatcaacaaggagaagaggctgcagctgagcaggatgctgaacctgacagaccggcaggtgaagatctggttccagaacagaaggatgaaggagaagaagctgaacagagaccggctgcagtacttcaccggcaaccccctcttctag

SEQ ID NO: 155527 - DNA, 813 bp, synthetic construct
  misc_feature 1..813: note = Description of Artificial Sequence: Synthetic coding sequence
  source 1..813: mol_type = other DNA
atgtgtgagaggagcctgtacagagctggctacgtgggcagcctgctgaacctgcagagcccagacagcttctacttcagcaacctgcggcccaacggcggccagctggccgccctgccccccatctcctaccccaggggggccctgccctgggccgccaccccagccagctgtgccccagcccagcctgctggggccacagcctttggaggcttcagccagccctacctggccggcagcggccccctgggcctgcagcccccaacagccaaggatggccctgaggagcaggccaagttctacgcccctgaggccgctgctggccctgaggagcggggccgcacccggcccagctttgcccctgagagcagcctggccccagctgtggccgccctgaaggccgccaagtatgactatgctggggtgggccgggccaccccaggcagcaccaccctgctgcagggcgccccctgtgcccctggcttcaaggatgacaccaagggccccctgaacctgaacatgacagtgcaggccgccggcgtggccagctgcctgcggcccagcctgcctgatggcctgccctggggcgccgcccctggccgggccaggaagaagaggaagccctacaccaagcagcagattgctgagctggagaatgagttcctggtgaatgagttcatcaaccggcagaagaggaaggagctgagcaaccggctgaacctgagtgaccagcaggtgaagatctggttccagaacagaaggatgaagaagaagagggtggtgctgcgggagcaggccctggccctgtactag

SEQ ID NO: 155528 - DNA, 1299 bp, synthetic construct
  misc_feature 1..1299: note = Description of Artificial Sequence: Synthetic coding sequence
  source 1..1299: mol_type = other DNA
atgctgtttgagcagggccagcaggccctggagctgcctgagtgcaccatgcagaaggccgcctactatgagaaccctggcctgtttggaggctacggctacagcaagaccacagacacctacggctacagcaccccccaccagccctacccacctcctgctgctgccagcagcctggacacagactacccaggcagcgcctgcagcatccagagcagcgcccccctgcgggccccagcccacaagggagctgagctgaatggcagctgcatgaggcctggcactggaaacagccagggcggcggcggcggcagccagcccccaggcctgaacagcgagcagcagcccccccagcccccacctcctccacccaccctgccccccagcagccccaccaaccctgggggcggcgtgcctgccaagaagcccaagggcggccccaatgccagcagcagcagcgccaccatcagcaagcagatcttcccctggatgaaggagagccggcagaacagcaagcagaagaacagctgtgccacagctggggagagctgtgaggacaagagccccccaggccctgccagcaagagggtgaggacagcctacaccagcgcccagctggtggagctggagaaggagttccacttcaaccgctacctgtgccggcccaggagagtggagatggccaacctgctgaacctgacagagcggcagatcaagatctggttccagaacagaaggatgaagtacaagaaggaccagaaggccaagggcatcctgcacagccctgccagccagagccctgagaggagcccccccctgggcggcgctgctggccacgtggcctacagcggccagctgccccctgtgcccggcctggcctatgatgcccccagccccccagcctttgccaagagccagcccaacatgtatggcctggccgcctacacagcccccctgagcagctgcctgccccagcagaagagatatgctgcccctgagtttgagccccaccccatggccagcaatggaggcggctttgccagcgccaacctgcagggcagccctgtgtatgtgggcggcaactttgtggagagcatggccccagccagcggccctgtgttcaacctgggccacctgagccaccccagcagcgcctctgtggactacagctgtgccgcccagatccctggcaaccaccaccacggcccctgtgacccccaccccacctacacagacctgagcgcccaccacagcagccagggccgcctgcctgaggcccccaagctgacccacctgtag

SEQ ID NO: 155529 - DNA, 1299 bp, synthetic construct; identical to SEQ ID NO: 155528
  misc_feature 1..1299: note = Description of Artificial Sequence: Synthetic coding sequence
  source 1..1299: mol_type = other DNA

SEQ ID NO: 155530 - DNA, 303 bp, synthetic construct
  misc_feature 1..303: note = Description of Artificial Sequence: Synthetic coding sequence
  source 1..303: mol_type = other DNA
atgctgtttgagcagggccagcaggccctggagctgcctgagtgcaccatgcagaaggccgcctactatgagaaccctggcctgtttggaggctacggctacagcaagaccacagacacctacggctacagcaccccccaccagccctacccacctcctgctgctgccagcagcctggacacagactacccaggcagcgcctgcagcatccagagcagcgcccccctgcgggccccagcccacaagggagctgagctgaatggcagctgcatgaggcctggcactggaaacagccagggctag

SEQ ID NO: 155531 - DNA, 1299 bp, synthetic construct; identical to SEQ ID NO: 155528
  misc_feature 1..1299: note = Description of Artificial Sequence: Synthetic coding sequence
  source 1..1299: mol_type = other DNA

SEQ ID NO: 155532 - DNA, 768 bp, synthetic construct
  misc_feature 1..768: note = Description of Artificial Sequence: Synthetic coding sequence
  source 1..768: mol_type = other DNA
atggtgatgagcagctacatggtgaacagcaaatatgtggaccccaagttccccccctgtgaggagtacctgcagggcggctacctgggggagcagggcgctgactactatggaggaggagcccagggcgctgacttccagcccccaggcctgtaccccaggccagactttggagagcagccctttggaggcagcggccctggccctggcagcgccctgcctgcccggggccacggccaggagcccggcggccctgggggccactacgccgcccctggagagccctgcccagcccccccagcccctcctccagcccccctgcccggggcccgggcctacagccagagcgaccccaagcagcccccatctggaacagccctgaagcagcctgctgtggtgtacccctggatgaagaaggtgcacgtgaacagcgtgaaccccaactacacaggaggagagcccaagaggagcaggacagcctacacccggcagcaggtgctggagctggagaaggagttccacttcaaccgctacctgaccaggagaagaagaattgaaattgcccacaccctgtgcctgtctgagcggcagatcaagatctggttccagaacagaaggatgaagtggaagaaggaccacaagctgcccaacaccaagggccgcagcagcagcagcagcagcagcagcagctgcagcagctctgtggcccccagccagcacctgcagcccatggccaaggaccaccacacagacctgaccaccctgtag

SEQ ID NO: 155533 - DNA, 873 bp, synthetic construct
  misc_feature 1..873: note = Description of Artificial Sequence: Synthetic coding sequence
  source 1..873: mol_type = other DNA
atgagcagctactttgtgaaccccctgtacagcaagtacaaggctgctgctgctgctgctgctgctgctggggaggccatcaaccccacctactatgactgccactttgcccctgaggtgggcggcagacatgctgctgctgctgctgccctgcagctgtatggcaacagcgctgctggcttcccccacgccccaccccaggcccacgcccacccccaccccagccccccaccttctggaacaggctgcggcggccgggagggccggggccaggagtacttccaccctgggggcggcagccctgctgctgcctaccaggccgcccctcctcctccaccccaccccccacctcctcctcctcctccaccctgtggcggcatcgcctgccacggggagcccgccaagttctacggctatgacaacctgcagaggcagcccatcttcaccacccagcaggaggccgagctggtgcagtacccagactgcaagagcagcagcggcaacattggagaagatcctgaccacctgaaccagagcagcagccccagccagatgttcccctggatgaggccccaggccgcccctggaagaagaagaggccggcagacctacagccgcttccagaccctggagctggagaaggagttcctgttcaacccctacctgaccaggaagaggcgcatcgaggtgagccacgccctggccctgacagagcggcaggtgaagatctggttccagaacagaaggatgaagtggaagaaggagaacaacaaggacaagtttcctgtgtcccggcaggaggtgaaggatggagagaccaagaaggaggcccaggagctggaggaggacagagctgagggcctgaccaactag

SEQ ID NO: 155534 - DNA, 870 bp, synthetic construct
  misc_feature 1..870: note = Description of Artificial Sequence: Synthetic coding sequence
  source 1..870: mol_type = other DNA
atgagcagctactttgtgaaccccctgtacagcaagtacaaggctgctgctgctgctgctgctgctgctggggaggccatcaaccccacctactatgactgccactttgcccctgaggtgggcggcagacatgctgctgctgctgctgccctgcagctgtatggcaacagcgctgctggcttcccccacgccccaccccaggcccacgcccacccccaccccagccccccaccttctggaacaggctgcggcggccgggagggccggggccaggagtacttccaccctgggggcggcagccctgctgctgcctaccaggccgcccctcctcctccaccccaccccccacctcctcctcctcctccaccctgtggcggcatcgcctgccacggggagcccgccaagttctacggctatgacaacctgcagaggcagcccatcttcaccacccagcaggaggccgagctggtgcagtacccagactgcaagagcagcagcggcaacattggagaagatcctgaccacctgaaccagagcagcagccccagccagatgttcccctggatgaggccccaggcccctggaagaagaagaggccggcagacctacagccgcttccagaccctggagctggagaaggagttcctgttcaacccctacctgaccaggaagagaagaattgaggtgtcccatgccctggccctgacagagcggcaggtgaagatctggttccagaacagaaggatgaagtggaagaaggagaacaacaaggacaagtttcctgtgtcccggcaggaggtgaaggatggagagaccaagaaggaggcccaggagctggaggaggacagagctgagggcctgaccaactag

SEQ ID NO: 155535 - DNA, 870 bp, synthetic construct; identical to SEQ ID NO: 155534
  misc_feature 1..870: note = Description of Artificial Sequence: Synthetic coding sequence
  source 1..870: mol_type = other DNA

SEQ ID NO: 155536 - DNA, 321 bp, synthetic construct
  misc_feature 1..321: note = Description of Artificial Sequence: Synthetic coding sequence
  source 1..321: mol_type = other DNA
atgttcccctggatgaggccccaggccgcccctggaagaagaagaggccggcagacctacagccgcttccagaccctggagctggagaaggagttcctgttcaacccctacctgaccaggaagaggcgcatcgaggtgagccacgccctggccctgacagagcggcaggtgaagatctggttccagaacagaaggatgaagtggaagaaggagaacaacaaggacaagtttcctgtgtcccggcaggaggtgaaggatggagagaccaagaaggaggcccaggagctggaggaggacagagctgagggcctgaccaactag

SEQ ID NO: 155537 - DNA, 1059 bp, synthetic construct
  misc_feature 1..1059: note = Description of Artificial Sequence: Synthetic coding sequence
  source 1..1059: mol_type = other DNA
atgctgggcggcagcgctggccgcctgaagatgagcagcagcggcaccctgagcaactactacgtggacagcctcatcggccacgagggagatgaggtgtttgctgcccgcttcggccccccaggccctggggcccagggccggcctgctggggtggctgatggccctgctgccacagctgctgagtttgccagctgcagctttgcccccaggtctgctgtgttcagcgcctcctggagcgctgtgcccagccagcccccagctgctgctgccatgagcggcctgtaccacccctacgtgcccccaccacccctggccgccagcgccagcgagcccggccgctacgtgcgctcctggatggagcccctgcccggcttccctggaggagctgggggcggcggcggcggcggcggcggcggccctggccggggccccagccctggccccagcggccctgccaacggccgccactacggcatcaagccagagacccgggccgccccagccccagccacagctgccagcaccaccagcagcagcagcaccagcctgagcagcagcagcaagaggacagagtgcagcgtggcccgggagagccagggcagcagcggccctgagttcagctgcaacagcttcctgcaggagaaggctgctgctgccactggaggcaccggccctggggccggcatcggggccgccaccggcaccggcggcagcagcgagcccagcgcctgcagcgaccaccccatccctggctgcagcctgaaggaggaggagaagcagcacagccagccccagcagcagcagctggaccccaacaacccagctgccaactggattcatgcccggagcaccaggaagaagcgctgcccctacaccaagtaccagaccctggagctggagaaggagttcctgttcaacatgtacctgacccgggaccggcgctatgaggtggcccgcatcctgaacctgacagagcggcaggtgaagatctggttccagaacagaaggatgaagatgaagaagatgagcaaggagaagtgccccaagggggactag

SEQ ID NO: 155538 - DNA, 2757 bp, synthetic construct
  misc_feature 1..2757: note = Description of Artificial Sequence: Synthetic coding sequence
  source 1..2757: mol_type = other DNA
ctgcagcctgtgtatgaatccatggccagccacgtgcaggtgttcagcccccacaccctgcagagcagcgccttctgcagcgtgaagaagctgaagattgagcccagcagcaactgggacatgacaggctacggcagccacagcaaggtgtacagccagagcaagaacatccccctgagccagcctgccaccaccaccgtgtccaccagcctgcctgtgcccaaccccagcctgccctatgagcagaccatcgtgtttcctggcagcacaggccacatcgtggtgaccagcgccagcagcacctctgtgacaggccaggtgctgggcggcccccacaacctgatgaggaggagcacagtgtccctgctggacacctaccagaagtgtggcctgaagaggaagtctgaggagattgagaacaccagctctgtgcagatcatcgaggagcacccccccatgatccagaacaatgccagcggggccaccgtggccacagccaccaccagcacagccaccagcaagaacagcggcagcaacagcgagggggactaccagctggtgcagcacgaggtgctgtgcagcatgaccaacacctatgaggtgctggagttcctgggccggggcaccttcggccaggtggtgaagtgctggaagaggggcaccaatgagatcgtggccatcaagatcctgaagaaccaccccagctatgcccggcagggccagatcgaggtgtccatcctggcccggctgagcacagagagcgcagatgactacaactttgtgcgggcctatgagtgcttccagcacaagaaccacacctgcctggtgtttgagatgctggagcagaacctgtatgacttcctgaagcagaacaagttcagccccctgcccctgaagtacatccggcctgtgctgcagcaggtggccacagccctgatgaagctgaagagcctgggcctcatccatgctgacctgaagccagagaacatcatgctggtggaccccagccggcagccctacagagtgaaggtgattgactttggaagtgccagccacgtgtccaaggctgtgtgcagcacctacctgcagagccgctactaccgggcccctgagatcatcctgggcctgcccttctgtgaggccatcgacatgtggagcctgggctgtgtgattgctgagctgttcctgggctggcccctgtacccaggggcctctgaatatgaccagatccgctacatcagccagacccagggcctgcctgctgagtacctgctgtctgctggcaccaagaccacccgcttcttcaacagagacacagacagcccctaccccctgtggaggctgaagaccccagatgaccacgaggccgagaccggcatcaagagcaaggaggccaggaagtacatcttcaactgcctggatgacatggcccaggtgaacatgaccacagacctggagggcagtgacatgctggtggagaaggctgacagaagagagttcatcgacctgctgaagaagatgctgaccattgatgctgacaagaggatcacccccatcgagaccctgaaccacccctttgtgaccatgacccacctgctggacttcccccacagcacccacgtgaagagctgcttccagaacatggagatctgcaagagaagagtgaacatgtatgacacagtgaaccagagcaagacccccttcatcacccacgtggcccccagcaccagcaccaacctgaccatgaccttcaacaaccagctgaccaccgtgcacaaccaggcccccagcagcaccagcgccaccatcagcctggccaaccctgaggtgtccatcctgaactaccccagcaccctgtaccagcccagcgctgcctccatggctgctgtggcccagaggtccatgcccctgcagacaggaacagcccagatctgtgcccggccagaccccttccagcaggccctgattgtgtgccccccaggcttccagggcctgcaggccagccccagcaagcatgctggctacagcgtgaggatggagaatgctgtgcccatcgtgacccaggcccctggggcccagcccctgcagatccagcccggcctgctggcccagcaggcctggcccagcggcacccagcagatcctgctgcccccagcctggcagcagctgactggagtggccacccacacctctgtgcagcacgccaccgtcatccctgagaccatggccggcacccagcagctggccgactggaggaacacccacgcccacggcagccactacaaccccatcatgcagcagcctgccctgctgaccggccacgtgaccctgcctgctgcccagcccctgaatgtgggcgtggcccacgtgatgaggcagcagcccaccagcaccaccagcagcaggaagagcaagcagcaccagagcagccagaggaagaatgtcatcagctgtgtgacagtgcatgacagcccctacagcgacagcagcagcaacaccagcccctacagcgtgcagcagagagctggccacaacaatgccaatgcctttgacaccaagggcagcctggagaaccactgcaccggcaaccccaggaccatcatcgtgccccccctgaagacccaggccagcgaggtgctggtggagtgtgacagcctggtgcccggcaacctgggccctggccagggcaggaacctgagcctggagagcggcttccctgccttcctgctgctggagatgctgctgtatggcagctag

SEQ ID NO: 155539 - DNA, 3597 bp, synthetic construct
  misc_feature 1..3597: note = Description of Artificial Sequence: Synthetic coding sequence
  source 1..3597: mol_type = other DNA
atggcccctgtgtatgagggcatggccagccacgtgcaggtgttcagcccccacaccctgcagagcagcgccttctgcagcgtgaagaagctgaagattgagcccagcagcaactgggacatgacaggctacggcagccacagcaaggtgtacagccagagcaagaacatccccctgagccagcctgccaccaccaccgtgtccaccagcctgcctgtgcccaaccccagcctgccctatgagcagaccatcgtgtttcctggcagcacaggccacatcgtggtgaccagcgccagcagcacctctgtgacaggccaggtgctgggcggcccccacaacctgatgaggaggagcacagtgtccctgctggacacctaccagaagtgtggcctgaagaggaagtctgaggagattgagaacaccagctctgtgcagatcatcgaggagcacccccccatgatccagaacaatgccagcggggccaccgtggccacagccaccaccagcacagccaccagcaagaacagcggcagcaacagcgagggggactaccagctggtgcagcacgaggtgctgtgcagcatgaccaacacctatgaggtgctggagttcctgggccggggcaccttcggccaggtggtgaagtgctggaagaggggcaccaatgagatcgtggccatcaagatcctgaagaaccaccccagctatgcccggcagggccagatcgaggtgtccatcctggcccggctgagcacagagagcgcagatgactacaactttgtgcgggcctatgagtgcttccagcacaagaaccacacctgcctggtgtttgagatgctggagcagaacctgtatgacttcctgaagcagaacaagttcagccccctgcccctgaagtacatccggcctgtgctgcagcaggtggccacagccctgatgaagctgaagagcctgggcctcatccatgctgacctgaagccagagaacatcatgctggtggaccccagccggcagccctacagagtgaaggtgattgactttggaagtgccagccacgtgtccaaggctgtgtgcagcacctacctgcagagccgctactaccgggcccctgagatcatcctgggcctgcccttctgtgaggccatcgacatgtggagcctgggctgtgtgattgctgagctgttcctgggctggcccctgtacccaggggcctctgaatatgaccagatccgctacatcagccagacccagggcctgcctgctgagtacctgctgtctgctggcaccaagaccacccgcttcttcaacagagacacagacagcccctaccccctgtggaggctgaagaccccagatgaccacgaggccgagaccggcatcaagagcaaggaggccaggaagtacatcttcaactgcctggatgacatggcccaggtgaacatgaccacagacctggagggcagtgacatgctggtggagaaggctgacagaagagagttcatcgacctgctgaagaagatgctgaccattgatgctgacaagaggatcacccccatcgagaccctgaaccacccctttgtgaccatgacccacctgctggacttcccccacagcacccacgtgaagagctgcttccagaacatggagatctgcaagagaagagtgaacatgtatgacacagtgaaccagagcaagacccccttcatcacccacgtggcccccagcaccagcaccaacctgaccatgaccttcaacaaccagctgaccaccgtgcacaaccaggcccccagcagcaccagcgccaccatcagcctggccaaccctgaggtgtccatcctgaactaccccagcaccctgtaccagcccagcgctgcctccatggctgctgtggcccagaggtccatgcccctgcagacaggaacagcccagatctgtgcccggccagaccccttccagcaggccctgattgtgtgccccccaggcttccagggcctgcaggccagccccagcaagcatgctggctacagcgtgaggatggagaatgctgtgcccatcgtgacccaggcccctggggcccagcccctgcagatccagcccggcctgctggcccagcaggcctggcccagcggcacccagcagatcctgctgcccccagcctggcagcagctgactggagtggccacccacacctctgtgcagcacgccaccgtcatccctgagaccatggccggcacccagcagctggccgactggaggaacacccacgcccacggcagccactacaaccccatcatgcagcagcctgccctgctgaccggccacgtgaccctgcctgctgcccagcccctgaatgtgggcgtggcccacgtgatgaggcagcagcccaccagcaccaccagcagcaggaagagcaagcagcaccagagctctgtgagaaatgtgtccacctgtgaggtgagcagcagccaggccatcagcagcccccagaggagcaagagggtgaaggagaacaccccaccccgctgtgccatggtgcacagcagccctgcctgcagcacctctgtgacctgtggctggggagatgtggccagcagcaccacccgggagcggcagaggcagaccatcgtcatcccagacacccccagccccaccgtgtctgtcatcaccatcagcagtgacacagatgaggaggaggagcagaagcacgcccccaccagcacagtgtccaagcagaggaagaatgtcatcagctgtgtgacagtgcatgacagcccctacagcgacagcagcagcaacaccagcccctacagcgtgcagcagagagctggccacaacaatgccaatgcctttgacaccaagggcagcctggagaaccactgcaccggcaaccccaggaccatcatcgtgccccccctgaagacccaggccagcgaggtgctggtggagtgtgacagcctggtgcctgtgaacaccagccaccacagcagcagctacaagagcaagagcagcagcaatgtgaccagcaccagcggccacagcagcggcagcagcagcggggccatcacctaccggcagcagaggcctggcccccacttccagcagcagcagcccctgaacctgagccaggcccagcagcacatcaccacagacagaacaggcagccaccggcggcagcaggcctacatcacccccaccatggcccaggccccctacagcttcccccacaacagccccagccacggcaccgtgcacccccacctggccgctgctgctgctgctgcccacctgcccacccagccccacctgtacacctacacagccccagctgccctgggcagcacaggcaccgtggcccacctggtggccagccagggcagcgcccggcacacagtgcagcacacagcctacccagccagcatcgtgcaccaggtgcctgtgtccatgggcccccgggtgctgcccagccccaccatccaccccagccagtacccagcccagtttgcccaccagacctacatcagcgccagccctgccagcacagtgtacacaggctaccccctgagccctgccaaggtgaaccagtacccctacatctag

SEQ ID NO: 155540 - DNA, 3516 bp, synthetic construct
  misc_feature 1..3516: note = Description of Artificial Sequence: Synthetic coding sequence
  source 1..3516: mol_type = other DNA
atggcccctgtgtatgagggcatggccagccacgtgcaggtgttcagcccccacaccctgcagagcagcgccttctgcagcgtgaagaagctgaagattgagcccagcagcaactgggacatgacaggctacggcagccacagcaaggtgtacagccagagcaagaacatccccctgagccagcctgccaccaccaccgtgtccaccagcctgcctgtgcccaaccccagcctgccctatgagcagaccatcgtgtttcctggcagcacaggccacatcgtggtgaccagcgccagcagcacctctgtgacaggccaggtgctgggcggcccccacaacctgatgaggaggagcacagtgtccctgctggacacctaccagaagtgtggcctgaagaggaagtctgaggagattgagaacaccagctctgtgcagatcatcgaggagcacccccccatgatccagaacaatgccagcggggccaccgtggccacagccaccaccagcacagccaccagcaagaacagcggcagcaacagcgagggggactaccagctggtgcagcacgaggtgctgtgcagcatgaccaacacctatgaggtgctggagttcctgggccggggcaccttcggccaggtggtgaagtgctggaagaggggcaccaatgagatcgtggccatcaagatcctgaagaaccaccccagctatgcccggcagggccagatcgaggtgtccatcctggcccggctgagcacagagagcgcagatgactacaactttgtgcgggcctatgagtgcttccagcacaagaaccacacctgcctggtgtttgagatgctggagcagaacctgtatgacttcctgaagcagaacaagttcagccccctgcccctgaagtacatccggcctgtgctgcagcaggtggccacagccctgatgaagctgaagagcctgggcctcatccatgctgacctgaagccagagaacatcatgctggtggaccccagccggcagccctacagagtgaaggtgattgactttggaagtgccagccacgtgtccaaggctgtgtgcagcacctacctgcagagccgctactaccgggcccctgagatcatcctgggcctgcccttctgtgaggccatcgacatgtggagcctgggctgtgtgattgctgagctgttcctgggctggcccctgtacccaggggcctctgaatatgaccagatccgctacatcagccagacccagggcctgcctgctgagtacctgctgtctgctggcaccaagaccacccgcttcttcaacagagacacagacagcccctaccccctgtggaggctgaagaccccagatgaccacgaggccgagaccggcatcaagagcaaggaggccaggaagtacatcttcaactgcctggatgacatggcccaggtgaacatgaccacagacctggagggcagtgacatgctggtggagaaggctgacagaagagagttcatcgacctgctgaagaagatgctgaccattgatgctgacaagaggatcacccccatcgagaccctgaaccacccctttgtgaccatgacccacctgctggacttcccccacagcacccacgtgaagagctgcttccagaacatggagatctgcaagagaagagtgaacatgtatgacacagtgaaccagagcaagacccccttcatcacccacgtggcccccagcaccagcaccaacctgaccatgaccttcaacaaccagctgaccaccgtgcacaaccagcccagcgctgcctccatggctgctgtggcccagaggtccatgcccctgcagacaggaacagcccagatctgtgcccggccagaccccttccagcaggccctgattgtgtgccccccaggcttccagggcctgcaggccagccccagcaagcacgccggctacagcgtgaggatggagaatgctgtgcccatcgtgacccaggcccctggggcccagcccctgcagatccagcccggcctgctggcccagcaggcctggcccagcggcacccagcagatcctgctgcccccagcctggcagcagctgactggagtggccacccacacctctgtgcagcacgccaccgtcatccctgagaccatggccggcacccagcagctggccgactggaggaacacccacgcccacggcagccactacaaccccatcatgcagcagcctgccctgctgactggacatgtgaccctgcctgctgcccagcccctgaatgtgggcgtggcccacgtgatgaggcagcagcccaccagcaccaccagcagcaggaagagcaagcagcaccagagctctgtgagaaatgtgtccacctgtgaggtgagcagcagccaggccatcagcagcccccagaggagcaagagggtgaaggagaacaccccaccccgctgtgccatggtgcacagcagccctgcctgcagcacctctgtgacctgtggctggggagatgtggccagcagcaccacccgggagcggcagaggcagaccatcgtcatcccagacacccccagccccaccgtgtctgtcatcaccatcagcagtgacacagatgaggaggaggagcagaagcacgcccccaccagcacagtgtccaagcagaggaagaatgtcatcagctgtgtgacagtgcatgacagcccctacagcgacagcagcagcaacaccagcccctacagcgtgcagcagagagctggccacaacaatgccaatgcctttgacaccaagggcagcctggagaaccactgcaccggcaaccccaggaccatcatcgtgccccccctgaagacccaggccagcgaggtgctggtggagtgtgacagcctggtgcctgtgaacaccagccaccacagcagcagctacaagagcaagagcagcagcaatgtgaccagcaccagcggccacagcagcggcagcagcagcggggccatcacctaccggcagcagaggcctggcccccacttccagcagcagcagcccctgaacctgagccaggcccagcagcacatcaccacagacagaacaggcagccaccggcggcagcaggcctacatcacccccaccatggcccaggccccctacagcttcccccacaacagccccagccatggaacagtgcacccccacctggccgctgctgctgctgctgcccacctgcccacccagccccacctgtacacctacacagccccagctgccctgggcagcactggaacagtggcccacctggtggccagccagggcagcgcccggcacacagtgcagcacacagcctacccagccagcatcgtgcaccaggtgcctgtgtccatgggcccccgggtgctgcccagccccaccatccaccccagccagtacccagcccagtttgcccaccagacctacatcagcgccagccctgccagcacagtgtacacaggctaccccctgagccctgccaaggtgaaccagtacccctacatctag

SEQ ID NO: 155541 - DNA, 3648 bp, synthetic construct
  misc_feature 1..3648: note = Description of Artificial Sequence: Synthetic coding sequence
  source 1..3648: mol_type = other DNA
atggccagccaggtgctggtgtacccaccctacgtgtaccagacccagagcagcgccttctgcagcgtgaagaagctgaaggtggagcccagcagctgtgtgttccaggagaggaactaccccaggacctacgtgaatggaagaaactttggaaacagccacccccccaccaagggcagcgccttccagaccaagatccccttcaaccggccccggggccacaacttcagcctgcagaccagcgctgtggtgctgaagaacacagctggggccaccaaggtgattgctgcccaggcccagcaggcccacgtgcaggccccccagattggagcctggaggaaccggctgcacttcctggagggcccccagagatgtggcctgaagaggaagtctgaggagctggacaaccacagcagcgccatgcagatcgtggatgagctgagcatcctgcctgccatgctgcagaccaacatgggcaaccctgtgacagtggtgacagccaccaccggcagcaagcagaactgcaccactggagagggggactaccagctggtgcagcacgaggtgctgtgcagcatgaagaacacctatgaggtgctggacttcctgggccggggcaccttcggccaggtggtgaagtgctggaagaggggcaccaatgagatcgtggccatcaagatcctgaagaaccaccccagctatgcccggcagggccagatcgaggtgtccatcctggcccggctgagcacagaaaatgctgatgagtacaactttgtgcgggcctatgagtgcttccagcacaggaaccacacctgcctggtgtttgagatgctggagcagaacctgtatgacttcctgaagcagaacaagttcagccccctgcccctgaaggtgatccggcccatcctgcagcaggtggccacagccctgaagaagctgaagagcctgggcctcatccatgctgacctgaagccagagaacatcatgctggtggaccctgtgcggcagccctacagagtgaaggtgattgactttggaagtgccagccacgtgtccaagacagtgtgcagcacctacctgcagagccgctactaccgggcccctgagatcatcctgggcctgcccttctgtgaggccatcgacatgtggagcctgggctgtgtgattgctgagctgttcctgggctggcccctgtacccaggggccctggagtatgaccagatccgctacatcagccagacccagggcctgcccggggagcagctgctgaatgtgggcaccaagagcacccgcttcttctgcaaggagacagacatgagccacagcggctggaggctgaagaccctggaggagcacgaggccgagaccggcatgaagagcaaggaggccaggaagtacatcttcaacagcctggatgatgtggcccacgtgaacacagtgatggacctggagggcagtgacctgctggccgagaaggctgacagaagagaatttgtgtccctgctgaagaagatgctgctgattgatgctgacctgcgcatcaccccagctgagaccctgaaccacccctttgtgaacatgaagcacctgctggacttcccccacagcaaccacgtgaagagctgcttccacatcatggacatctgcaagagccacctgaacagctgtgacaccaacaaccacaacaagaccagcctgctgcggcctgtggccagcagcagcacagccaccctgacagccaacttcaccaagattggcaccctgcggagccaggccctgaccaccagcgcccacagcgtggtgcaccacggcatccccctgcaggccggcacagcccagtttggctgtggagatgccttccagcagaccctcatcatctgccccccagccatccagggcatcccagccacccacggcaagcccaccagctacagcatccgggtggacaacacagtgcccctggtgacccaggccccagctgtgcagcccctgcagatccggcctggggtgctgagccagacctggagcggccgcacccagcagatgctggtgcctgcctggcagcaggtgacccccctggccccagccaccaccaccctgaccagcgagagcgtggccggcagccaccggctgggggactggggcaagatgatcagctgcagcaaccactacaacagcgtgatgccccagcccctgctgaccaaccagatcaccctgagcgccccccagcctgtgtctgtgggcatcgcccacgtggtgtggccccagcctgccaccaccaagaagaacaagcagtgccagaacagaggcatcctggtgaagctgatggagtgggagcccggccgggaggagatcaatgccttctcctggagcaacagcctgcagaacaccaacatcccccacagcgccttcatcagccccaagatcatcaatggcaaggatgtggaggaggtgtcctgcatcgagacccaggacaaccagaacagcgagggggaggccaggaactgctgtgagaccagcatccggcaggacagcgacagctctgtgtctgacaagcagaggcagaccatcatcatcgctgacagccccagccctgctgtgtctgtcatcaccatcagcagtgacacagatgaggaggagaccagccagaggcacagcctgagagaatgtaaaggcagcctggactgtgaggcctgccagagcaccctgaacatcgacaggatgtgcagcctgagcagcccagacagcaccctgagcaccagcagcagcggccagagcagccccagcccctgcaagaggcccaacagcatgtctgatgaggagcaggagagcagctgtgacacagtggatggcagccccaccagtgacagcagcggccatgacagcccctttgctgagagcacctttgtggaggacacccatgaaaatacagagctggtgagcagcgctgacacagagaccaagccagctgtgtgcagcgtggtggtgccccctgtggagctggagaatggcctgaatgctgatgagcacatggccaacacagacagcatctgccagcccctcatcaagggccgcagcgcccctggccgcctgaaccagcccagcgctgtgggcacccggcagcagaagctgaccagcgccttccagcagcagcacctgaacttcagccaggtgcagcactttggaagtggccaccaggagtggaatggaaactttggccaccggcggcagcaggcctacatccccacctctgtgaccagcaaccccttcaccctgagccacggcagccccaaccacacagctgtgcacgcccacctggccggcaacacccacctgggcggccagcccaccctgctgccctaccccagcagcgccaccctgagcagcgctgcccctgtggcccacctgctggccagcccctgcaccagccggcccatgctgcagcaccccacctacaacatcagccaccccagcggcatcgtgcaccaggtgcctgtgggcctgaacccccggctgctgcccagccccaccatccaccagacccagtacaagcccatcttccccccccacagctacatcgccgccagccctgcctacacaggcttccccctgagccccaccaagctgagccagtacccctacatgtag

SEQ ID NO: 155542 - DNA, 3585 bp, synthetic construct
  misc_feature 1..3585: note = Description of Artificial Sequence: Synthetic coding sequence
  source 1..3585: mol_type = other DNA
atggccagccaggtgctggtgtacccaccctacgtgtaccagacccagagcagcgccttctgcagcgtgaagaagctgaaggtggagcccagcagctgtgtgttccaggagaggaactaccccaggacctacgtgaatggaagaaactttggaaacagccacccccccaccaagggcagcgccttccagaccaagatccccttcaaccggccccggggccacaacttcagcctgcagaccagcgctgtggtgctgaagaacacagctggggccaccaaggtgattgctgcccaggcccagcaggcccacgtgcaggccccccagattggagcctggaggaaccggctgcacttcctggagggcccccagagatgtggcctgaagaggaagtctgaggagctggacaaccacagcagcgccatgcagatcgtggatgagctgagcatcctgcctgccatgctgcagaccaacatgggcaaccctgtgacagtggtgacagccaccaccggcagcaagcagaactgcaccactggagagggggactaccagctggtgcagcacgaggtgctgtgcagcatgaagaacacctatgaggtgctggacttcctgggccggggcaccttcggccaggtggtgaagtgctggaagaggggcaccaatgagatcgtggccatcaagatcctgaagaaccaccccagctatgcccggcagggccagatcgaggtgtccatcctggcccggctgagcacagaaaatgctgatgagtacaactttgtgcgggcctatgagtgcttccagcacaggaaccacacctgcctggtgtttgagatgctggagcagaacctgtatgacttcctgaagcagaacaagttcagccccctgcccctgaaggtgatccggcccatcctgcagcaggtggccacagccctgaagaagctgaagagcctgggcctcatccatgctgacctgaagccagagaacatcatgctggtggaccctgtgcggcagccctacagagtgaaggtgattgactttggaagtgccagccacgtgtccaagacagtgtgcagcacctacctgcagagccgctactaccgggcccctgagatcatcctgggcctgcccttctgtgaggccatcgacatgtggagcctgggctgtgtgattgctgagctgttcctgggctggcccctgtacccaggggccctggagtatgaccagatccgctacatcagccagacccagggcctgcccggggagcagctgctgaatgtgggcaccaagagcacccgcttcttctgcaaggagacagacatgagccacagcggctggaggctgaagaccctggaggagcacgaggccgagaccggcatgaagagcaaggaggccaggaagtacatcttcaacagcctggatgatgtggcccacgtgaacacagtgatggacctggagggcagtgacctgctggccgagaaggctgacagaagagaatttgtgtccctgctgaagaagatgctgctgattgatgctgacctgcgcatcaccccagctgagaccctgaaccacccctttgtgaacatgaagcacctgctggacttcccccacagcaaccacgtgaagagctgcttccacatcatggacatctgcaagagccacctgaacagctgtgacaccaacaaccacaacaagaccagcctgctgcggcctgtggccagcagcagcacagccaccctgacagccaacttcaccaagattggcaccctgcggagccaggccctgaccaccagcgcccacagcgtggtgcaccacggcatccccctgcaggccggcacagcccagtttggctgtggagatgccttccagcagaccctcatcatctgccccccagccatccagggcatcccagccacccacggcaagcccaccagctacagcatccgggtggacaacacagtgcccctggtgacccaggccccagctgtgcagcccctgcagatccggcctggggtgctgagccagacctggagcggccgcacccagcagatgctggtgcctgcctggcagcaggtgacccccctggccccagccaccaccaccctgaccagcgagagcgtggccggcagccaccggctgggggactggggcaagatgatcagctgcagcaaccactacaacagcgtgatgccccagcccctgctgaccaaccagatcaccctgagcgccccccagcctgtgtctgtgggcatcgcccacgtggtgtggccccagcctgccaccaccaagaagaacaagcagtgccagaacagaagcaacagcctgcagaacaccaacatcccccacagcgccttcatcagccccaagatcatcaacgggaaggatgtggaggaggtgtcctgcatcgagacccaggacaaccagaacagcgagggggaggccaggaactgctgtgagaccagcatccggcaggacagcgacagctctgtgtctgacaagcagaggcagaccatcatcatcgctgacagccccagccctgctgtgtctgtcatcaccatcagcagtgacacagatgaggaggagaccagccagaggcacagcctgcgggagtgcaagggcagcctggactgtgaggcctgccagagcaccctgaacatcgacaggatgtgcagcctgagcagcccagacagcaccctgagcaccagcagcagcggccagagcagccccagcccctgcaagaggcccaacagcatgtctgatgaggagcaggagagcagctgtgacacagtggatggcagccccaccagtgacagcagcggccatgacagcccctttgctgagagcacctttgtggaggacacccatgagaacacagagctggtgtcctctgctgacacagagaccaagccagctgtgtgcagcgtggtggtgccccctgtggagctggagaatggcctgaatgctgatgagcacatggccaacacagacagcatctgccagcccctcatcaagggccgcagcgcccctggccgcctgaaccagcccagcgctgtgggcacccggcagcagaagctgaccagcgccttccagcagcagcacctgaacttcagccaggtgcagcacttcggcagcggccaccaggagtggaatggaaactttggccaccggcggcagcaggcctacatccccacctctgtgaccagcaaccccttcaccctgagccacggcagccccaaccacacagctgtgcacgcccacctggccggcaacacccacctgggcggccagcccaccctgctgccctaccccagcagcgccaccctgagcagcgctgcccctgtggcccacctgctggccagcccctgcaccagccggcccatgctgcagcaccccacctacaacatcagccaccccagcggcatcgtgcaccaggtgcctgtgggcctgaacccccggctgctgcccagccccaccatccaccagacccagtacaagcccatcttccccccccacagctacatcgccgccagccctgcctacacaggcttccccctgagccccaccaagctgagccagtacccctacatgtag

SEQ ID NO: 155543 - DNA, 3585 bp, synthetic construct; identical to SEQ ID NO: 155542
  misc_feature 1..3585: note = Description of Artificial Sequence: Synthetic coding sequence
  source 1..3585: mol_type = other DNA

SEQ ID NO: 155544 - DNA, 3585 bp, synthetic construct; identical to SEQ ID NO: 155542
  misc_feature 1..3585: note = Description of Artificial Sequence: Synthetic coding sequence
  source 1..3585: mol_type = other DNA

SEQ ID NO: 155545 - DNA, 231 bp, synthetic construct
  misc_feature 1..231: note = Description of Artificial Sequence: Synthetic coding sequence
  source 1..231: mol_type = other DNA
atggccagccaggtgctggtgtacccaccctacgtgtaccagacccagagcagcgccttctgcagcgtgaagaagctgaaggtggagcccagcagctgtgtgttccaggagaggaactaccccaggacctacgtgaatggaagaaactttggaaacagccacccccccaccaagggcagcgccttccagaccaagatccccttcaaccggccccggggccacaacttctag

SEQ ID NO: 155546 - DNA, 1851 bp, synthetic construct
  misc_feature 1..1851: note = Description of Artificial Sequence: Synthetic coding sequence
  source 1..1851: mol_type = other DNA
atgagcaccatccagagcgagacagactgctatgacatcatcgaggtgctgggcaagggcaccttcggggaggtggccaagggctggaggaggagcactggagagatggtggccatcaagatcctgaagaatgatgcctacagaaaccgcatcatcaagaatgagctgaagctgctgcactgcatgaggggcctggaccctgaggaggcccacgtgatccgcttcctggagttcttccatgatgccctgaagttctacctggtgtttgagctgctggagcagaacctgtttgagttccagaaggagaacaactttgcccccctgcctgcccggcacatcagaacagtgaccctgcaggtgctgacagccctggcccggctgaaggagctggccatcatccatgctgacctgaagccagagaacatcatgctggtggaccagacccgctgccccttccgggtgaaggtgattgactttggaagtgccagcatcttcagcgaggtgcgctacgtgaaggagccctacatccagagccgcttctaccgggcccctgagatcctgctgggcctgcccttctgtgagaaggtggatgtgtggagcctgggctgtgtgatggccgagctgcacctgggctggcccctgtacccaggcaacaatgaatatgaccaggtgcgctacatctgtgagacccagggcctgcccaagccccacctgctgcatgctgcctgcaaggcccaccacttcttcaagaggaacccccacccagatgctgccaacccctggcagctgaagagcagcgctgactacctggccgagaccaaggtgcggcccctggagaggaggaagtacatgctgaagagcctggaccagattgaaacagtgaatggaggctctgtggccagccggctgaccttcccagaccgggaggccctggccgagcacgccgacctgaagtccatggtggagctgatcaagaggatgctgacctgggagagccatgagcgcatcagccccagcgctgccctgcggcacccctttgtgtccatgcagcagctgcggagcgcccacgagaccacccactactaccagctgagcctgcggagctaccgcctgagcctgcaggtggagggcaagccacccacccctgtggtggccgcagaagatggcaccccctactactgcctggccgaggagaaggaggccgccggcatgggctctgtggccggcagcagccccttcttccgggaggagaaggcccctggcatgcagagggccatcgaccagctggatgacctgagcctgcaggaggccggccacggcctgtggggcgagacctgcaccaatgctgtgtctgacatgatggtgcccctgaaggccgccatcaccggccaccacgtgcctgattctggccctgagcccatcctggccttctacagcagccggctggccggccgccacaaggccaggaagcccccagctggcagcaagagtgacagcaacttcagcaacctgatccggctgagccaggtgtccccagaagatgaccggccctgccggggcagctcctgggaggagggggagcacctgggcgccagcgctgagcccctggccatcctgcagagagatgaagatggccccaacatcgacaacatgaccatggaggccgagaggccagaccctgagctgtttgaccccagcagctgccctggagagtggctgtctgagccagactgcaccctggagagcgtgcggggcccccgggcccagggcctgcccccccggcgcagccaccagcacggcccccccaggggggccaccagcttcctgcagcacgtgacaggccaccactag

SEQ ID NO: 155547 - DNA, 1746 bp, synthetic construct
  misc_feature 1..1746: note = Description of Artificial Sequence: Synthetic coding sequence
  source 1..1746: mol_type = other DNA
atggtggccatcaagatcctgaagaatgatgcctacagaaaccgcatcatcaagaatgagctgaagctgctgcactgcatgaggggcctggaccctgaggaggcccacgtgatccgcttcctggagttcttccatgatgccctgaagttctacctggtgtttgagctgctggagcagaacctgtttgagttccagaaggagaacaactttgcccccctgcctgcccggcacatcagaacagtgaccctgcaggtgctgacagccctggcccggctgaaggagctggccatcatccacgccgacctgaagccagagaacatcatgctggtggaccagacccgctgccccttccgggtgaaggtgattgactttggcagcgccagcatcttcagcgaggtgcgctacgtgaaggagccctacatccagagccgcttctaccgggcccctgagatcctgctgggcctgcccttctgtgagaaggtggatgtgtggagcctgggctgtgtgatggccgagctgcacctgggctggcccctgtacccaggcaacaatgaatatgaccaggtgcgctacatctgtgagacccagggcctgcccaagccccacctgctgcacgccgcctgcaaggcccaccacttcttcaagaggaacccccacccagatgctgccaacccctggcagctgaagagcagcgctgactacctggccgagaccaaggtgcggcccctggagaggaggaagtacatgctgaagagcctggaccagatcgagaccgtgaatggaggctctgtggccagccggctgaccttcccagaccgggaggccctggccgagcacgccgacctgaagtccatggtggagctgatcaagaggatgctgacctgggagagccatgagcgcatcagccccagcgctgccctgcggcacccctttgtgtccatgcagcagctgcggagcgcccacgagaccacccactactaccagctgagcctgcggagctaccgcctgagcctgcaggtggagggcaagccacccacccctgtggtggccgcagaagatggcaccccctactactgcctggccgaggagaaggaggccgccggcatgggctctgtggccggcagcagccccttcttccgggaggagaaggcccctggcatgcagagggccatcgaccagctggatgacctgagcctgcaggaggccggccacggcctgtggggcgagacctgcaccaatgctgtgtctgacatgatggtgcccctgaaggccgccatcaccggccaccacgtgcctgacagcggccctgagcccatcctggccttctacagcagccggctggccggccgccacaaggccaggaagcccccagctggcagcaagagtgacagcaacttcagcaacctgatccggctgagccaggtgtccccagaagatgaccggccctgccggggcagctcctgggaggagggggagcacctgggcgccagcgctgagcccctggccatcctgcagagagatgaagatggccccaacatcgacaacatgaccatggaggccgagaggccagaccctgagctgtttgaccccagcagctgccctggagagtggctgtctgagccagactgcaccctggagagcgtgcggggcccccgggcccagggcctgcccccaagaagaagccaccagcacggcccccccaggggggccaccagcttcctgcagcacgtgacaggccaccactag

SEQ ID NO: 155548 - DNA, 675 bp, synthetic construct
  misc_feature 1..675: note = Description of Artificial Sequence: Synthetic coding sequence
  source 1..675: mol_type = other DNA
atgggagagcagcccatcttcagcacccgggcccacgtgttccagattgaccccaacaccaagaagaactgggtgcccaccagcaagcatgctgtgacagtgtcctacttctatgacagcaccagaaatgtgtaccgcatcatcagcctggatggcagcaaggccatcatcaacagcaccatcacccccaacatgaccttcaccaagaccagccagaagtttggccagtgggccgacagccgggccaacacagtgtatggcctgggcttcagcagcgagcaccacctgagcaaggtgacagagctggagtgtgtgagcagccaggccaatgctgtgcacacccacaagacagagctgaaccagaccatccaggagctggaggagaccctgaagctgaaggaggaggagattgagcggctgaagcaggagattgacaatgcccgggagctgcaggagcagagggacagcctgacccagaagctgcaggaggtggagatccggaacaaggacctggagggccagctgagtgacctggagcagaggctggagaagagccagaatgagcaggaggccttcaggaacaacctgaagaccctgctggagatcctggatggcaagatctttgagctgacagagctgcgggacaacctggccaagctgctggagtgcagctag

SEQ ID NO: 155549 - DNA, 1065 bp, synthetic construct
  misc_feature 1..1065: note = Description of Artificial Sequence: Synthetic coding sequence
  source 1..1065: mol_type = other DNA
atgggagagcagcccatcttcagcacccgggcccacgtgttccagattgaccccaacaccaagaagaactgggtgcccaccagcaagcatgctgtgacagtgtcctacttctatgacagcaccagaaatgtgtaccgcatcatcagcctggatggcagcaaggccatcatcaacagcaccatcacccccaacatgaccttcaccaagaccagccagaagtttggccagtgggccgacagccgggccaacacagtgtatggcctgggcttcagcagcgagcaccacctgagcaagtttgctgagaagttccaggagttcaaggaggccgcccggctggccaaggagaagagccaggagaagatggagctgaccagcacccccagccaggagagcgctggaggagacctgcagagccccctgaccccagagagcatcaatggaacagatgatgagaggaccccagatgtgacccagaacagcgagcccagggctgagcccacccagaatgccctgcccttcagccacagcagcgccatcagcaagcactgggaggccgagctggccaccctgaagggcaacaatgccaagctgacagctgccctgctggagagcacagccaacgtgaagcagtggaagcagcagctggccgcctaccaggaggaggccgagcggctgcacaagagggtgacagagctggagtgtgtgagcagccaggccaatgctgtgcacacccacaagacagagctgaaccagaccatccaggagctggaggagaccctgaagctgaaggaggaggagattgagcggctgaagcaggagattgacaatgcccgggagctgcaggagcagagggacagcctgacccagaagctgcaggaggtggagatccggaacaaggacctggagggccagctgagtgacctggagcagaggctggagaagagccagaatgagcaggaggccttcaggaacaacctgaagaccctgctggagatcctggatggcaagatctttgagctgacagagctgcgggacaacctggccaagctgctggagtgcagctag

SEQ ID NO: 155550 - DNA, 534 bp, synthetic construct
  misc_feature 1..534: note = Description of Artificial Sequence: Synthetic coding sequence
  source 1..534: mol_type = other DNA
atgggagagcagcccatcttcagcacccgggcccacgtgttccagattgaccccaacaccaagaagaactgggtgcccaccagcaagcatgctgtgacagtgtcctacttctatgacagcaccagaaatgtgtaccgcatcatcagcctggatggcagcaaggccatcatcaacagcaccatcacccccaacatgaccttcaccaagaccagccagaagtttggccagtgggccgacagccgggccaacacagtgtatggcctgggcttcagcagcgagcaccacctgagcaagtttgctgagaagttccaggagttcaaggaggccgcccggctggccaaggagaagagccaggagaagatggagctgaccagcacccccagccaggagagcgctggaggagacctgcagagccccctgaccccagagagcatcaatggaacagatgatgagaggaccccagatgtgacccagaacagcgagcccagggctgagcccacccagaatgccctgcccttcagccacaggaagtag

SEQ ID NO: 155551 - DNA, 543 bp, synthetic construct
  misc_feature 1..543: note = Description of Artificial Sequence: Synthetic coding sequence
  source 1..543: mol_type = other DNA
atgggcagcgccatcagcaagcactgggaggccgagctggccaccctgaagggcaacaatgccaagctgacagctgccctgctggagagcacagccaacgtgaagcagtggaagcagcagctggccgcctaccaggaggaggccgagcggctgcacaagagggtgacagagctggagtgtgtgagcagccaggccaatgctgtgcacacccacaagacagagctgaaccagaccatccaggagctggaggagaccctgaagctgaaggaggaggagattgagcggctgaagcaggagattgacaatgcccgggagctgcaggagcagagggacagcctgacccagaagctgcaggaggtggagatccggaacaaggacctggagggccagctgagtgacctggagcagaggctggagaagagccagaatgagcaggaggccttcaggaacaacctgaagaccctgctggagatcctggatggcaagatctttgagctgacagagctgcgggacaacctggccaagctgctggagtgcagctag

SEQ ID NO: 155552 - DNA, 1065 bp, synthetic construct
  misc_feature 1..1065: note = Description of Artificial Sequence: Synthetic coding sequence
  source 1..1065: mol_type = other DNA
atgggagagcagcccatcttcaccacccgggcccacgtgttccagattgaccccaacaccaagaagaactggatgcctgccagcaagcaggccgtgacagtgtcctacttctatgatgtgaccaggaacagctaccgcatcatctctgtggatggagccaaggtgatcatcaacagcaccatcacccccaacatgaccttcaccaagaccagccagaagtttggccagtgggccgacagccgggccaacacagtgtttggcctgggcttcagcagcgagcagcagctgaccaagtttgctgagaagttccaggaggtgaaggaggccgccaagatcgccaaggacaagacccaggagaagattgagaccagcagcaaccacagccaggagagcggccgggagacccccagcagcacccaggccagctctgtgaatggaacagatgatgagaaggccagccatgctggccctgccaacacccacctgaagtcagaaaatgacaagctgaagatcgccctgacccagagcgctgccaacgtgaagaagtgggagattgagctgcagaccctgcgggagagcaatgcccggctgaccacagccctgcaggagagcgctgcctctgtggagcagtggaagaggcagttcagcatctgcagagatgaaaatgaccggctgaggaacaagattgatgagctggaggagcagtgcagcgagatcaaccgggagaaggagaagaacacccagctgaagagaagaattgaggagctggaggccgagctgcgggagaaggagacagagctgaaggacctgaggaagcagagcgagatcatcccccagctgatgtctgaatgtgaatatgtgtctgagaagctggaggccgctgagcgggacaaccagaacctggaggacaaggtgcgcagcctgaagacagacatcgaggagagcaagtaccggcagaggcacctgaaggtggagctgaagagcttcctggaggtgctggatggcaagattgatgacctgcatgacttccggcggggcctgagcaagctgggcacagacaactag

SEQ ID NO: 155553 - DNA, 867 bp, synthetic construct
  misc_feature 1..867: note = Description of Artificial Sequence: Synthetic coding sequence
  source 1..867: mol_type = other DNA
atgggagagcagcccatcttcaccacccgggcccacgtgttccagattgaccccaacaccaagaagaactggatgcctgccagcaagcaggccgtgacagtgtcctacttctatgatgtgaccaggaacagctaccgcatcatctctgtggatggagccaaggtgatcatcaacagcaccatcacccccaacatgaccttcaccaagaccagccagaagtttggccagtgggccgacagccgggccaacacagtgtttggcctgggcttcagcagcgagcagcagctgaccaagtttgctgagaagttccaggaggtgaaggaggccgccaagatcgccaaggacaagacccaggagaagattgagaccagcagcaaccacagccaggccagctctgtgaatggaacagatgatgagaaggccagccacgccggccctgccaacacccacctgaagtcagaaaatgacaagctgaagatcgccctgacccagagcgctgccaacgtgaagaatgagatcaaccgggagaaggagaagaacacccagctgaagagaagaattgaggagctggaggccgagctgcgggagaaggagacagagctgaaggacctgaggaagcagagcgagatcatcccccagctgatgtctgaatgtgaatatgtgtctgagaagctggaggccgctgagcgggacaaccagaacctggaggacaaggtgcgcagcctgaagacagacatcgaggagagcaagtaccggcagaggcacctgaaggtggagctgaagagcttcctggaggtgctggatggcaagattgatgacctgcatgacttccggcggggcctgagcaagctgggcacagacaactag

SEQ ID NO: 155554 - DNA, 900 bp, synthetic construct
  misc_feature 1..900: note = Description of Artificial Sequence: Synthetic coding sequence
  source 1..900: mol_type = other DNA
atgggagagcagcccatcttcaccacccgggcccacgtgttccagattgaccccaacaccaagaagaactggatgcctgccagcaagcaggccgtgacagtgtcctacttctatgatgtgaccaggaacagctaccgcatcatctctgtggatggagccaaggtgatcatcaacagcaccatcacccccaacatgaccttcaccaagaccagccagaagtttggccagtgggccgacagccgggccaacacagtgtttggcctgggcttcagcagcgagcagcagctgaccaagtttgctgagaagttccaggaggtgaaggaggccgccaagatcgccaaggacaagacccaggagaagattgagaccagcagcaaccacagccaggagagcggccgggagacccccagcagcacccaggccagctctgtgaatggaacagatgatgagaaggccagccatgctggccctgccaacacccacctgaagtcagaaaatgacaagctgaagatcgccctgacccagagcgctgccaacgtgaagaatgagatcaaccgggagaaggagaagaacacccagctgaagaggcgcatcgaggagctggaggccgagctgcgggagaaggagacagagctgaaggacctgaggaagcagagcgagatcatcccccagctgatgtctgaatgtgaatatgtgtctgagaagctggaggccgctgagcgggacaaccagaacctggaggacaaggtgcgcagcctgaagacagacatcgaggagagcaagtaccggcagaggcacctgaaggtggagctgaagagcttcctggaggtgctggatggcaagattgatgacctgcatgacttcagaagaggcctgagcaagctgggcacagacaactag

SEQ ID NO: 155555 - DNA, 1032 bp, synthetic construct
  misc_feature 1..1032: note = Description of Artificial Sequence: Synthetic coding sequence
  source 1..1032: mol_type = other DNA
atgggagagcagcccatcttcaccacccgggcccacgtgttccagattgaccccaacaccaagaagaactggatgcctgccagcaagcaggccgtgacagtgtcctacttctatgatgtgaccaggaacagctaccgcatcatctctgtggatggagccaaggtgatcatcaacagcaccatcacccccaacatgaccttcaccaagaccagccagaagtttggccagtgggccgacagccgggccaacacagtgtttggcctgggcttcagcagcgagcagcagctgaccaagtttgctgagaagttccaggaggtgaaggaggccgccaagatcgccaaggacaagacccaggagaagattgagaccagcagcaaccacagccaggccagctctgtgaatggaacagatgatgagaaggccagccacgccggccctgccaacacccacctgaagtcagaaaatgacaagctgaagatcgccctgacccagagcgctgccaacgtgaagaagtgggagattgagctgcagaccctgcgggagagcaatgcccggctgaccacagccctgcaggagagcgctgcctctgtggagcagtggaagaggcagttcagcatctgcagagatgaaaatgaccggctgaggaacaagattgatgagctggaggagcagtgcagcgagatcaaccgggagaaggagaagaacacccagctgaagaggcgcatcgaggagctggaggccgagctgcgggagaaggagacagagctgaaggacctgaggaagcagagcgagatcatcccccagctgatgtctgaatgtgaatatgtgtctgagaagctggaggccgctgagcgggacaaccagaacctggaggacaaggtgcgcagcctgaagacagacatcgaggagagcaagtaccggcagaggcacctgaaggtggagctgaagagcttcctggaggtgctggatggcaagattgatgacctgcatgacttcagaagaggcctgagcaagctgggcacagacaactag

SEQ ID NO: 155556 - DNA, 15 bp, synthetic construct
  misc_feature 1..15: note = Description of Artificial Sequence: Synthetic coding sequence
  source 1..15: mol_type = other DNA
tgaacagacaactag

SEQ ID NO: 155557 - DNA, 4176 bp, synthetic construct
  misc_feature 1..4176: note = Description of Artificial Sequence: Synthetic coding sequence
  source 1..4176: mol_type = other DNA
atggctgtggagggcagcaccatcaccagccgcatcaagaacctgctgcggagccccagcatcaagctgcggcgcagcaaggccggcaacagaagagaggacctgagcagcaaggtgaccctggagaaggtgctgggcatcaccgtgtctgggggccggggcctggcctgtgaccccaggagcggcctggtggcctacccagctggctgtgtggtggtgctcttcaaccccaggaagcacaagcagcaccacatcctgaacagcagcaggaagaccatcacagccctggccttctccccagatggcaagtacctggtgactggagagagcggccacatgcctgctgtgcgggtgtgggatgtggccgagcacagccaggtggccgagctgcaggagcacaagtatggagtggcctgtgtggccttcagccccagcgccaagtacatcgtgtctgtgggctaccagcacgacatgattgtgaatgtgtgggcctggaagaagaacatcgtggtggccagcaacaaggtgagcagccgggtgacagctgtgtccttcagcgaggactgcagctactttgtgacagctggcaacagacacatcaagttctggtacctggatgacagcaagaccagcaaggtgaatgccaccgtgcccctgctgggccgcagcggcctgctgggggagctgaggaacaacctcttcacagatgtggcctgtggccggggcaagaaggctgacagcaccttctgcatcaccagcagcggcctgctgtgtgagttcagtgaccggcggctgctggacaagtgggtggagctgcgggtgtacccagaggtgaaggacagcaaccaggcctgcctgccccccagcagcttcatcacctgcagcagtgacaacaccatccggctgtggaacacagagagcagcggcgtgcacggcagcaccctgcacaggaacatcctgagcagtgacctgatcaagatcatctacgtggatggcaacacccaggccctgctggacacagagctgcctggaggagacaaggcagatgccagcctgctggacccccgggtgggcatccgctctgtgtgtgtgagccccaacggccagcacctggccagcggggacaggatgggcaccctgcgggtgcatgagctgcagagcctgtctgagatgctgaaggtggaggcccatgattctgagatcctgtgcctggagtacagcaagccagacaccggcctgaagctgctggccagcgccagccgggacaggctcatccacgtgctggatgctggccgggagtacagcctgcagcagaccctggatgagcacagcagcagcatcacagctgtgaagtttgctgccagtgatggccaggtgaggatgatcagctgtggggctgacaagagcatctacttcagaacagcccagaagtctggagatggagtgcagttcaccaggacccaccacgtggtgaggaagaccaccctgtatgacatggatgtggagcccagctggaagtacacagccatcggctgccaggacaggaacatccgcatcttcaacatcagcagcggcaagcagaagaagctgttcaagggcagccagggagaagatggcaccctcatcaaggtgcagacagaccccagcggcatctacatcgccaccagctgcagcgacaagaacctgagcatctttgacttcagcagtggagaatgtgtggccaccatgtttggccacagcgagatcgtgacaggcatgaagttcagcaatgactgcaagcacctgatctctgtgtctggggacagctgcatctttgtgtggaggctgagcagcgagatgaccatctccatgaggcagaggctggccgagctgcggcagaggcagaggggcggcaagcagcagggccccagcagcccccagagggccagcggccccaacagacaccaggcccccagcatgctgagccctggccctgccctgagcagtgacagcgacaaggagggagaagatgagggcacagaggaggagctgcctgccctgcctgtgctggccaagagcaccaagaaggccctggcctctgtgcccagccctgccctgcccaggagcctgagccactgggagatgagccgggcccaggagagcgtgggcttcctggaccctgccccagctgccaaccctggcccccggcggcggggccgctgggtgcagcccggggtggagctgtctgtgcgctccatgctggacctgcggcagctggagaccctggcccccagcctgcaggaccccagccaggacagcctggccatcatccccagcggccccaggaagcacggccaggaggccctggagaccagcctgaccagccagaatgagaagccaccccggccccaggccagccagccctgcagctacccccacatcatccggctgctgagccaggaggagggcgtgtttgcccaggacctggagcccgcccccattgaagatggcatcgtgtacccagagcccagcgacaaccccaccatggacaccagcgagttccaggtgcaggccccagcccggggcaccctgggccgggtgtacccaggcagccgcagcagcgagaagcacagcccagacagcgcctgcagcgtggactacagcagcagctgcctgagcagccctgagcaccccacagaagattctgagagcacagagcccctgtctgtggatggcatcagcagtgacctggaggagccagcagaaggagatgaggaggaggaggaggaggagggcggcatgggcccctacggcctgcaggagggcagcccccagaccccagaccaggagcagttcctgaagcagcactttgagaccctggccagcggggccgcccctggggcccctgtgcaggtgcctgagaggtctgagagccgcagcatcagcagccgcttcctgctgcaggtgcagacccggcccctgcgggagcccagccccagcagcagcagcctggccctgatgagcaggcctgcccaggtgccccaggccagcggggagcagcccagaggaaatggagccaaccccccaggggcccctcctgaggtggagcccagcagcggcaaccccagcccccagcaggccgcctctgtgctgctgccccgctgccgcctgaacccagacagctcctgggcccccaagagggtggccacagccagccccttcagcggcctgcagaaggcccagagcgtgcacagcctggtgccccaggagagacatgaggccagcctgcaggcccccagccctggggccctgctgagccgggagattgaggcccaggacggcctgggcagcctgcccccagcagatggccggcccagccggccccacagctaccagaaccccaccaccagctccatggccaagatcagccgcagcatctctgtgggggagaacctgggcctggtggccgagccccaggcccacgcccccatccgggtgagccccctgagcaagctggccctgcccagccgggcccacctggtgctggacatccccaagcccctgcctgaccggcccaccctggccgccttcagccctgtgaccaagggccgggcccctggagaggccgagaagccaggcttccctgtgggcctgggcaaggcccacagcaccacagagcgctgggcctgcctgggggagggcaccacccccaagcccaggacagagtgccaggcccaccctggccccagcagcccctgtgcccagcagctgcctgtgagcagcctcttccagggccctgagaacctgcagcccccacctcctgagaagacccccaaccccatggagtgcaccaagccaggagctgccctgagccaggacagcgagcctgctgtgtccctggagcagtgtgagcagctggtggccgagctgcggggctctgtgcggcaggccgtgcggctgtaccacagcgtggccggctgcaagatgcccagcgctgagcagagccgcatcgcccagctgctgcgggacaccttcagctctgtgcggcaggagctggaggccgtggccggggctgtgctgagcagccctggcagcagccctggagctgtgggcgctgagcagacccaggccctgctggagcagtacagcgagctgctgctgcgggctgtggagaggaggatggagaggaagctgtag

SEQ ID NO: 155558 - DNA, 1077 bp, synthetic construct
  misc_feature 1..1077: note = Description of Artificial Sequence: Synthetic coding sequence
  source 1..1077: mol_type = other DNA
atgagcacagcccgggagcagcccatcttcagcacccgggcccacgtgttccagattgatcctgccaccaagaggaactggatcccagctgggaagcacgccctgactgtgtcctacttctatgatgccaccagaaatgtgtaccgcatcatcagcattggaggagccaaggccatcatcaacagcacagtgacccccaacatgaccttcaccaagaccagccagaagtttggccagtgggccgacagccgggccaacacagtgtatggcctgggctttgccagcgagcagcacctgacccagtttgctgagaagttccaggaggtgaaggaggccgcccggctggcccgggagaagagccaggacggcggggagctgaccagccctgccctgggcctggccagccaccaggtgccccccagccccctggtgtctgccaatggacctggagaggagaagctgttccgcagccagagcgcagatgcccctggccccacagagcgggagcggctgaagaagatgctgtctgagggctctgtgggggaggtgcagtgggaggccgagttctttgccctgcaggacagcaacaacaagctggccggggccctgcgggaggccaatgctgctgctgcccagtggaggcagcagctggaggcccagagagctgaggccgagcggctgcggcagagggtggccgagctggaggcccaggccgccagcgaggtgacccccactggagagaaggagggcctgggccagggccagagcctggagcagctggaggccctggtgcagaccaaggaccaggagatccagaccctgaagagccagacaggaggcccccgggaggccctggaggccgctgagcgggaggagacccagcagaaggtgcagaccagaaatgctgagctggagcaccagctgcgggccatggagaggagcctggaggaggcccgggcagagcgggagcgggcccgggcagaggtgggccgggccgcccagctgctggatgtgtccctgtttgagctgtctgagctgcgggagggcctggcccggctggccgaggccgccccctag

SEQ ID NO: 155559 - DNA, 438 bp, synthetic construct
  misc_feature 1..438: note = Description of Artificial Sequence: Synthetic coding sequence
  source 1..438: mol_type = other DNA
atgagcacagcccgggagcagcccatcttcagcacccgggcccacgtgttccagattgatcctgccaccaagaggaactggatcccagctgggaagcacgccctgactgtgtcctacttctatgatgccaccagaaatgtgtaccgcatcatcagcattggaggagccaaggccatcatcaacagcacagtgacccccaacatgaccttcaccaagaccagccagaagtttggccagtgggccgacagccgggccaacacagtgtatggcctgggctttgccagcgagcagcacctgacccagtttgctgagaagttccaggaggtgaaggaggccgcccggctggcccgggagaagagccaggacggctggggcggcccccagagcgccctggtggtgggcagctttggagctgtgtttgagctgctgattgtgtag

SEQ ID NO: 155560 - DNA, 1086 bp, synthetic construct
  misc_feature 1..1086: note = Description of Artificial Sequence: Synthetic coding sequence
  source 1..1086: mol_type = other DNA
atgagcacagcccgggagcagcccatcttcagcacccgggcccacgtgttccagattgatcctgccaccaagaggaactggatcccagctgggaagcacgccctgactgtgtcctacttctatgatgccaccagaaatgtgtaccgcatcatcagcattggaggagccaaggccatcatcaacagcacagtgacccccaacatgaccttcaccaagaccagccagaagtttggccagtgggccgacagccgggccaacacagtgtatggcctgggctttgccagcgagcagcacctgacccagtttgctgagaagttccaggaggtgaaggaggccgcccggctggcccgggagaagagccaggacggcggggagctgaccagccctgccctgggcctggccagccaccaggtgccccccagccccctggtgtctgccaatggacctggagaggagaagctgttccgcagccagagcgcagatgcccctggccccacagagcgggagcggctgaagaagatgctgtctgagggctctgtgggggaggtgcagtgggaggccgagttctttgccctgcaggacagcaacaacaagctggccggggccctgcgggaggccaatgctgctgctgcccagtggaggcagcagctggaggcccagagagctgaggccgagcggctgcggcagagggtggccgagctggaggcccaggccgccagcgaggtgacccccactggagagaaggagggcctgggccagggccagagcctggagcagctggaggccctggtgcagaccaaggaccaggagatccagaccctgaagagccagacaggaggcccccgggaggccctggaggccgctgagcgggaggagacccagcagaaggtgcaggacctggagaccagaaatgctgagctggagcaccagctgcgggccatggagaggagcctggaggaggcccgggcagagcgggagcgggcccgggcagaggtgggccgggccgcccagctgctggatgtgtccctgtttgagctgtctgagctgcgggagggcctggcccggctggccgaggccgccccctag

SEQ ID NO: 155561 - DNA, 1077 bp, synthetic construct; identical to SEQ ID NO: 155558
  misc_feature 1..1077: note = Description of Artificial Sequence: Synthetic coding sequence
  source 1..1077: mol_type = other DNA

SEQ ID NO: 155562 - DNA, 1086 bp, synthetic construct; identical to SEQ ID NO: 155560
  misc_feature 1..1086: note = Description of Artificial Sequence: Synthetic coding sequence
  source 1..1086: mol_type = other DNA

SEQ ID NO: 155563 - DNA, 1086 bp, synthetic construct; identical to SEQ ID NO: 155560
  misc_feature 1..1086: note = Description of Artificial Sequence: Synthetic coding sequence
  source 1..1086: mol_type = other DNA

SEQ ID NO: 155564 - DNA, 978 bp, synthetic construct; identical to SEQ ID NO: 146592
  misc_feature 1..978: note = Description of Artificial Sequence: Synthetic coding sequence
  source 1..978: mol_type = other DNA

SEQ ID NO: 155565 - DNA, 1176 bp, synthetic construct
  misc_feature 1..1176: note = Description of Artificial Sequence: Synthetic coding sequence
  source 1..1176: mol_type = other DNA
atggagagcgagacagagcctgagcctgtgaccctgctggtgaagagccccaaccagaggcaccgggacctggagctgagcggggaccggggctggagcgtgggccacctgaaggcccacctgagccgggtgtacccagagcggcccaggcctgaggaccagaggctcatctacagcggcaagctgctgctggaccaccagtgcctgcgggacctgctgcccaagcaggagaagagacatgtgctgcacctggtgtgcaatgtgaagagccccagcaagatgcctgagatcaatgccaaggtggccgagagcacagaggagcctgctggcagcaacagaggccagtacccagaggacagcagcagtgatggcctgcggcagcgggaggtgctgaggaacctgagcagccctggctgggagaacatcagcaggcctgaggccgcccagcaggccttccagggcctgggccctggcttcagcggctacaccccctacggctggctgcagctgtcctggttccagcagatctatgcccggcagtactacatgcagtacctggccgccacagctgccagcggggcctttgtgcccccacccagcgcccaggagatccctgtggtgtctgccccagccccagcccccatccacaaccagtttcctgctgagaaccagcctgccaaccagaatgctgccccccaggtggtggtgaaccctggggccaaccagaacctgaggatgaatgcccagggcggccccatcgtggaggaggatgatgagatcaacagagactggctggactggacctacagcgctgccaccttctctgtgttcctgagcatcctgtacttctacagcagcctgagccgcttcctgatggtgatgggcgccaccgtggtgatgtacctgcaccacgtgggctggttccccttccggcccaggcctgtgcagaacttccccaatgatggccccccaccagatgtggtgaaccaggaccccaacaacaacctgcaggagggcacagatcctgagacagaggaccccaaccacctgcccccagacagagatgtgctggatggagagcagaccagccccagcttcatgagcacagcctggctggtgttcaagaccttctttgccagcctgctgcctgagggccccccagccatcgccaactag

SEQ ID NO: 155566 - DNA, 699 bp, synthetic construct
  misc_feature 1..699: note = Description of Artificial Sequence: Synthetic coding sequence
  source 1..699: mol_type = other DNA
atggagagcgagacagagcctgagcctgtgaccctgctggtgaagagccccaaccagaggcaccgggacctggagctgagcggggaccggggctggagcgtgggccacctgaaggcccacctgagccgggtgtacccagagcggcccaggcctgaggaccagaggctcatctacagcggcaagctgctgctggaccaccagtgcctgcgggacctgctgcccaaggagaagagacatgtgctgcacctggtgtgcaatgtgaagagccccagcaagatgcctgagatcaatgccaaggtggccgagagcacagaggagcccgccggcagcaacagaggccagtacccagaggacagcagcagtgatggcctgcggcagcgggaggtgctgaggaacctgagcagccctggctgggagaacatcagccgccaccacgtgggctggttccccttccggcccaggcctgtgcagaacttccccaatgatggccccccaccagatgtggtgaaccaggaccccaacaacaacctgcaggagggcacagatcctgagacagaggaccccaaccacctgcccccagacagagatgtgctggatggagagcagaccagccccagcttcatgagcacagcctggctggtgttcaagaccttctttgccagcctgctgcctgagggccccccagccatcgccaactag

SEQ ID NO: 155567 - DNA, 1101 bp, synthetic construct
  misc_feature 1..1101: note = Description of Artificial Sequence: Synthetic coding sequence
  source 1..1101: mol_type = other DNA
atggagagcgagacagagcctgagcctgtgaccctgctggtgaagagccccaaccagaggcaccgggacctggagctgagcggggaccggggctggagcgtgggccacctgaaggcccacctgagccgggtgtacccagagcggcccaggcctgaggaccagaggctcatctacagcggcaagctgctgctggaccaccagtgcctgcgggacctgctgcccaaggtggccgagagcacagaggagcccgccggcagcaacagaggccagtacccagaggacagcagcagtgatggcctgcggcagcgggaggtgctgaggaacctgagcagccctggctgggagaacatcagcaggcctgaggccgcccagcaggccttccagggcctgggccctggcttcagcggctacaccccctacggctggctgcagctgtcctggttccagcagatctatgcccggcagtactacatgcagtacctggccgccacagctgccagcggggcctttgtgcccccaccttctgcccaggagatccctgtggtgtctgccccagccccagcccccatccacaaccagtttcctgctgagaaccagcctgccaaccagaatgctgccccccaggtggtggtgaaccctggggccaaccagaacctgaggatgaatgcccagggcggccccatcgtggaggaggatgatgagatcaacagagactggctggactggacctacagcgctgccaccttcagcgtcttcctgagcatcctgtacttctacagcagcctgagccgcttcctgatggtgatgggcgccaccgtggtgatgtacctgcaccacgtgggctggttccccttccggcccaggcctgtgcagaacttccccaatgatggccccccaccagatgtggtgaaccaggaccccaacaacaacctgcaggagggcacagatcctgagacagaggaccccaaccacctgcccccagacagagatgtgctggatggagagcagaccagccccagcttcatgagcacagcctggctggtgttcaagaccttctttgccagcctgctgcctgagggccccccagccatcgccaactag

SEQ ID NO: 155568 - DNA, 1173 bp, synthetic construct
  misc_feature 1..1173: note = Description of Artificial Sequence: Synthetic coding sequence
  source 1..1173: mol_type = other DNA
atggagagcgagacagagcctgagcctgtgaccctgctggtgaagagccccaaccagaggcaccgggacctggagctgagcggggaccggggctggagcgtgggccacctgaaggcccacctgagccgggtgtacccagagcggcccaggcctgaggaccagaggctcatctacagcggcaagctgctgctggaccaccagtgcctgcgggacctgctgcccaaggagaagagacatgtgctgcacctggtgtgcaatgtgaagagccccagcaagatgcctgagatcaatgccaaggtggccgagagcacagaggagcccgccggcagcaacagaggccagtacccagaggacagcagcagtgatggcctgcggcagcgggaggtgctgaggaacctgagcagccctggctgggagaacatcagcaggcctgaggccgcccagcaggccttccagggcctgggccctggcttcagcggctacaccccctacggctggctgcagctgtcctggttccagcagatctatgcccggcagtactacatgcagtacctggccgccacagctgccagcggggcctttgtgcccccaccttctgcccaggagatccctgtggtgtctgccccagccccagcccccatccacaaccagtttcctgctgagaaccagcctgccaaccagaatgctgccccccaggtggtggtgaaccctggggccaaccagaacctgaggatgaatgcccagggcggccccatcgtggaggaggatgatgagatcaacagagactggctggactggacctacagcgctgccaccttcagcgtcttcctgagcatcctgtacttctacagcagcctgagccgcttcctgatggtgatgggcgccaccgtggtgatgtacctgcaccacgtgggctggttccccttccggcccaggcctgtgcagaacttccccaatgatggccccccaccagatgtggtgaaccaggaccccaacaacaacctgcaggagggcacagatcctgagacagaggaccccaaccacctgcccccagacagagatgtgctggatggagagcagaccagccccagcttcatgagcacagcctggctggtgttcaagaccttctttgccagcctgctgcctgagggccccccagccatcgccaactag

SEQ ID NO: 155569 - DNA, 1338 bp, synthetic construct
  misc_feature 1..1338: note = Description of Artificial Sequence: Synthetic coding sequence
  source 1..1338: mol_type = other DNA
atggccgagctgaagtacatcagcggctttggaaatgaatgttcttctgaggacccccgctgccccggcagcctgcctgagggccagaacaacccccaggtgtgcccctacaacctgtatgcagagcagctgagcggcagcgccttcacctgccccaggagcaccaacaagaggtcctggctgtaccgcatcctgcccagcgtgagccacaagccctttgagagcattgatgagggccaggtgacccacaactgggatgaggtggaccctgaccccaaccagctgcgctggaagccctttgagatccccaaggccagccagaagaaggtggactttgtgtctggcctgcacaccctgtgtggggccggggacatcaagagcaacaacggcctggccatccacatcttcctgtgcaacacctccatggagaaccgctgcttctacaacagtgatggagacttcctgattgtgccccagaagggcaacctgctgatctacacagaatttgggaagatgctggtgcagcccaatgagatctgtgtgatccagaggggcatgaggttcagcattgatgtgtttgaggagacccggggctacatcctggaggtgtatggagtgcactttgagctgcctgacctgggccccatcggggccaacggcctggccaacccccgggacttcctgatccccatcgcctggtatgaagatcggcaggtgcctgggggctacaccgtcatcaacaagtaccagggcaagctgtttgctgccaagcaggatgtgagccccttcaacgtggtggcctggcacggcaactacaccccctacaagtacaacctgaagaacttcatggtgatcaacagcgtggcctttgaccatgctgaccccagcatcttcaccgtgctgacagccaagtctgtgcggcctggggtggccatcgctgactttgtgatcttccccccacgctggggcgtggccgacaagaccttccggcccccctactaccacaggaactgcatgtctgagttcatgggcctcatccggggccactatgaggccaagcagggcggcttcctgcccggcggcggcagcctgcacagcaccatgacccctcatggcccagatgctgactgctttgagaaggccagcaaggtgaagctggcccctgagagaattgctgatggcaccatggccttcatgtttgagagcagcctgagcctggccgtgaccaagtggggcctgaaggccagccgctgcctggatgagaactaccacaagtgctgggagcccctgaagagccacttcacccccaacagcagaaatcctgctgagcccaactag

SEQ ID NO: 155570 - DNA, 2187 bp, synthetic construct
  misc_feature 1..2187: note = Description of Artificial Sequence: Synthetic coding sequence
  source 1..2187: mol_type = other DNA
atggaggagacccagcccccaccccagcccaagctgcccctgtgtgacagcctgatgatctggctgcagaccttcaacacagccagcccctgccaggatgtgaagcagctgaccagcggcgtggccatggcccaggtgctgcaccagattgatgctgcctggttcaatgaatcctggctgagccgcatcaaggaggatgtgggggacaactggaggatcaaggccagcaatgtgaagaaggtgctgcagggcatcatgagctactaccacgagttcctgggccagcagatcagcgaggccctgatcccagacctgaaccagatcacagagtgcagcgaccctgtggagctgggccgcctgctgcagctgatcctgggctgtgccatcaactgtgagaagaagcaggagcacatccagaacatcatgaccctggaggagagcgtgcagcacgtggtgatgacagccatccaggagctgatgagcaaggagatcctgagcagccccccaaatgatgctgtgggggagctggagcagcagctgaagagggccctggaggagctgcaggaggccctggccgagaaggaggagctgcggcagagatgtgaggagctggacatgcaggtgaccaccctgcaggatgagaagaacagcctggtgtctgaaaatgagatgatgaatgagaagctggaccagctggatggcagctttgatgaccccaacacagtggtggccaagaagtacttccacgcccagctgcagctggagcagctgcaggaggagaacttccggctggaggccgccaaggatgactacagagtgcactgtgaggagctggagaagcagctgattgagttccagcacagaaatgatgagctgaccagcctggccgaggagacccgggccctgaaggatgaaattgatgtgctgcgggccaccagtgacaaggccaacaagctggagagcacagtggagatctaccggcagaagctgcaggacctgaatgacctgaggaagcaggtgaagaccctgcaggagaccaacatgatgtacatgcacaacacagtgtccctggaggaggagctgaagaaggccaatgctgcccggacccagctggagacctacaagaggcaggtgcaggacctgcacgtgaagctgagcagcgagagcaagagagctgacaccctggcctttgagatgaagaggctggaggagaagcatgaggccctgctgaaggagaaggagcggctgattgagcagagggacaccctgaaggagaccaatgaggagctgcgctgcagccaggtgcagcaggaccacctgaaccagacagatgccagcgccaccaagagctatgagaacctggccgctgagatcatgcctgtggagtaccgggaggtgttcatccggctgcagcacgagaacaagatgctgcggctgcagcaggagggctctgaaaatgaaagaattgaggagctgcaggagcagctggagcagaagcacaggaagatgaatgagctggagacagagcagaggctgagcaaggagcgcatccgggagctgcagcagcagatcgaggacctgcagaagagcctgcaggagcagggcagcaagtctgagggggagagcagcagcaagctgaagcagaagctggaggcccacatggagaagctgacagaggtgcatgaggagctgcagaagaagcaggagctgattgaggacctgcagcctgacatcaaccagaatgtgcagaagatcaatgagctggaggccgccctgcagaagaaggatgaggacatgaaggccatggaggagcgctacaagatgtacctggagaaggccagaaatgtcatcaagaccctggaccccaagctgaacccagccagcgctgagatcatgctgctgaggaagcagctggccgagaaggagaggagaattgagatcctggagagcgagtgcaaggtggccaagttccgggactatgaggagaagctgattgtgtctgcctggtacaacaagagcctggccttccagaagctgggcatggagagccggctggtgtctgggggcggggcctgcagcgacacaggagcctgcaccccagcccgctccttcctggcccagcagaggcacatcaccaacaccaggaggaacctgtctgtgaaggtgcctgccaccaccagtgactag

SEQ ID NO: 155571 - DNA, 2061 bp, synthetic construct
  misc_feature 1..2061: note = Description of Artificial Sequence: Synthetic coding sequence
  source 1..2061: mol_type = other DNA
atggcccaggtgctgcaccagattgatgctgcctggttcaatgaatcctggctgagccgcatcaaggaggatgtgggggacaactggaggatcaaggccagcaatgtgaagaaggtgctgcagggcatcatgagctactaccacgagttcctgggccagcagatcagcgaggccctgatcccagacctgaaccagatcacagagtgcagcgaccctgtggagctgggccgcctgctgcagctgatcctgggctgtgccatcaactgtgagaagaagcaggagcacatccagaacatcatgaccctggaggagagcgtgcagcacgtggtgatgacagccatccaggagctgatgagcaaggagatcctgagcagccccccaaatgatgctgtgggggagctggagcagcagctgaagagggccctggaggagctgcaggaggccctggccgagaaggaggagctgcggcagagatgtgaggagctggacatgcaggtgaccaccctgcaggatgagaagaacagcctggtgtctgaaaatgagatgatgaatgagaagctggaccagctggatggcagctttgatgaccccaacacagtggtggccaagaagtacttccacgcccagctgcagctggagcagctgcaggaggagaacttccggctggaggccgccaaggatgactacagagtgcactgtgaggagctggagaagcagctgattgagttccagcacagaaatgatgagctgaccagcctggccgaggagacccgggccctgaaggatgaaattgatgtgctgcgggccaccagtgacaaggccaacaagctggagagcacagtggagatctaccggcagaagctgcaggacctgaatgacctgaggaagcaggtgaagaccctgcaggagaccaacatgatgtacatgcacaacacagtgtccctggaggaggagctgaagaaggccaatgctgcccggacccagctggagacctacaagaggcaggtgcaggacctgcacgtgaagctgagcagcgagagcaagagagctgacaccctggcctttgagatgaagaggctggaggagaagcatgaggccctgctgaaggagaaggagcggctgattgagcagagggacaccctgaaggagaccaatgaggagctgcgctgcagccaggtgcagcaggaccacctgaaccagacagatgccagcgccaccaagagctatgagaacctggccgctgagatcatgcctgtggagtaccgggaggtgttcatccggctgcagcacgagaacaagatgctgcggctgcagcaggagggctctgaaaatgaaagaattgaggagctgcaggagcagctggagcagaagcacaggaagatgaatgagctggagacagagcagaggctgagcaaggagcgcatccgggagctgcagcagcagatcgaggacctgcagaagagcctgcaggagcagggcagcaagtctgagggggagagcagcagcaagctgaagcagaagctggaggcccacatggagaagctgacagaggtgcatgaggagctgcagaagaagcaggagctgattgaggacctgcagcctgacatcaaccagaatgtgcagaagatcaatgagctggaggccgccctgcagaagaaggatgaggacatgaaggccatggaggagcgctacaagatgtacctggagaaggccagaaatgtcatcaagaccctggaccccaagctgaacccagccagcgctgagatcatgctgctgaggaagcagctggccgagaaggagaggagaattgagatcctggagagcgagtgcaaggtggccaagttccgggactatgaggagaagctgattgtgtctgcctggtacaacaagagcctggccttccagaagctgggcatggagagccggctggtgtctgggggcggggcctgcagcgacacaggagcctgcaccccagcccgctccttcctggcccagcagaggcacatcaccaacaccaggaggaacctgtctgtgaaggtgcctgccaccaccagtgactag

SEQ ID NO: 155572 - DNA, 414 bp, synthetic construct
  misc_feature 1..414: note = Description of Artificial Sequence: Synthetic coding sequence
  source 1..414: mol_type = other DNA
atggaggagacccagcccccaccccagcccaagctgcccctgtgtgacagcctgatgatctggctgcagaccttcaacacagccagcccctgccaggatgtgaagcagctgaccagcggcgtggccatggcccaggtgctgcaccagattgatgctgcctggttcaatgaatcctggctgagccgcatcaaggaggatgtgggggacaactggaggatcaaggccagcaatgtgaagaaggtgctgcagggcatcatgagctactaccacgagttcctgggccagcagatcagcgaggccctgatcccagacctgaaccagatcacagagtgcagcgaccctgtggagctgggccgcctgctgcagctgatcctgggctgtgccatcaactgtgagaagaagcaggagcactag

SEQ ID NO: 155573 - DNA, 2154 bp, synthetic construct
  misc_feature 1..2154: note = Description of Artificial Sequence: Synthetic coding sequence
  source 1..2154: mol_type = other DNA
atgtctgtggacaaggccgagctgtgtggcagcctgctgacctggctgcagaccttccacgtgcccagcccctgtgccagcccccaggacctgagcagcggcctggccgtggcctacgtgctgaaccagattgaccccagctggttcaatgaggcctggctgcagggcatcagtgaagatcctggccccaactggaagctgaaggtgagcaacctgaagatggtgctgcggagcctggtggagtacagccaggatgtgctggcccaccctgtgtctgaggagcacctgcctgatgtgtccctcatcggggagttcagtgaccctgctgagctgggcaagctgctgcagctggtgctgggctgtgccatcagctgtgagaagaagcaggaccacatccagaggatcatgaccctggaggagagcgtgcagcacgtggtgatggaggccatccaggagctgatgaccaaggacaccccagacagcctgagccctgagacctacggcaactttgacagccagagccgccgctactacttcctgtctgaggaggccgaggagggagatgagctgcagcagcgctgcctggacctggagcggcagctgatgctgctgtctgaggagaagcagagcctggcccaggagaatgccggcctgcgggagaggatgggccggcctgagggggagggcaccccaggcctgacagccaagaagctgctgctgctgcagagccagctggagcagctgcaggaggagaacttccggctggagagcggccgggaggatgagcggctgcgctgtgccgagctggagcgggaggtggccgagctgcagcacaggaaccaggccctgaccagcctggcccaggaggcccaggccctgaaggatgagatggatgagctgcggcagagcagcgagagagctggccagctggaggccaccctgaccagctgcagaagaaggctgggggagctgcgggagctgcggcggcaggtgcggcagctggaggagagaaatgccggccacgccgagaggacccggcagctggaggatgagctgcggcgggccggcagcctgcgggcccagctggaggcccagaggcggcaggtgcaggagctgcagggccagaggcaggaggaggccatgaaggccgagaagtggctgtttgaatgtagaaacctggaggagaagtatgaatctgtgaccaaggagaaggagcggctgctggccgagcgggacagcctgcgggaggccaatgaggagctgcgctgtgcccagctgcagccccggggcctgacccaggccgaccccagcctggaccccaccagcacccctgtggacaacctggccgctgagatcctgcctgctgagctgcgggagaccctgctgcggctgcagctggagaacaagaggctgtgccggcaggaggccgctgaccgggagcggcaggaggagctgcagaggcacctggaggatgccaacagagcccggcacggcctggagacccagcaccggctgaaccagcagcagctgtctgagctgcgggcccaggtggaggacctgcagaaggccctgcaggagcagggcggcaagacagaggacagcatcctgctgaagaggaagctggaggagcacctgcagaagctgcatgaagctgacctggagctgcagaggaagcgggagtacatcgaggagctggagcccccaacagacagcagcacagccaggagaattgaggagctgcagcacaacctgcagaagaaggatgctgacctgcgggccatggaggagcgctacagaagatatgtggacaaggccaggatggtgatgcagaccatggagcccaagcagaggcctgctgctggggcccctcctgagctgcacagcctgcggacccagctgcgggagagagatgtgcgcatccgccacctggagatggactttgagaagagccgcagccagcgggagcaggaggagaagctgctgatcagcgcctggtacaacatgggcatggccctgcagcagagagctggggaggagcgggccccagcccacgcccagagcttcctggcccagcagaggctggccaccaacagcagaagaggccccctgggccgcctggccagcctgaacctgcggcccacagacaagcactag

SEQ ID NO: 155574 - DNA, 2160 bp, synthetic construct
  misc_feature 1..2160: note = Description of Artificial Sequence: Synthetic coding sequence
  source 1..2160: mol_type = other DNA
atgtctgtggacaaggccgagctgtgtggcagcctgctgacctggctgcagaccttccacgtgcccagcccctgtgccagcccccaggacctgagcagcggcctggccgtggcctacgtgctgaaccagattgaccccagctggttcaatgaggcctggctgcagggcatcagtgaagatcctggccccaactggaagctgaaggtgagcaacctgaagatggtgctgcggagcctggtggagtacagccaggatgtgctggcccaccctgtgtctgaggagcacctgcctgatgtgtccctcatcggggagttcagtgaccctgctgagctgggcaagctgctgcagctggtgctgggctgtgccatcagctgtgagaagaagcaggaccacatccagaggatcatgaccctggaggagagcgtgcagcacgtggtgatggaggccatccaggagctgatgaccaaggacaccccagacagcctgagccctgagacctacggcaactttgacagccagagccgccgctactacttcctgtctgaggaggccgaggagggagatgagctgcagcagcgctgcctggacctggagcggcagctgatgctgctgtctgaggagaagcagagcctggcccaggagaatgccggcctgcgggagaggatgggccggcctgagggggagggcaccccaggcctgacagccaagaagctgctgctgctgcagagccagctggagcagctgcaggaggagaacttccggctggagagcggccgggaggatgagcggctgcgctgtgccgagctggagcgggaggtggccgagctgcagcacaggaaccaggccctgaccagcctggcccaggaggcccaggccctgaaggatgagatggatgagctgcggcagagcagcgagagagctggccagctggaggccaccctgaccagctgcagaagaaggctgggggagctgcgggagctgcggcggcaggtgcggcagctggaggagagaaatgccggccacgccgagaggacccggcagctggaggatgagctgcggcgggccggcagcctgcgggcccagctggaggcccagaggcggcaggtgcaggagctgcagggccagaggcaggaggaggccatgaaggccgagaagtggctgtttgaatgtagaaacctggaggagaagtatgaatctgtgaccaaggagaaggagcggctgctggccgagcgggacagcctgcgggaggccaatgaggagctgcgctgtgcccagctgcagccccggggcctgacccaggccgaccccagcctggaccccaccagcacccctgtggacaacctggccgctgagatcctgcctgctgagctgcgggagaccctgctgcggctgcagctggagaacaagaggctgtgccggcaggaggccgctgaccgggagcggcaggaggagctgcagaggcacctggaggatgccaacagagcccggcacggcctggagacccagcaccggctgaaccagcagcagctgtctgagctgcgggcccaggtggaggacctgcagaaggccctgcaggagcagggcggcaagacagaagatgccatcagcatcctgctgaagaggaagctggaggagcacctgcagaagctgcatgaagctgacctggagctgcagaggaagcgggagtacatcgaggagctggagcccccaacagacagcagcacagccaggagaattgaggagctgcagcacaacctgcagaagaaggatgctgacctgcgggccatggaggagcgctacagaagatatgtggacaaggccaggatggtgatgcagaccatggagcccaagcagaggcctgctgctggggcccctcctgagctgcacagcctgcggacccagctgcgggagagagatgtgcgcatccgccacctggagatggactttgagaagagccgcagccagcgggagcaggaggagaagctgctgatcagcgcctggtacaacatgggcatggccctgcagcagagagctggggaggagcgggccccagcccacgcccagagcttcctggcccagcagaggctggccaccaacagcagaagaggccccctgggccgcctggccagcctgaacctgcggcccacagacaagcactag

SEQ ID NO: 155575 - DNA, 2157 bp, synthetic construct
  misc_feature 1..2157: note = Description of Artificial Sequence: Synthetic coding sequence
  source 1..2157: mol_type = other DNA
atgttttctgtggagagcctggagcgggcagagctgtgtgagagcctgctgacctggatccagaccttcaacgtggatgccccctgccagacagtggaggacctgaccaatggagtggtgatggcccaggtgctgcagaagattgatcctgcctactttgatgagaactggctgaaccgcatcaagacagaggtgggggacaactggaggctgaagatcagcaacctgaagaagatcctgaagggcatcctggactacaaccacgagatcctgggccagcagatcaatgacttcaccctgcctgatgtgaacctgattggagagcacagtgatgctgctgagctgggccgcatgctgcagctgatcctgggctgtgctgtgaactgtgagcagaagcaggagtacatccaggccatcatgatgatggaggagagcgtgcagcacgtggtgatgacagccatccaggagctgatgagcaaggagagccctgtgtctgctggaaatgatgcctacgtggacctggaccggcagctgaagaagaccacagaggagctgaatgaggccctgagcgccaaggaggagatcgcccagcgctgccacgagctggacatgcaggtggccgccctgcaggaggagaagagcagcctgctggccgagaaccaggtgctgatggagcggctgaaccagagcgacagcattgaggaccccaacagccctgctggccgccgccacctgcagctgcagacccagctggagcagctgcaggaggagaccttccggctggaggccgccaaggatgactaccgcatccgctgtgaggagctggagaaggagatcagcgagctgcggcagcagaatgatgagctgaccaccctggctgatgaggcccagagcctgaaggatgaaattgatgtgctgcggcacagcagtgacaaggtgtccaagctggagggccaggtggagagctacaagaagaagctggaggacctgggggacctgcggcggcaggtgaagctgctggaggagaagaacaccatgtacatgcagaacacagtgtccctggaggaggagctgaggaaggccaatgctgcccggagccagctggagacctacaagaggcaggtggtggagctgcagaaccggctgtctgaggagagcaagaaggctgacaagctggactttgagtacaagaggctgaaggagaaggtggacagcctgcagaaggagaaggaccggctgaggacagagcgggacagcctgaaggagaccatcgaggagctgcgctgtgtgcaggcccaggagggccagctgaccacccagggcctgatgcccctgggcagccaggagagcagtgacagcctggccgctgagatcgtgaccccagagatccgggagaagctgatccggctgcagcacgagaacaagatgctgaagctgaaccaggagggcagtgacaatgagaagatcgccctgctgcagagcctgctggatgatgccaacctgaggaagaatgagctggagacagaaaatcggctggtgaaccagaggctgctggaggtgcagagccaggtggaggagctgcagaagagcctgcaggaccagggcagcaaggcagaagattctgtgctgctgaagaagaagctggaggagcacctggagaagctgcacgaggccaacaatgagctgcagaagaagagggccatcatcgaggacctggagccccgcttcaacaacagcagcctgaagattgaggagctgcaggaggccctgaggaagaaggaggaggagatgaagcagatggaggagcgctacaagaagtacctggagaaggccaagagcgtcatccgcaccctggaccccaagcagaaccagggcgccgcccctgagatccaggccctgaagaaccagctgcaggagcgggacaggctcttccacagcctggagaaggagtatgagaagaccaagagccagcgggagatggaggagaagtacatcgtgtctgcctggtacaacatgggcatgaccctgcacaagaaggctgctgaggaccggctggccagcacaggcagcggccagagcttcctggcccggcagaggcaggccaccagcagcagaagaagctacccaggccacgtgcagcctgccacagccaggtag

SEQ ID NO: 155576 - DNA, 222 bp, synthetic construct
  misc_feature 1..222: note = Description of Artificial Sequence: Synthetic coding sequence
  source 1..222: mol_type = other DNA
atgtctgctgagacagccagcggccccacagaggaccaggtggagatcctggagtacaacttcaacaaggtggacaagcacccagacagcaccaccctgtgcctgattgctgctgaggccggcctgtctgaggaggagacccagaagtggttcaagcagaggctggccaagtggaggagaagtgagggcctgcccagtgaatgtagatctgtgacagactag

SEQ ID NO: 155577 - DNA, 222 bp, synthetic construct; identical to SEQ ID NO: 155576
  misc_feature 1..222: note = Description of Artificial Sequence: Synthetic coding sequence
  source 1..222: mol_type = other DNA

SEQ ID NO: 155578 - DNA, 222 bp, synthetic construct; identical to SEQ ID NO: 155576
  misc_feature 1..222: note = Description of Artificial Sequence: Synthetic coding sequence
  source 1..222: mol_type = other DNA

SEQ ID NO: 155579 - DNA, 285 bp, synthetic construct
  misc_feature 1..285: note = Description of Artificial Sequence: Synthetic coding sequence
  source 1..285: mol_type = other DNA
atgtctgctgagacagccagcggccccacagaggaccaggtggagatcctggagtacaacttcaacaaggtggacaagcacccagacagcaccaccctgtgcctgattgctgctgaggccggcctgtctgaggaggagacccagggcagtgacctgatcagccgcagcaagatctggcaccctgagagcagcccccagcgggagggctacccccatgacagcctgccctgcctggcctttgactacttcagcctgctgcccccccagtgcaaggagatggtgtag

SEQ ID NO: 155580 - DNA, 276 bp, synthetic construct
  misc_feature 1..276: note = Description of Artificial Sequence: Synthetic coding sequence
  source 1..276: mol_type = other DNA
atgctgatcttcctgggctgctacagaagaaggctggaggagcgggccggcaccatgtctgctgagacagccagcggccccacagaggaccaggtggagatcctggagtacaacttcaacaaggtggacaagcacccagacagcaccaccctgtgcctgattgctgctgaggccggcctgtctgaggaggagacccagaagtggttcaagcagaggctggccaagtggaggagaagtgagggcctgcccagtgaatgtagatctgtgacagactag

SEQ ID NO: 155581 - DNA, 222 bp, synthetic construct; identical to SEQ ID NO: 155576
  misc_feature 1..222: note = Description of Artificial Sequence: Synthetic coding sequence
  source 1..222: mol_type = other DNA

SEQ ID NO: 155582 - DNA, 285 bp, synthetic construct; identical to SEQ ID NO: 155579
  misc_feature 1..285: note = Description of Artificial Sequence: Synthetic coding sequence
  source 1..285: mol_type = other DNA

SEQ ID NO: 155583 - DNA, 222 bp, synthetic construct; identical to SEQ ID NO: 155576
  misc_feature 1..222: note = Description of Artificial Sequence: Synthetic coding sequence
  source 1..222: mol_type = other DNA

SEQ ID NO: 155584 - DNA, 276 bp, synthetic construct; identical to SEQ ID NO: 155580
  misc_feature 1..276: note = Description of Artificial Sequence: Synthetic coding sequence
  source 1..276: mol_type = other DNA

SEQ ID NO: 155585 - DNA, 285 bp, synthetic construct; identical to SEQ ID NO: 155579
  misc_feature 1..285: note = Description of Artificial Sequence: Synthetic coding sequence
  source 1..285: mol_type = other DNA

SEQ ID NO: 155586 - DNA, 222 bp, synthetic construct; identical to SEQ ID NO: 155576
  misc_feature 1..222: note = Description of Artificial Sequence: Synthetic coding sequence
  source 1..222: mol_type = other DNA

SEQ ID NO: 155587 - DNA, 222 bp, synthetic construct; identical to SEQ ID NO: 155576
  misc_feature 1..222: note = Description of Artificial Sequence: Synthetic coding sequence
  source 1..222: mol_type = other DNA

SEQ ID NO: 155588 - DNA, 339 bp, synthetic construct
  misc_feature 1..339: note = Description of Artificial Sequence: Synthetic coding sequence
  source 1..339: mol_type = other DNA
atgctgatcttcctgggctgctacagaagaaggctggaggagcgggccggcaccatgtctgctgagacagccagcggccccacagaggaccaggtggagatcctggagtacaacttcaacaaggtggacaagcacccagacagcaccaccctgtgcctgattgctgctgaggccggcctgtctgaggaggagacccagggcagtgacctgatcagccgcagcaagatctggcaccctgagagcagcccccagcgggagggctacccccatgacagcctgccctgcctggcctttgactacttcagcctgctgcccccccagtgcaaggagatggtgtag

SEQ ID NO: 155589 - DNA, 222 bp, synthetic construct; identical to SEQ ID NO: 155576
  misc_feature 1..222: note = Description of Artificial Sequence: Synthetic coding sequence
  source 1..222: mol_type = other DNA

SEQ ID NO: 155590 - DNA, 222 bp, synthetic construct; identical to SEQ ID NO: 155576
  misc_feature 1..222: note = Description of Artificial Sequence: Synthetic coding sequence
  source 1..222: mol_type = other DNA

SEQ ID NO: 155591 - DNA, 222 bp, synthetic construct; identical to SEQ ID NO: 155576
  misc_feature 1..222: note = Description of Artificial Sequence: Synthetic coding sequence
  source 1..222: mol_type = other DNA

SEQ ID NO: 155592 - DNA, 144 bp, synthetic construct
  misc_feature 1..144: note = Description of Artificial Sequence: Synthetic coding sequence
  source 1..144: mol_type = other DNA
atgtctgctgagacagccagcggccccacagaggaccaggtggagatcctggagtacaacttcaacaaggtggacaagcacccagacagcaccaccctgtgcctgattgctgctgaggccggcctgtctgaggaggagacctag

SEQ ID NO: 155593 - DNA, 1164 bp, synthetic construct
  misc_feature 1..1164: note = Description of Artificial Sequence: Synthetic coding sequence
  source 1..1164: mol_type = other DNA
atggccacagcccagctgcagaggacccccatgtctgccctggtgttccccaacaagatcagcacagagcaccagagcctggtgctggtgaagaggctgctggccgtgtctgtgtcctgcatcacctacctgcggggcatcttcccagaatgtgcctacggcacccgctacctggatgacctgtgtgtgaagatcctgcgggaggacaagaactgccccggcagcacccagctggtgaagtggatgctgggctgctatgatgccctgcagaagaagtatgtgtacaccaaccctgaggacccccagaccatcagcgagtgctaccagttcaagttcaagtacaccaacaacggccccctgatggacttcatcagcaagaaccagagcaatgaaagctccatgctgagcacagacaccaagaaggccagcatcctgctgatcaggaagatctacatcctgatgcagaacctgggccccctgcccaatgatgtgtgcctgaccatgaagctgttctactatgatgaggtgaccccaccagactaccagcccccaggcttcaaggatggagactgtgaaggagtcatctttgaaggagagcccatgtacctgaatgtgggggaggtgtccacccccttccacatcttcaaggtgaaggtgaccacagagcgggagaggatggagaacatcgacagcaccatcctgagccccaagcagatcaagacccccttccagaagatcctgcgggacaaggatgtggaggatgagcaggagcactacaccagtgatgacctggacatcgagaccaagatggaggagcaggagaagaacccagccagcagcgagctggaggagcccagcctggtgtgtgaagaagatgagatcatgaggagcaaggagagcccagacctgagcatcagccacagccaggtggagcagctggtgaacaagaccagcgagctggacatgtctgagagcaagaccaggtctgggaaggtgttccagaacaagatggccaatggaaaccagcctgtgaagagcagcaaagaaaataggaagaggagccagcacgagagcggcagaattgtgctgcaccactttgacagcagcagccaggagagcgtgcccaagaggaggaagttcagcgagcccaaggagcacatctag

SEQ ID NO: 155594 - DNA, 1185 bp, synthetic construct
  misc_feature 1..1185: note = Description of Artificial Sequence: Synthetic coding sequence
  source 1..1185: mol_type = other DNA
atggccacagcccagctgcagaggacccccatgtctgccctggtgttccccaacaagatcagcacagagcaccagagcctggtgctggtgaagaggctgctggccgtgtctgtgtcctgcatcacctacctgcggggcatcttcccagaatgtgcctacggcacccgctacctggatgacctgtgtgtgaagatcctgcgggaggacaagaactgccccggcagcacccagctggtgaagtggatgctgggctgctatgatgccctgcagaagaagtacctgaggatggtggtgctggccgtgtacaccaaccctgaggacccccagaccatcagcgagtgctaccagttcaagttcaagtacaccaacaacggccccctgatggacttcatcagcaagaaccagagcaatgaaagctccatgctgagcacagacaccaagaaggccagcatcctgctgatcaggaagatctacatcctgatgcagaacctgggccccctgcccaatgatgtgtgcctgaccatgaagctgttctactatgatgaggtgaccccaccagactaccagcccccaggcttcaaggatggagactgtgagggcgtcatctttgaaggagagcccatgtacctgaatgtgggggaggtgtccacccccttccacatcttcaaggtgaaggtgaccacagagcgggagaggatggagaacatcgacagcaccatcctgagccccaagcagatcaagacccccttccagaagatcctgcgggacaaggatgtggaggatgagcaggagcactacaccagtgatgacctggacatcgagaccaagatggaggagcaggagaagaacccagccagcagcgagctggaggagcccagcctggtgtgtgaggaggatgagatcatgaggagcaaggagagcccagacctgagcatcagccacagccaggtggagcagctggtgaacaagaccagcgagctggacatgtctgagagcaagaccaggtctgggaaggtgttccagaacaagatggccaacggcaaccagcctgtgaagagcagcaaggagaacaggaagaggagccagcatgaaagtggccgcatcgtgctgcaccactttgacagcagcagccaggagagcgtgcccaagaggaggaagttcagcgagcccaaggagcacatctag

SEQ ID NO: 155595 - DNA, 573 bp, synthetic construct
  misc_feature 1..573: note = Description of Artificial Sequence: Synthetic coding sequence
  source 1..573: mol_type = other DNA
atgaggctgtggaacaagatcagccgctggatgctgggctgctatgatgccctgcagaagaagtacctgaggatggtggtgctggccgtgtacaccaaccctgaggacccccagaccatcagcgagtgctaccagttcaagttcaagtacaccaacaacggccccctgatggacttcatcagcaagaaccagagcaatgaaagctccatgctgagcacagacaccaagaaggccagcatcctgctgatcaggaagatctacatcctgatgcagaacctgggccccctgcccaatgatgtgtgcctgaccatgaagctgttctactatgatgaggtgaccccaccagactaccagcccccaggcttcaaggatggagactgtgaaggagtcatctttgaaggagagcccatgtacctgaatgtgggggaggtgtccacccccttccacatcttcaaggtgaaggtgaccacagagcgggagaggatggagaacatcgacagcaccatcctgagccccaagcagatcaagacccccttccagaagatcctgcgggacaaggatgtggaggactag

SEQ ID NO: 155596 - DNA, 972 bp, synthetic construct
  misc_feature 1..972: note = Description of Artificial Sequence: Synthetic coding sequence
  source 1..972: mol_type = other DNA
atgaggctgtggaacaagatcagccgctggatgctgggctgctatgatgccctgcagaagaagtacctgaagatcatggagctgactgtgtacaccaaccctgaggacccccagaccatcagcgagtgctaccagttcaagttcaagtacaccaacaacggccccctgatggacttcatcagcaagaaccagagcaatgaaagctccatgctgagcacagacaccaagaaggccagcatcctgctgatcaggaagatctacatcctgatgcagaacctgggccccctgcccaatgatgtgtgcctgaccatgaagctgttctactatgatgaggtgaccccaccagactaccagcccccaggcttcaaggatggagactgtgaaggagtcatctttgaaggagagcccatgtacctgaatgtgggggaggtgtccacccccttccacatcttcaaggtgaaggtgaccacagagcgggagaggatggagaacatcgacagcaccatcctgagccccaagcagatcaagacccccttccagaagatcctgcgggacaaggatgtggaggatgagcaggagcactacaccagtgatgacctggacatcgagaccaagatggaggagcaggagaagaacccagccagcagcgagctggaggagcccagcctggtgtgtgaagaagatgagatcatgaggagcaaggagagcccagacctgagcatcagccacagccaggtggagcagctggtgaacaagaccagcgagctggacatgtctgagagcaagaccaggtctgggaaggtgttccagaacaagatggccaatggaaaccagcctgtgaagagcagcaaagaaaataggaagaggagccagcacgagagcggcagaattgtgctgcaccactttgacagcagcagccaggagagcgtgcccaagaggaggaagttcagcgagcccaaggagcacatctag

SEQ ID NO: 155597 - DNA, 1185 bp, synthetic construct
  misc_feature 1..1185: note = Description of Artificial Sequence: Synthetic coding sequence
  source 1..1185: mol_type = other DNA
atggccacagcccagctgcagaggacccccatgtctgccctggtgttccccaacaagatcagcacagagcaccagagcctggtgctggtgaagaggctgctggccgtgtctgtgtcctgcatcacctacctgcggggcatcttcccagaatgtgcctacggcacccgctacctggatgacctgtgtgtgaagatcctgcgggaggacaagaactgccccggcagcacccagctggtgaagtggatgctgggctgctatgatgccctgcagaagaagtacctgaagatcatggagctgactgtgtacaccaaccctgaggacccccagaccatcagcgagtgctaccagttcaagttcaagtacaccaacaacggccccctgatggacttcatcagcaagaaccagagcaatgaaagctccatgctgagcacagacaccaagaaggccagcatcctgctgatcaggaagatctacatcctgatgcagaacctgggccccctgcccaatgatgtgtgcctgaccatgaagctgttctactatgatgaggtgaccccaccagactaccagcccccaggcttcaaggatggagactgtgagggcgtcatctttgaaggagagcccatgtacctgaatgtgggggaggtgtccacccccttccacatcttcaaggtgaaggtgaccacagagcgggagaggatggagaacatcgacagcaccatcctgagccccaagcagatcaagacccccttccagaagatcctgcgggacaaggatgtggaggatgagcaggagcactacaccagtgatgacctggacatcgagaccaagatggaggagcaggagaagaacccagccagcagcgagctggaggagcccagcctggtgtgtgaggaggatgagatcatgaggagcaaggagagcccagacctgagcatcagccacagccaggtggagcagctggtgaacaagaccagcgagctggacatgtctgagagcaagaccaggtctgggaaggtgttccagaacaagatggccaacggcaaccagcctgtgaagagcagcaaggagaacaggaagaggagccagcatgaaagtggccgcatcgtgctgcaccactttgacagcagcagccaggagagcgtgcccaagaggaggaagttcagcgagcccaaggagcacatctag

SEQ ID NO: 155598 - DNA, 945 bp, synthetic construct
  misc_feature 1..945: note = Description of Artificial Sequence: Synthetic coding sequence
  source 1..945: mol_type = other DNA
atgaggctgtggaacaagatcagccgctggatgctgggctgctatgatgccctgcagaagaagtacctgaggatggtggtgctggccaccatcagcgagtgctaccagttcaagttcaagtacaccaacaacggccccctgatggacttcatcagcaagaaccagagcaatgaaagctccatgctgagcacagacaccaagaaggccagcatcctgctgatcaggaagatctacatcctgatgcagaacctgggccccctgcccaatgatgtgtgcctgaccatgaagctgttctactatgatgaggtgaccccaccagactaccagcccccaggcttcaaggatggagactgtgagggcgtcatctttgaaggagagcccatgtacctgaatgtgggggaggtgtccacccccttccacatcttcaaggtgaaggtgaccacagagcgggagaggatggagaacatcgacagcaccatcctgagccccaagcagatcaagacccccttccagaagatcctgcgggacaaggatgtggaggatgagcaggagcactacaccagtgatgacctggacatcgagaccaagatggaggagcaggagaagaacccagccagcagcgagctggaggagcccagcctggtgtgtgaggaggatgagatcatgaggagcaaggagagcccagacctgagcatcagccacagccaggtggagcagctggtgaacaagaccagcgagctggacatgtctgagagcaagaccaggtctgggaaggtgttccagaacaagatggccaacggcaaccagcctgtgaagagcagcaaggagaacaggaagaggagccagcatgaaagtggccgcatcgtgctgcaccactttgacagcagcagccaggagagcgtgcccaagaggaggaagttcagcgagcccaaggagcacatctag

SEQ ID NO: 155599 - DNA, 495 bp, synthetic construct
  misc_feature 1..495: note = Description of Artificial Sequence: Synthetic coding sequence
  source 1..495: mol_type = other DNA
atgaggctgtggaacaagatcagccgctggatgctgggctgctatgatgccctgcagaagaagtatgtgtacaccaaccctgaggacccccagaccatcagcgagtgctaccagttcaagttcaagtacaccaacaacggccccctgatggacttcatcagcaagaaccagagcaatgaaagctccatgctgagcacagacaccaagaaggccagcatcctgctgatcaggaagatctacatcctgatgcagaacctgggccccctgcccaatgatgtgtgcctgaccatgaagctgttctactatgatgaggtgaccccaccagactaccagcccccaggcttcaaggatggagactgtgagggcgtcatctttgaaggagagcccatgtacctgaatgtgggggaggtgtccacccccttccacatcttcaaggtgaaggtgaccacagagcgggagaggatggagaacatcgacagcaccatcctgtcctag

SEQ ID NO: 155600 - DNA, 945 bp, synthetic construct
  misc_feature 1..945: note = Description of Artificial Sequence: Synthetic coding sequence
  source 1..945: mol_type = other DNA
atgaggctgtggaacaagatcagccgctggatgctgggctgctatgatgccctgcagaagaagtacctgcgctacttcctgttcaagaccatcagcgagtgctaccagttcaagttcaagtacaccaacaacggccccctgatggacttcatcagcaagaaccagagcaatgaaagctccatgctgagcacagacaccaagaaggccagcatcctgctgatcaggaagatctacatcctgatgcagaacctgggccccctgcccaatgatgtgtgcctgaccatgaagctgttctactatgatgaggtgaccccaccagactaccagcccccaggcttcaaggatggagactgtgagggcgtcatctttgaaggagagcccatgtacctgaatgtgggggaggtgtccacccccttccacatcttcaaggtgaaggtgaccacagagcgggagaggatggagaacatcgacagcaccatcctgagccccaagcagatcaagacccccttccagaagatcctgcgggacaaggatgtggaggatgagcaggagcactacaccagtgatgacctggacatcgagaccaagatggaggagcaggagaagaacccagccagcagcgagctggaggagcccagcctggtgtgtgaggaggatgagatcatgaggagcaaggagagcccagacctgagcatcagccacagccaggtggagcagctggtgaacaagaccagcgagctggacatgtctgagagcaagaccaggtctgggaaggtgttccagaacaagatggccaacggcaaccagcctgtgaagagcagcaaggagaacaggaagaggagccagcatgaaagtggccgcatcgtgctgcaccactttgacagcagcagccaggagagcgtgcccaagaggaggaagttcagcgagcccaaggagcacatctag

SEQ ID NO: 155601 - DNA, 6108 bp, synthetic construct
  misc_feature 1..6108: note = Description of Artificial Sequence: Synthetic coding sequence
  source 1..6108: mol_type = other DNA
atggccagcgctgtgtccccagccaacctgcctgctgtgctgctgcagccccgctggaagagggtggtgggctggagcggccctgtgccccggcccaggcatggccacagagctgtggccatcaaggagctgattgtggtgtttggaggcggcaatgaaggaattgtggatgagctgcacgtgtacaacacagccaccaaccagtggttcatcccagctgtgcggggggacatccccccaggctgtgccgcctacggctttgtgtgtgatggcacccggctgctggtgtttggaggcatggtggagtatggcaagtacagcaatgacctgtatgagctgcaggccagccgctgggagtggaagaggctgaaggccaagacccccaagaatggccccccaccctgcccccggctgggccacagcttcagcctggtgggcaacaagtgctacctgtttggaggcctggccaatgattctgaggaccccaagaacaacatcccccgctacctgaatgacctgtacatcctggagctgcggcccggcagcggcgtggtggcctgggacatccccatcacctatggagtgctgcccccaccccgggagagccacacagctgtggtgtacacagagaaggacaacaagaagagcaagctggtgatctatggaggcatgagcggctgccgcctgggggacctgtggaccctggacatcgacaccctgacctggaacaagcccagcctgagcggcgtggcccccctgcccaggagcctgcacagcgccaccaccatcggcaacaagatgtatgtgtttggaggctgggtgcccctggtgatggatgatgtgaaggtggccacccatgagaaggagtggaagtgcaccaacaccctggcctgcctgaacctggacaccatggcctgggagaccatcctgatggacaccctggaggacaacatcccccgggcccgggccggccactgtgctgtggccatcaacacccggctgtacatctggagcggcagagatggctacaggaaggcctggaacaaccaggtgtgctgcaaggacctgtggtacctggagacagagaagcccccacctccagcccgggtgcagctggtgcgggccaacaccaacagcctggaggtgtcctggggcgctgtggccacagctgacagctacctgctgcagctgcagaagtatgacatcccagccacagctgccacagccaccagccccacccccaaccctgtgcccagcgtgcctgccaacccccccaagagccctgccccagctgctgctgccccagctgtgcagcccctgacccaggtgggcatcaccctgctgccccaggccgccccagccccacccaccaccaccaccatccaggtgctgcccaccgtgcccggcagcagcatctctgtgcccacagctgcccggacccagggcgtgcctgctgtgctgaaggtgacaggcccccaggccaccaccggcacccccctggtgaccatgaggcctgccagccaggccggcaaggcccctgtgacagtgaccagcctgcctgctggggtgaggatggtggtgcccacccagagcgcccagggcaccgtgattggcagcagcccccagatgagcggcatggccgccctggccgctgctgctgctgccacccagaagatcccccccagcagcgcccccaccgtgctgtctgtgcctgctggcaccaccatcgtgaagaccatggctgtgaccccaggcaccaccaccctgcctgccaccgtgaaggtggccagcagccctgtgatggtgagcaacccagccaccaggatgctgaagacagctgctgcccaggtgggcacctctgtgtcctctgccaccaacaccagcacccggcccatcatcaccgtgcacaagagcggcaccgtgacagtggcccagcaggcccaggtggtgaccaccgtggtgggcggcgtgaccaagaccatcaccctggtgaagagccccatctctgtgcctgggggcagcgccctgatcagcaacctgggcaaggtgatgtctgtggtgcagaccaagcctgtgcagaccagcgctgtgacaggccaggccagcactggacctgtgacccagatcatccagaccaagggccccctgcctgctggcaccatcctgaagctggtgaccagcgcagatggcaagcccaccaccatcatcaccaccacccaggccagcggggccggcaccaagcccaccatcctgggcatcagctctgtgagccccagcaccaccaagccaggcaccaccaccatcatcaagaccatccccatgtctgccatcatcacccaggccggggccaccggggtgaccagcagccctggcatcaagagccccatcaccatcatcaccaccaaggtgatgaccagcggcaccggggccccagccaagatcatcacagctgtgcccaagatcgccactggacatggccagcagggcgtgacccaggtggtgctgaagggggcccctggccagcccggcaccatcctgaggacagtgcccatgggcggcgtgcggctggtgacccctgtgacagtgtctgctgtgaagccagctgtgaccaccctggtggtgaagggcaccaccggggtgaccaccctgggcaccgtgactggaacagtgtccaccagcctggccggggccggcggccacagcaccagcgccagcctggccacccccatcaccaccctgggcaccatcgccaccctgagcagccaggtgatcaaccccacagccatcaccgtgtctgctgcccagaccaccctgacagctgctgggggcctgaccacccccaccatcaccatgcagcctgtgtcccagcccacccaggtgaccctcatcacagcccccagcggcgtggaggcccagcctgtgcatgacctgcctgtgtccatcctggccagccccaccacagagcagcccacagccaccgtgaccatcgctgacagcggccagggagatgtgcagcccggcaccgtgaccctggtgtgcagcaaccccccctgtgagacccatgaaacaggcaccaccaacacagccaccaccaccgtggtggccaacctgggcggccacccccagcccacccaggtgcagtttgtgtgtgaccggcaggaggccgccgccagcctggtgaccagcacagtgggccagcagaatggatctgtggtgcgggtgtgcagcaaccccccctgtgagacccatgaaacaggcaccaccaacacagccaccacagccaccagcaacatggccggccagcacggctgcagcaaccccccctgtgagacccatgagaccggcaccaccaacacagccaccacagccatgagctctgtgggcgccaaccaccagagagatgcccggcgggcctgtgccgccggcaccccagctgtgatccgcatctctgtggccactggagccctggaggccgcccagggcagcaagagccagtgccagacccggcagaccagcgccaccagcaccaccatgacagtgatggccactggagccccctgcagcgctggccccctgctgggccccagcatggcccgggagcccggcggccgcagccctgcctttgtgcagctggcccccctgagcagcaaggtgcggctgagcagccccagcatcaaggacctgcctgctggccgccacagccatgctgtgtccacagctgccatgaccaggagctctgtgggcgctggggagcccaggatggcccctgtgtgtgagagcctgcagggcggcagccccagcaccaccgtgacagtgacagccctggaggccctgctgtgccccagcgccaccgtgacccaggtgtgcagcaaccccccctgtgagacccatgaaacaggcaccaccaacacagccaccaccagcaatgccggcagcgcccagagggtgtgcagcaaccccccctgtgagacccatgaaacaggcaccacccacacagccaccacagccaccagcaatggaggcaccggccagcctgagggcggccagcagcccccagctggccggccctgtgagacccaccagaccaccagcacaggcaccaccatgtctgtgtctgtgggcgccctgctgcctgatgccaccagcagccacaggacagtggagagcggcctggaggtggccgccgcccccagcgtgaccccccaggccggcacagccctgctggcccccttccccacccagagggtgtgcagcaaccccccctgtgagacccatgaaacaggcaccacccacacagccaccaccgtgaccagcaacatgagcagcaaccaggaccccccacctgctgccagtgaccagggcgaggtggagagcacccagggcgacagcgtgaacatcaccagcagcagcgccatcaccaccaccgtgagcagcaccctgaccagggctgtgaccaccgtgacccagagcacccctgtgcccggccccagcgtgcccccacctgaggagctgcaggtgtccccaggcccccggcagcagctgcccccccggcagctgctgcagagcgccagcacagccctgatgggagagagcgctgaggtgctgagcgccagccagaccccagagctgcctgctgctgtggacctgagcagcactggagagcccagcagcggccaggagagcgctggcagcgctgtggtggccaccgtggtggtgcagcccccaccacccacccagagcgaggtggaccagctgagcctgccccaggagctgatggccgaggcccaggccggcaccaccaccctgatggtgacaggcctgaccccagaggagctggccgtgacagctgctgctgaggccgccgcccaggccgccgccacagaggaggcccaggccctggccatccaggccgtgctgcaggccgcccagcaggccgtgatgggcactggagagcccatggacaccagcgaggccgccgccaccgtgacccaggccgagctgggccacctgtctgctgagggccaggagggccaggccaccaccatccccatcgtgctgacccagcaggagctggccgccctggtgcagcagcagcagctgcaggaggcccaggcccagcagcagcaccaccacctgcccacagaggccctggccccagctgacagcctgaatgaccctgccatcgagagcaactgcctgaatgagctggccggcaccgtgcccagcacagtggccctgctgcccagcacagccacagagagcctggcccccagcaacacctttgtggccccccagcctgtggtggtggccagccctgccaagctgcaggccgccgccaccctgacagaggtggccaacggcatcgagagcctgggcgtgaagccagacctgcccccaccacccagcaaggcccccatgaagaaggagaaccagtggtttgatgtgggcgtcatcaagggcaccaacgtgatggtgacccactacttcctgcccccagatgatgctgtgcccagtgatgatgacctgggcaccgtgcctgactacaaccagctgaagaagcaggagctgcagcccggcacagcctacaagttccgggtggccggcatcaatgcctgtggccggggccccttcagcgagatcagcgccttcaagacctgcctgcccggcttccctggggccccctgtgccatcaagatcagcaagagcccagatggagcccacctgacctgggagccccccagcgtgaccagcggcaagatcatcgagtacagcgtgtacctggccatccagagcagccaggccggcggggagctgaagagcagcaccccagcccagctggccttcatgagggtgtactgcggccccagccccagctgcctggtgcagagcagcagcctgagcaatgcccacatcgactacaccaccaagccagccatcatcttcagaattgctgccagaaatgagaagggctacggccctgccacccaggtgcgctggctgcaggagaccagcaaggacagcagcggcaccaagccagccaacaagaggcccatgagcagccctgagatgaagagcgcccccaagaagagcaaggcagatggccagtag

SEQ ID NO: 155602 - DNA, 5901 bp, synthetic construct
  misc_feature 1..5901: note = Description of Artificial Sequence: Synthetic coding sequence
  source 1..5901: mol_type = other DNA
atggccagcgctgtgtccccagccaacctgcctgctgtgctgctgcagccccgctggaagagggtggtgggctggagcggccctgtgccccggcccaggcatggccacagagctgtggccatcaaggagctgattgtggtgtttggaggcggcaatgaaggaattgtggatgagctgcacgtgtacaacacagccaccaaccagtggttcatcccagctgtgcggggggacatccccccaggctgtgccgcctacggctttgtgtgtgatggcacccggctgctggtgtttggaggcatggtggagtatggcaagtacagcaatgacctgtatgagctgcaggccagccgctgggagtggaagaggctgaaggccaagacccccaagaatggccccccaccctgcccccggctgggccacagcttcagcctggtgggcaacaagtgctacctgtttggaggcctggccaatgattctgaggaccccaagaacaacatcccccgctacctgaatgacctgtacatcctggagctgcggcccggcagcggcgtggtggcctgggacatccccatcacctatggagtgctgcccccaccccgggagagccacacagctgtggtgtacacagagaaggacaacaagaagagcaagctggtgatctatggaggcatgagcggctgccgcctgggggacctgtggaccctggacatcgacaccctgacctggaacaagcccagcctgagcggcgtggcccccctgcccaggagcctgcacagcgccaccaccatcggcaacaagatgtatgtgtttggaggctgggtgcccctggtgatggatgatgtgaaggtggccacccatgagaaggagtggaagtgcaccaacaccctggcctgcctgaacctggacaccatggcctgggagaccatcctgatggacaccctggaggacaacatcccccgggcccgggccggccactgtgctgtggccatcaacacccggctgtacatctggagcggcagagatggctacaggaaggcctggaacaaccaggtgtgctgcaaggacctgtggtacctggagacagagaagcccccacctccagcccgggtgcagctggtgcgggccaacaccaacagcctggaggccgccccagccccacccaccaccaccaccatccaggtgctgcccaccgtgcccggcagcagcatctctgtgcccacagctgcccggacccagggcgtgcctgctgtgctgaaggtgacaggcccccaggccaccaccggcacccccctggtgaccatgaggcctgccagccaggccggcaaggcccctgtgacagtgaccagcctgcctgctggggtgaggatggtggtgcccacccagagcgcccagggcaccgtcatcggcagcagcccccagatgagcggcatggccgccctggccgctgctgctgctgccacccagaagatcccccccagcagcgcccccaccgtgctgtctgtgcctgctggcaccaccatcgtgaagaccatggctgtgaccccaggcaccaccaccctgcctgccaccgtgaaggtggccagcagccctgtgatggtgagcaacccagccaccaggatgctgaagacagctgctgcccaggtgggcacctctgtgagcagcgccaccaacaccagcacccggcccatcatcaccgtgcacaagtctggaacagtgacagtggcccagcaggcccaggtggtgaccaccgtggtgggcggcgtgaccaagaccatcaccctggtgaagagccccatctctgtgcctgggggcagcgccctgatcagcaacctgggcaaggtgatgtctgtggtgcagaccaagcctgtgcagaccagcgctgtgacaggccaggccagcacaggccctgtgacccagatcatccagaccaagggccccctgcctgctggcaccatcctgaagctggtgaccagcgcagatggcaagcccaccaccatcatcaccaccacccaggccagcggggccggcaccaagcccaccatcctgggcatcagctctgtgagccccagcaccaccaagccaggcaccaccaccatcatcaagaccatccccatgtctgccatcatcacccaggccggggccactggagtgaccagcagccctggcatcaagagccccatcaccatcatcaccaccaaggtgatgaccagcggcactggagccccagccaagatcatcacagctgtgcccaagatcgccaccggccacggccagcagggcgtgacccaggtggtgctgaagggggcccctggccagcccggcaccatcctgaggacagtgcccatgggcggcgtgcggctggtgacccctgtgacagtgtctgctgtgaagccagctgtgaccaccctggtggtgaagggcaccactggagtgaccaccctgggcaccgtgacaggcaccgtgtccaccagcctggccggggccggcggccacagcaccagcgccagcctggccacccccatcaccaccctgggcaccatcgccaccctgagcagccaggtgatcaaccccacagccatcaccgtgtctgctgcccagaccaccctgacagctgctgggggcctgaccacccccaccatcaccatgcagcctgtgtcccagcccacccaggtgaccctcatcacagcccccagcggcgtggaggcccagcctgtgcatgacctgcctgtgtccatcctggccagccccaccacagagcagcccacagccaccgtgaccatcgctgacagcggccagggagatgtgcagcccggcaccgtgaccctggtgtgcagcaaccccccctgtgagacccatgagaccggcaccaccaacacagccaccaccaccgtggtggccaacctgggcggccacccccagcccacccaggtgcagtttgtgtgtgaccggcaggaggccgccgccagcctggtgaccagcacagtgggccagcagaatggatctgtggtgcgggtgtgcagcaaccccccctgtgagacccatgagaccggcaccaccaacacagccaccacagccaccagcaacatggccggccagcacggctgcagcaaccccccctgtgagacccatgaaacaggcaccaccaacacagccaccacagccatgagctctgtgggcgccaaccaccagagagatgcccggcgggcctgtgccgccggcaccccagctgtgatccgcatctctgtggccaccggggccctggaggccgcccagggcagcaagagccagtgccagacccggcagaccagcgccaccagcaccaccatgacagtgatggccaccggggccccctgcagcgctggccccctgctgggccccagcatggcccgggagcccggcggccgcagccctgcctttgtgcagctggcccccctgagcagcaaggtgcggctgagcagccccagcatcaaggacctgcctgctggccgccacagccatgctgtgtccacagctgccatgaccaggagctctgtgggcgctggggagcccaggatggcccctgtgtgtgagagcctgcagggcggcagccccagcaccaccgtgacagtgacagccctggaggccctgctgtgccccagcgccaccgtgacccaggtgtgcagcaaccccccctgtgagacccatgagaccggcaccaccaacacagccaccaccagcaatgccggcagcgcccagagggtgtgcagcaaccccccctgtgagacccatgagaccggcaccacccacacagccaccacagccaccagcaatggaggcaccggccagcctgagggcggccagcagcccccagctggccggccctgtgagacccaccagaccaccagcacaggcaccaccatgtctgtgtctgtgggcgccctgctgcctgatgccaccagcagccacaggacagtggagagcggcctggaggtggccgccgcccccagcgtgaccccccaggccggcacagccctgctggcccccttccccacccagagggtgtgcagcaaccccccctgtgagacccatgagaccggcaccacccacacagccaccaccgtgaccagcaacatgagcagcaaccaggaccccccacctgctgccagtgaccagggcgaggtggagagcacccagggcgacagcgtgaacatcaccagcagcagcgccatcaccaccaccgtgagcagcaccctgaccagggctgtgaccaccgtgacccagagcacccctgtgcccggccccagcgtgcccccacctgaggagctgcaggtgtccccaggcccccggcagcagctgcccccccggcagctgctgcagagcgccagcacagccctgatgggagagagcgctgaggtgctgagcgccagccagaccccagagctgcctgctgctgtggacctgagcagcactggagagcccagcagcggccaggagagcgctggcagcgctgtggtggccaccgtggtggtgcagcccccaccacccacccagagcgaggtggaccagctgagcctgccccaggagctgatggccgaggcccaggccggcaccaccaccctgatggtgacaggcctgaccccagaggagctggccgtgacagctgctgctgaggccgccgcccaggccgccgccacagaggaggcccaggccctggccatccaggccgtgctgcaggccgcccagcaggccgtgatgggcaccggggagcccatggacaccagcgaggccgccgccaccgtgacccaggccgagctgggccacctgtctgctgagggccaggagggccaggccaccaccatccccatcgtgctgacccagcaggagctggccgccctggtgcagcagcagcagctgcaggaggcccaggcccagcagcagcaccaccacctgcccacagaggccctggccccagctgacagcctgaatgaccctgccatcgagagcaactgcctgaatgagctggccggcaccgtgcccagcacagtggccctgctgcccagcacagccacagagagcctggcccccagcaacacctttgtggccccccagcctgtggtggtggccagccctgccaagctgcaggccgccgccaccctgacagaggtggccaatggaattgagagcctgggcgtgaagccagacctgcccccaccacccagcaaggcccccatgaagaaggagaaccagtggtttgatgtgggcgtcatcaagggcaccaacgtgatggtgacccactacttcctgcccccagatgatgctgtgcccagtgatgatgacctgggcaccgtgcctgactacaaccagctgaagaagcaggagctgcagcctggaacagcctacaagttccgggtggccggcatcaatgcctgtggccggggccccttcagcgagatcagcgccttcaagacctgcctgcccggcttccctggggccccctgtgccatcaagatcagcaagagcccagatggagcccacctgacctgggagcccccatctgtgaccagcggcaagatcatcgagtacagcgtgtacctggccatccagagcagccaggccggcggggagctgaagagcagcaccccagcccagctggccttcatgagggtgtactgcggccccagccccagctgcctggtgcagagcagcagcctgagcaatgcccacatcgactacaccaccaagccagccatcatcttcagaattgctgccagaaatgagaagggctacggccctgccacccaggtgcgctggctgcaggagaccagcaaggacagcagcggcaccaagccagccaacaagaggcccatgagcagccctgagatgaagagcgcccccaagaagagcaaggcagatggccagtag

SEQ ID NO: 155603 - DNA, 6243 bp, synthetic construct
  misc_feature 1..6243: note = Description of Artificial Sequence: Synthetic coding sequence
  source 1..6243: mol_type = other DNA
atggccagcgctgtgtccccagccaacctgcctgctgtgctgctgcagccccgctggaagagggtggtgggctggagcggccctgtgccccggcccaggcatggccacagagctgtggccatcaaggagctgattgtggtgtttggaggcggcaatgaaggaattgtggatgagctgcacgtgtacaacacagccaccaaccagtggttcatcccagctgtgcggggggacatccccccaggctgtgccgcctacggctttgtgtgtgatggcacccggctgctggtgtttggaggcatggtggagtatggcaagtacagcaatgacctgtatgagctgcaggccagccgctgggagtggaagaggctgaaggccaagacccccaagaatggccccccaccctgcccccggctgggccacagcttcagcctggtgggcaacaagtgctacctgtttggaggcctggccaatgattctgaggaccccaagaacaacatcccccgctacctgaatgacctgtacatcctggagctgcggcccggcagcggcgtggtggcctgggacatccccatcacctatggagtgctgcccccaccccgggagagccacacagctgtggtgtacacagagaaggacaacaagaagagcaagctggtgatctatggaggcatgagcggctgccgcctgggggacctgtggaccctggacatcgacaccctgacctggaacaagcccagcctgagcggcgtggcccccctgcccaggagcctgcacagcgccaccaccatcggcaacaagatgtatgtgtttggaggctgggtgcccctggtgatggatgatgtgaaggtggccacccatgagaaggagtggaagtgcaccaacaccctggcctgcctgaacctggacaccatggcctgggagaccatcctgatggacaccctggaggacaacatcccccgggcccgggccggccactgtgctgtggccatcaacacccggctgtacatctggagcggcagagatggctacaggaaggcctggaacaaccaggtgtgctgcaaggacctgtggtacctggagacagagaagcccccacctccagcccgggtgcagctggtgcgggccaacaccaacagcctggaggtgtcctggggcgctgtggccacagctgacagctacctgctgcagctgcagaagtatgacatcccagccacagctgccacagccaccagccccacccccaaccctgtgcccagcgtgcctgccaacccccccaagagccctgccccagctgctgctgccccagctgtgcagcccctgacccaggtgggcatcaccctgctgccccaggccgccccagccccacccaccaccaccaccatccaggtgctgcccaccgtgcccggcagcagcatctctgtgcccacagctgcccggacccagggcgtgcctgctgtgctgaaggtgacaggcccccaggccaccaccggcacccccctggtgaccatgaggcctgccagccaggccggcaaggcccctgtgacagtgaccagcctgcctgctggggtgaggatggtggtgcccacccagagcgcccagggcaccgtgattggcagcagcccccagatgagcggcatggccgccctggccgctgctgctgctgccacccagaagatcccccccagcagcgcccccaccgtgctgtctgtgcctgctggcaccaccatcgtgaagaccatggctgtgaccccaggcaccaccaccctgcctgccaccgtgaaggtggccagcagccctgtgatggtgagcaacccagccaccaggatgctgaagacagctgctgcccaggtgggcacctctgtgtcctctgccaccaacaccagcacccggcccatcatcaccgtgcacaagagcggcaccgtgacagtggcccagcaggcccaggtggtgaccaccgtggtgggcggcgtgaccaagaccatcaccctggtgaagagccccatctctgtgcctgggggcagcgccctgatcagcaacctgggcaaggtgatgtctgtggtgcagaccaagcctgtgcagaccagcgctgtgacaggccaggccagcactggacctgtgacccagatcatccagaccaagggccccctgcctgctggcaccatcctgaagctggtgaccagcgcagatggcaagcccaccaccatcatcaccaccacccaggccagcggggccggcaccaagcccaccatcctgggcatcagctctgtgagccccagcaccaccaagccaggcaccaccaccatcatcaagaccatccccatgtctgccatcatcacccaggccggggccaccggggtgaccagcagccctggcatcaagagccccatcaccatcatcaccaccaaggtgatgaccagcggcaccggggccccagccaagatcatcacagctgtgcccaagatcgccactggacatggccagcagggcgtgacccaggtggtgctgaagggggcccctggccagcccggcaccatcctgaggacagtgcccatgggcggcgtgcggctggtgacccctgtgacagtgtctgctgtgaagccagctgtgaccaccctggtggtgaagggcaccaccggggtgaccaccctgggcaccgtgactggaacagtgtccaccagcctggccggggccggcggccacagcaccagcgccagcctggccacccccatcaccaccctgggcaccatcgccaccctgagcagccaggtgatcaaccccacagccatcaccgtgtctgctgcccagaccaccctgacagctgctgggggcctgaccacccccaccatcaccatgcagcctgtgtcccagcccacccaggtgaccctcatcacagcccccagcggcgtggaggcccagcctgtgcatgacctgcctgtgtccatcctggccagccccaccacagagcagcccacagccaccgtgaccatcgctgacagcggccagggagatgtgcagcccggcaccgtgaccctggtgtgcagcaaccccccctgtgagacccatgaaacaggcaccaccaacacagccaccaccaccgtggtggccaacctgggcggccacccccagcccacccaggtgcagtttgtgtgtgaccggcaggaggccgccgccagcctggtgaccagcacagtgggccagcagaatggatctgtggtgcgggtgtgcagcaaccccccctgtgagacccatgaaacaggcaccaccaacacagccaccacagccaccagcaacatggccggccagcacggctgcagcaaccccccctgtgagacccatgagaccggcaccaccaacacagccaccacagccatgagctctgtgggcgccaaccaccagagagatgcccggcgggcctgtgccgccggcaccccagctgtgatccgcatctctgtggccactggagccctggaggccgcccagggcagcaagagccagtgccagacccggcagaccagcgccaccagcaccaccatgacagtgatggccactggagccccctgcagcgctggccccctgctgggccccagcatggcccgggagcccggcggccgcagccctgcctttgtgcagctggcccccctgagcagcaaggtgcggctgagcagccccagcatcaaggacctgcctgctggccgccacagccatgctgtgtccacagctgccatgaccaggagctctgtgggcgctggggagcccaggatggcccctgtgtgtgagagcctgcagggcggcagccccagcaccaccgtgacagtgacagccctggaggccctgctgtgccccagcgccaccgtgacccaggtgtgcagcaaccccccctgtgagacccatgaaacaggcaccaccaacacagccaccaccagcaatgccggcagcgcccagagggtgtgcagcaaccccccctgtgagacccatgaaacaggcaccacccacacagccaccacagccaccagcaatggaggcaccggccagcctgagggcggccagcagcccccagctggccggccctgtgagacccaccagaccaccagcacaggcaccaccatgtctgtgtctgtgggcgccctgctgcctgatgccaccagcagccacaggacagtggagagcggcctggaggtggccgccgcccccagcgtgaccccccaggccggcacagccctgctggcccccttccccacccagagggtgtgcagcaaccccccctgtgagacccatgaaacaggcaccacccacacagccaccaccgtgaccagcaacatgagcagcaaccaggaccccccacctgctgccagtgaccagggcgaggtggagagcacccagggcgacagcgtgaacatcaccagcagcagcgccatcaccaccaccgtgagcagcaccctgaccagggctgtgaccaccgtgacccagagcacccctgtgcccggccccagcgtgcccaagatcagctccatgacagaaacagccccccgggccctgaccacagaggtgcccatcccagccaagatcaccgtgaccatcgccaacacagagaccagtgacatgcccttctctgctgtggacatcctgcagcccccagaggagctgcaggtgtccccaggcccccggcagcagctgcccccccggcagctgctgcagagcgccagcacagccctgatgggagagagcgctgaggtgctgagcgccagccagaccccagagctgcctgctgctgtggacctgagcagcactggagagcccagcagcggccaggagagcgctggcagcgctgtggtggccaccgtggtggtgcagcccccaccacccacccagagcgaggtggaccagctgagcctgccccaggagctgatggccgaggcccaggccggcaccaccaccctgatggtgacaggcctgaccccagaggagctggccgtgacagctgctgctgaggccgccgcccaggccgccgccacagaggaggcccaggccctggccatccaggccgtgctgcaggccgcccagcaggccgtgatggccggcaccggggagcccatggacaccagcgaggccgccgccaccgtgacccaggccgagctgggccacctgtctgctgagggccaggagggccaggccaccaccatccccatcgtgctgacccagcaggagctggccgccctggtgcagcagcagcagctgcaggaggcccaggcccagcagcagcaccaccacctgcccacagaggccctggccccagctgacagcctgaatgaccctgccatcgagagcaactgcctgaatgagctggccggcaccgtgcccagcacagtggccctgctgcccagcacagccacagagagcctggcccccagcaacacctttgtggccccccagcctgtggtggtggccagccctgccaagctgcaggccgccgccaccctgacagaggtggccaatggaattgagagcctgggcgtgaagccagacctgcccccaccacccagcaaggcccccatgaagaaggagaaccagtggtttgatgtgggcgtcatcaagggcaccaacgtgatggtgacccactacttcctgcccccagatgatgctgtgcccagtgatgatgacctgggcaccgtgcctgactacaaccagctgaagaagcaggagctgcagcctggaacagcctacaagttccgggtggccggcatcaatgcctgtggccggggccccttcagcgagatcagcgccttcaagacctgcctgcccggcttccctggggccccctgtgccatcaagatcagcaagagcccagatggagcccacctgacctgggagcccccatctgtgaccagcggcaagatcatcgagtacagcgtgtacctggccatccagagcagccaggccggcggggagctgaagagcagcaccccagcccagctggccttcatgagggtgtactgcggccccagccccagctgcctggtgcagagcagcagcctgagcaatgcccacatcgactacaccaccaagccagccatcatcttcagaattgctgccagaaatgagaagggctacggccctgccacccaggtgcgctggctgcaggagaccagcaaggacagcagcggcaccaagccagccaacaagaggcccatgagcagccctgagatgaagagcgcccccaagaagagcaaggcagatggccagtag

SEQ ID NO: 155604 - DNA, 1305 bp, synthetic construct
  misc_feature 1..1305: note = Description of Artificial Sequence: Synthetic coding sequence
  source 1..1305: mol_type = other DNA
atggattctgtggagaagggggccgccacctctgtgagcaacccccggggccggcccagccggggccggccccccaagctgcagaggaacagcagaggaggccagggccggggcgtggagaagccaccccacctggccgccctgatcctggcccggggcggcagcaagggcatccccctgaagaacatcaagcacctggccggcgtgcccctcatcggctgggtgctgcgggccgccctggacagcggggccttccagagcgtgtgggtgtccacagaccatgatgaaattgaaaatgtggccaagcagtttggagcccaggtgcaccggcgcagcagcgaggtgtccaaggacagcagcaccagcctggatgccatcatcgagttcctgaactaccacaatgaggtggacatcgtgggcaacatccaggccaccagcccctgcctgcaccccacagacctgcagaaggtggccgagatgatccgggaggagggctatgacagcgtcttctctgtggtgcggcggcaccagttccgctggagcgagatccagaagggcgtgcgggaggtgacagagcccctgaacctgaacccagccaagaggccccggcggcaggactgggatggagagctgtatgaaaatggcagcttctactttgccaagaggcacctgattgagatgggctacctgcagggcggcaagatggcctactatgagatgagagctgagcacagcgtggacattgatgtggacatcgactggcccatcgccgagcagagggtgctgcgctatggctactttgggaaggagaagctgaaggagatcaagctgctggtgtgcaacattgatggctgcctgaccaacggccacatctacgtgtctggggaccagaaggagatcatctcctatgatgtgaaggatgccatcggcatcagcctgctgaagaagtctggaattgaggtgcggctcatcagcgagcgggcctgcagcaagcagaccctgagcagcctgaagctggactgcaagatggaggtgtctgtgtctgacaagctggccgtggtggatgagtggaggaaggagatgggcctgtgctggaaggaggtggcctacctgggcaatgaggtgtctgatgaagaatgtctgaagagggtgggcctgagcggggccccagcagatgcctgcagcacagcccagaaggctgtgggctacatctgcaagtgcaatggaggccgcggggccatccgggagtttgctgagcacatctgcctgctgatggagaaggtgaacaacagctgccagaagtag

SEQ ID NO: 155605 - DNA, 507 bp, synthetic construct
  misc_feature 1..507: note = Description of Artificial Sequence: Synthetic coding sequence
  source 1..507: mol_type = other DNA
atggccttcaatgactgcttcagcctgaactacccaggcaacccctgccctggggacctgattgaggtgttccggcccggctaccagcactgggccctgtacctgggagatggctacgtgatcaacatcgcccctgtggatggcatcccagccagcttcaccagcgccaagagcgtcttcagcagcaaggccctggtgaagatgcagctgctgaaggatgtggtgggcaatgacacctaccgcatcaacaacaagtatgatgagacctacccacccctgcctgtggaggagatcatcaagagaagtgaatttgtgattggccaggaggtggcctacaacctgctggtgaacaactgtgagcactttgtgaccctgctgcgctacggggagggcgtgtctgagcaggccaacagagccatcagcacagtggagtttgtgacagctgctgtgggcgtcttctccttcctgggcctcttccccaagggccagagggccaagtactactag

SEQ ID NO: 155606 - DNA, 489 bp, synthetic construct
  misc_feature 1..489: note = Description of Artificial Sequence: Synthetic coding sequence
  source 1..489: mol_type = other DNA
atggccctggcccggccccggccccggctgggggacctgattgagatcagcagatttggctacgcccactgggccatctacgtgggagatggctacgtggtgcacctggccccagccagcgagattgctggagctggagctgcctctgtgctgagcgccctgaccaacaaggccatcgtgaagaaggagctgctgtctgtggtggccggcggggacaactacagagtgaacaacaagcatgatgaccgctacacccccctgcccagcaacaagatcgtgaagagagctgaggagctggtgggccaggagctgccctacagcctgaccagtgacaactgtgagcactttgtgaaccacctgcgctatggagtgtccagaagtgaccaggtgactggagctgtgaccaccgtgggcgtggccgccggcctgctggccgccgccagcctggtgggcatcctgctggcccggagcaagcgggagcggcagtag

SEQ ID NO: 155607 - DNA, 1023 bp, synthetic construct
  misc_feature 1..1023: note = Description of Artificial Sequence: Synthetic coding sequence
  source 1..1023: mol_type = other DNA
atgaaggaggaccaggtggtggccgaggagcccggcttccaggatgaggaggagagcctcttccaggacatcgacctgctgcagaagcacggcatcaacgtggccgacatcaagaagctgaagtctgtgggcatctgcaccatcaagggcatccagatgaccacccggcgggccctgtgcaatgtgaagggcctgtctgaggccaaggtggacaagatcaaggaggccgccaacaagctgattgagcccggcttcctgacagcctttgagtacagcgagaagaggaagatggtgttccacatcaccaccggcagccaggagtttgacaagctgctgggcggcggcatcgagagcatggccatcacagaggcctttggagagttcagaacaggcaagacccagctgagccacaccctgtgtgtgacagcccagctgcccggggccggcggctacccaggcggcaagatcatcttcatcgacacagagaacaccttccggccagaccggctgcgggacattgctgaccgcttcaacgtggaccatgatgctgtgctggacaacgtgctgtatgcccgggcctacaccagcgagcaccagatggagctgctggactatgtggccgccaagttccacgaggaggccggcatcttcaagctgctgatcatcgacagcatcatggccctcttccgggtggacttcagcggccgcggggagctggccgagcggcagcagaagctggcccagatgctgagccggctgcagaagatcagcgaggagtacaacgtggccgtgtttgtgaccaaccagatgacagctgaccccggggccaccatgaccttccaggccgaccccaagaagcccatcggcggccacatcctggcccacgccagcaccacccgcatcagcctgaggaagggccgcggggagctgcgcatcgccaagatctatgacagccctgagatgccagaaaatgaggccacctttgccatcacagctgggggcattggagatgccaaggagtag

SEQ ID NO: 155608 - DNA, 1080 bp, synthetic construct
  misc_feature 1..1080: note = Description of Artificial Sequence: Synthetic coding sequence
  source 1..1080: mol_type = other DNA
atgtctgatgagggcagccggggcagccggctgcccctggccctgcccccagccagccagggctgcagcagcggcggcggcggcggcggcagcagcgctgggggcagcggcaacagccggcccccaagaaacctgcagggcctgctgcagatggccatcacagctggcagcgaggagccagaccccccacctgagcccatgtctgaggagcggcggcagtggctgcaggaggccatgtctgctgccttccggggccagcgggaggaggtggagcagatgaagagctgcctgcgggtgctgagccagcccatgccacccacagctggggaggccgagcaggccgctgaccagcaggagcgggagggcgccctggagctgctggccgacctgtgtgagaacatggacaatgctgctgacttctgccagctgagcggcatgcacctgctggtgggccgctacctggaggccggggctgctggcctgcgctggagggctgcccagctgattggcacctgcagccagaatgtggccgccatccaggagcaggtgctgggcctgggcgccctgaggaagctgctgcggctgctggacagagatgcctgtgacacagtgcgggtgaaggccctgtttgccatcagctgcctggtgcgggagcaggaggccggcctgctgcagttcctgcggctggatggcttctctgtgctgatgagggccatgcagcagcaggtgcagaagctgaaggtgaagagcgccttcctgctgcagaacctgctggtgggccaccctgagcacaagggcaccctgtgcagcatgggcatggtgcagcagctggtggccctggtgaggacagagcacagccccttccatgaacatgtgctgggcgccctgtgcagcctggtgacagacttcccccagggcgtgagagaatgtcgggagcctgagctgggcctggaggagctgctgcggcaccgctgccagctgctgcagcagcacgaggagtaccaggaggagctggagttctgtgagaagctgctgcagacctgcttcagcagccctgcagatgacagcatggacagatag

SEQ ID NO: 155609 - DNA, 774 bp, synthetic construct
  misc_feature 1..774: note = Description of Artificial Sequence: Synthetic coding sequence
  source 1..774: mol_type = other DNA
atgtctgatgagggcagccggggcagccggctgcccctggccctgcccccagccagccagggctgcagcagcggcggcggcggcggcggcagcagcgctgggggcagcggcaacagccggcccccaagaaacctgcagggcctgctgcagatggccatcacagctggcagcgaggagccagaccccccacctgagcccatgtctgaggagcggcggcagtggctgcaggaggccatgtctgctgccttccggggccagcgggaggaggtggagcagatgaagagctgcctgcgggtgctgagccagcccatgccacccacagctggggaggccgagcaggccgctgaccagcaggagcgggagggcgccctggagctgctggccgacctgtgtgagaacatggacaatgctgctgacttctgccagctgagcggcatgcacctgctggtgggccgctacctggaggccggggctgctggcctgcgctggagggctgcccagctgattggcacctgcagccagaatgtggccgccatccaggagcaggtgctgggcctgggcgccctgaggaagctgctgcggctgctggacagagatgcctgtgacacaggagtgagagaatgtcgggagcctgagctgggcctggaggagctgctgcggcaccgctgccagctgctgcagcagcacgaggagtaccaggaggagctggagttctgtgagaagctgctgcagacctgcttcagcagccctgcagatgacagcatggacagatag

SEQ ID NO: 155610 - DNA, 1080 bp, synthetic construct; identical to SEQ ID NO: 155608
  misc_feature 1..1080: note = Description of Artificial Sequence: Synthetic coding sequence
  source 1..1080: mol_type = other DNA

SEQ ID NO: 155611 - DNA, 1443 bp, synthetic construct
  misc_feature 1..1443: note = Description of Artificial Sequence: Synthetic coding sequence
  source 1..1443: mol_type = other DNA
atgcagatcccccgggccgccctgctgcccctgctgctgctgctgctggccgccccagccagcgcccagctgagcagagctggccgcagcgcccccctggccgccggctgcccagacagatgtgagcccgcccgctgccccccccagcctgagcactgtgagggcggccgggccagagatgcctgtggctgctgtgaggtgtgtggggcccctgagggcgccgcctgtggcctgcaggagggcccctgtggggagggcctgcagtgtgtggtgccctttggagtgcctgccagcgccaccgtgagaagaagagcccaggccggcctgtgtgtgtgtgccagcagcgagcctgtgtgtggcagtgatgccaacacctacgccaacctgtgccagctgcgggccgccagcagaagaagtgagcggctgcacaggcctcctgtgattgtgctgcagagaggagcctgtggccagggccaggaggaccccaacagcctgcggcacaagtacaacttcatcgcagatgtggtggagaagatcgccccagctgtggtgcacatcgagctgttcaggaagctgcccttcagcaagcgggaggtgcctgtggccagcggcagcggcttcatcgtgtctgaagatggcctgattgtgaccaatgcccacgtggtgaccaacaagcaccgggtgaaggtggagctgaagaatggagccacctatgaggccaagatcaaggatgtggatgagaaggctgacatcgccctgatcaagattgaccaccagggcaagctgcctgtgctgctgctgggccgcagcagcgagctgcggcctggagaatttgtggtggccatcggcagccccttcagcctgcagaacacagtgaccaccggcatcgtgtccaccacccagagaggaggcaaggagctgggcctgaggaacagcgacatggactacatccagacagatgccatcatcaactacggcaacagcggcggccccctggtgaacctggatggagaggtgattggcatcaacaccctgaaggtgacagctggcatcagctttgccatccccagcgacaagatcaagaagttcctgacagagagccatgaccggcaggccaagggcaaggccatcaccaagaagaagtacatcggcatccgcatgatgagcctgaccagcagcaaggccaaggagctgaaggacagacaccgggacttcccagatgtgatcagcggggcctacatcattgaagtcatcccagacaccccagctgaggccggcggcctgaaggaaaatgatgtgatcatcagcatcaatggccagagcgtggtgtctgccaatgatgtgtctgatgtgatcaagcgggagagcaccctgaacatggtggtgagaagaggaaatgaagacatcatgatcaccgtcatccctgaggagattgacccctag

SEQ ID NO: 155612 - DNA, 666 bp, synthetic construct
  misc_feature 1..666: note = Description of Artificial Sequence: Synthetic coding sequence
  source 1..666: mol_type = other DNA
gggaagctgcctgtgctgctgctgggccgcagcagcgagctgcggcctggagaatttgtggtggccatcggcagccccttcagcctgcagaacacagtgaccactggaattgtgtccaccacccagaggggcggcaaggagctgggcctgaggaacagcgacatggactacatccagacagatgccatcatcaactacggcaacagcggcggccccctggtgaacctggatggagaggtgattggcatcaacaccctgaaggtgacagctggcatcagctttgccatccccagcgacaagatcaagaagttcctgacagagagccatgaccggcaggccaagggcaaggccatcaccaagaagaagtacatcggcatccgcatgatgagcctgaccagcagcaaggccaaggagctgaaggacagacaccgggacttcccagatgtgatcagcggggcctacatcatcgaggtgatcccagacaccccagctgaggccggcggcctgaaggaaaatgatgtgatcatcagcatcaatggccagagcgtggtgtctgccaatgatgtgtctgatgtgatcaagcgggagagcaccctgaacatggtggtgagaagaggaaatgaagacatcatgatcaccgtcatccctgaggagattgacccctag

SEQ ID NO: 155613 - DNA, 1344 bp, synthetic construct
  misc_feature 1..1344: note = Description of Artificial Sequence: Synthetic coding sequence
  source 1..1344: mol_type = other DNA
atgggctgggccgcccggccccgggccctggccccagctgcccctgaggccctgctgcacagcccccggcggcgcagccctgccctggccctgtctgctgccacagctgctgctgcccggggccctggccgggtgcggctgctgcggggcgtgcggcgggcccggggcagaagagtgcggcctgctgggggccctgtgagaagaggagctgctgtgcggggggccctgcggggggccagcctgggccatggagctgctgcccgggccggccggcccctgtgtgtgcggcagcagctgcgggccgccagccgccgctctgagcggctgcaccggccccctgtgattgtgctgcagagaggagcctgtggccagggccaggaggaccccaacagcctgcggcacaagtacaacttcatcgcagatgtggtggagaagatcgccccagctgtggtgcacatcgagctgttcaggaagctgcccttcagcaagcgggaggtgcctgtggccagcggcagcggcttcatcgtgtctgaagatggcctcatcgtgaccaatgcccacgtggtgaccaacaagcaccgggtgaaggtggagctgaagaatggagccacctatgaggccaagatcaaggatgtggatgagaaggctgacatcgccctgatcaagattgaccaccagggcaagctgcctgtgctgctgctgggccgcagcagcgagctgcggcctggagaatttgtggtggccatcggcagccccttcagcctgcagaacacagtgaccactggaattgtgtccaccacccagaggggcggcaaggagctgggcctgaggaacagcgacatggactacatccagacagatgccatcatcaactacggcaacagcggcggccccctggtgaacctggatggagaggtgattggcatcaacaccctgaaggtgacagctggcatcagctttgccatccccagcgacaagatcaagaagttcctgacagagagccatgaccggcaggccaagggcaaggccatcaccaagaagaagtacatcggcatccgcatgatgagcctgaccagcagcaaggccaaggagctgaaggacagacaccgggacttcccagatgtgatcagcggggcctacatcatcgaggtgatcccagacaccccagctgaggccggcggcctgaaggaaaatgatgtgatcatcagcatcaatggccagagcgtggtgtctgccaatgatgtgtctgatgtgatcaagcgggagagcaccctgaacatggtggtgagaagaggaaatgaagacatcatgatcaccgtcatccctgaggagattgacccctag

SEQ ID NO: 155614 - DNA, 1377 bp, synthetic construct
  misc_feature 1..1377: note = Description of Artificial Sequence: Synthetic coding sequence
  source 1..1377: mol_type = other DNA
atggccgccccccgggccggccgcggggccggctggagcctgcgggcctggagggccctgggcggcatccgctggggcagaagaccccggctgaccccagacctgcgggccctgctgaccagcggcaccagtgacccccgggcccgggtgacctacggcacccccagcctgtgggcccggctgtctgtgggcgtgacagagccccgggcctgcctgaccagcggcaccccaggcccccgggcccagctgacagctgtgaccccagacaccaggacccgggaggcctctgaaaattctggcaccaggagccgggcctggctggccgtggccctgggcgccggcggcgctgtgctgctgctgctgtggggcggcggccggggccccccagctgtgctggccgctgtgcccagccccccaccagccagccccaggagccagtacaacttcatcgcagatgtggtggagaagacagccccagctgtggtgtacatcgagatcctggacagacaccccttcctgggccgggaggtgcccatcagcaatggaagtggctttgtggtggccgcagatggcctgattgtgaccaatgcccacgtggtggccgacagaagaagagtgcgggtgcggctgctgagcggggacacctatgaggccgtggtgacagctgtggaccctgtggccgacatcgccaccctgcgcatccagaccaaggagcccctgcccaccctgcccctgggccgctctgcagatgtgcggcagggcgagtttgtggtggccatgggcagcccctttgccctgcagaacaccatcaccagcggcatcgtgtcctctgcccagaggcctgcccgggacctgggcctgccccagaccaacgtggagtacatccagacagatgctgccatcgactttggaaacagcggcggccccctggtgaacctggatggagaggtgattggagtgaacaccatgaaggtgacagctggcatcagctttgccatccccagcgaccggctgcgggagttcctgcacagaggagagaagaagaacagcagcagcggcatcagcggcagccagaggcgctacatcggcgtgatgatgctgaccctgagccccagcatcctggccgagctgcagctgcgggagcccagcttcccagatgtgcagcacggcgtgctgatccacaaggtgatcctgggcagccctgcccacagagctggcctgcggcctggagatgtgatcctggccatcggggagcagatggtgcagaatgcagaagatgtgtatgaggccgtgaggacccagagccagctggccgtgcagatccggcggggccgggagaccctgaccctgtatgtgaccccagaggtgacagaatag

SEQ ID NO: 155615 - DNA, 1086 bp, synthetic construct
  misc_feature 1..1086: note = Description of Artificial Sequence: Synthetic coding sequence
  source 1..1086: mol_type = other DNA
atggccgccccccgggccggccgcggggccggctggagcctgcgggcctggagggccctgggcggcatccgctggggcagaagaccccggctgaccccagacctgcgggccctgctgaccagcggcaccagtgacccccgggcccgggtgacctacggcacccccagcctgtgggcccggctgtctgtgggcgtgacagagccccgggcctgcctgaccagcggcaccccaggcccccgggcccagctgacagctgtgaccccagacaccaggacccgggaggcctctgaaaattctggcaccaggagccgggcctggctggccgtggccctgggcgccggcggcgctgtgctgctgctgctgtggggcggcggccggggccccccagctgtgctggccgctgtgcccagccccccaccagccagccccaggagccagtacaacttcatcgcagatgtggtggagaagacagccccagctgtggtgtacatcgagatcctggacagacaccccttcctgggccgggaggtgcccatcagcaatggaagtggctttgtggtggccgcagatggcctgattgtgaccaatgcccacgtggtggccgacagaagaagagtgcgggtgcggctgctgagcggggacacctatgaggccgtggtgacagctgtggaccctgtggccgacatcgccaccctgcgcatccagaccaagtttggaaattctgggggccccctggtgaacctggatggagaggtgattggagtgaacaccatgaaggtgacagctggcatcagctttgccatccccagcgaccggctgcgggagttcctgcacagaggagagaagaagaacagcagcagcggcatcagcggcagccagaggcgctacatcggcgtgatgatgctgaccctgagcccccgggccggcctgcggcctggagatgtgatcctggccatcggggagcagatggtgcagaatgcagaagatgtgtatgaagctgtgaggacccagagccagctggccgtgcagatcagaagaggccgggagaccctgaccctgtatgtgaccccagaggtgacagaatag

SEQ ID NO: 155616 - DNA, 1362 bp, synthetic construct
  misc_feature 1..1362: note = Description of Artificial Sequence: Synthetic coding sequence
  source 1..1362: mol_type = other DNA
atgcaggcccgggccctgctgctggccgccctggccgccctggccctggcccgggagcccccagctgccccctgcccagcccgctgtgatgtgagccgctgccccagcccccgctgccctgggggctacgtgcctgacctgtgcaactgctgcctggtgtgtgccgccagcgagggggagccctgtggcggccccctggacagcccctgtggggagagcctggagtgtgtgcggggcctgtgccgctgccgctggagccatgctgtgtgtggcacagatggccacacctacgccaacgtgtgtgccctgcaggccgccagccggcgggccctgcagctgagcggcacccctgtgcggcagctgcagaagggggcctgccccctgggcctgcaccagctgagcagcccccgctacaagttcaacttcatcgcagatgtggtggagaagatcgccccagctgtggtgcacatcgagctgttcctgcggcaccccctgtttggaagaaatgtgcccctgagcagcggcagcggcttcatcatgtctgaggccggcctcatcatcaccaatgcccacgtggtgagcagcaacagcgctgcccctggccggcagcagctgaaggtgcagctgcagaatggagacagctatgaggccaccatcaaggacatcgacaagaagagtgacatcgccaccatcaagatccaccccaagaagaagctgcctgtgctgctgctgggccacagcgctgacctgcggcctggagaatttgtggtggccatcggcagcccctttgccctgcagaacacagtgaccactggaattgtgtccacagcccagcgggagggccgggagctgggcctgcgggacagcgacatggactacatccagacagatgccatcatcaactacggcaacagcggcggccccctggtgaacctggatggagaggtgattggcatcaacaccctgaaggtgacagctggcatcagctttgccatccccagcgaccgcatcacccgcttcctgacagagttccaggacaagcagatcaaggactggaagaagcgcttcatcggcatccgcatgaggaccatcacccccagcctggtggatgagctgaaggccagcaacccagacttccctgaggtgagcagcggcatctacgtgcaggaggtggcccccaacagccccagccagaggggcggcatccaggatggagacatcatcgtgaaggtgaatggccggcccctggtggacagcagcgagctgcaggaggccgtgctgacagagagccccctgctgctggaggtgagaagaggaaatgatgacctgctcttcagcatcgcccctgaggtggtgatgtag

SEQ ID NO: 155617 - DNA, 1431 bp, synthetic construct
  misc_feature 1..1431: note = Description of Artificial Sequence: Synthetic coding sequence
  source 1..1431: mol_type = other DNA
atgatccggccccagctgaggacagctggcctgggccgctgcctgctgcccggcctgctgctgctgctggtgcctgtgctgtgggccggggctgagaagctgcacacccagcccagctgcccagctgtgtgccagcccacccgctgcccagccctgcccacctgtgccctgggcaccacccctgtgtttgacctgtgccgctgctgccgggtgtgcccagctgctgagcgggaggtgtgtggcggggcccagggccagccctgtgcccctggcctgcagtgcctgcagcccctgcggcccggcttccccagcacctgtggctgccccaccctgggcggcgctgtgtgtggcagtgacaggaggacctaccccagcatgtgtgccctgcgggcagagaacagagctgcccggcggctgggcaaggtgcctgctgtgcctgtgcagtggggcaactgtggggacaccggcaccaggtctgctggccccctgcggaggaactacaacttcatcgctgctgtggtggagaaggtggcccccagcgtggtgcacgtgcagctgtggggccgcctgctgcacggcagccggctggtgcctgtgtacagcggcagcggcttcatcgtgtctgaagatggcctcatcatcaccaatgcccacgtggtgaggaaccagcagtggattgaggtggtgctgcagaatggagcccgctatgaggccgtggtgaaggacatcgacctgaagctggacctggccgtcatcaagattgagagcaatgctgagctgcctgtgctgatgctgggccgcagcagtgacctgcgggccggggagtttgtggtggccctgggcagccccttcagcctgcagaacacagccacagctggcatcgtgtccaccaagcagagaggaggcaaggagctgggcatgaaggacagcgacatggactatgtgcagattgatgccaccatcaactacggcaacagcggcggccccctggtgaacctggatggagatgtgattggagtgaacagcctgcgggtgacagatggcatcagctttgccatccccagcgacagagtgcggcagttcctggccgagtaccacgagcaccagatgaagggcaaggccttcagcaacaagaagtacctgggcctgcagatgctgagcctgactgtgcccctgtctgaggagctgaagatgcactacccagacttcccagatgtgagcagcggcgtgtatgtgtgcaaggtggtggagggcacagctgcccagagcagcggcctgcgggaccatgatgtgattgtgaacatcaacgggaagcccatcaccaccaccacagatgtggtgaaggccctggacagcgacagcctgtccatggctgtgctgcggggcaaggacaacctgctgctgaccgtcatccctgagaccatcaactag

SEQ ID NO: 155618 - DNA, 8157 bp, synthetic construct
  misc_feature 1..8157: note = Description of Artificial Sequence: Synthetic coding sequence
  source 1..8157: mol_type = other DNA
atgcccaggaccaagcagatccaccccaggaacctgcgggacaagattgaggaggcccagaaggagctgaatggagctgaggtgtccaagaaggagatcctgcaggccggcgtgaagggcaccagcgagagcctgaagggcgtgaagaggaagaagatcgtggccgagaaccacctgaagaagatccccaagagccccctgaggaaccccctgcaggccaagcacaagcagaacacagaggagagcagctttgctgtgctgcacagcgccagcgagagccacaagaagcagaactacatccctgtgaagaatggcaagcagttcaccaagcagaatggagagaccccaggcatcatcgccgaggccagcaagtctgaggagagcgtgagccccaagaagcccctcttcctgcagcagcccagcgagctgcggcgctggaggtctgagggcgctgaccctgccaagttcagtgacctggatgagcagtgtgacagcagcagcctgagcagcaagaccaggacagacaacagcgagtgcatcagcagccactgcggcaccaccagccccagctacaccaacacagcctttgatgtgctgctgaaggccatggagcctgagctgagcaccctgagccagaagggcagcccctgtgccatcaagacagagaagctgcggcccaacaagacagcccggagcccccccaagctgaagaacagctccatggatgcccccaaccagaccagccaggagctggtggccgagagccagagcagctgcaccagctacacagtgcacatgtctgctgcccagaagaatgagcagggcgccatgcagagcgccagccacctgtaccaccagcacgagcactttgtgcccaagagcaaccagcacaaccagcagctgcccggctgcagcggcttcaccggcagcctgaccaacctgcagaaccaggagaatgccaagctggagcaggtgtacaacattgctgtgaccagctctgtgggcctgaccagccccagcagccgcagccaggtgaccccccagaaccagcagatggacagcgccagccccctgagcatcagccctgccaacagcacccagagcccccccatgcccatctacaacagcacccacgtggcctctgtggtgaaccagagcgtggagcagatgtgcaacctgctgctgaaggaccagaagcccaagaagcagggcaagtacatctgtgagtactgcaacagagcctgtgccaagcccagcgtgctgctgaagcacatccgcagccacactggagagcggccctacccctgtgtgacctgtggcttctccttcaagaccaagagcaacctgtacaagcacaagaagagccacgcccacaccatcaagctgggcctggtgctgcagccagatgctgggggcctcttcctgagccatgagagccccaaggccctgagcatccacagtgatgtggaggacagcggggagagcgaggaggagggcgccacagatgagcggcagcacgacctgggcgccatggagctgcagcctgtgcacatcatcaagaggatgagcaatgctgagaccctgctgaagagcagcttcacccccagcagcccagaaaatgtcatcggggacttcctgctgcaggacagatctgctgagagccaggccgtgacagagctgcccaaggtggtggtgcaccacgtgacagtgagccccctgaggacagacagccccaaggccatggaccccaagccagagctgagcagcgcccagaagcagaaggacctgcaggtgaccaacgtgcagcccctgagcgccaacatgagccagggcggcgtgtcccggctggagaccaatgaaaacagccaccagaagggggacatgaaccccctggagggcaagcaggacagccacgtgggcaccgtgcacgcccagctgcagaggcagcaggccacagactacagccaggagcagcagggcaagctgctgagccccaggagcctgggcagcacagattctggctacttcagccgctctgagagcgctgaccagacagtgagcccccccaccccatttgcccggcggctgcccagcacagagcaggacagcggccgcagcaatggccccagcgctgccctggtgaccaccagcacccccagcgccctgcccaccggggagaaggccctgctgctgcccggccagatgaggcctcccctggccaccaagaccctggaggagcgcatcagcaagctgatcagtgacaatgaggccctggtggatgacaagcagctggacagcgtgaagcccaggaggaccagcctgagccggcggggcagcattgacagccccaagagctacatcttcaaggacagcttccagtttgacctgaagcctgtgggccgccgcaccagcagcagcagtgacatccccaagagccccttcacccccacagagaagagcaagcaggtgttcctgctgtctgtgcccagcctggactgcctgcccatcaccaggagcaacagcatgcccaccaccggctacagcgctgtgcctgccaacatcatccccccaccccaccccctgcggggcagccagagctttgatgacaagattggcaccttctatgatgatgtgtttgtgtctggccccaatgcccctgtgccccagagcggccaccccaggaccctggtgcggcaggccgccatcgaggacagcagcgccaatgaaagccacgtgctgggcaccggccagagcctggatgagagccaccagggctgccacgccgccggggaggccatgtctgtgcgcagcaaggccctggcccagggcccccacatcgagaagaagaagagccaccagggccggggcaccatgtttgaatgtgagacctgcaggaaccgctacaggaagctggagaactttgagaaccacaagaagttctactgcagcgagctgcacggccccaagaccaaggtggccatgagggagcctgagcacagccctgtgcctgggggcctgcagccccagatcctgcactacagagtggccggcagcagcggcatctgggagcagaccccccagatcaggaagaggaggaagatgaagtctgtgggagatgatgaggagctgcagcagaatgaaagtggcaccagccccaagagcagcgagggcctgcagttccagaatgccctgggctgcaaccccagcctgcccaagcacaacgtgaccatccgcagtgaccagcagcacaagaacatccagctgcagaacagccacatccacctggtggcccggggccctgagcagaccatggaccccaagctgagcaccatcatggagcagcagatcagcagcgctgcccaggacaagattgagctgcagagacatggaacaggcatcagcgtcatccagcacaccaacagcctgagccggcccaacagctttgacaagccagagccctttgagcgggccagccctgtgtccttccaggagctgaacagaacaggcaagagcggcagcctgaaggtgattggcatcagccaggaggagagccaccccagcagagatggcagccacccccaccagctggccctgagtgatgccctgcggggggagctgcaggagagcagcaggaagagccccagcgagcggcacgtgctgggccagcccagccggctggtgcggcagcacaacatccaggtgcctgagatcctggtgacagaggagccagaccgggacctggaggcccagtgccacgaccaggagaagtctgagaagttctcctggccccagaggtctgagaccctgagcaagctgcccacagagaagctgccccccaagaagaagaggctgcggctggccgagattgagcacagcagcacagagagcagctttgacagcaccctgagccgcagcctgagccgggagagcagcctgagccacaccagcagcttcagcgccagcctggacattgaagatgtgtccaagacagaggccagccccaagattgacttcctgaacaaggccgagttcctgatgatcccagctggcctgaacaccctgaatgtgcccggctgccaccgggagatgagaagaacagccagcgagcagatcaactgcacccagacctccatggaggtgtctgacctgcggagcaagagctttgactgtggcagcatcaccccaccccagaccacccccctgacagagctgcagccccccagcagccccagccgggtgggcgtgacaggccacgtgcccctgctggagaggagaagaggccccctggtgcggcagatcagcctgaacatcgccccagacagccacctgagccctgtgcaccccaccagcttccagaacacagccctgcccagcgtgaatgctgtgccctaccagggcccccagctgaccagcaccagcctggccgagttcagcgccaacaccctgcacagccagacccaggtgaaggacctgcaggccgagaccagcaacagcagcagcaccaacgtgtttcctgtgcagcagctgtgtgacatcaacctgctgaaccagatccacgccccacccagccaccagagcacccagctgagcctgcaggtgtccacccagggcagcaagccagacaagaacagcgtgctgagcggcagcagcaagtctgaggactgctttgcccccaagtaccagctgcactgccaggtgttcaccagcggccccagctgcagcagcaaccctgtgcacagcctgcccaaccaggtgatcagtgaccctgtgggcacagaccactgtgtgaccagcgccaccctgcccaccaagctgattgacagcatgagcaacagccaccccctgctgcccccagagctgcggcccctgggcagccaggtgcagaaggtgcccagcagcttcatgctgcccatccggctgcagagctctgtgcctgcctactgctttgccaccctgaccagcctgccccagatcctggtgacccaggacctgcccaaccagcccatctgccagaccaaccacagcgtggtgcccatcagcgaggagcagaacagcgtgcccaccctgcagaagggccaccagaatgccctgcccaaccctgagaaggagttcctgtgtgaaaatgtgttttctgagatgagccagaacagcagcctgtctgagagcctgcccatcacccagaagatctctgtgggccgcctgagcccccagcaggagagcagcgccagcagcaagaggatgctgagccctgccaacagcctggacatcgccatggagaagcaccagaagagggccaaggatgaaaatggagctgtgtgtgccacagatgtgcggcccctggaggccctgagcagccgggtgaatgaggccagcaagcagaagaagcccatcctggtgcggcaggtgtgcaccacagagcccctggatggagtgatgctggagaaggatgtgttcagccagcctgagatcagcaatgaagctgtgaacctgaccaacgtgctgcctgctgacaacagcagcacaggctgcagcaagtttgtggtgattgagcccatcagcgagctgcaggagtttgagaacatcaagagcagcaccagcctgaccctgactgtgcgcagcagccctgcccccagcgagaacacccacatcagccccctgaagtgcacagacaacaaccaggagaggaagagccctggggtgaagaaccagggcgacaaggtgaacatccaggagcagagccagcagcctgtgaccagcctgagcctcttcaacatcaaggacacccagcagctggccttccccagcctgaagaccaccaccaacttcacctggtgctacctgctgcggcagaagagcctgcacctgccccagaaggaccagaagaccagcgcctacacagactggacagtgtctgccagcaaccccaaccccctgggcctgcccaccaaggtggccctggccctgctgaacagcaagcagaacacaggcaagagcctgtactgccaggccatcaccacccacagcaagagtgacctgctggtgtacagcagcaagtggaagagcagcctgagcaagagggccctgggcaaccagaagagcacagtggtggagttcagcaacaaggatgccagcgagatcaacagcgagcaggacaaggagaacagcctcatcaagtctgagccccggcgcatcaagatctttgatggcggctacaagagcaatgaggagtatgtgtatgtgcggggccggggccggggcaagtacatctgtgaggagtgtggcatccgctgcaagaagcccagcatgctgaagaagcacatccgcacccacacagatgtgcggccctaccactgcacctactgcaacttctccttcaagaccaagggcaacctgaccaagcacatgaagagcaaggcccacagcaagaagtgtgtggacctgggcgtgtctgtgggcctgattgatgagcaggacacagaggagagtgatgagaagcagcgcttctcctatgaaagaagtggctatgacctggaggagagtgatggcccagatgaagatgacaatgaaaatgaagatgatgatgaggacagccaggccgagagcgtgctgagcgccacccccagcgtgacagccagcccccagcacctgcccagccgcagcagcctgcaggaccctgtgtccacagatgaagatgtgcgcatcacagactgcttctctggagtgcacacagaccccatggatgtgctgccccgggccctgctgaccaggatgacagtgctgagcacagcccagagcgactacaacaggaagaccctgagccctgggaaggcccggcagagagctgccagagatgaaaatgacaccatccccagcgtggacaccagccgcagcccctgccaccagatgtctgtggactacccagagagcgaggagatcctgcggagctccatggccggcaaggctgtggccatcacccagagccccagctctgtgcggctgcccccagctgctgctgagcacagcccccagacagctgctggcatgcccagcgtggccagcccccacccagacccccaggagcagaagcagcagatcaccctgcagcccaccccaggcctgcccagcccccacacccacctgttcagccacctgcccctgcacagccagcagcagagcaggaccccctacaacatggtgcctgtgggcggcatccacgtggtgcctgctggcctgacctacagcacctttgtgcccctgcaggccggccctgtgcagctgaccatcccagctgtgtctgtggtgcacaggaccctgggcacccacaggaacacagtgacagaggtgtctggcaccaccaacccagctggggtggccgagctgagctctgtggtgccctgcatccccatcggccagatccgggtgcccggcctgcagaacctgagcaccccaggcctgcagagcctgcccagcctgtccatggagaccgtgaacatcgtgggcctggccaacaccaacatggccccccaggtgcaccccccaggcctggccctgaatgctgtgggcctgcaggtgctgacagccaaccccagcagccagagcagccctgccccccaggcccacatccctggcctgcagatcctgaacatcgccctgcccaccctcatccccagcgtgtcccaggtggccgtggatgcccagggcgcccctgagatgcctgccagccagagcaaggcctgtgagacccagcccaagcagacctctgtggccagcgccaaccaggtgtccaggacagagagcccccagggcctgcccaccgtgcagagagaaaatgccaagaaggtgctgaaccccccagccccagctggggaccacgcccggctggatggcctgagcaagatggacacagagaaggccgccagcgccaaccacgtgaagcccaagccagagctgaccagcatccagggccagcctgccagcaccagccagcccctgctgaaggcccacagcgaggtgttcaccaagcccagcggccagcagaccctgagcccagaccggcaggtgccccggcccacagccctgccccggcggcagcccaccgtgcacttcagtgatgtgtccagtgatgatgatgaagatcggctggtgattgccacctag

SEQ ID NO: 155619 - DNA, 387 bp, synthetic construct
  misc_feature 1..387: note = Description of Artificial Sequence: Synthetic coding sequence
  source 1..387: mol_type = other DNA
atgcccaggaccaagcagatccaccccaggaacctgcgggacaagattgaggaggcccagaaggagctgaatggagctgaggtgtccaagaaggagatcctgcaggccggcgtgaagggcaccagcgagagcctgaagggcgtgaagaggaagaagatcgtggccgagaaccacctgaagaagatccccaagagccccctgaggaaccccctgcaggccaagcacaagcagaacacagaggagagcagctttgctgtgctgcacagcgccagcgagagccacaagaagcagaactacatccctgtgaagaatggcaagcagttcaccaagcagaatggagagaccccaggcatcatcgccgaggccagcaagtctgaggagagctag

SEQ ID NO: 155620 - DNA, 429 bp, synthetic construct
  misc_feature 1..429: note = Description of Artificial Sequence: Synthetic coding sequence
  source 1..429: mol_type = other DNA
atgcccaggaccaagcagatccaccccaggaacctgcgggacaagattgaggaggcccagaaggagctgaatggagctgaggtgtccaagaaggagatcctgcaggccggcgtgaagggcaccagcgagagcctgaagggcgtgaagaggaagaagatcgtggccgagaaccacctgaagaagatccccaagagccccctgaggaaccccctgcaggccaagcacaagcagaacacagaggagagcagctttgctgtgctgcacagcgccagcgagagccacaagaagcagaactacatccctgtgaagaatggcaagcagttcaccaagcagaatggagagaccccaggcatcatcgccgaggccagcaagtctgaggagagcgtgagccccaagaagcccctcttcctgcagcagcccagcgagtag

SEQ ID NO: 155621 - DNA, 363 bp, synthetic construct
  misc_feature 1..363: note = Description of Artificial Sequence: Synthetic coding sequence
  source 1..363: mol_type = other DNA
atgcccaggaccaagcagatccaccccaggaacctgcgggacaagattgaggaggcccagaaggagctgaatggagctgaggtgtccaagaaggagatcctgcaggccggcgtgaagggcaccagcgagagcctgaagggcgtgaagaggaagaagatcgtggccgagaaccacctgaagaagatccccaagagccccctgaggaaccccctgcaggccaagcacaagcagaacacagaggagagcagctttgctgtgctgcacagcgccagcgagagccacaagaagcagaactacatccctgtgaagaatggcaagcagttcaccaagcagaatggagagaccccaggcatcatcgcctag

SEQ ID NO: 155622 - DNA, 1752 bp, synthetic construct
  misc_feature 1..1752: note = Description of Artificial Sequence: Synthetic coding sequence
  source 1..1752: mol_type = other DNA
atgctgaagaagcacatccgcacccacacagatgtgcggccctaccactgcacctactgcaacttctccttcaagaccaaggatgagaagcagcgcttctcctatgaaagaagtggctatgacctggaggagagtgatggcccagatgaagatgacaatgaaaatgaagatgatgatgaggacagccaggccgagagcgtgctgagcgccaccccatctgtgacagccagcccccagcacctgcccagccgcagcagcctgcaggaccctgtgtccacagatgaagatgtgcgcatcacagactgcttcagcggcgtgcacacagaccccatggatgtgctgccccgggccctgctgaccaggatgacagtgctgagcacagcccagagcgactacaacaggaagaccctgagccctgggaaggcccggcagagagctgccagagatgaaaatgacaccatccccagcgtggacaccagccgcagcccctgccaccagatgtctgtggactacccagagagcgaggagatcctgcggagctccatggccggcaaggctgtggccatcacccagagccccagctctgtgcggctgcccccagctgctgctgagcacagcccccagacagctgctggcatgcccagcgtggccagcccccacccagacccccaggagcagaagcagcagatcaccctgcagcccaccccaggcctgcccagcccccacacccacctgttcagccacctgcccctgcacagccagcagcagagcaggaccccctacaacatggtgcctgtgggcggcatccacgtggtgcctgctggcctgacctacagcacctttgtgcccctgcaggccggccctgtgcagctgaccatcccagctgtgtctgtggtgcacaggaccctgggcacccacaggaacacagtgacagaggtgtctggcaccaccaacccagctggggtggccgagctgagctctgtggtgccctgcatccccatcggccagatccgggtgcccggcctgcagaacctgagcaccccaggcctgcagagcctgcccagcctgtccatggagaccgtgaacatcgtgggcctggccaacaccaacatggccccccaggtgcaccccccaggcctggccctgaatgctgtgggcctgcaggtgctgacagccaaccccagcagccagagcagccctgccccccaggcccacatccctggcctgcagatcctgaacatcgccctgcccaccctcatccccagcgtgtcccaggtggccgtggatgcccagggcgcccctgagatgcctgccagccagagcaaggcctgtgagacccagcccaagcagacctctgtggccagcgccaaccaggtgtccaggacagagagcccccagggcctgcccaccgtgcagcgggagaatgccaagaaggtgctgaaccccccagccccagctggggaccacgcccggctggatggcctgagcaagatggacacagagaaggccgccagcgccaaccacgtgaagcccaagccagagctgaccagcatccagggccagcctgccagcaccagccagcccctgctgaaggcccacagcgaggtgttcaccaagcccagcggccagcagaccctgagcccagaccggcaggtgccccggcccacagccctgccccggcggcagcccaccgtgcacttcagtgatgtgtccagtgatgatgatgaggaccggctggtgattgccacctag

SEQ ID NO: 155623 - DNA, 2103 bp, synthetic construct
  misc_feature 1..2103: note = Description of Artificial Sequence: Synthetic coding sequence
  source 1..2103: mol_type = other DNA
ggggacaagttctccttccagagggccctgggcaaccagaagagcacagtggtggagttcagcaacaaggatgccagcgagatcaacagcgagcaggacaaggagaacagcctcatcaagtctgagccccggcgcatcaagatctttgatggcggctacaagagcaatgaggagtatgtgtatgtgcggggccggggccggggcaagtacatctgtgaggagtgtggcatccgctgcaagaagcccagcatgctgaagaagcacatccgcacccacacagatgtgcggccctaccactgcacctactgcaacttctccttcaagaccaagggcaacctgaccaagcacatgaagagcaaggcccacagcaagaagtgtgtggacctgggcgtgtctgtgggcctgattgatgagcaggacacagaggagagtgatgagaagcagcgcttctcctatgaaagaagtggctatgacctggaggagagtgatggcccagatgaagatgacaatgaaaatgaagatgatgatgaggacagccaggccgagagcgtgctgagcgccacccccagcgtgacagccagcccccagcacctgcccagccgcagcagcctgcaggaccctgtgtccacagatgaagatgtgcgcatcacagactgcttctctggagtgcacacagaccccatggatgtgctgccccgggccctgctgaccaggatgacagtgctgagcacagcccagagcgactacaacaggaagaccctgagccctgggaaggcccggcagagagctgccagagatgaaaatgacaccatccccagcgtggacaccagccgcagcccctgccaccagatgtctgtggactacccagagagcgaggagatcctgcggagctccatggccggcaaggctgtggccatcacccagagccccagctctgtgcggctgcccccagctgctgctgagcacagcccccagacagctgctggcatgcccagcgtggccagcccccacccagacccccaggagcagaagcagcagatcaccctgcagcccaccccaggcctgcccagcccccacacccacctgttcagccacctgcccctgcacagccagcagcagagcaggaccccctacaacatggtgcctgtgggcggcatccacgtggtgcctgctggcctgacctacagcacctttgtgcccctgcaggccggccctgtgcagctgaccatcccagctgtgtctgtggtgcacaggaccctgggcacccacaggaacacagtgacagaggtgtctggcaccaccaacccagctggggtggccgagctgagctctgtggtgccctgcatccccatcggccagatccgggtgcccggcctgcagaacctgagcaccccaggcctgcagagcctgcccagcctgtccatggagaccgtgaacatcgtgggcctggccaacaccaacatggccccccaggtgcaccccccaggcctggccctgaatgctgtgggcctgcaggtgctgacagccaaccccagcagccagagcagccctgccccccaggcccacatccctggcctgcagatcctgaacatcgccctgcccaccctcatccccagcgtgtcccaggtggccgtggatgcccagggcgcccctgagatgcctgccagccagagcaaggcctgtgagacccagcccaagcagacctctgtggccagcgccaaccaggtgtccaggacagagagcccccagggcctgcccaccgtgcagagagaaaatgccaagaaggtgctgaaccccccagccccagctggggaccacgcccggctggatggcctgagcaagatggacacagagaaggccgccagcgccaaccacgtgaagcccaagccagagctgaccagcatccagggccagcctgccagcaccagccagcccctgctgaaggcccacagcgaggtgttcaccaagcccagcggccagcagaccctgagcccagaccggcaggtgccccggcccacagccctgccccggcggcagcccaccgtgcacttcagtgatgtgtccagtgatgatgatgaagatcggctggtgattgccacctag

SEQ ID NO: 155624 - DNA, 7341 bp, synthetic construct
  misc_feature 1..7341: note = Description of Artificial Sequence: Synthetic coding sequence
  source 1..7341: mol_type = other DNA
atggacacaggagacacagccctgggccagaaggccaccagccgcagcggggagacagacaaggccagcggccgctggaggcaggagcagagcgctgtgatcaagatgagcaccttcggcagccatgagggccagaggcagccccagatcgagcctgagcagatcggcaacacagccagcgcccagctgtttggcagcggcaagctggccagccccagcgaggtggtgcagcaggtggccgagaagcagtacccaccccaccggcccagcccctacagctgccagcacagcctgtccttcccccagcacagcctgccccagggcgtgatgcacagcaccaagccccaccagagcctggagggccccccctggctgtttcctggccccctgcccagcgtggccagcgaggacctcttccccttccccatccacggccacagcggcggctaccccaggaagaagatcagcagcctgaacccagcctacagccagtacagccagaagagcattgagcaggccgaggaggcccacaagaaggagcacaagcccaagaagccaggcaagtacatctgcccctactgcagccgggcctgtgccaagcccagcgtgctgaagaagcacatccgcagccacactggagagcggccctacccctgcatcccctgtggcttctccttcaagaccaagagcaacctgtacaagcacaggaagagccacgcccacgccatcaaggccggcctggtgcccttcacagaatctgctgtgtccaagctggacctggaggccggcttcattgatgtggaggccgagatccacagtgatggagagcagagcacagacacagatgaggagagcagcctgtttgctgaggccagtgacaagatgagccctggcccccccatccccctggacatcgccagcagaggaggctaccacggcagcctggaggagagcctgggcggccccatgaaggtgcccatcctgatcatccccaagagcggcatccccctgcccaatgaaagcagccagtacatcggccctgacatgctgcccaaccccagcctgaacaccaaggcagatgacagccacacagtgaagcagaagctggccctgcggctgtctgagaagaagggccaggacagcgagcccagcctgaacctgctgagcccccacagcaagggcagcacagacagcggctacttcagccgctctgagagcgctgagcagcagatcagcccccccaacaccaatgccaagagctatgaggagatcatctttgggaagtactgccgcctgagccccagaaatgccctgtctgtgaccaccaccagccaggagcgggccgccatgggcaggaagggcatcatggagcccctgccccacgtgaacacccggctggatgtgaagatgtttgaggaccctgtgtcccagctgatccccagcaaaggagatgtggaccccagccagacctccatgctgaagagcaccaagttcaacagcgagagccggcagccccagatcatccccagcagcatcagaaatgaaggcaagctgtacccagccaacttccagggcagcaaccctgtgctgctggaggcccctgtggacagcagccccctcatccgcagcaacagcgtgcccaccagcagcgccaccaacctgaccatcccccccagcctgcggggcagccacagctttgatgagaggatgactggaagtgatgatgtgttctacccaggcaccgtgggcatccccccccagaggatgctgcggcggcaggccgcctttgagctgcccagcgtgcaggagggccacgtggaggtggagcaccacggccgcatgctgaagggcatcagcagcagcagcctgaaggagaagaagctgagccctggggacagagtgggctatgactatgatgtgtgcaggaagccctacaagaagtgggaggacagcgagacccccaagcagaactacagagacatcagctgcctgagcagcctgaagcatggaggagagtacttcatggaccctgtggtgcccctgcagggcgtgcccagcatgtttggcaccacctgtgaaaataggaagaggaggaaggagaagtctgtgggagatgaggaggacacccccatgatctgcagcagcatcgtgtccacccctgtgggcatcatggccagtgactatgaccccaagctgcagatgcaggagggcgtgcgcagcggctttgccatggccggccacgagaacctgagccacggccacacagaaagatttgacccctgccggccccagctgcagcccggcagccccagcctggtgtctgaggagagccccagcgccatcgacagcgacaagatgtctgacctgggcggcaggaagcccccaggaaatgtcatcagcgtcatccagcacaccaacagcctgagccggcccaacagctttgagaggtctgagagcgctgagctggtggcctgcacccaggacaaggcccccagccccagcgagacctgtgacagcgagatcagcgaggcccctgtgtccccagagtgggcccctcctggagatggagctgagagcggcggcaagcccagccccagccagcaggtgcagcagcagagctaccacacccagccccggctggtgcggcagcacaacatccaggtgcctgagatccgggtgacagaggagccagacaagccagagaaggagaaggaggcccagagcaaggagcctgagaagcctgtggaggagttccagtggccccagaggtctgagaccctgagccagctgcctgctgagaagctgccccccaagaagaagaggctgcggctggccgacatggagcacagcagtggagagagcagctttgagagcactggaacaggcctgagccgcagccccagccaggagagcaacctgagccacagcagcagcttctccatgagctttgagcgggaggagaccagcaagctgagcgccctgcccaagcaggatgaatttgggaagcacagcgagttcctgactgtgcctgctggcagctacagcctgtctgtgcccggccaccaccaccagaaggagatgaggcgctgcagcagcgagcagatgccctgcccccaccctgctgaggtgcctgaggtgcgcagcaagagctttgattatggcaacctgagccacgcccctgtgtctggagctgctgccagcacagtgagccccagccgggagaggaagaagtgcttcctggtgcggcaggccagcttcagcggcagccctgagatcagccagggcgaggtgggcatggaccagagcgtgaagcaggagcagctggagcacctgcatgctggcctgcggagcggctggcaccacggccccccagctgtgctgccccccctgcagcaggaggaccccgggaagcaggtggccggcccctgcccccccctgagcagcggccccctgcacctggcccagccccagatcatgcacatggacagccaggagagcctgaggaaccccctcatccagcccaccagctacatgaccagcaagcacctgcctgagcagccccacctgttcccccaccaggagaccatccccttcagccccatccagaatgccctcttccagttccagtaccccaccgtgtgcatggtgcacctgcctgcccagcagcccccctggtggcaggcccacttcccccacccctttgcccagcacccccagaagagctatggcaagcccagcttccagacagagatccacagcagctaccccctggagcacgtggccgagcacacaggcaagaagccagcagaatatgcccacaccaaggagcagacctacccctgctacagcggggccagcggcctgcaccccaagaacctgctgcccaagttccccagcgaccagagcagcaagagcacagagacccccagcgagcaggtgctgcaggaggactttgccagcgccaatgccggcagcctgcagagcctgcccggcaccgtggtgcctgtgcgcatccagacccacgtgcccagctatggctctgtgatgtacaccagcatcagccagatcctgggccagaacagccctgccatcgtcatctgcaaggtggatgagaacatgacccagaggaccctggtgaccaatgctgccatgcagggcatcggcttcaacatcgcccaggtgctgggccagcacgccggcctggagaagtaccccatctggaaggccccccagaccctgcccctgggcctggagagcagcatccccctgtgcctgcccagcaccagtgacagcgtggccaccctgggcggcagcaagaggatgctgagccctgccagcagcctggagctgttcatggagaccaagcagcagaagagggtgaaggaggagaagatgtatggccagatcgtggaggagctgtctgctgtggagctgaccaacagcgacatcaagaaggacctgagccggccccagaagccccagctggtgcggcagggctgtgccagcgagcccaaggatggcctgcagagcggcagcagcagcttcagcagcctgagccccagcagcagccaggactaccccagcgtgagccccagcagccgggagcccttcctgcccagcaaggagatgctgagcggcagccgggcccccctgcccggccagaagagcagcggccccagcgagagcaaggagagcagtgatgagctggacattgatgaaacagccagtgacatgtccatgagcccccagagcagcagcctgcctgctggagatggccagctggaggaggagggcaagggccacaagaggcctgtgggcatgctggtgaggatggccagcgcccccagcggaaatgtggccgacagcaccctgctgctgacagacatggctgacttccagcagatcctgcagttccccagcctgcggaccaccaccaccgtgtcctggtgcttcctgaactacaccaagcccaactacgtgcagcaggccaccttcaagagctctgtgtatgcctcctggtgcatcagcagctgcaaccccaaccccagcggcctgaacaccaagaccaccctggccctgctgcggagcaagcagaagatcacagctgagatctacaccctggccgccatgcacaggcctggcaccgggaagctgaccagcagcagcgcctggaagcagttcacccagatgaagccagatgccagcttcctgtttggcagcaagctggagaggaagctggtgggcaacatcctgaaggagcggggcaagggggacatccacggggacaaggacatcggcagcaagcagacagagcccatccgcatcaagatctttgagggcggctacaagagcaatgaagattatgtgtatgtgcggggccggggccggggcaagtacatctgtgaagaatgtggcatccgctgcaagaagcccagcatgctgaagaagcacatccgcacccacacagatgtgcggccctacgtgtgcaagctgtgcaactttgccttcaagaccaagggcaacctgaccaagcacatgaagagcaaggcccacatgaagaagtgcctggagctgggcgtgtccatgacctctgtggatgacacagaaacagaggaggccgagaacctggaggacctgcacaaggctgctgagaagcacagcatgagcagcatcagcacagaccaccagttcagtgatgctgaggagagtgatggagaagatggagatgacaatgatgatgatgatgaagatgaagatgactttgatgaccagggcgacctgacccccaagaccaggagccgcagcaccagcccccagcccccacgcttcagcagcctgcctgtgaatgtgggcgctgtgccccatggagtgcccagcgacagcagcctgggccacagcagcctcatctcctacctggtgaccctgcccagcatccgggtgacccagctgatgacccccagcgacagctgtgaggacacccagatgacagagtaccagaggctcttccagagcaagagcacagattctgagccagacaaggaccggctggacatccccagctgcatggatgaggagtgcatgctgcccagcgagcccagcagcagcccccgggacttcagccccagcagccaccacagcagccctggctatgacagcagcccctgccgggacaacagccccaagcgctacctgatccccaagggggacctgagccccaggaggcacctgagcccccggcgggacctgagccccatgaggcacctgagccccaggaaggaggccgccctgcggcgggagatgagccagagagatgtgagcccccggcggcacctgagcccccggcggcctgtgtccccaggcaaggacatcacagcccggcgggacctgagcccccggcgggagcggcgctacatgaccaccatccgggcccccagcccccggcgggccctgtaccacaacccccccctgtccatgggccagtacctgcaggccgagcccatcgtgctgggcccccccaacctgcggcggggcctgccccaggtgccctacttcagcctgtatggagaccaggagggcgcctatgagcaccctggcagcagcctcttccctgagggccccaatgactatgtgttcagccacctgcccctgcacagccagcagcaggtgcgggcccccatccccatggtgcctgtgggcggcatccagatggtgcacagcatgcccccagccctgagcagcctgcaccccagccccaccctgcccctgcccatggagggctttgaggagaagaagggggccagcggggagagcttcagcaaggacccctacgtgctgagcaagcagcacgagaagaggggcccccacgccctgcagagcagcggcccccccagcacccccagcagcccccggctgctgatgaagcagagcaccagcgaggacagcctgaatgccacagagcgggagcaggaggagaacatccagacctgcaccaaggccatcgccagcctgcgcatcgccacagaggaggccgccctgctgggccctgaccagcctgcccgggtgcaggagccccaccagaaccccctgggcagcgcccacgtgtccatccgccacttcagcaggcctgagcccggccagccctgcaccagcgccacccacccagacctgcatgatggagagaaggacaactttggcaccagccagacccccctggcccacagcaccttctacagcaagagctgtgtggatgacaagcagctggacttccacagcagcaaggagctgagcagcagcacagaggagagcaaggaccccagcagcgagaagagccagctgcactag

SEQ ID NO: 155625 - DNA, 7341 bp, synthetic construct; identical to SEQ ID NO: 155624
  misc_feature 1..7341: note = Description of Artificial Sequence: Synthetic coding sequence
  source 1..7341: mol_type = other DNA

SEQ ID NO: 155626 - DNA, 7341 bp, synthetic construct; identical to SEQ ID NO: 155624
  misc_feature 1..7341: note = Description of Artificial Sequence: Synthetic coding sequence
  source 1..7341: mol_type = other DNA

SEQ ID NO: 155627 - DNA, 7221 bp, synthetic construct
  misc_feature 1..7221: note = Description of Artificial Sequence: Synthetic coding sequence
  source 1..7221: mol_type = other DNA
atggaccctgagcagagcgtgaagggcaccaagaaggccgagggcagccccaggaagaggctgaccaagggggaggccatccagacctctgtgagcagctctgtgccctacccaggcagcggcacagctgccacccaggagagccctgcccaggagctgctggccccccagcccttccctggccccagctctgtgctgcgggagggcagccaggagaagacaggccagcagcagaagccacccaagaggcctcccatcgaggcctctgtgcacatcagccagctgccccagcaccccctgaccccagccttcatgagccctgggaagccagagcacctgctggagggcagcacctggcagctggtggaccccatgaggcctggccccagcggcagctttgtggcccctggcctgcacccccagagccagctgctgcccagccacgccagcatcatccccccagaggacctgcccggggtgcccaaggtgtttgtgccccggcccagccaggtgtccctgaagcccacagaggaggcccacaagaaggagaggaagccccagaagccaggcaagtacatctgccagtactgcagccggccctgtgccaagcccagcgtgctgcagaagcacatccgcagccacactggagagcggccctacccctgtggcccctgtggcttctccttcaagaccaagagcaacctgtacaagcacaggaagagccacgcccaccgcatcaaggccggcctggccagcggcatgggcggggagatgtacccccacggcctggagatggagcgcatccctggagaggagtttgaggagcccacagaaggagagagcacagacagcgaggaggagaccagcgccaccagcggccaccctgctgagctgagcccccggcccaagcagcccctgctgagcagcggcctgtacagcagcggcagccacagcagcagccatgagcgctgcagcctgagccagagcagcacagcccagagcctggaggaccccccaccatttgtggagcccagcagcgagcaccccctgagccacaagccagaggacacccacaccatcaagcagaagctggccctgcggctgtctgagaggaagaaggtgattgatgagcaggccttcctgagccctggcagcaagggcagcacagaaagtggctacttcagccgctctgagagcgctgagcagcaggtgagcccccccaacaccaatgccaagagctatgcagagatcatctttggaaaatgtggcagaattggccagaggacagccatgctgacagccaccagcacccagcccctgctgcccctgagcacagaggacaagcccagcctggtgcccctgtctgtgcccaggacccaggtgattgagcacatcaccaagctgatcaccatcaatgaggccgtggtggacaccagcgagattgattctgtgaagcccaggaggagcagcctgagcagaagaagctccatggagagccccaagagcagcctgtaccgggagcccctgagcagccacagcgagaagaccaagccagagcagagcctgctgagcctgcagcacccccccagcacagcccctcctgtgcccctgctgcggagccacagcatgcccagcgctgcctgcaccatcagcaccccccaccaccccttccggggcagctacagctttgatgaccacatcacagacagcgaggccctgagccacagcagccacgtgttcaccagccaccccaggatgctgaagaggcagcctgccatcgagctgcccctgggcggggagtacagcagcgaggagcccggccccagcagcaaggacacagccagcaagcccagtgatgaggtggagcccaaggagagcgagctgaccaagaagaccaagaagggcctgaagaccaagggcgtcatctatgagtgcaacatctgtggggcccgctacaagaagagggacaactatgaggcccacaagaagtactactgcagcgagctgcagatcgccaagcccatctctgctggcacccacaccagccctgaggccgagaagagccagatcgagcacgagccctggagccagatgatgcactacaagctgggcaccaccctggagctgacccccctgaggaagaggaggaaggagaagagcctgggagatgaggaggagcccccagcctttgagagcaccaagagccagtttggcagccctggccccagtgatgctgccaggaacctgcccctggagagcaccaagagccctgctgagcccagcaagtctgtgcccagcctggagggccccaccggcttccagcccaggacccccaagccaggcagcggcagcgagagcggcaaggagaggaggaccaccagcaaggagatcagcgtcatccagcacaccagcagctttgagaagagtgacagcctggagcagcccagcggcctggagggggaggacaagcccctggcccagttccccagccccccaccagccccccacggccgcagcgcccacagcctgcagcccaagctggtgcggcagcccaacatccaggtgcctgagatcctggtgacagaggagccagacagaccagacacagagcctgagcccccacccaaggagcctgagaagacagaggagttccagtggccccagaggagccagaccctggcccagctgcctgctgagaagctgccccccaagaagaagaggctgcggctggccgagatggcccagagcagtggagagagcagctttgagagctctgtgcccctgagccgcagccccagccaggagagcaatgtgtccctgagcggcagcagccgcagcgccagctttgaaagagatgaccacggcaaggccgaggcccccagccccagcagtgacatgaggcccaagcccctgggcacccacatgctgactgtgcccagccaccacccccacgcccgggagatgagaagaagtgccagcgagcagagccccaacgtgagccacagcgcccacatgacagagaccaggagcaagagctttgattatggcagcctgagcctgaccggccccagcgccccagcccctgtggcccccccagcccgggtggcccctcctgagaggaggaagtgcttcctggtgcggcaggccagcctgagccggcccccagagagcgagctggaggtggcccccaagggccggcaggagagcgaggagccccagcccagcagcagcaagcccagcgccaagagcagcctgagccagatcagcagcgctgccaccagccatggaggccccccaggcggcaagggccctggccaggacaggcctcccctgggccccaccgtgccctacacagaggccctgcaggtgttccaccaccctgtggcccagacccccctgcacgagaagccctacctgcccccacctgtgtccctcttctccttccagcacctggtgcagcacgagcccggccagagccctgagttcttcagcacccaggccatgagcagcctgctgagcagcccctacagcatgccacccctgccccccagcctcttccaggccccacccctgcccctgcagcccaccgtgctgcaccctggccagctgcacctgccccagctgatgccccacccagccaacatccccttccggcagccccccagcttcctgcccatgccctaccccaccagcagcgccctgagcagcggcttcttcctgcccctgcagagccagtttgccctgcagctgcctggagatgtggagagccacctgccccagatcaagaccagcctggcccccctggccaccggcagcgctggcctgagccccagcacagagtacagcagtgacatccggctgccccctgtggcccccccagccagcagcagcgcccccaccagcgccccacccctggccctgcctgcctgcccagacaccatggtgtccctggtggtgcctgtgcgggtgcagaccaacatgcccagctatggcagcgccatgtacaccaccctgagccagatcctggtgacccagagccagggcagcagcgccaccgtggccctgcccaagtttgaggagccccccagcaagggcaccaccgtgtgtggggctgatgtgcatgaggtgggccctggccccagcggcctgtctgaggagcagagccgggccttccccaccccctacctgcgggtgcctgtgaccctgcctgagaggaagggcaccagcctgagcagcgagagcatcctgagcctggagggcagcagcagcacagctgggggcagcaagagggtgctgagccctgctggcagcctggagctgaccatggagacccagcagcagaagagggtgaaggaggaggaggccagcaaggcagatgagaagctggagctggtgaagccctgcagcgtggtgctgaccagcacagaagatggcaagaggcctgagaagagccacctgggcaaccagggccagggcagaagagagctggagatgctgagcagcctgagcagtgaccccagcgacaccaaggagatcccccccctgccccacccagccctgagccacggcacagcccctggcagcgaggccctgaaggagtacccccagcccagcggcaagccccacagaagaggcctgacccccctgtctgtgaagaaggaggacagcaaggagcagcctgacctgcccagcctggccccacccagcagcctgcccctgtctgagaccagcagcaggcctgccaagagccaggagggcacagacagcaagaaggtgctgcagttccccagcctgcacaccaccaccaacgtgtcctggtgctacctgaactacatcaagcccaaccacatccagcacgccgaccggcgcagctctgtgtatgccggctggtgcatcagcctgtacaaccccaacctgcccggggtgtccaccaaggccgccctgagcctgctgcggagcaagcagaaggtgtccaaggagacctacaccatggccacagccccccaccctgaggccggccgcctggtgcccagcagcagcaggaagcccaggatgacagaggtgcacctgcccagcctggtgtccccagagggccagaaggacctggcccgggtggagaaggaggaggagaggagaggagagccagaagaagatgccccagccagccagagaggagagcccgcccgcatcaagatctttgaaggaggctacaagagcaatgaggagtatgtgtatgtgcggggccggggccggggcaagtatgtgtgtgaggagtgtggcatccgctgcaagaagcccagcatgctgaagaagcacatccgcacccacacagatgtgcggccctacgtgtgcaagcactgccactttgccttcaagaccaagggcaacctgaccaagcacatgaagagcaaggcccacagcaagaagtgccaggagactggagtgctggaggagctggaggccgaggagggcaccagtgatgacctcttccaggacagcgagggccgggagggcagcgaggccgtggaggagcaccagttcagtgacctggaggacagcgacagcgacagcgacctggatgaagatgaagatgaagatgaggaggagagccaggatgagctgagccggcccagcagcgaggcccctcctcctggccccccccacgccctgcgggctgacagcagccccatcctgggcccccagcccccagatgccccagccagcggcacagaggccacccggggcagctctgtgtctgaggccgagcggctgacagccagcagctgcagcatgagcagccagagcatgcctggcctgccctggctgggccctgcccccctgggctctgtggagaaggacaccggcagcgccctgagctacaagcctgtgagcccccggcggccctggagccccagcaaggaggccggcagcaggcctcccctggccaggaagcacagcctgaccaagaatgacagcagcccccagcgctgcagccctgcccgggagccccaggccagcgcccccagccccccaggcctgcacgtggaccccggccggggcatgggcgccctgccctgtggcagcccccggctgcagctgagccccctgaccctgtgccccctgggccgggagctggccccccgggcccacgtgctgagcaagctggagggcaccacagatcctggcctgccccgctacagccccacccggcgctggagccctggccaggccgagagcccccccaggtctgcccctcctgggaagtgggccctggccggccctggcagccccagcgctggggagcacggccctggcctgggcctggacccccgggtgctcttccccccagcccccctgccccacaagctgctgagccgcagccctgagacctgtgccagcccctggcagaaggccgagagccgcagccccagctgcagccctggccctgcccaccccctgagcagccggcccttcagcgccctgcatgacttccacggccacatcctggccaggacagaggagaacatcttcagccacctgcccctgcacagccagcacctgacccgggccccctgccccctcatccccatcggcggcatccagatggtgcaggcccggcctggggcccaccccaccctgctgcccggccccacagctgcctgggtgtctggcttcagcggcggcggcagtgacctgactggagcccgggaggcccaggagcggggccgctggagccccacagagagcagcagcgcctctgtgtcccctgtggccaaggtgtccaagttcaccctgagcagcgagctggagggcggggactaccccaaggagcgggagaggactggaggcggccctggccggcccccagactggaccccccacggcaccggggccccagctgagcccacccccacccacagcccctgcaccccaccagacaccctgccccggcccccccagggccggcgggccgcccagagctggagcccccggctggagagcccccgggcccccaccaaccctgagcccagcgccaccccacccctggacaggagcagctctgtgggctgcctggccgaggccagcgcccgcttccctgcccggaccaggaacctgtctggagagcccaggacccggcaggacagccccaagcccagcggcagcggggagccccgggcccacccccaccagccagaagatagagtgcccccaaatgcctag

SEQ ID NO: 155628 - DNA, 7221 bp, synthetic construct; identical to SEQ ID NO: 155627
  misc_feature 1..7221: note = Description of Artificial Sequence: Synthetic coding sequence
  source 1..7221: mol_type = other DNA

SEQ ID NO: 155629 - DNA, 7218 bp, synthetic construct
  misc_feature 1..7218: note = Description of Artificial Sequence: Synthetic coding sequence
  source 1..7218: mol_type = other DNA
atggaccctgagcagagcgtgaagggcaccaagaaggccgagggcagccccaggaagaggctgaccaagggggaggccatccagacctctgtgagcagctctgtgccctacccaggcagcggcacagctgccacccaggagagccctgcccaggagctgctggccccccagcccttccctggccccagctctgtgctgcgggagggcagccaggagaagacaggccagcagcagaagccacccaagaggcctcccatcgaggcctctgtgcacatcagccagctgccccagcaccccctgaccccagccttcatgagccctgggaagccagagcacctgctggagggcagcacctggcagctggtggaccccatgaggcctggccccagcggcagctttgtggcccctggcctgcacccccagagccagctgctgcccagccacgccagcatcatccccccagaggacctgcccggggtgcccaaggtgtttgtgccccggcccagccaggtgtccctgaagcccacagaggaggcccacaagaaggagaggaagccccagaagccaggcaagtacatctgccagtactgcagccggccctgtgccaagcccagcgtgctgcagaagcacatccgcagccacactggagagcggccctacccctgtggcccctgtggcttctccttcaagaccaagagcaacctgtacaagcacaggaagagccacgcccaccgcatcaaggccggcctggccagcggcatgggcggggagatgtacccccacggcctggagatggagcgcatccctggagaggagtttgaggagcccacagaaggagagagcacagacagcgaggaggagaccagcgccaccagcggccaccctgctgagctgagcccccggcccaagcagcccctgctgagcagcggcctgtacagcagcggcagccacagcagcagccatgagcgctgcagcctgagccagagcagcacagcccagagcctggaggaccccccaccatttgtggagcccagcagcgagcaccccctgagccacaagccagaggacacccacaccatcaagcagaagctggccctgcggctgtctgagaggaagaaggtgattgatgagcaggccttcctgagccctggcagcaagggcagcacagaaagtggctacttcagccgctctgagagcgctgagcagcaggtgagcccccccaacaccaatgccaagagctatgcagagatcatctttggaaaatgtggcagaattggccagaggacagccatgctgacagccaccagcacccagcccctgctgcccctgagcacagaggacaagcccagcctggtgcccctgtctgtgcccaggacccaggtgattgagcacatcaccaagctgatcaccatcaatgaggccgtggtggacaccagcgagattgattctgtgaagcccaggaggagcagcctgagcagaagaagctccatggagagccccaagagcagcctgtaccgggagcccctgagcagccacagcgagaagaccaagccagagcagagcctgctgagcctgcagcacccccccagcacagcccctcctgtgcccctgctgcggagccacagcatgcccagcgctgcctgcaccatcagcaccccccaccaccccttccggggcagctacagctttgatgaccacatcacagacagcgaggccctgagccacagcagccacgtgttcaccagccaccccaggatgctgaagaggcagcctgccatcgagctgcccctgggcggggagtacagcagcgaggagcccggccccagcagcaaggacacagccagcaagcccagtgatgaggtggagcccaaggagagcgagctgaccaagaagaccaagaagggcctgaagaccaagggcgtcatctatgagtgcaacatctgtggggcccgctacaagaagagggacaactatgaggcccacaagaagtactactgcagcgagctgcagatcgccaagcccatctctgctggcacccacaccagccctgaggccgagaagagccagatcgagcacgagccctggagccagatgatgcactacaagctgggcaccaccctggagctgacccccctgaggaagaggaggaaggagaagagcctgggagatgaggaggagcccccagcctttgagagcaccaagagccagtttggcagccctggccccagtgatgctgccaggaacctgcccctggagagcaccaagagccctgctgagcccagcaagtctgtgcccagcctggagggccccaccggcttccagcccaggacccccaagccaggcagcggcagcgagagcggcaaggagaggaggaccaccagcaaggagatcagcgtcatccagcacaccagcagctttgagaagagtgacagcctggagcagcccagcggcctggagggggaggacaagcccctggcccagttccccagccccccaccagccccccacggccgcagcgcccacagcctgcagcccaagctggtgcggcagcccaacatccaggtgcctgagatcctggtgacagaggagccagacagaccagacacagagcctgagcccccacccaaggagcctgagaagacagaggagttccagtggccccagaggagccagaccctggcccagctgcctgctgagaagctgccccccaagaagaagaggctgcggctggccgagatggcccagagcagtggagagagcagctttgagagctctgtgcccctgagccgcagccccagccaggagagcaatgtgtccctgagcggcagcagccgcagcgccagctttgaaagagatgaccacggcaaggccgaggcccccagccccagcagtgacatgaggcccaagcccctgggcacccacatgctgactgtgcccagccaccacccccacgcccgggagatgagaagaagtgccagcgagcagagccccaacgtgagccacagcgcccacatgacagagaccaggagcaagagctttgattatggcagcctgagcctgaccggccccagcgccccagcccctgtggcccccccagcccgggtggcccctcctgagaggaggaagtgcttcctggtgcggcaggccagcctgagccggcccccagagagcgagctggaggtggcccccaagggccggcaggagagcgaggagccccagcccagcagcagcaagcccagcgccaagagcagcctgagccagatcagcagcgctgccaccagccatggaggccccccaggcggcaagggccctggccaggacaggcctcccctgggccccaccgtgccctacacagaggccctgcaggtgttccaccaccctgtggcccagacccccctgcacgagaagccctacctgcccccacctgtgtccctcttctccttccagcacctggtgcagcacgagcccggccagagccctgagttcttcagcacccaggccatgagcagcctgctgagcagcccctacagcatgccacccctgccccccagcctcttccaggccccacccctgcccctgcagcccaccgtgctgcaccctggccagctgcacctgccccagctgatgccccacccagccaacatccccttccggcagccccccagcttcctgcccatgccctaccccaccagcagcgccctgagcagcggcttcttcctgcccctgcagagccagtttgccctgcagctgcctggagatgtggagagccacctgccccagatcaagaccagcctggcccccctggccaccggcagcgctggcctgagccccagcacagagtacagcagtgacatccggctgccccctgtggcccccccagccagcagcagcgcccccaccagcgccccacccctggccctgcctgcctgcccagacaccatggtgtccctggtggtgcctgtgcgggtgcagaccaacatgcccagctatggcagcgccatgtacaccaccctgagccagatcctggtgacccagagccagggcagcagcgccaccgtggccctgcccaagtttgaggagccccccagcaagggcaccaccgtgtgtggggctgatgtgcatgaggtgggccctggccccagcggcctgtctgaggagcagagccgggccttccccaccccctacctgcgggtgcctgtgaccctgcctgagaggaagggcaccagcctgagcagcgagagcatcctgagcctggagggcagcagcagcacagctgggggcagcaagagggtgctgagccctgctggcagcctggagctgaccatggagacccagcagcagaagagggtgaaggaggaggaggccagcaaggcagatgagaagctggagctggtgaagccctgcagcgtggtgctgaccagcacagaagatggcaagaggcctgagaagagccacctgggcaaccagggccagggcagaagagagctggagatgctgagcagcctgagcagtgaccccagcgacaccaaggagatcccccccctgccccacccagccctgagccacggcacagcccctggcagcgaggccctgaaggagtacccccagcccagcggcaagccccacagaagaggcctgacccccctgtctgtgaagaaggaggacagcaaggagcagcctgacctgcccagcctggccccacccagcagcctgcccctgtctgagaccagcagcaggcctgccaagagccaggagggcacagacagcaagaaggtgctgcagttccccagcctgcacaccaccaccaacgtgtcctggtgctacctgaactacatcaagcccaaccacatccagcacgccgaccggcgcagctctgtgtatgccggctggtgcatcagcctgtacaaccccaacctgcccggggtgtccaccaaggccgccctgagcctgctgcggagcaagcagaaggtgtccaaggagacctacaccatggccacagccccccaccctgaggccggccgcctggtgcccagcagcagcaggaagcccaggatgacagaggtgcacctgcccagcctggtgtccccagagggccagaaggacctggcccgggtggagaaggaggaggagaggagaggagagccagaagaagatgccccagccagccagagaggagagcccgcccgcatcaagatctttgaaggaggctacaagagcaatgaggagtatgtgtatgtgcggggccggggccggggcaagtatgtgtgtgaggagtgtggcatccgctgcaagaagcccagcatgctgaagaagcacatccgcacccacacagatgtgcggccctacgtgtgcaagcactgccactttgccttcaagaccaagggcaacctgaccaagcacatgaagagcaaggcccacagcaagaagtgccaggagactggagtgctggaggagctggaggccgaggagggcaccagtgatgacctcttccaggacagcgagggccgggagggcagcgaggccgtggaggagcaccagttcagtgacctggaggacagcgacagcgacagcgacctggatgaagatgaagatgaagatgaggaggagagccaggatgagctgagccggcccagcagcgaggcccctcctcctggccccccccacgccctgcgggctgacagcagccccatcctgggcccccagcccccagatgccccagccagcggcacagaggccacccggggcagctctgtgtctgaggccgagcggctgacagccagcagctgcagcatgagcagccagagcatgcctggcctgccctggctgggccctgcccccctgggctctgtggagaaggacaccggcagcgccctgagctacaagcctgtgagcccccggcggccctggagccccagcaaggaggccggcagcaggcctcccctggccaggaagcacagcctgaccaagaatgacagcagcccccagcgctgcagccctgcccgggagccccaggccagcgcccccagccccccaggcctgcacgtggaccccggccggggcatgggcgccctgccctgtggcagcccccggctgcagctgagccccctgaccctgtgccccctgggccgggagctggccccccgggcccacgtgctgagcaagctggagggcaccacagatcctggcctgccccgctacagccccacccggcgctggagccctggccaggccgagagcccccccaggtctgcccctcctgggaagtgggccctggccggccctggcagccccagcgctggggagcacggccctggcctgggcctggacccccgggtgctcttccccccagcccccctgccccacaagctgctgagccgcagccctgagacctgtgccagcccctggaaggccgagagccgcagccccagctgcagccctggccctgcccaccccctgagcagccggcccttcagcgccctgcatgacttccacggccacatcctggccaggacagaggagaacatcttcagccacctgcccctgcacagccagcacctgacccgggccccctgccccctcatccccatcggcggcatccagatggtgcaggcccggcctggggcccaccccaccctgctgcccggccccacagctgcctgggtgtctggcttcagcggcggcggcagtgacctgaccggggcccgggaggcccaggagcggggccgctggagccccacagagagcagcagcgcctctgtgtcccctgtggccaaggtgtccaagttcaccctgagcagcgagctggagggcggggactaccccaaggagcgggagaggactggaggcggccctggccggcccccagactggacccctcatggaactggagccccagctgagcccacccccacccacagcccctgcaccccaccagacaccctgcccaggcctccccagggcagaagagctgcccagagctggagcccccggctggagagcccccgggcccccaccaaccctgagcccagcgccaccccacccctggacaggagcagctctgtgggctgcctggccgaggccagcgcccgcttccctgcccggaccaggaacctgagcggggagcccaggacccggcaggacagccccaagcccagcggcagcggggagccccgggcccacccccaccagcctgaggacagagtgcccccaaatgcctag

SEQ ID NO: 155630 - DNA, 7218 bp, synthetic construct; identical to SEQ ID NO: 155629
  misc_feature 1..7218: note = Description of Artificial Sequence: Synthetic coding sequence
  source 1..7218: mol_type = other DNA

SEQ ID NO: 155631 - DNA, 9429 bp, synthetic construct
  misc_feature 1..9429: note = Description of Artificial Sequence: Synthetic coding sequence
  source 1..9429: mol_type = other DNA
atggccaccctggagaagctgatgaaggcctttgagagcctgaagagcttccagcagcagcagcagcagcagcagcagcagcagcagcagcagcagcagcagcagcagcagcagcccccacctcctcctcctcctcctcctccaccccagctgccccagcccccaccccaggcccagcccctgctgccccagccccagcccccacctcctcctcctcctcctcctcctggccctgctgtggccgaggagcccctgcaccggcccaagaaggagctgagcgccaccaagaaggacagagtgaaccactgcctgaccatctgtgagaacatcgtggcccagagcgtgaggaacagccctgagttccagaagctgctgggcatcgccatggagctgttcctgctgtgcagtgatgatgctgagagtgatgtgaggatggtggctgatgaatgtctgaacaaggtgatcaaggccctgatggacagcaacctgccccggctgcagctggagctgtacaaggagatcaagaagaatggagcccccaggagcctgcgggccgccctgtggaggtttgctgagctggcccacctggtgcggccccagaagtgccggccctacctggtgaacctgctgccctgcctgaccaggaccagcaagaggcctgaggagagcgtgcaggagaccctggccgctgctgtgcccaagatcatggccagctttggaaactttgccaatgacaatgagatcaaggtgctgctgaaggccttcatcgccaacctgaagagcagcagccccaccatcagaagaacagctgctggcagcgctgtgtccatctgccagcacagcaggaggacccagtacttctacagctggctgctgaatgtgctgctgggcctgctggtgcctgtggaggatgagcacagcaccctgctgatcctgggcgtgctgctgaccctgcgctacctggtgcccctgctgcagcagcaggtgaaggacaccagcctgaagggcagctttggagtgaccaggaaggagatggaggtgagccccagcgctgagcagctggtgcaggtgtatgagctgaccctgcaccacacccagcaccaggaccacaacgtggtgactggagccctggagctgctgcagcagctgttccgcaccccacctcctgagctgctgcagaccctgacagctgtgggcggcatcggccagctgacagctgccaaggaggagagcggcggccgcagccgcagcggcagcatcgtggagctgattgctgggggcggcagcagctgcagccctgtgctgagcaggaagcagaagggcaaggtgctgctgggggaggaggaggccctggaggatgattctgagagcagaagtgatgtgagcagcagcgccctgacagcctctgtgaaggatgagatctctggagagctggccgccagcagcggcgtgtccaccccaggcagcgctggccatgacatcatcacagagcagcccaggagccagcacaccctgcaggccgacagcgtggacctggccagctgtgacctgaccagcagcgccacagatggagatgaggaggacatcctgagccacagcagcagccaggtgtctgctgtgcccagcgaccctgccatggacctgaatgatggcacccaggccagcagccccatcagtgacagcagccagaccaccacagagggcccagattctgctgtgacccccagcgacagcagcgagatcgtgctggatggaacagacaaccagtacctgggcctgcagatcggccagccccaggatgaagatgaggaggccaccggcatcctgcctgatgaggccagcgaggccttcaggaacagctccatggccctgcagcaggcccacctgctgaagaacatgagccactgccggcagcccagcgacagctctgtggacaagtttgtgctgagagatgaggccacagagcccggggaccaggagaacaagccctgccgcatcaagggggacatcggccagagcacagatgatgacagcgcccccctggtgcactgtgtgcggctgctgagcgccagcttcctgctgactggaggcaagaatgtgctggtgcctgacagagatgtgcgggtgtctgtgaaggccctggccctgagctgtgtgggcgctgctgtggccctgcaccctgagagcttcttcagcaagctgtacaaggtgcccctggacaccacagagtacccagaggagcagtatgtgtctgacatcctgaactacatcgaccatggagacccccaggtgcggggggccacagccatcctgtgtggcaccctcatctgcagcatcctgagccgcagccgcttccacgtgggggactggatgggcaccatccgcaccctgaccggcaacaccttcagcctggccgactgcatccccctgctgaggaagaccctgaaggatgagagctctgtgacctgcaagctggcctgcacagctgtgaggaactgtgtgatgagcctgtgcagcagcagctacagcgagctgggcctgcagctgatcattgatgtgctgaccctgaggaacagcagctactggctggtgaggacagagctgctggagaccctggccgagattgacttccggctggtgtccttcctggaggccaaggccgagaacctgcacagaggagcccaccactacacaggcctgctgaagctgcaggagcgggtgctgaacaacgtggtgatccacctgctgggagatgaggacccccgggtgagacatgtggccgccgccagcctcatccggctggtgcccaagctgttctacaagtgtgaccagggccaggccgaccctgtggtggccgtggcccgggaccagagctctgtgtacctgaagctgctgatgcatgagacccagccccccagccacttctctgtgtccaccatcacccgcatctaccggggctacaacctgctgcccagcatcacagatgtgaccatggagaacaacctgagccgggtgattgctgctgtgtcccatgagctgatcaccagcaccacccgggccctgaccttcggctgctgtgaggccctgtgcctgctgagcacagccttccctgtgtgcatctggagcctgggctggcactgcggcgtgccccccctgagcgccagtgatgagagcaggaagagctgcaccgtgggcatggccaccatgatcctgaccctgctgagcagcgcctggttccccctggacctgagcgcccaccaggatgccctgatcctggccggcaacctgctggccgccagcgcccccaagagcctgcggagctcctgggccagcgaggaggaggccaacccagctgccaccaagcaggaggaggtgtggccagccctgggggaccgggccctggtgcccatggtggagcagctgttcagccacctgctgaaggtgatcaacatctgtgcccacgtgctggatgatgtggcccctggccctgccatcaaggccgccctgcccagcctgaccaacccccccagcctgagccccatccggaggaagggcaaggagaaggagcccggggagcaggcctctgtgcccctgagccccaagaagggcagcgaggccagcgctgccagccggcagagcgacaccagcggccctgtgaccaccagcaagagcagcagcctgggcagcttctaccacctgcccagctacctgaagctgcatgatgtgctgaaggccacccacgccaactacaaggtgaccctggacctgcagaacagcacagagaagtttggaggcttcctgcggagcgccctggatgtgctgagccagatcctggagctggccaccctgcaggacatcggcaaatgtgtggaggagatcctgggctacctgaagagctgcttcagccgggagcccatgatggccaccgtgtgtgtgcagcagctgctgaagaccctgtttggcaccaacctggccagccagtttgatggcctgagcagcaaccccagcaagagccagggccgggcccagaggctgggcagcagctctgtgcggcccggcctgtaccactactgcttcatggccccctacacccacttcacccaggccctggctgatgccagcctgaggaacatggtgcaggccgagcaggagaatgacaccagcggctggtttgatgtgctgcagaaggtgtccacccagctgaagaccaacctgacctctgtgaccaagaacagagctgacaagaatgccatccacaaccacatccggctgtttgagcccctggtgatcaaggccctgaagcagtacaccaccaccacctgtgtgcagctgcagaagcaggtgctggacctgctggcccagctggtgcagctgcgggtgaactactgcctgctggacagcgaccaggtgttcatcggctttgtgctgaagcagtttgagtacatcgaggtgggccagttccgggagagcgaggccatcatccccaacatcttcttcttcctggtgctgctgtcctatgaaagataccacagcaagcagatcatcggcatccccaagatcatccagctgtgtgatggcatcatggccagcggcaggaaggctgtgacccacgccatcccagccctgcagcccatcgtgcatgacctgtttgtgctgcggggcaccaacaaggcagatgctgggaaggagctggagacccagaaggaggtggtggtgtccatgctgctgcggctcatccagtaccaccaggtgctggagatgttcatcctggtgctgcagcagtgccacaaggaaaatgaagacaagtggaagaggctgagccggcagattgctgacatcatcctgcccatgctggccaagcagcagatgcacatcgacagccatgaggccctgggcgtgctgaacaccctgtttgagatcctggcccccagcagcctgcggcctgtggacatgctgctgcgctccatgtttgtgacccccaacaccatggcctctgtgtccacagtgcagctgtggatcagcggcatcctggccatcctgcgggtgctgatcagccagagcacagaagatattgtgctgagccgcatccaggagctgtccttcagcccctacctgatcagctgcaccgtcatcaaccggctgagagatggagacagcaccagcaccctggaggagcacagcgagggcaagcagatcaagaacctgcctgaggagaccttcagccgcttcctgctgcagctggtgggcatcctgctggaggacatcgtgaccaagcagctgaaggtggagatgtctgagcagcagcacaccttctactgccaggagctgggcaccctgctgatgtgcctgatccacatcttcaagagcggcatgttccgccgcatcacagctgctgccaccaggctcttcagaagtgatggctgcggcggcagcttctacaccctggacagcctgaacctgcgggcccgctccatgatcaccacccacccagccctggtgctgctgtggtgccagatcctgctgctggtgaaccacacagactaccgctggtgggccgaggtgcagcagacccccaagaggcacagcctgagcagcaccaagctgctgagcccccagatgtctggagaggaggaggacagcgacctggccgccaagctgggcatgtgcaaccgggagatcgtgagaagaggagccctgatcctcttctgtgactatgtgtgccagaacctgcatgattctgagcacctgacctggctgattgtgaaccacatccaggacctgatcagcctgagccatgagccccctgtgcaggacttcatctctgctgtgcacagaaattctgctgccagcggcctcttcatccaggccatccagagccgctgtgagaacctgagcacccccaccatgctgaagaagaccctgcagtgcctggagggcatccacctgagccagagcggggctgtgctgaccctgtatgtggaccggctgctgtgcacccccttccgggtgctggccaggatggtggacatcctggcctgccggcgggtggagatgctgctggccgccaacctgcagagctccatggcccagctgcccatggaggagctgaaccgcatccaggagtacctgcagagcagcggcctggcccagaggcaccagaggctgtacagcctgctggaccgcttccggctgagcaccatgcaggacagcctgagccccagcccccctgtgagcagccaccccctggatggagatggccacgtgtccctggagaccgtgtccccagacaaggactggtacgtgcacctggtgaagagccagtgctggaccaggagtgacagcgccctgctggagggcgctgagctggtgaaccgcatcccagctgaggacatgaatgccttcatgatgaacagcgagttcaacctgagcctgctggccccctgcctgagcctgggcatgtctgagatcagcggcggccagaagagcgccctgtttgaagctgcccgggaggtgaccctggcccgggtgtctggaacagtgcagcagctgcctgctgtgcaccacgtgttccagcctgagctgcctgctgagcctgctgcctactggagcaagctgaatgacctgtttggagatgctgccctgtaccagagcctgcccaccctggcccgggccctggcccagtacctggtggtggtgtccaagctgcccagccacctgcacctgcccccagagaaggagaaggacatcgtgaagtttgtggtggccaccctggaggccctgtcctggcacctgatccacgagcagatccccctgagcctggacctgcaggccggcctggactgctgctgcctggccctgcagctgcccggcctgtggagcgtggtgagcagcacagaatttgtgacccacgcctgcagcctcatctactgtgtgcacttcatcctggaggccgtggccgtgcagcccggggagcagctgctgagccctgagaggaggaccaacacccccaaggccatcagcgaggaggaggaggaggtggaccccaacacccagaaccccaagtacatcacagctgcctgtgagatggtggccgagatggtggagagcctgcagagcgtgctggccctgggccacaagaggaacagcggcgtgcctgccttcctgacccccctgctgaggaacatcatcatcagcctggcccggctgcccctggtgaacagctacaccagggtgccccccctggtgtggaagctgggctggagccccaagccaggaggagactttggaacagccttccctgagatccctgtggagttcctgcaggagaaggaggtgttcaaggagttcatctaccgcatcaacaccctgggctggaccagcaggacccagtttgaggagacctgggccaccctgctgggcgtgctggtgacccagcccctggtgatggagcaggaggagagccccccagaggaggacacagagaggacccagatcaacgtgctggccgtgcaggccatcaccagcctggtgctgagcgccatgacagtgcctgtggccggcaacccagctgtgtcctgcctggagcagcagcccaggaacaagcccctgaaggccctggacaccaggtttggaaggaagctgagcatcatccggggcatcgtggagcaggagatccaggccatggtgtccaagcgggagaacatcgccacccaccacctgtaccaggcctgggaccctgtgcccagcctgagccctgccaccaccggggccctgatcagccatgagaagctgctgctgcagatcaaccctgagcgggagctgggctccatgagctacaagctgggccaggtgtccatccacagcgtgtggctgggcaacagcatcacccccctgcgggaggaggagtgggatgaggaggaggaggaggaggctgatgccccagcccccagcagcccccccaccagccctgtgaacagcaggaagcaccgggccggcgtggacatccacagctgcagccagttcctgctggagctgtacagccgctggatcctgcccagcagcagcgcccggaggaccccagccatcctgatcagcgaggtggtgcgcagcctgctggtggtgtctgacctcttcacagagaggaaccagtttgagctgatgtatgtgaccctgacagagctgcggcgggtgcaccccagtgaagatgagatcctggcccagtacctggtgcctgccacctgcaaggctgctgctgtgctgggcatggacaaggctgtggccgagcctgtgtcccggctgctggagagcaccctgcggagcagccacctgcccagccgggtgggcgccctgcacggcgtgctgtatgtgctggagtgtgacctgctggatgacacagccaagcagctgatccctgtgatcagtgactacctgctgagcaacctgaagggcatcgcccactgtgtgaacatccacagccagcagcacgtgctggtgatgtgtgccacagccttctacctgattgagaactaccccctggatgtgggccctgagttcagcgccagcatcatccagatgtgtggggtgatgctgagcggcagcgaggagagcacccccagcatcatctaccactgtgccctgcggggcctggagcggctgctgctgtctgagcagctgagccggctggatgctgagagcctggtgaagctgtctgtggacagagtgaatgtgcacagcccccaccgggccatggccgccctgggcctgatgctgacctgcatgtacaccgggaaggagaaggtgtccccaggccgcaccagtgaccccaacccagctgccccagacagcgagagcgtcatcgtggccatggagcgggtgtctgtgctgtttgaccgcatcaggaagggcttcccctgtgaggcccgggtggtggcccgcatcctgccccagttcctggatgacttcttccccccccaggacatcatgaacaaggtgattggagagttcctgagcaaccagcagccctacccccagttcatggccaccgtggtgtacaaggtgttccagaccctgcacagcacaggccagagctccatggtgcgggactgggtgatgctgagcctgagcaacttcacccagagggcccctgtggccatggccacctggagcctgagctgcttctttgtgtctgccagcaccagcccctgggtggccgccatcctgccccacgtgatcagcaggatgggcaagctggagcaggtggatgtgaacctcttctgcctggtggccacagacttctaccgccaccagatcgaggaggagctggacagaagagccttccagagcgtgctggaggtggtggccgcccctggcagcccctaccaccggctgctgacctgcctgagaaatgtgcacaaggtgaccacctgctag

SEQ ID NO: 155632 - DNA, 3114 bp, synthetic construct
  misc_feature 1..3114: note = Description of Artificial Sequence: Synthetic coding sequence
  source 1..3114: mol_type = other DNA
atggacaggatggccagctccatgaagcaggtgcccaaccccctgcccaaggtgctgagcagaagaggagtgggcgccggcctggaggccgctgagcgggagagctttgagaggacccagacagtgtccatcaacaaggccatcaacacccaggaggtggccgtgaaggagaagcacgcccggacctgcatcctgggcacccaccacgagaagggggcccagaccttctggagcgtggtgaaccggctgcccctgagcagcaatgctgtgctgtgctggaagttctgccacgtgttccacaagctgctgagagatggccaccccaacgtgctgaaggacagcctgcgctacagaaatgagctgagtgacatgagcaggatgtggggccacctgtctgagggctacggccagctgtgcagcatctacctgaagctgctgcggaccaagatggagtaccacaccaagaacccccgcttccctggcaacctgcagatgtctgaccggcagctggatgaagctggggagagtgatgtgaacaacttcttccagctgactgtggagatgtttgactacctggagtgtgagctgaacctcttccagacagtgttcaacagcctggacatgagccgctctgtgtctgtgacagctgctggccagtgccgcctggcccccctcatccaggtgatcctggactgcagccacctgtatgactacacagtgaagctgctcttcaagctgcacagctgcctgcctgctgacaccctgcagggccaccgggaccgcttcatggagcagttcaccaagctgaaggacctcttctaccgcagcagcaacctgcagtacttcaagaggctcatccagatcccccagctgcctgaaaatccacccaacttcctgcgggccagcgccctgtctgagcacatcagccctgtggtggtgatcccagctgaggccagcagcccagattctgagcctgtgctggagaaggatgacctgatggacatggatgccagccagcagaacctgtttgacaacaagtttgatgacatcttcggcagcagcttcagcagtgaccccttcaacttcaacagccagaatggagtgaacaaggatgagaaggaccacctgattgagcggctgtaccgggagatcagcggcctgaaggcccagctggagaacatgaagacagagagccagagggtggtgctgcagctgaagggccacgtgtctgagctggaggccgacctggccgagcagcagcacctgcggcagcaggccgcagatgactgtgagttcctgcgggcagagctggatgagctgcggcggcagcgggaggacacagagaaggcccagaggagcctgtctgaaattgaaaggaaggcccaggccaatgagcagcgctacagcaagctgaaggagaagtacagcgagctggtgcagaaccacgccgacctgctgaggaagaatgctgaggtgaccaagcaggtgtccatggcccggcaggcccaggtggacctggagcgggagaagaaggagctggaggacagcctggagcgcatcagtgaccagggccagaggaagacccaggagcagctggaggtgctggagagcctgaagcaggagctggccaccagccagcgggagctgcaggtgctgcagggcagcctggagaccagcgcccagagcgaggccaactgggccgctgagtttgctgagctggagaaggagcgggacagcctggtgtctggggccgcccaccgggaggaggagctgagcgccctgaggaaggagctgcaggacacccagctgaagctggccagcacagaggagagcatgtgccagctggccaaggaccagaggaagatgctgctggtgggcagcaggaaggctgctgagcaggtgatccaggatgccctgaaccagctggaggagcccccactcatcagctgtgccggcagcgctgaccacctgctgagcacagtgaccagcatcagcagctgcatcgagcagctggagaagtcctggagccagtacctggcctgcccagaggacatcagcggcctgctgcacagcatcaccctgctggcccacctgaccagtgatgccatcgcccatggagccaccacctgcctgcgggcccctcctgagcctgctgacagcctgacagaggcctgcaagcagtatggccgggagaccctggcctacctggccagcctggaggaggagggcagcctggagaatgctgacagcacagccatgaggaactgcctgagcaagatcaaggccatcggggaggagctgctgccccggggcctggacatcaagcaggaggagctgggggacctggtggacaaggagatggccgccaccagcgctgccatcgagacagccacagccagaattgaggagatgctgagcaagagccgggccggggacacaggagtgaagctggaggtgaatgaaagaatcctgggctgctgcaccagcctgatgcaggccatccaggtgctgattgtggccagcaaggacctgcagcgggagatcgtggagagcggccggggcacagccagccccaaggagttctacgccaagaacagccgctggacagagggcctcatcagcgccagcaaggctgtgggctggggcgccaccgtgatggtggatgctgctgacctggtggtgcagggccggggcaagtttgaggagctgatggtgtgcagccatgaaattgctgccagcacagcccagctggtggccgccagcaaggtgaaggctgacaaggacagccccaacctggcccagctgcagcaggccagcagaggagtgaaccaggccacagctggggtggtggccagcaccatcagcggcaagagccagatcgaggagacagacaacatggacttcagctccatgaccctgacccagatcaagaggcaggagatggacagccaggtgcgggtgctggagctggagaatgagctgcagaaggagcggcagaagctgggggagctgaggaagaagcactatgagctggccggcgtggccgagggctgggaggagggcacagaggccagcccccccaccctgcaggaggtggtgacagagaaggagtag

SEQ ID NO: 155633 - DNA, 2961 bp, synthetic construct
  misc_feature 1..2961: note = Description of Artificial Sequence: Synthetic coding sequence
  source 1..2961: mol_type = other DNA
atggacaggatggccagctccatgaagcaggtgcccaaccccctgcccaaggtgctgagcagaagaggagtgggcgccggcctggaggccgctgagcgggagagctttgagaggacccagacagtgtccatcaacaaggccatcaacacccaggaggtggccgtgaaggagaagcacgcccggacctgcatcctgggcacccaccacgagaagggggcccagaccttctggagcgtggtgaaccggctgcccctgagcagcaatgctgtgctgtgctggaagttctgccacgtgttccacaagctgctgagagatggccaccccaacgtgctgaaggacagcctgcgctacagaaatgagctgagtgacatgagcaggatgtggggccacctgtctgagggctacggccagctgtgcagcatctacctgaagctgctgcggaccaagatggagtaccacaccaagaacccccgcttccctggcaacctgcagatgtctgaccggcagctggatgaagctggggagagtgatgtgaacaacttcttccagctgactgtggagatgtttgactacctggagtgtgagctgaacctcttccagacagtgttcaacagcctggacatgagccgctctgtgtctgtgacagctgctggccagtgccgcctggcccccctcatccaggtgatcctggactgcagccacctgtatgactacacagtgaagctgctcttcaagctgcacagctgcctgcctgctgacaccctgcagggccaccgggaccgcttcatggagcagttcaccaagctgaaggacctcttctaccgcagcagcaacctgcagtacttcaagaggctcatccagatcccccagctgcctgaaaatccacccaacttcctgcgggccagcgccctgtctgagcacatcagccctgtggtggtgatcccagctgaggccagcagcccagattctgagcctgtgctggagaaggatgacctgatggacatggatgccagccagcagaacctgtttgacaacaagtttgatgacatcttcggcagcagcttcagcagtgaccccttcaacttcaacagccagaatggagtgaacaaggatgagaaggaccacctgattgagcggctgtaccgggagatcagcggcctgaaggcccagctggagaacatgaagacagagagccagagggtggtgctgcagctgaagggccacgtgtctgagctggaggccgacctggccgagcagcagcacctgcggcagcaggccgcagatgactgtgagttcctgcgggcagagctggatgagctgcggcggcagcgggaggacacagagaaggcccagaggagcctgtctgaaattgaaaggaaggcccaggccaatgagcagcgctacagcaagctgaaggagaagtacagcgagctggtgcagaaccacgccgacctgctgaggaagaatgctgaggtgaccaagcaggtgtccatggcccggcaggcccaggtggacctggagcgggagaagaaggagctggaggacagcctggagcgcatcagtgaccagggccagaggaagacccaggagcagctggaggtgctggagagcctgaagcaggagctggccaccagccagcgggagctgcaggtgctgcagggcagcctggagaccagcgcccagagcgaggccaactgggccgctgagtttgctgagctggagaaggagcgggacagcctggtgtctggggccgcccaccgggaggaggagctgagcgccctgaggaaggagctgcaggacacccagctgaagctggccagcacagaggagagcatgtgccagctggccaaggaccagaggaagatgctgctggtgggcagcaggaaggctgctgagcaggtgatccaggatgccctgaaccagctggaggagcccccactcatcagctgtgccggcagcgctgaccacctgctgagcacagtgaccagcatcagcagctgcatcgagcagctggagaagtcctggagccagtacctggcctgcccagaggacatcagcggcctgctgcacagcatcaccctgctggcccacctgaccagtgatgccatcgcccatggagccaccacctgcctgcgggcccctcctgagcctgctgacagcctgacagaggcctgcaagcagtatggccgggagaccctggcctacctggccagcctggaggaggagggcagcctggagaatgctgacagcacagccatgaggaactgcctgagcaagatcaaggccatcggggaggagctgctgccccggggcctggacatcaagcaggaggagctgggggacctggtggacaaggagatggccgccaccagcgctgccatcgagacagccacagccagaattgagggcacagccagccccaaggagttctacgccaagaacagccgctggacagagggcctcatcagcgccagcaaggctgtgggctggggcgccaccgtgatggtggatgctgctgacctggtggtgcagggccggggcaagtttgaggagctgatggtgtgcagccatgaaattgctgccagcacagcccagctggtggccgccagcaaggtgaaggctgacaaggacagccccaacctggcccagctgcagcaggccagccggggcgtgaaccaggccacagctggggtggtggccagcaccatcagcggcaagagccagatcgaggagacagacaacatggacttcagctccatgaccctgacccagatcaagaggcaggagatggacagccaggtgcgggtgctggagctggagaatgagctgcagaaggagcggcagaagctgggggagctgaggaagaagcactatgagctggccggcgtggccgagggctgggaggagggcacagaggccagcccccccaccctgcaggaggtggtgacagagaaggagtag

SEQ ID NO: 155634 - DNA, 3207 bp, synthetic construct
  misc_feature 1..3207: note = Description of Artificial Sequence: Synthetic coding sequence
  source 1..3207: mol_type = other DNA
atgaacagcatcaagaatgtgcctgcccgggtgctgagccggcggcccggccacagcctggaggccgagcgggagcagtttgacaagacccaggccatcagcatcagcaaggccatcaacacccaggaggcccctgtgaaggagaagcacgcccggcgcatcatcctgggcacccaccacgagaagggggccttcaccttctggagctatgccatcggcctgcccctgcccagcagcagcatcctgtcctggaagttctgccacgtgctgcacaaggtgctgagagatggccaccccaacgtgctgcatgactgccagcgctaccgcagcaacatccgggagattggagacctgtggggccacctgcatgacagatatggccagctggtgaatgtgtacaccaagctgctgctgaccaagatctccttccacctgaagcacccccagtttcctgctggcctggaggtgacagatgaggtgctggagaaggctgctggaacagatgtgaacaacatcttccagctgactgtggagatgtttgactacatggactgtgagctgaagctgtctgagagcgtcttccggcagctgaacacagccatcgctgtgtcccagatgagcagcggccagtgccgcctggcccccctcatccaggtgatccaggactgcagccacctgtaccactacacagtgaagctgctcttcaagctgcacagctgcctgcctgctgacaccctgcagggccaccgggaccgcttccacgagcagttccacagcctgaggaacttcttcagaagagccagtgacatgctgtacttcaagaggctcatccagatcccccggctgcctgagggcccccccaacttcctgcgggccagcgccctggccgagcacatcaagcctgtggtggtgattcctgaggaggccccagaagatgaggagcctgagaacctgattgagatcagcactggacctcctgctggggagcctgtggtggtggccgacctgtttgaccagacctttggacctccaaatggatctgtgaaggatgaccgggacctgcagatcgagagcctgaagcgggaggtggagatgctgcggtctgagctggagaagatcaagctggaggcccagcgctacatcgcccagctgaagagccaggtgaatgccctggagggggagctggaggagcagaggaagcagaagcagaaggccctggtggacaatgagcagctgcggcatgagctggcccagctgcgggccgcccagctggagggggagaggagccagggcctgcgggaggaggccgagaggaaggccagcgccacagaggcccgctacaacaagctgaaggagaagcacagcgagctggtgcacgtgcacgccgagctgctgaggaagaatgctgacacagccaagcagctgactgtgacccagcagagccaggaggaggtggcccgggtgaaggagcagctggccttccaggtggagcaggtgaagcgggagagcgagctgaagctggaggagaagagtgaccagctggagaagctgaagcgggagctggaggccaaggccggggagctggcccgggcccaggaggccctgagccacacagagcagagcaagtctgagctgagcagccggctggacaccctgtctgctgagaaggatgccctgagcggggctgtgcggcagcgggaggccgacctgctggccgcccagagcctggtgcgggagacagaggccgccctgagccgggagcagcagaggagcagccaggagcagggcgagctgcagggccgcctggccgagcgggagagccaggagcagggcctgcggcagaggctgctggatgagcagtttgctgtgctgcggggagctgctgctgaggccgccggcatcctgcaggatgctgtgtccaagctggatgaccccctgcacctgcgctgcaccagcagcccagactacctggtgtcccgggcccaggaggccctggatgctgtgtccaccctggaggagggccacgcccagtacctgaccagcctggctgatgccagcgccctggtggccgccctgacccgcttcagccacctggccgctgacaccatcatcaatggaggagccaccagccacctggcccccacagatcctgctgaccggctgattgacacctgcagagaatgtggggcccgggccctggagctgatgggccagctgcaggaccagcaggccctgcggcacatgcaggccagcctggtgaggacccccctgcagggcatcctgcagctgggccaggagctgaagcccaagagcctggatgtgcggcaggaggagctgggcgctgtggtggacaaggagatggccgccaccagcgctgccattgaagatgctgtgagaagaattgaggacatgatgaaccaggcccggcatgccagcagtggagtgaagctggaggtgaatgaaagaatcctgaacagctgcacagacctgatgaaggccatccggctgctggtgaccaccagcaccagcctgcagaaggagatcgtggagagcggcagaggagctgccacccagcaggagttctacgccaagaacagccgctggacagagggcctcatcagcgccagcaaggctgtgggctggggcgccacccagctggtggaggccgctgacaaggtggtgctgcacacaggcaagtatgaggagctgattgtgtgcagccatgaaattgctgccagcacagcccagctggtggccgccagcaaggtgaaggccaacaagcacagcccccacctgagccggctgcaggagtgcagcaggacagtgaatgaaagagctgccaacgtggtggccagcaccaagagcggccaggagcagattgaagatcgggacaccatggacttcagcggcctgagcctcatcaagctgaagaagcaggagatggagacccaggtgcgggtgctggagctggagaagaccctggaggccgagaggatgaggctgggggagctgaggaagcagcactacgtgctggccggggccagcggcagccctggagaggaggtggccatccggcccagcacagcccccaggtctgtgaccaccaagaagccacccctggcccagaagcccagcgtggccccccggcaggaccaccagctggacaagaaggatggcatctacccagcccagctggtgaactactag

SEQ ID NO: 155635 - DNA, 753 bp, synthetic construct
  misc_feature 1..753: note = Description of Artificial Sequence: Synthetic coding sequence
  source 1..753: mol_type = other DNA
atggcccacgtgggcaccagccgggtgggctctgtgctgtccatgagcctgagcatccacctgctggtgcccaccatgaccaagggggagaccgggaagccaggccaccacgaggcccccaggaccctgcaggccttcccctggacctgggcccgggccagccctggggtgtctgtggacatgtctgctggcctgccccagagcctgctgtgctggccaggggcccccctgctgcccaccccacccctgcccagcgccacctacgtgggccacagcctgggcctgccccgggccggcagctctgtgggcccctggttcagcggccgctgggtgggcggggccctggtgcagtggcccctgggcggcggcggccctggctctgtggccgccggcctgggcggccccctggtgcgctggctgctgggcggcggggccctggtgcgctggcccctgggcggcggcggccctggctctgtggccgccggctggggcggcccctggtttggaggccgctgggtgggcggccccccaggctctgtggccgccggctggggcggccctgtgcgctggcccctgggcggcggcggccctggctctgtggccaccggctggggcggcccctggtttggaggccgctgggtgggcggccccccaggctctgtggccgccggctgcggcggggccctggtgcagtggcccctgggcggcggcagcctgcacagcatccccagcttcccccgggcctggaggtag

SEQ ID NO: 155636 - DNA, 2016 bp, synthetic construct
  misc_feature 1..2016: note = Description of Artificial Sequence: Synthetic coding sequence
  source 1..2016: mol_type = other DNA
atgaggcccaagaggctgggccgctgctgtgccggcagccggctgggccctggggaccctgctgccctgacctgtgcccccagccccagcgccagccctgcccctgagcccagcgcccagccccaggcccggggcaccggccagagggtgggcagccgggccaccagcggcagccagttcctgtctgaggccaggactggagcccggcctgccagcgaggccggggccaaggccggggcccggcggcccagcgccttcagcgccatccagggagatgtgcgctccatgccagacaacagtgatgccccctggaccaggtttgtgttccagggccccttcggcagccgggccaccggccggggcaccgggaaggccgccggcatctggaagaccccagctgcctacgtgggccggcggcctggggtgtctggccctgagcgggccgccttcatccgggagctggaggaggccctgtgccccaacctgcccccacctgtgaagaagatcacccaggaggatgtgaaggtgatgctgtacctgctggaggagctgctgccccctgtgtgggagagcgtgacctacggcatggtgctgcagcgggagcgggacctgaacacagctgcccgcatcggccagagcctggtgaagcagaacagcgtgctgatggaggagaacagcaagctggaggccctgctgggcagcgccaaggaggagatcctgtacctgcggcaccaggtgaacctgagagatgagctgctgcagctgtacagcgacagtgatgaggaggatgaagatgaggaggaggaggaggaggagaaggaggccgaggaggagcaggaggaggaggaggccgaggaggacctgcagtgtgcccacccctgtgatgcccccaagctgatcagccaggaggccctgctgcaccagcaccactgcccccagctggaggccctgcaggagaagctgcggctgctggaggaggagaaccaccagctgcgggaggaggccagccagctggacaccctggaggatgaggagcagatgctgatcctggagtgtgtggagcagttcagcgaggccagccagcagatggccgagctgtctgaggtgctggtgctgcggctggagaactatgagcggcagcagcaggaggtggcccggctgcaggcccaggtgctgaagctgcagcagcgctgcaggatgtatggagctgagacagagaagctgcagaagcagctggccagcgagaaggagatccagatgcagctgcaggaggagagcgtgtgggtgggcagccagctgcaggacctgcgggagaagtacatggactgtggcggcatgctgattgagatgcaggaggaggtgaagaccctgcggcagcagccccctgtgtccactggaagtgccacccactacccctacagcgtgcccctggagaccctgcccggcttccaggagaccctggccgaggagctgcggaccagcctgcggaggatgatcagtgaccctgtgtacttcatggagaggaactatgagatgcccaggggggacaccagcagcctgcgctatgacttccgctacagcgaggaccgggagcaggtgcggggctttgaggccgaggagggcctgatgctggccgctgacatcatgagaggagaggacttcaccccagctgaggagtttgtgccccaggaggagctgggcgccgccaagaaggtgcctgctgaggagggcgtgatggaggaggccgagctggtgtctgaggagacagagggctgggaggaggtggagctggagctggatgaggccaccaggatgaatgtggtgaccagcgccctggaggccagcggcctgggccccagccacctggacatgaactacgtgctgcagcagctggccaactggcaggatgcccactaccgccggcagctgcgctggaagatgctgcagaagggggagtgcccccatggagccctgcctgctgccagcaggaccagctgccgcagcagctgcaggtag

SEQ ID NO: 155637 - DNA, 1809 bp, synthetic construct
  misc_feature 1..1809: note = Description of Artificial Sequence: Synthetic coding sequence
  source 1..1809: mol_type = other DNA
atgaggcccaagaggctgggccgctgctgtgccggcagccggctgggccctggggaccctgctgccctgacctgtgcccccagccccagcgccagccctgcccctgagcccagcgcccagccccaggcccggggcaccggccagagggtgggcagccgggccaccagcggcagccagttcctgtctgaggccaggactggagcccggcctgccagcgaggccggggccaaggccggggcccggcggcccagcgccttcagcgccatccagggagatgtgcgctccatgccagacaacagtgatgccccctggaccaggtttgtgttccagggccccttcggcagccgggccaccggccggggcaccgggaaggccgccggcatctggaagaccccagctgcctacgtgggccggcggcctggggtgtctggccctgagcgggccgccttcatccgggagctggaggaggccctgtgccccaacctgcccccacctgtgaagaagatcacccaggaggatgtgaaggtgatgctgtacctgctggaggaggtgtgcacagccttcctgatccagctgctgccccctgtgtgggagagcgtgacctacggcatggtgctgcagcgggagcgggacctgaacacagctgcccgcatcggccagagcctggtgaagcagaacagcgtgctgatggaggagaacagcaagctggaggccctgctgggcagcgccaaggaggagatcctgtacctgcggcaccaggtgaacctgagagatgagctgctgcagctgtacagcgacagtgatgaggaggatgaagatgaggaggaggaggaggaggagaaggaggccgaggaggagcaggaggaggaggaggccgaggaggacctgcagtgtgcccacccctgtgatgcccccaagctgatcagccaggaggccctgctgcaccagcaccactgcccccagctggaggccctgcaggagaagctgcggctgctggaggaggagaaccaccagctgcgggaggaggccagccagctggacaccctggaggatgaggagcagatgctgatcctggagtgtgtggagcagttcagcgaggccagccagcagatggccgagctgtctgaggtgctggtgctgcggctggagaactatgagcggcagcagcaggaggtggcccggctgcaggcccaggtgctgaagctgcagcagcgctgcaggatggagaccctgcccggcttccaggagaccctggccgaggagctgcggaccagcctgcggaggatgatcagtgaccctgtgtacttcatggagagaaattatgagatgcccaggggggacaccagcagcctgcgctatgacttccgctacagtgaagatcgggagcaggtgcggggctttgaagctgaggagggcctgatgctggccgctgacatcatgagaggagaggacttcaccccagctgaggagtttgtgccccaggaggagctgggcgccgccaagaaggtgcctgctgaggagggcgtgatggaggaggccgagctggtgtctgaggagacagagggctgggaggaggtggagctggagctggatgaggccaccaggatgaatgtggtgaccagcgccctggaggccagcggcctgggccccagccacctggacatgaactacgtgctgcagcagctggccaactggcaggatgcccactaccgccggcagctgcgctggaagatgctgcagaagggagaatgtccccacggggccctgcctgctgccagcaggaccagctgccgcagcagctgcaggtag

SEQ ID NO: 155638 - DNA, 1860 bp, synthetic construct
  misc_feature 1..1860: note = Description of Artificial Sequence: Synthetic coding sequence
  source 1..1860: mol_type = other DNA
atgaggcccaagaggctgggccgctgctgtgccggcagccggctgggccctggggaccctgctgccctgacctgtgcccccagccccagcgccagccctgcccctgagcccagcgcccagccccaggcccggggcaccggccagagggtgggcagccgggccaccagcggcagccagttcctgtctgaggccaggactggagcccggcctgccagcgaggccggggccaaggccggggcccggcggcccagcgccttcagcgccatccagggagatgtgcgctccatgccagacaacagtgatgccccctggaccaggtttgtgttccagggccccttcggcagccgggccaccggccggggcaccgggaaggccgccggcatctggaagaccccagctgcctacgtgggccggcggcctggggtgtctggccctgagcgggccgccttcatccgggagctggaggaggccctgtgccccaacctgcccccacctgtgaagaagatcacccaggaggatgtgaaggtgatgctgtacctgctggaggagctgctgccccctgtgtgggagagcgtgacctacggcatggtgctgcagcgggagcgggacctgaacacagctgcccgcatcggccagagcctggtgaagcagaacagcgtgctgatggaggagaacagcaagctggaggccctgctgggcagcgccaaggaggagatcctgtacctgcggcaccaggtgaacctgagagatgagctgctgcagctgtacagcgacagtgatgaggaggatgaagatgaggaggaggaggaggaggagaaggaggccgaggaggagcaggaggaggaggaggccgaggaggacctgcagtgtgcccacccctgtgatgcccccaagctgatcagccaggaggccctgctgcaccagcaccactgcccccagctggaggccctgcaggagaagctgcggctgctggaggaggagaaccaccagctgcgggaggaggccagccagctggacaccctggaggatgaggagcagatgctgatcctggagtgtgtggagcagttcagcgaggccagccagcagatggccgagctgtctgaggtgctggtgctgcggctggagaactatgagcggcagcagcaggaggtggcccggctgcaggcccaggtgctgaagctgcagcagcgctgcaggatgtatggagctgagacagagaagctgcagaagcagctggccagcgagaaggagatccagatgcagctgcaggaggaggagaccctgcccggcttccaggagaccctggccgaggagctgcggaccagcctgcggaggatgatcagtgaccctgtgtacttcatggagaggaactatgagatgcccaggggggacaccagcagcctgcgctatgacttccgctacagcgaggaccgggagcaggtgcggggctttgaggccgaggagggcctgatgctggccgctgacatcatgagaggagaggacttcaccccagctgaggagtttgtgccccaggaggagctgggcgccgccaagaaggtgcctgctgaggagggcgtgatggaggaggccgagctggtgtctgaggagacagagggctgggaggaggtggagctggagctggatgaggccaccaggatgaatgtggtgaccagcgccctggaggccagcggcctgggccccagccacctggacatgaactacgtgctgcagcagctggccaactggcaggatgcccactaccgccggcagctgcgctggaagatgctgcagaagggggagtgcccccatggagccctgcctgctgccagcaggaccagctgccgcagcagctgcaggtag

SEQ ID NO: 155639 - DNA, 1785 bp, synthetic construct
  misc_feature 1..1785: note = Description of Artificial Sequence: Synthetic coding sequence
  source 1..1785: mol_type = other DNA
atgaggcccaagaggctgggccgctgctgtgccggcagccggctgggccctggggaccctgctgccctgacctgtgcccccagccccagcgccagccctgcccctgagcccagcgcccagccccaggcccggggcaccggccagagggtgggcagccgggccaccagcggcagccagttcctgtctgaggccaggactggagcccggcctgccagcgaggccggggccaaggccggggcccggcggcccagcgccttcagcgccatccagggagatgtgcgctccatgccagacaacagtgatgccccctggaccaggtttgtgttccagggccccttcggcagccgggccaccggccggggcaccgggaaggccgccggcatctggaagaccccagctgcctacgtgggccggcggcctggggtgtctggccctgagcgggccgccttcatccgggagctggaggaggccctgtgccccaacctgcccccacctgtgaagaagatcacccaggaggatgtgaaggtgatgctgtacctgctggaggagctgctgccccctgtgtgggagagcgtgacctacggcatggtgctgcagcgggagcgggacctgaacacagctgcccgcatcggccagagcctggtgaagcagaacagcgtgctgatggaggagaacagcaagctggaggccctgctgggcagcgccaaggaggagatcctgtacctgcggcaccaggtgaacctgagagatgagctgctgcagctgtacagcgacagtgatgaggaggatgaagatgaggaggaggaggaggaggagaaggaggccgaggaggagcaggaggaggaggaggccgaggaggacctgcagtgtgcccacccctgtgatgcccccaagctgatcagccaggaggccctgctgcaccagcaccactgcccccagctggaggccctgcaggagaagctgcggctgctggaggaggagaaccaccagctgcgggaggaggccagccagctggacaccctggaggatgaggagcagatgctgatcctggagtgtgtggagcagttcagcgaggccagccagcagatggccgagctgtctgaggtgctggtgctgcggctggagaactatgagcggcagcagcaggaggtggcccggctgcaggcccaggtgctgaagctgcagcagcgctgcaggatggagaccctgcccggcttccaggagaccctggccgaggagctgcggaccagcctgcggaggatgatcagtgaccctgtgtacttcatggagagaaattatgagatgcccaggggggacaccagcagcctgcgctatgacttccgctacagtgaagatcgggagcaggtgcggggctttgaagctgaggagggcctgatgctggccgctgacatcatgagaggagaggacttcaccccagctgaggagtttgtgccccaggaggagctgggcgccgccaagaaggtgcctgctgaggagggcgtgatggaggaggccgagctggtgtctgaggagacagagggctgggaggaggtggagctggagctggatgaggccaccaggatgaatgtggtgaccagcgccctggaggccagcggcctgggccccagccacctggacatgaactacgtgctgcagcagctggccaactggcaggatgcccactaccgccggcagctgcgctggaagatgctgcagaagggagaatgtccccacggggccctgcctgctgccagcaggaccagctgccgcagcagctgcaggtag

SEQ ID NO: 155640 - DNA, 837 bp, synthetic construct
  misc_feature 1..837: note = Description of Artificial Sequence: Synthetic coding sequence
  source 1..837: mol_type = other DNA
atgaagttccgggccaagatcaccgggaagggctgcctggagctgttcatccacgtgtctggcaccgtggcccggctggccaaggtgtgtgtgctgcgggtgcggccagacagcctgtgctttggacctgctggcagcggcggcctgcacgaggcccggctgtggtgtgaggtgcggcagggcgccttccagcagttcaggatggagggcgtgtctgaggacctggatgagatccacctggagctgacagctgagcacctgagccgggccgcccggtctgctgctggggccagcagcctgaagctgcagctgacccacaagaggcggcccagcctgactgtggccgtggagctggtgagcagcctgggccgggcccggtctgtggtgcatgacctgcctgtgcgggtgctgcccaggagagtgtggagggactgcctgccccccagcctgcgggccagtgatgccagcatccggctgccccgctggaggaccctgcggagcatcgtggagaggatggccaacgtgggcagccacgtgctggtggaggccaacctgagcggccgcatgaccctgagcattgaaacagaggtggtgtccatccagagctacttcaagaacctgggcaaccccccccagagcgctgtgggcgtgcctgaaaatagagacctggagagcatggtgcaggtgcgggtggacaacaggaagctgctgcagttcctggagggccagcagatccaccccaccacagccctgtgcaacatctgggacaacaccctgctgcagctggtgctggtgcaggaggatgtgtccctgcagtacttcatcccagccctgtag

SEQ ID NO: 155641 - DNA, 1065 bp, synthetic construct
  misc_feature 1..1065: note = Description of Artificial Sequence: Synthetic coding sequence
  source 1..1065: mol_type = other DNA
atgaagagcctgctgctgctggtgctgatcagcatctgctgggccgaccacctgagtgacaactacaccctggaccatgaccgggccatccacatccaggctgaaaatggcccccacctgctggtggaggccgagcaggccaaggtgttcagccaccggggcggcaatgtgaccctgccctgcaagttctacagagaccccacagccttcggcagcggcatccacaagatccgcatcaagtggaccaagctgaccagtgactacctgaaggaggtggatgtgtttgtgtccatgggctaccacaagaagacctatggaggctaccagggccgggtcttcctgaagggcggcagtgacagtgatgccagcctggtgatcacagacctgaccctggaggactatggccgctacaagtgtgaggtgattgagggcctggaggatgacacagtggtggtggccctggacctgcagggcgtggtgttcccctacttcccccggctgggccgctacaacctgaacttccacgaggcccagcaggcctgcctggaccaggatgctgtgattgccagctttgaccagctgtatgatgcctggaggggcggcctggactggtgcaatgccggctggctgagtgatggctctgtgcagtaccccatcaccaagccccgggagccctgtggcggccagaacacagtgcctggggtgaggaactacggcttctgggacaaggacaagagccgctatgatgtgttctgcttcaccagcaacttcaacggccgcttctactacctgatccaccccaccaagctgacctatgatgaagctgtgcaggcctgcctgaatgatggagcccagatcgccaaggtgggccagatctttgctgcctggaagatcctgggctatgacagatgtgatgctggctggctggctgatggctctgtgcgctaccccatcagccggccccggcggcgctgcagccccacagaggccgctgtgcgctttgtgggcttcccagacaagaagcacaagctgtatggagtgtactgcttccgggcctacaactag

SEQ ID NO: 155642 - DNA, 549 bp, synthetic construct
  misc_feature 1..549: note = Description of Artificial Sequence: Synthetic coding sequence
  source 1..549: mol_type = other DNA
atgaagagcctgctgctgctggtgctgatcagcatctgctgggccgaccacctgagtgacaactacaccctggaccatgaccgggccatccacatccaggagaatggcccccacctgctggtggaggccgagcaggccaaggtgttcagccacagaggaggaaatgtgaccctgccctgcaagttctacagagaccccacagcctttggaagtggcatccacaagatccgcatcaagtggaccaagctgaccagtgactacctgaaggaggtggatgtgtttgtgtccatgggctaccacaagaagacctacggcggctaccagggccgggtcttcctgaagggcggcagtgacagtgatgccagcctggtgatcacagacctgaccctggaggactatggccgctacaagtgtgaggtgattgagggcctggaggatgacacagtggtggtggccctggacctgcagggcgtggtgttcccctacttcccccggctgggccgctacaacctgaacttccacgaggcccagcaggcctgcctggactag

SEQ ID NO: 155643 - DNA, 477 bp, synthetic construct
  misc_feature 1..477: note = Description of Artificial Sequence: Synthetic coding sequence
  source 1..477: mol_type = other DNA
atgaagagcctgctgctgctggtgctgatcagcatctgctgggccgaccacctgagtgacaactacaccctggaccatgaccgggccatccacatccaggctgaaaatggcccccacctgctggtggaggccgagcaggccaaggtgttcagccaccggggcggcaatgtgaccctgccctgcaagttctacagagaccccacagccttcggcagcggcatccacaagatccgcatcaagtggaccaagctgaccagtgactacctgaaggaggtggatgtgtttgtgtccatgggctaccacaagaagacctatggaggctaccagggccgggtcttcctgaagggcggcagtgacagtgatgccagcctggtgatcacagacctgaccctggaggactatggccgctacaagtgtgaggtgattgagggcctggaggatgacacagtggtggtggccctggacctgcagggctag

SEQ ID NO: 155644 - DNA, 600 bp, synthetic construct
  misc_feature 1..600: note = Description of Artificial Sequence: Synthetic coding sequence
  source 1..600: mol_type = other DNA
atgaagagcctgctgctgctggtgctgatcagcatctgctgggccgaccacctgagtgacaactacaccctggaccatgaccgggccatccacatccaggctgaaaatggcccccacctgctggtggaggccgagcaggccaaggtgttcagccaccggggcggcaatgtgaccctgccctgcaagttctacagagaccccacagccttcggcagcggcatccacaagatccgcatcaagtggaccaagctgaccagtgactacctgaaggaggtggatgtgtttgtgtccatgggctaccacaagaagacctatggaggctaccagggccgggtcttcctgaagggcggcagtgacagtgatgccagcctggtgatcacagacctgaccctggaggactatggccgctacaagtgtgaggtgattgagggcctggaggatgacacagtggtggtggccctggacctgcagggcgtggtgttcccctacttcccccggctgggccgctacaacctgaacttccacgaggcccagcaggcctgcctggaccaggatgctgtgattgccagctttgaccagctgtatgatgcctggaggtag

SEQ ID NO: 155645 - DNA, 777 bp, synthetic construct
  misc_feature 1..777: note = Description of Artificial Sequence: Synthetic coding sequence
  source 1..777: mol_type = other DNA
atgaagagcctgctgctgctggtgctgatcagcatctgctgggccgaccacctgagtgacaactacaccctggaccatgaccgggccatccacatccaggctgaaaatggcccccacctgctggtggaggccgagcaggccaaggtgttcagccaccggggcggcaatgtgaccctgccctgcaagttctacagagaccccacagccttcggcagcggcatccacaagatccgcatcaagtggaccaagctgaccagtgactacctgaaggaggtggatgtgtttgtgtccatgggctaccacaagaagacctatggaggctaccagggccgggtcttcctgaagggcggcagtgacagtgatgccagcctggtgatcacagacctgaccctggaggactatggccgctacaagtgtgaggtgattgagggcctggaggatgacacagtggtggtggccctggacctgcagggcgtggtgttcccctacttcccccggctgggccgctacaacctgaacttccacgaggcccagcaggcctgcctggaccaggatgctgtgattgccagctttgaccagctgtatgatgcctggaggggcggcctggactggtgcaatgccggctggctgagtgatggctctgtgcagtaccccatcaccaagccccgggagccctgtggcggccagaacacagtgcctggggtgaggaactacggcttctgggacaaggacaagagccgctatgatgtgttctgcttcaccagcaacttcaactag

SEQ ID NO: 155646 - DNA, 462 bp, synthetic construct
  misc_feature 1..462: note = Description of Artificial Sequence: Synthetic coding sequence
  source 1..462: mol_type = other DNA
atgaagagcctgctgctgctggtgctgatcagcatctgctgggccgaccacctgagtgacaactacaccctggaccatgaccgggccatccacatccaggctgaaaatggcccccacctgctggtggaggccgagcaggccaaggtgttcagccaccggggcggcaatgtgaccctgccctgcaagttctacagagaccccacagccttcggcagcggcatccacaagatccgcatcaagtggaccaagctgaccagtgactacctgaaggaggtggatgtgtttgtgtccatgggctaccacaagaagacctatggaggctaccagggccgggtcttcctgaagggcggcagtgacagtgatgccagcctggtgatcacagacctgaccctggaggactatggccgctacaagtgtgaggtgattgagggcctggaggatgacacagtggtggtggcctag

SEQ ID NO: 155647 - DNA, 1683 bp, synthetic construct
  misc_feature 1..1683: note = Description of Artificial Sequence: Synthetic coding sequence
  source 1..1683: mol_type = other DNA
atgtttgccaggatgtctgacctgcacgtgctgctgctgatggccctggtgggcaagacagcctgtggcttcagcctgatgagcctgctggagagcctggaccctgactggaccccagaccagtatgactacagctatgaggactacaaccaggaggagaacaccagcagcaccctgacccatgctgaaaatccagactggtactacacagaggaccaggccgacccctgccagcccaacccctgtgagcacggcggggactgcctggtgcacggcagcaccttcacctgcagctgcctggcccccttcagcggcaacaagtgccagaaggtgcagaacacctgcaaggacaacccctgtggccggggccagtgcctgatcacccagagccccccctactaccgctgtgtgtgcaagcacccctacacaggccccagctgcagccaggtggtgcctgtgtgccggcccaacccctgccagaatggagccacctgcagccgccacaagaggaggagcaagttcacctgtgcctgcccagaccagttcaagggcaagttctgtgaaattggaagtgatgactgctacgtgggagatggctacagctaccggggcaagatgaacagaacagtgaaccagcacgcctgcctgtactggaacagccacctgctgctgcaggagaactacaacatgttcatggaggatgctgagacccacggcatcggggagcacaacttctgcagaaatccagatgctgatgagaagccctggtgcttcatcaaggtgaccaatgacaaggtgaagtgggagtactgtgatgtgtctgcctgcagcgcccaggatgtggcctacccagaggagagccccacagagcccagcaccaagctgcccggctttgacagctgtgggaagacagaaattgctgagaggaagatcaagaggatctatggaggcttcaagagcacagctgggaagcacccctggcaggccagcctgcagagcagcctgcccctgaccatctccatgccccagggccacttctgtggcggggccctgatccacccctgctgggtgctgacagctgcccactgcacagacatcaagaccaggcacctgaaggtggtgctgggggaccaggacctgaagaaggaggagttccacgagcagagcttccgggtggagaagatcttcaagtacagccactacaatgaaagagatgagatcccccacaatgacatcgccctgctgaagctgaagcctgtggatggccactgtgccctggagagcaaatatgtgaagacagtgtgcctgcctgatggcagcttccccagcggcagcgagtgccacatcagcggctggggcgtgacagaaacaggcaagggcagccggcagctgctggatgccaaggtgaagctgattgccaacaccctgtgcaacagccggcagctgtatgaccacatgattgatgacagcatgatctgtgccggcaacctgcagaagccaggccaggacacctgccagggcgacagcggcggccccctgacctgtgagaaggatggcacctactacgtgtatggcatcgtgtcctggggcctggagtgtgggaagaggcctggggtgtacacccaggtgaccaagttcctgaactggatcaaggccaccatcaagtctgagagcggcttctag

SEQ ID NO: 155648 - DNA, 534 bp, synthetic construct
  misc_feature 1..534: note = Description of Artificial Sequence: Synthetic coding sequence
  source 1..534: mol_type = other DNA
atggaggagaacttcatctgcagcaggaagaccatggccctgagcagcacctggatcctgagccccaagaagacaggccccctgacctccatgatcacagccacccgcatcatcatcaggaagaggacccctgtggcccacctgcccaccctgcgcatcctgaccggcaccaccctgcggaccaagctgattcatgccagccccacccctgtgaacacagtgggcacagccagctccatgggcgcccccagccacgccgccgcctggctgctgagcctgggcatctctgtgaggaagtgcaagatccgggcccggaccacccacgtggccggggccaacgtgtccctgccccgggtgctgcccaccacagctgtgtctgtgaacaccctgacccaggtgcctgctgcccccaagtggttcctgtatgccggccagaccccagccaggatgggcctgcctgcccctggcatcagcggggaccccagcagccctgtgcctgtgcccaccagcagccggggcaacagcgtgaagtag

SEQ ID NO: 155649 - DNA, 843 bp, synthetic construct
  misc_feature 1..843: note = Description of Artificial Sequence: Synthetic coding sequence
  source 1..843: mol_type = other DNA
atgtttgccaggatgtctgacctgcacgtgctgctgctgatggccctggtgggcaagacagcctgtggcttcagcctgatgagcctgctggagagcctggaccctgactggaccccagaccagtatgactacagctatgaggactacaaccaggaggagaacaccagcagcaccctgacccatgctgaaaatccagactggtactacacagaggaccaggccgacccctgccagcccaacccctgtgagcacggcggggactgcctggtgcacggcagcaccttcacctgcagctgcctggcccccttcagcggcaacaagtgccagaaggtgcagaacacctgcaaggacaacccctgtggccggggccagtgcctgatcacccagagccccccctactaccgctgtgtgtgcaagcacccctacacaggccccagctgcagccaggtggtgcctgtgtgccggcccaacccctgccagaatggagccacctgcagccgccacaagaggaggagcaagttcacctgtgcctgcccagaccagttcaagggcaagttctgtgaaattggaagtgatgactgctacgtgggagatggctacagctaccggggcaagatgaacagaacagtgaaccagcacgcctgcctgtactggaacagccacctgctgctgcaggagaactacaacatgttcatggaggatgctgagacccacggcatcggggagcacaacttctgcagaaatccagatgctgatgagaagccctggtgcttcatcaaggtgaccaatgacaaggtgaagtgggagtactgtgatgtgtctgcctgcagcgcccaggcctag

SEQ ID NO: 155650 - DNA, 1605 bp, synthetic construct
  misc_feature 1..1605: note = Description of Artificial Sequence: Synthetic coding sequence
  source 1..1605: mol_type = other DNA
atgagcctgctggagagcctggaccctgactggaccccagaccagtatgactacagctatgaggactacaaccaggaggagaacaccagcagcaccctgacccatgctgaaaatccagactggtactacacagaggaccaggccgacccctgccagcccaacccctgtgagcacggcggggactgcctggtgcacggcagcaccttcacctgcagctgcctggcccccttcagcggcaacaagtgccagaaggtgcagaacacctgcaaggacaacccctgtggccggggccagtgcctgatcacccagagccccccctactaccgctgtgtgtgcaagcacccctacacaggccccagctgcagccaggtggtgcctgtgtgccggcccaacccctgccagaatggagccacctgcagccgccacaagaggaggagcaagttcacctgtgcctgcccagaccagttcaagggcaagttctgtgaaattggaagtgatgactgctacgtgggagatggctacagctaccggggcaagatgaacagaacagtgaaccagcacgcctgcctgtactggaacagccacctgctgctgcaggagaactacaacatgttcatggaggatgctgagacccacggcatcggggagcacaacttctgcagaaatccagatgctgatgagaagccctggtgcttcatcaaggtgaccaatgacaaggtgaagtgggagtactgtgatgtgtctgcctgcagcgcccaggatgtggcctacccagaggagagccccacagagcccagcaccaagctgcccggctttgacagctgtgggaagacagaaattgctgagaggaagatcaagaggatctatggaggcttcaagagcacagctgggaagcacccctggcaggccagcctgcagagcagcctgcccctgaccatctccatgccccagggccacttctgtggcggggccctgatccacccctgctgggtgctgacagctgcccactgcacagacatcaagaccaggcacctgaaggtggtgctgggggaccaggacctgaagaaggaggagttccacgagcagagcttccgggtggagaagatcttcaagtacagccactacaatgaaagagatgagatcccccacaatgacatcgccctgctgaagctgaagcctgtggatggccactgtgccctggagagcaaatatgtgaagacagtgtgcctgcctgatggcagcttccccagcggcagcgagtgccacatcagcggctggggcgtgacagaaacaggcaagggcagccggcagctgctggatgccaaggtgaagctgattgccaacaccctgtgcaacagccggcagctgtatgaccacatgattgatgacagcatgatctgtgccggcaacctgcagaagccaggccaggacacctgccagggcgacagcggcggccccctgacctgtgagaaggatggcacctactacgtgtatggcatcgtgtcctggggcctggagtgtgggaagaggcctggggtgtacacccaggtgaccaagttcctgaactggatcaaggccaccatcaagtctgagagcggcttctag

SEQ ID NO: 155651 - DNA, 1656 bp, synthetic construct
  misc_feature 1..1656: note = Description of Artificial Sequence: Synthetic coding sequence
  source 1..1656: mol_type = other DNA
atgctgcccctgctgctgctgcccctgctgtggggcggcagcctgcaggagaagcctgtgtatgagctgcaggtgcagaagtctgtgacagtgcaggagggcctgtgtgtgctggtgccctgcagcttctcctacccctggaggtcctggtacagcagcccccccctgtatgtgtactggttcagagatggagagatcccctactatgcagaggtggtggccaccaacaacccagaccggcgggtgaagccagagacccagggccgcttccggctgctgggagatgtgcagaagaagaactgcagcctgagcattggagatgccaggatggaggacaccggcagctacttcttccgggtggagcggggcagagatgtgaagtacagctaccagcagaacaagctgaacctggaggtgacagccctgattgagaagccagacatccacttcctggagcccctggagagcggccggcccacccggctgagctgcagcctgcccggcagctgtgaggccggcccccccctgaccttctcctggacaggaaatgccctgagccccctggaccctgagaccaccaggagcagcgagctgaccctgacccccaggccagaagatcatggcaccaacctgacctgccagatgaagaggcagggcgcccaggtgaccacagagaggacagtgcagctgaatgtgtcctatgccccccagaccatcaccatcttcagaaatggcatcgccctggagatcctgcagaacaccagctacctgcctgtgctggagggccaggccctgcggctgctgtgtgatgcccccagcaaccccccagcccacctgtcctggttccagggcagccctgccctgaatgccacccccatcagcaacacaggcatcctggagctgcggcgggtgcgctctgctgaggagggcggcttcacctgccgggcccagcaccccctgggcttcctgcagatcttcctgaacctgtctgtgtacagcctgccccagctgctgggccccagctgctcctgggaggccgagggcctgcactgccgctgcagcttccgggcccggcctgcccccagcctgtgctggaggctggaggagaagcccctggagggcaacagcagccagggcagcttcaaggtgaacagcagcagcgctggcccctgggccaacagcagcctcatcctgcatggaggcctgagcagtgacctgaaggtgtcctgcaaggcctggaacatctacggcagccagagcggctctgtgctgctgctgcagggccgcagcaacctgggcaccggggtggtgcctgctgccctgggcggggccggcgtgatggccctgctgtgcatctgcctgtgcctgatcttcttcctgattgtgaaggcccggaggaagcaggccgccggccggcctgagaagatggatgatgaggaccccatcatgggcaccatcaccagcggcagcaggaagaagccctggccagacagccctggggaccaggccagccccccaggagatgccccacccctggaggagcagaaggagctgcactacgccagcctgtccttcagcgagatgaagagccgggagcccaaggaccaggaggcccccagcaccacagagtacagcgagatcaagaccagcaagtag

SEQ ID NO: 155652 - DNA, 558 bp, synthetic construct
  misc_feature 1..558: note = Description of Artificial Sequence: Synthetic coding sequence
  source 1..558: mol_type = other DNA
atgttccgggaggtgtttgctgatgaagatcctgccacctacgtgtgggatggcaactaccaccagccctgggagcctgctgctgctggagctgtgggcgctggggcctaccgggaggtggaggctgaagatcctggccgcctggccgtggaggccctggtgaggacccggcgctgtgtgtgtgtggcccagcgctggggcggcaagcgggaggtgatgtacacagccttcaaggccctgggggacagcgtggactatgtgcagttctgccgggtgtgtgacagcgacacccggctggaccccatggccctgctggagctggtgcgggtgctggatgaggacccccgggtgggcgctgtgggcggagatgtgcgcatcctgaaccccctggacagctgggtgtccttcctgagcagcctgcgctactgggtggccttcaacgtggagcgggcctgccagagctacttccactgtgtgtcctgcatcagcggccccctgggcaccccacctggccctgctgccacccagaggcggccccggcccagctgtggcggctag

SEQ ID NO: 155653 - DNA, 645 bp, synthetic construct
  misc_feature 1..645: note = Description of Artificial Sequence: Synthetic coding sequence
  source 1..645: mol_type = other DNA
atgttccgggaggtgtttgctgatgaagatcctgccacctacgtgtgggatggcaactaccaccagccctgggagcctgctgctgctggagctgtgggcgctggggcctaccgggaggtggaggctgaagatcctggccgcctggccgtggaggccctggtgaggacccggcgctgtgtgtgtgtggcccagcgctggggcggcaagcgggaggtgatgtacacagccttcaaggccctgggggacagcgtggactatgtgcaggtgtgtgacagcgacacccggctggaccccatggccctgctggagctggtgcgggtgctggatgaggacccccgggtgggcgctgtgggcggagatgtgcgcatcctgaaccccctggacagctgggtgtccttcctgagcagcctgcgctactgggtggccttcaacgtggagcgggcctgccagagctacttccactgtgtgtcctgcatcagcggccccctggagagctgccccggcccccgggagcacgccatgatgcccagcttcctggcccctgtgcaggtgcacctgcaggtgcccctgctgctgagagatgccctggtgctgcctgctgtggccgagcctgctgacaccctggtgcaggtggtgctgccctag

SEQ ID NO: 155654 - DNA, 1734 bp, synthetic construct
  misc_feature 1..1734: note = Description of Artificial Sequence: Synthetic coding sequence
  source 1..1734: mol_type = other DNA
atgaggcaggatgcccccaagcccaccccagctgcctgccgctgcagcggcctggcccggcgggtgctgaccatcgcctttgccctgctgatcctgggcctgatgacctgggcctatgctgctggggtgcccctggccagtgacagatatggcctgctggccttcggcctgtatggagccttcctgagcgcccacctggtggcccagagcctgtttgcctacctggagcaccggcgggtggccgctgctgcccggggccccctggatgctgccacagcccggtctgtggccctgaccatcagcgcctaccaggaggaccctgcctacctgcggcagtgcctggccagcgcccgggccctgctgtacccccgggcccggctgcgggtgctgatggtggtggatggcaacagagcagaagatctctacatggtggacatgttccgggaggtgtttgctgatgaggaccctgccacctacgtgtgggatggcaactaccaccagccctgggagcctgctgctgctggagctgtgggcgctggggcctaccgggaggtggaggccgaggaccccggccgcctggccgtggaggccctggtgaggacccggcgctgtgtgtgtgtggcccagcgctggggcggcaagcgggaggtgatgtacacagccttcaaggccctgggggacagcgtggactatgtgcaggtgtgtgacagcgacacccggctggaccccatggccctgctggagctggtgcgggtgctggatgaggacccccgggtgggcgctgtgggcggagatgtgcgcatcctgaaccccctggacagctgggtgtccttcctgagcagcctgcgctactgggtggccttcaacgtggagcgggcctgccagagctacttccactgtgtgtcctgcatcagcggccccctgggcctgtacagaaacaacctgctgcagcagttcctggaggcctggtacaaccagaagttcctgggcacccactgcacctttggagatgacagacacctgaccaacaggatgctgtccatgggctacgccaccaagtacaccagccgcagccgctgctacagcgagacccccagcagcttcctgcgctggctgagccagcagacccgctggagcaagagctacttccgggagtggctgtacaatgccctgtggtggcaccgccaccacgcctggatgacctatgaggccgtggtgtctggcctcttccccttctttgtggccgccaccgtgctgcggctcttctacgccggccggccctgggccctgctgtgggtgctgctgtgtgtgcagggcgtggccctggccaaggccgcctttgctgcctggctgcggggctgcctgaggatggtgctgctgagcctgtatgcccccctgtacatgtgtggcctgctgcctgccaagttcctggccctggtgaccatgaaccagagcggctggggcaccagcggccgcaggaagctggccgccaactacgtgcccctgctgcccctggccctgtgggccctgctgctgctgggcggcctggtgcgctctgtggcccacgaggcccgggctgactggagcggccccagcagagctgctgaggcctaccacctggccgccggggccggggcctacgtgggctactgggtggccatgctgaccctgtactgggtgggcgtgcggcggctgtgcagaagaagaactggaggctacagagtgcaggtgtag

SEQ ID NO: 155655 - DNA, 1659 bp, synthetic construct
  misc_feature 1..1659: note = Description of Artificial Sequence: Synthetic coding sequence
  source 1..1659: mol_type = other DNA
atgcactgtgagcgcttcctgtgcatcctgcgcatcatcggcaccaccctgtttggagtgtccctgctgctgggcatcacagctgcctacatcgtgggctaccagttcatccagacagacaactactacttctcctttggcctgtatggagccttcctggccagccacctgatcatccagagcctgtttgccttcctggagcacaggaagatgaagaagagcctggagacccccatcaagctgaacaagacagtggccctgtgcatcgccgcctaccaggaggaccctgactacctgaggaagtgcctgcagagcgtgaagaggctgacctacccaggcatcaaggtggtgatggtgattgatggcaacagtgaagatgacctgtacatgatggacatcttcagcgaggtgatgggccgggacaagagcgccacctacatctggaagaacaacttccacgagaagggccctggagaaacagatgagagccacaaggagagcagccagcacgtgacccagctggtgctgagcaacaagagcatctgcatcatgcagaagtggggcggcaagcgggaggtgatgtacacagccttccgggccctgggccgctctgtggactatgtgcaggtgtgtgacagcgacaccatgctggaccctgccagctctgtggagatggtgaaggtgctggaggaggaccccatggtgggcggcgtgggcggagatgtgcagatcctgaacaagtatgacagctggatctccttcctgagctctgtgcgctactggatggccttcaacatcgagcgggcctgccagagctacttcggctgtgtgcagtgcatcagcggccccctgggcatgtacagaaacagcctgctgcatgaatttgtggaggactggtacaaccaggagttcatgggcaaccagtgcagctttggagatgacagacacctgaccaacagagtgctgagcctgggctacgccaccaagtacacagcccggagcaagtgcctgacagagacccccatcgagtacctgcgctggctgaaccagcagacccgctggagcaagagctacttccgggagtggctgtacaatgccatgtggttccacaagcaccacctgtggatgacctatgaggccatcatcaccggcttcttccccttcttcctgattgccaccgtcatccagctgttctaccggggcaagatctggaacatcctgctcttcctgctgactgtgcagctggtgggcctcatcaagagcagctttgccagctgcctgcggggcaacatcgtgatggtgttcatgagcctgtacagcgtgctgtacatgagcagcctgctgcctgccaagatgtttgccatcgccaccatcaacaaggccggctggggcaccagcggcaggaagaccatcgtggtgaacttcatcggcctcatccctgtgtctgtgtggttcaccatcctgctgggcggcgtcatcttcaccatctacaaggagagcaagaggcccttcagcgagagcaagcagacagtgctgattgtgggcaccctgctgtatgcctgctactgggtgatgctgctgaccctgtatgtggtgctgatcaacaagtgtggccgcaggaagaagggccagcagtatgacatggtgctggatgtgtag

SEQ ID NO: 155656 - DNA, 951 bp, synthetic construct
  misc_feature 1..951: note = Description of Artificial Sequence: Synthetic coding sequence
  source 1..951: mol_type = other DNA
atgcactgtgagcgcttcctgtgcatcctgcgcatcatcggcaccaccctgtttggagtgtccctgctgctgggcatcacagctgcctacatcgtgggctaccagttcatccagacagacaactactacttctcctttggcctgtatggagccttcctggccagccacctgatcatccagagcctgtttgccttcctggagcacaggaagatgaagaagagcctggagacccccatcaagctgaacaagacagtggccctgtgcatcgccgcctaccaggaggaccctgactacctgaggaagtgcctgcagagcgtgaagaggctgacctacccaggcatcaaggtggtgatggtgattgatggcaacagtgaagatgacctgtacatgatggacatcttcagcgaggtgatgggccgggacaagagcgccacctacatctggaagaacaacttccacgagaagggccctggagaaacagatgagagccacaaggagagcagccagcacgtgacccagctggtgctgagcaacaagagcatctgcatcatgcagaagtggggcggcaagcgggaggtgatgtacacagccttccgggccctgggccgctctgtggactatgtgcaggtgtgtgacagcgacaccatgctggaccctgccagctctgtggagatggtgaaggtgctggaggaggaccccatggtgggcggcgtgggcggagatgtgcagatcctgaacaagtatgacagctggatctccttcctgagctctgtgcgctactggatggccttcaacatcgagcgggcctgccagagctacttcggctgtgtgcagtgcatcagcggccccctgggcatgtacagaaacagcctgctgcacgtgctgacctttgctgtgacccacaacaccctggtgcccctgggcgctgtgcagtactgcggcatcagatag

SEQ ID NO: 155657 - DNA, 1389 bp, synthetic construct
  misc_feature 1..1389: note = Description of Artificial Sequence: Synthetic coding sequence
  source 1..1389: mol_type = other DNA
atggcccaggtgtccatcaacaatgactacagcgagtgggacctgagcacagatgctggggagcgggcccggctgctgcagagcccctgtgtggacacagcccccaagtctgagtgggaggccagccctgggggcctggaccggggcaccaccagcaccctgggcgccatcttcatcgtggtgaatgcctgcctgggcgccggcctgctgaacttccctgctgccttcagcacagctggaggagtggccgccggcatcgccctgcagatgggcatgctggtgttcatcatcagcggcctggtgatcctggcctactgcagccaggccagcaatgaaagaacctaccaggaggtggtgtgggccgtgtgtgggaagctgactggagtgctgtgtgaggtggccatcgctgtgtacaccttcggcacctgcatcgccttcctgatcatcatcggggaccagcaggacaagatcatcgctgtgatggccaaggagcctgagggcgccagcggcccctggtacacagacaggaagttcaccatcagcctgacagccttcctgttcatcctgcccctgagcatcccccgggagatcggcttccagaagtatgccagcttcctgtctgtggtgggcacctggtacgtgacagccatcgtcatcatcaagtacatctggccagacaaggagatgaccccaggcaacatcctgaccaggcctgcctcctggatggctgtgttcaatgccatgcccaccatctgcttcggcttccagtgccacgtgtcctctgtgcctgtgttcaacagcatgcagcagcctgaggtgaagacctggggcggcgtggtgacagctgccatggtgattgccctggccgtgtacatgggcaccggcatctgtggcttcctgaccttcggggctgctgtggaccctgatgtgctgctgagctaccccagcgaggacatggctgtggccgtggcccgggccttcatcatcctgtctgtgctgaccagctaccccatcctgcacttctgtggccgggctgtggtggagggcctgtggctgcgctaccagggcgtgcctgtggaggaggatgtgggccgggagaggagaagaagagtgctgcagaccctggtgtggttcctgctgaccctgctgctggccctcttcatcccagacatcggcaaggtgatcagcgtcatcggcggcctggccgcctgcttcatctttgtgtttcctggcctgtgcctgatccaggccaagctgtctgagatggaggaggtgaagccagcctcctggtgggtgctggtgtcctatggagtgctgctggtgaccctgggcgccttcatcttcggccagaccacagccaatgccatctttgtggacctgctggcctag

SEQ ID NO: 155658 - DNA, 1662 bp, synthetic construct
  misc_feature 1..1662: note = Description of Artificial Sequence: Synthetic coding sequence
  source 1..1662: mol_type = other DNA
atgcctgtgcagctgaccacagccctgcgggtggtgggcaccagcctgtttgccctggccgtgctgggcggcatcctggccgcctacgtgacaggctaccagttcatccacacagagaagcactacctgagctttggcctgtatggagccatcctgggcctgcacctgctgatccagagcctgtttgccttcctggagcacaggaggatgagaagagctggccaggccctgaagctgcccagcccccggcggggctctgtggccctgtgcatcgccgcctaccaggaggaccctgactacctgaggaagtgcctgcggagcgcccagaggatctccttcccagacctgaaggtggtgatggtggtggatggcaaccggcaggaggatgcctacatgctggacatcttccacgaggtgctgggcggcacagagcaggccggcttctttgtgtggaggagcaacttccacgaggccggggagggggagacagaggccagcctgcaggagggcatggacagagtgagagatgtggtgcgggccagcaccttcagctgcatcatgcagaagtggggcggcaagcgggaggtgatgtacacagccttcaaggccctgggggacagcgtggactacatccaggtgtgtgacagcgacacagtgctggaccctgcctgcaccatcgagatgctgcgggtgctggaggaggacccccaggtgggcggcgtgggcggagatgtgcagatcctgaacaagtatgacagctggatctccttcctgagctctgtgcgctactggatggccttcaacgtggagcgggcctgccagagctacttcggctgtgtgcagtgcatcagcggccccctgggcatgtacagaaacagcctgctgcagcagttcctggaggactggtaccaccagaagttcctgggcagcaaatgttcctttggagatgacagacacctgaccaacagagtgctgagcctgggctaccgcaccaagtacacagcccggagcaagtgcctgacagagacccccaccaagtacctgcgctggctgaaccagcagacccgctggagcaagagctacttccgggagtggctgtacaacagcctgtggttccacaagcaccacctgtggatgacctatgaatctgtggtgacaggcttcttccccttcttcctgattgccaccgtcatccagctgttctaccggggccgcatctggaacatcctgctcttcctgctgactgtgcagctggtgggcatcatcaaggccacctacgcctgcttcctgcggggaaatgctgagatgatcttcatgagcctgtacagcctgctgtacatgagcagcctgctgcctgccaagatctttgccatcgccaccatcaacaagagcggctggggcaccagcggcaggaagaccatcgtggtgaacttcatcggcctcatccctgtgtccatctgggtggccgtgctgctgggcggcctggcctacacagcctactgccaggacctcttcagcgagacagagctggccttcctggtgtctggggccatcctgtatggctgctactgggtggccctgctgatgctgtacctggccatcatcgcccggcgctgtgggaagaagccagagcagtacagcctggcctttgctgaggtgtag

SEQ ID NO: 155659 - DNA, 1308 bp, synthetic construct
  misc_feature 1..1308: note = Description of Artificial Sequence: Synthetic coding sequence
  source 1..1308: mol_type = other DNA
atggccgcccacctgctgcccatctgtgccctcttcctgaccctgctggacatggcccagggcttccggggccccctgctgcccaaccggcccttcaccaccgtgtggaatgccaacacccagtggtgcctggagagacatggagtggatgtggatgtgtctgtgtttgatgtggtggccaaccctggccagaccttccggggccctgacatgaccatcttctacagcagccagctgggcacctacccctactacacccccaccggggagcctgtgtttggaggcctgccccagaatgccagcctgattgcccacctggcccggaccttccaggacatcctggccgccatcccagccccagacttcagcggcctggccgtcatcgactgggaggcctggaggccccgctgggccttcaactgggacaccaaggacatctaccggcagaggagccgggccctggtgcaggcccagcacccagactggccagccccccaggtggaggccgtggcccaggaccagttccagggcgccgcccgggcctggatggccggcaccctgcagctgggccgggccctgcggccccggggcctgtggggcttctacggcttcccagactgctacaactatgacttcctgagccccaactacacaggccagtgccccagcggcatccgggcccagaatgaccagctgggctggctgtggggccagagccgggccctgtaccccagcatctacatgcctgctgtgctggagggcaccgggaagagccagatgtatgtgcagcaccgggtggccgaggccttccgggtggccgtggccgccggggaccccaacctgcctgtgctgccctacgtgcagatcttctatgacaccaccaaccacttcctgcccctggatgagctggagcacagcctgggggagagcgctgcccagggcgccgccggcgtggtgctgtgggtgtcctgggagaacaccaggaccaaggagagctgccaggccatcaaggagtacatggacaccaccctgggccccttcatcctgaatgtgaccagcggggccctgctgtgcagccaggccctgtgcagcggccacggccgctgtgtgcggaggaccagccaccccaaggccctgctgctgctgaacccagccagcttcagcatccagctgaccccaggcggcggccccctgagcctgcggggggccctgagcctggaggaccaggcccagatggctgtggagttcaagtgccgctgctacccaggctggcaggccccctggtgtgagaggaagtccatgtggtag

SEQ ID NO: 155660 - DNA, 1308 bp, synthetic construct; identical to SEQ ID NO: 155659
  misc_feature 1..1308: note = Description of Artificial Sequence: Synthetic coding sequence
  source 1..1308: mol_type = other DNA

SEQ ID NO: 155661 - DNA, 1218 bp, synthetic construct
  misc_feature 1..1218: note = Description of Artificial Sequence: Synthetic coding sequence
  source 1..1218: mol_type = other DNA
atggccgcccacctgctgcccatctgtgccctcttcctgaccctgctggacatggcccagggcttccggggccccctgctgcccaaccggcccttcaccaccgtgtggaatgccaacacccagtggtgcctggagagacatggagtggatgtggatgtgtctgtgtttgatgtggtggccaaccctggccagaccttccggggccctgacatgaccatcttctacagcagccagctgggcacctacccctactacacccccaccggggagcctgtgtttggaggcctgccccagaatgccagcctgattgcccacctggcccggaccttccaggacatcctggccgccatcccagccccagacttcagcggcctggccgtcatcgactgggaggcctggaggccccgctgggccttcaactgggacaccaaggacatctaccggcagaggagccgggccctggtgcaggcccagcacccagactggccagccccccaggtggaggccgtggcccaggaccagttccagggcgccgcccgggcctggatggccggcaccctgcagctgggccgggccctgcggccccggggcctgtggggcttctacggcttcccagactgctacaactatgacttcctgagccccaactacacaggccagtgccccagcggcatccgggcccagaatgaccagctgggctggctgtggggccagagccgggccctgtaccccagcatctacatgcctgctgtgctggagggcaccgggaagagccagatgtatgtgcagcaccgggtggccgaggccttccgggtggccgtggccgccggggaccccaacctgcctgtgctgccctacgtgcagatcttctatgacaccaccaaccacttcctgcccctggagagctgccaggccatcaaggagtacatggacaccaccctgggccccttcatcctgaatgtgaccagcggggccctgctgtgcagccaggccctgtgcagcggccacggccgctgtgtgcggaggaccagccaccccaaggccctgctgctgctgaacccagccagcttcagcatccagctgaccccaggcggcggccccctgagcctgcggggggccctgagcctggaggaccaggcccagatggctgtggagttcaagtgccgctgctacccaggctggcaggccccctggtgtgagaggaagtccatgtggtag

SEQ ID NO: 155662 - DNA, 1308 bp, synthetic construct; identical to SEQ ID NO: 155659
  misc_feature 1..1308: note = Description of Artificial Sequence: Synthetic coding sequence
  source 1..1308: mol_type = other DNA

SEQ ID NO: 155663 - DNA, 312 bp, synthetic construct
  misc_feature 1..312: note = Description of Artificial Sequence: Synthetic coding sequence
  source 1..312: mol_type = other DNA
atggccgcccacctgctgcccatctgtgccctcttcctgaccctgctggacatggcccagggcttccggggccccctgctgcccaaccggcccttcaccaccgtgtggaatgccaacacccagtggtgcctggagagacatggagtggatgtggatgtgtctgtgtttgatgtggtggccaaccctggccagaccttccggggccctgacatgaccatcttctacagcagccagctgggcacctacccctactacacccccaccggggagcctgtgtttggaggcctgccccagaatgccagcctcatctag

SEQ ID NO: 155664 - DNA, 531 bp, synthetic construct
  misc_feature 1..531: note = Description of Artificial Sequence: Synthetic coding sequence
  source 1..531: mol_type = other DNA
atgtatgtgcagcaccgggtggccgaggccttccgggtggccgtggccgccggggaccccaacctgcctgtgctgccctacgtgcagatcttctatgacaccaccaaccacttcctgcccctggatgagctggagcacagcctgggggagagcgctgcccagggcgctgctggggtggtgctgtgggtgtcctgggagaacaccaggaccaaggagagctgccaggccatcaaggagtacatggacaccaccctgggccccttcatcctgaatgtgaccagcggggccctgctgtgcagccaggccctgtgcagcggccacggccgctgtgtgcggaggaccagccaccccaaggccctgctgctgctgaacccagccagcttcagcatccagctgacccctgggggcggccccctgagcctgcggggggccctgagcctggaggaccaggcccagatggctgtggagttcaagtgccgctgctacccaggctggcaggccccctggtgtgagaggaagtccatgtggtag

SEQ ID NO: 155665 - DNA, 210 bp, synthetic construct
  misc_feature 1..210: note = Description of Artificial Sequence: Synthetic coding sequence
  source 1..210: mol_type = other DNA
atggccgcccacctgctgcccatctgtgccctcttcctgaccctgctggacatggcccagggcttccggggccccctgctgcccaaccggcccttcaccaccgtgtggaatgccaacacccagtggtgcctggagagacatggagtggatgtggatgtgtctgtgtttgatgtggtggccaaccctggccagaccttccggggcccctag

SEQ ID NO: 155666 - DNA, 762 bp, synthetic construct
  misc_feature 1..762: note = Description of Artificial Sequence: Synthetic coding sequence
  source 1..762: mol_type = other DNA
atggccggcaccctgcagctgggccgggccctgcggccccggggcctgtggggcttctacggcttcccagactgctacaactatgacttcctgagccccaactacacaggccagtgccccagcggcatccgggcccagaatgaccagctgggctggctgtggggccagagccgggccctgtaccccagcatctacatgcctgctgtgctggagggcaccgggaagagccagatgtatgtgcagcaccgggtggccgaggccttccgggtggccgtggccgccggggaccccaacctgcctgtgctgccctacgtgcagatcttctatgacaccaccaaccacttcctgcccctggatgagctggagcacagcctgggggagagcgctgcccagggcgccgccggcgtggtgctgtgggtgtcctgggagaacaccaggaccaaggagagctgccaggccatcaaggagtacatggacaccaccctgggccccttcatcctgaatgtgaccagcggggccctgctgtgcagccaggccctgtgcagcggccacggccgctgtgtgcggaggaccagccaccccaaggccctgctgctgctgaacccagccagcttcagcatccagctgaccccaggcggcggccccctgagcctgcggggggccctgagcctggaggaccaggcccagatggctgtggagttcaagtgccgctgctacccaggctggcaggccccctggtgtgagaggaagtccatgtggtag

SEQ ID NO: 155667 - DNA, 1422 bp, synthetic construct
  misc_feature 1..1422: note = Description of Artificial Sequence: Synthetic coding sequence
  source 1..1422: mol_type = other DNA
atgagagctggccctggccccaccgtgaccctggccctggtgctggccgtgtcctgggccatggagctgaagcccacagccccacccatcttcaccggccggccctttgtggtggcctgggatgtgcccacccaggactgtggcccccggctgaaggtgcccctggacctgaatgcctttgatgtgcaggccagccccaatgaaggatttgtgaaccagaacatcaccatcttctacagagaccggctgggcctgtaccccaggtttgattctgctggccgctctgtgcatggaggagtgccccagaatgtgtccctgtgggcccacaggaagatgctgcagaagagggtggagcactacatccgcacccaggagagcgctggcctggccgtcatcgactgggaggactggaggcctgtgtgggtgaggaactggcaggacaaggatgtgtaccgccgcctgagccggcagctggtggccagccgccacccagactggcccccagacagaattgtgaagcaggcccagtatgaatttgaatttgctgcccagcagttcatgctggagaccctgcgctacgtgaaggctgtgcggcccaggcacctgtggggcttctacctgttcccagactgctacaaccacgactatgtgcagaactgggagagctacacaggccgctgcccagatgtggaggtggccagaaatgaccagctggcctggctgtgggccgagagcacagccctcttccccagcgtgtacctggatgagaccctggccagcagcagacatggaagaaactttgtgtccttccgggtgcaggaggccctgcgggtggcccggacccaccacgccaaccacgccctgcctgtgtatgtgttcacccggcccacctacagccggcggctgaccggcctgtctgagatggacctgatcagcaccatcggggagagcgctgccctgggcgctgctggggtcatcctgtggggagatgctggctacaccaccagcacagagacctgccagtacctgaaggactacctgacccggctgctggtgccctacgtggtgaatgtgtcctgggccacccagtactgcagccgggcccagtgccacggccacggccgctgtgtgagaagaaaccccagcgccagcaccttcctgcacctgagcaccaacagcttccggctggtgcccggccacgcccctggagagccccagctgcggcctgtgggggagctgtcctgggccgacatcgaccacctgcagacccacttccgctgccagtgctacctgggctggagcggggagcagtgccagtgggaccaccggcaggccgccggcggggccagcgaggcctgggccggcagccacctgaccagcctgctggccctggccgccctggccttcacctggaccctgtag

SEQ ID NO: 155668 - DNA, 1422 bp, synthetic construct; identical to SEQ ID NO: 155667
  misc_feature 1..1422: note = Description of Artificial Sequence: Synthetic coding sequence
  source 1..1422: mol_type = other DNA

SEQ ID NO: 155669 - DNA, 147 bp, synthetic construct
  misc_feature 1..147: note = Description of Artificial Sequence: Synthetic coding sequence
  source 1..147: mol_type = other DNA
atgagagctggccctggccccaccgtgaccctggccctggtgctggccgtgtcctgggccatggagctgaagcccacagccccacccatcttcaccggccggccctttgtggtggcctgggatgtgcccacccaggactgtggctag

SEQ ID NO: 155670 - DNA, 354 bp, synthetic construct
  misc_feature 1..354: note = Description of Artificial Sequence: Synthetic coding sequence
  source 1..354: mol_type = other DNA
atgagagctggccctggccccaccgtgaccctggccctggtgctggccgtgtcctgggccatggagctgaagcccacagccccacccatcttcaccggccggccctttgtggtggcctgggatgtgcccacccaggactgtggcccccggctgaaggtgcccctggacctgaatgcctttgatgtgcaggccagccccaatgaaggatttgtgaaccagaacatcaccatcttctacagagaccggctgggcctgtaccccaggtttgattctgctggccgctctgtgcatggaggagtgccccagaatgtgtccctgtgggcccacaggaagatgctgcagaagagggtgtag

SEQ ID NO: 155671 - DNA, 246 bp, synthetic construct
  misc_feature 1..246: note = Description of Artificial Sequence: Synthetic coding sequence
  source 1..246: mol_type = other DNA
atgagagctggccctggccccaccgtgaccctggccctggtgctggccgtgtcctgggccatggagctgaagcccacagccccacccatcttcaccggccggccctttgtggtggcctgggatgtgcccacccaggactgtggcccccggctgaaggtgcccctggacctgaatgcctttgatgtgcaggccagccccaatgaaggatttgtgaaccagaacatcaccatcttctacagagactag

SEQ ID NO: 155672 - DNA, 231 bp, synthetic construct
  misc_feature 1..231: note = Description of Artificial Sequence: Synthetic coding sequence
  source 1..231: mol_type = other DNA
atgagagctggccctggccccaccgtgaccctggccctggtgctggccgtgtcctgggccatggagctgaagcccacagccccacccatcttcaccggccggccctttgtggtggcctgggatgtgcccacccaggactgtggcccccggctgaaggtgcccctggacctgaatgcctttgatgtgcaggccagccccaatgaaggatttgtgaaccagaacatcacctag

SEQ ID NO: 155673 - DNA, 1422 bp, synthetic construct; identical to SEQ ID NO: 155667
  misc_feature 1..1422: note = Description of Artificial Sequence: Synthetic coding sequence
  source 1..1422: mol_type = other DNA

SEQ ID NO: 155674 - DNA, 1422 bp, synthetic construct; identical to SEQ ID NO: 155667
  misc_feature 1..1422: note = Description of Artificial Sequence: Synthetic coding sequence
  source 1..1422: mol_type = other DNA

SEQ ID NO: 155675 - DNA, 366 bp, synthetic construct
  misc_feature 1..366: note = Description of Artificial Sequence: Synthetic coding sequence
  source 1..366: mol_type = other DNA
atgagagctggccctggccccaccgtgaccctggccctggtgctggccgtgtcctgggccatggagctgaagcccacagccccacccatcttcaccggccggccctttgtggtggcctgggatgtgcccacccaggactgtggcccccggctgaaggtgcccctggacctgaatgcctttgatgtgcaggccagccccaatgaaggatttgtgaaccagaacatcaccatcttctacagagaccggctgggcctgtaccccaggtttgattctgctggccgctctgtgcatggaggagtgccccagaatgtgtccctgtgggcccacaggaagatgctgcagaagagggtggagcactacatctag

SEQ ID NO: 155676 - DNA, 1254 bp, synthetic construct
  misc_feature 1..1254: note = Description of Artificial Sequence: Synthetic coding sequence
  source 1..1254: mol_type = other DNA
atgaccacccagctgggccctgccctggtgctgggcgtggccctgtgcctgggctgcggccagcccctgccccaggtgcctgagcggcccttctctgtgctgtggaatgtgcccagcgcccactgtgaggcccgcttcggcgtgcacctgcccctgaatgccctgggcatcatcgccaacagaggccagcacttccacggccagaacatgaccatcttctacaagaaccagctgggcctgtacccctacttcggcccccggggcacagcccacaacggcggcatcccccaggccctgcccctggacagacacctggccctggccgcctaccagatccaccacagcctgcggcccggctttgctggccctgctgtgctggactgggaggagtggtgccccctgtgggccggcaactggggcagaagaagagcctaccaggccgcctcctgggcctgggcccagcaggtgtttcctgacctggacccccaggagcagctgtacaaggcctacacaggctttgagcaggccgcccgggccctgatggaggacaccctgcgggtggcccaggccctgcggccccacggcctgtggggcttctaccactacccagcctgtggaaatggctggcacagcatggccagcaactacacaggccgctgccacgccgccaccctggccaggaacacccagctgcactggctgtgggccgccagcagcgccctcttccccagcatctacctgcccccccggctgcccccagcccaccaccaggcctttgtgcgccaccggctggaggaggccttccgggtggccctggtgggccaccgccaccccctgcctgtgctggcctacgtgcggctgacccaccggcgcagcggccgcttcctgagccaggatgacctggtgcagagcattggagtgtctgctgccctgggcgccgccggcgtggtgctgtggggagacctgagcctgagcagcagcgaggaggagtgctggcacctgcatgactacctggtggacaccctgggcccctacgtgatcaacgtgacccgggccgccatggcctgcagccaccagcgctgccacggccacggccgctgtgcccggcgggaccccggccagatggaggccttcctgcacctgtggccagatggcagcctgggggactggaagagcttcagctgccactgctactggggctgggccggccccacctgccaggagcccaggcctggccccaaggaggccgtgtag

SEQ ID NO: 155677 - DNA, 1164 bp, synthetic construct
  misc_feature 1..1164: note = Description of Artificial Sequence: Synthetic coding sequence
  source 1..1164: mol_type = other DNA
atgaccacccagctgggccctgccctggtgctgggcgtggccctgtgcctgggctgcggccagcccctgccccaggtgcctgagcggcccttctctgtgctgtggaatgtgcccagcgcccactgtgaggcccgcttcggcgtgcacctgcccctgaatgccctgggcatcatcgccaacagaggccagcacttccacggccagaacatgaccatcttctacaagaaccagctgggcctgtacccctacttcggcccccggggcacagcccacaacggcggcatcccccaggccctgcccctggacagacacctggccctggccgcctaccagatccaccacagcctgcggcccggctttgctggccctgctgtgctggactgggaggagtggtgccccctgtgggccggcaactggggcagaagaagagcctaccaggccgcctcctgggcctgggcccagcaggtgtttcctgacctggacccccaggagcagctgtacaaggcctacacaggctttgagcaggccgcccgggccctgatggaggacaccctgcgggtggcccaggccctgcggccccacggcctgtggggcttctaccactacccagcctgtggaaatggctggcacagcatggccagcaactacacaggccgctgccacgccgccaccctggccaggaacacccagctgcactggctgtgggccgccagcagcgccctcttccccagcatctacctgcccccccggctgcccccagcccaccaccaggcctttgtgcgccaccggctggaggaggccttccgggtggccctggtgggccaccgccaccccctgcctgtgctggcctacgtgcggctgacccaccggcgcagcggccgcttcctgagccaggaggagtgctggcacctgcatgactacctggtggacaccctgggcccctacgtgatcaacgtgacccgggccgccatggcctgcagccaccagcgctgccacggccacggccgctgtgcccggcgggaccccggccagatggaggccttcctgcacctgtggccagatggcagcctgggggactggaagagcttcagctgccactgctactggggctgggccggccccacctgccaggagcccaggcctggccccaaggaggccgtgtag

SEQ ID NO: 155678 - DNA, 507 bp, synthetic construct
  misc_feature 1..507: note = Description of Artificial Sequence: Synthetic coding sequence
  source 1..507: mol_type = other DNA
atgctgcccccagcccaccaccaggcctttgtgcgccaccggctggaggaggccttccgggtggccctggtgggccaccgccaccccctgcctgtgctggcctacgtgcggctgacccacagaagaagtggccgcttcctgagccaggatgacctggtgcagagcattggagtgtctgctgccctgggcgctgctggggtggtgctgtggggagacctgagcctgagcagcagcgaggaggagtgctggcacctgcatgactacctggtggacaccctgggcccctacgtgatcaacgtgaccagggctgccatggcctgcagccaccagcgctgccacggccacggccgctgtgcccggcgggaccccggccagatggaggccttcctgcacctgtggccagatggcagcctgggggactggaagagcttcagctgccactgctactggggctgggccggccccacctgccaggagccccggcccggccccaaggaggccgtgtag

SEQ ID NO: 155679 - DNA, 483 bp, synthetic construct
  misc_feature 1..483: note = Description of Artificial Sequence: Synthetic coding sequence
  source 1..483: mol_type = other DNA
atgaccacccagctgggccctgccctggtgctgggcgtggccctgtgcctgggctgcggccagcccctgccccaggtgcctgagcggcccttctctgtgctgtggaatgtgcccagcgcccactgtgaggcccgcttcggcgtgcacctgcccctgaatgccctgggcatcatcgccaacagaggccagcacttccacggccagaacatgaccatcttctacaagaaccagctgggcctgtacccctacttcggcccccggggcacagcccacaacggcggcatcccccaggccctgcccctggacagacacctggccctggccgcctaccagatccaccacagcctgcggcccggctttgctggccctgctgtgctggactgggaggagtggtgccccctgtgggccggcaactggggcagaagaagagcctaccaggccgcctcctgggcctgggcccagcaggtgtttcctgacctgtag

SEQ ID NO: 155680 - DNA, 1164 bp, synthetic construct; identical to SEQ ID NO: 155677
  misc_feature 1..1164: note = Description of Artificial Sequence: Synthetic coding sequence
  source 1..1164: mol_type = other DNA

SEQ ID NO: 155681 - DNA, 417 bp, synthetic construct
  misc_feature 1..417: note = Description of Artificial Sequence: Synthetic coding sequence
  source 1..417: mol_type = other DNA
atgctgcccccagcccaccaccaggcctttgtgcgccaccggctggaggaggccttccgggtggccctggtgggccaccgccaccccctgcctgtgctggcctacgtgcggctgacccacagaagaagtggccgcttcctgagccaggaggagtgctggcacctgcatgactacctggtggacaccctgggcccctacgtgatcaacgtgaccagggctgccatggcctgcagccaccagcgctgccacggccacggccgctgtgcccggcgggaccccggccagatggaggccttcctgcacctgtggccagatggcagcctgggggactggaagagcttcagctgccactgctactggggctgggccggccccacctgccaggagccccggcccggccccaaggaggccgtgtag

SEQ ID NO: 155682 - DNA, 1518 bp, synthetic construct
  misc_feature 1..1518: note = Description of Artificial Sequence: Synthetic coding sequence
  source 1..1518: mol_type = other DNA
atgagctctgtgcagcagcagcccccaccaccccggcgggtgaccaacgtgggcagcctgctgctgaccccccaggagaatgaaagcctcttcaccttcctgggcaagaagtgtgtgaccatgagcagcgctgtggtgcagctgtatgctgctgacaggaactgcatgtggagcaagaagtgcagcggcgtggcctgcctggtgaaggacaacccccagaggagctacttcctgcgcatctttgacatcaaggatggcaagctgctgtgggagcaggagctgtacaacaactttgtgtacaacagcccccggggctacttccacacctttgctggggacacctgccaggtggccctgaactttgccaatgaggaggaggccaagaagttcaggaaggctgtgacagacctgctgggccggcggcagaggaagtctgagaagaggcgggaccccccaaatggccccaacctgcccatggccaccgtggacatcaagaaccctgagatcaccaccaaccgcttctacggcccccaggtgaacaacatcagccacaccaaggagaagaagaagggcaaggccaagaagaagaggctgaccaaggctgacatcggcacccccagcaacttccagcacatcggccacgtgggctgggaccccaacacaggctttgacctgaacaacctggaccctgagctgaagaacctgtttgacatgtgtggcatcagcgaggcccagctgaaggaccgggagaccagcaaggtgatctatgacttcatcgagaagacaggaggagtggaggccgtgaagaatgagctgcggcggcaggcccctcctcctcctccacccagcagaggaggccccccacctcctcctcctccaccccacaacagcggccccccacctcctccagcccggggccgcggggcccctcctcctccacccagccgggcccccacagctgcccctcctcctcctccacccagccggcccagcgtggccgtgcccccacctccacccaacaggatgtacccacctcctcctccagccctgcccagcagcgcccccagcggccccccacctcctccacccagcgtgctgggcgtgggccctgtggcccctcctcctcctcctcctcctcctcctcctcctggccccccacctcctcctggcctgcccagtgatggagaccaccaggtgcccaccacagctggcaacaaggccgccctgctggaccagatccgggagggcgcccagctgaagaaggtggagcagaacagcaggcctgtgtcctgcagcggcagagatgccctgctggaccagatccggcagggcatccagctgaagtctgtggctgatggccaggagagcaccccacccaccccagcccccaccagcggcatcgtgggcgccctgatggaggtgatgcagaagaggagcaaggccatccacagcagtgatgaagatgaagatgaagatgatgaagaagattttgaagatgatgatgagtgggaggactag

SEQ ID NO: 155683 - DNA, 1446 bp, synthetic construct
  misc_feature 1..1446: note = Description of Artificial Sequence: Synthetic coding sequence
  source 1..1446: mol_type = other DNA
atgaaggtgctgtctgagggccagctgaagctgtgtgtggtgcagcctgtgcacctgacctcctggctgctgatcttcttcatcctgaagagcatcagctgcctgaagccagcccggctgcccatctaccagaggaagcccttcatcgccgcctggaatgcccccacagaccagtgcctgatcaagtacaacctgcggctgaacctgaagatgtttcctgtgattggcagccccctggccaaggcccggggccagaatgtgaccatcttctacgtgaaccggctgggctactacccctggtacaccagccagggcgtgcccatcaatggaggcctgccccagaacatcagcctgcaggtgcacctggagaaggctgaccaggacatcaactactacatcccagctgaggacttcagcggcctggccgtcatcgactgggagtactggaggccccagtgggccaggaactggaacagcaaggatgtgtaccggcagaagagcaggaagctgatcagtgacatgggcaagaatgtgtctgccacagacatcgagtacctggccaaggtgacctttgaggagagcgccaaggccttcatgaaggagaccatcaagctgggcatcaagagccggcccaagggcctgtggggctactacctgtacccagactgccacaactacaacgtgtatgcccccaactacagcggcagctgcccagaagatgaggtgctgaggaacaatgagctgtcctggctgtggaacagcagcgctgccctgtaccccagcattggagtgtggaagagcctgggggacagcgagaacatcctgcgcttcagcaagttccgggtgcatgagagcatgaggatcagcaccatgaccagccatgactatgccctgcctgtgtttgtgtacacccggctgggctacagagatgagcccctcttcttcctgagcaagcaggacctggtgtccaccatcggggagagcgctgccctgggcgccgccggcatcgtcatctggggagacatgaacctgacagccagcaaggccaactgcaccaaggtgaagcagtttgtgtccagtgacctgggcagctacatcgccaacgtgaccagggctgctgaggtgtgcagcctgcacctgtgcaggaacaacggccgctgcatcaggaagatgtggaatgcccccagctacctgcacctgaacccagccagctaccacatcgaggcctctgaagatggagagttcaccgtgaagggcaaggccagtgacacagacctggccgtgatggctgacaccttcagctgccactgctaccagggctatgaaggagctgactgccgggagatcaagacagcagatggctgcagcggcgtgagccccagccctggcagcctgatgaccctgtgcctgctgctgctggccagctaccgcagcatccagctgtag

SEQ ID NO: 155684 - DNA, 138 bp, synthetic construct
  misc_feature 1..138: note = Description of Artificial Sequence: Synthetic coding sequence
  source 1..138: mol_type = other DNA
atgaaggtgctgtctgagggccagctgaagctgtgtgtggtgcagcctgtgcacctgacctcctggctgctgatcttcttcatcctgaagagcatcagctgcctgaagccagcccggctgcccatctaccagaggtag

SEQ ID NO: 155685 - DNA, 192 bp, synthetic construct
  misc_feature 1..192: note = Description of Artificial Sequence: Synthetic coding sequence
  source 1..192: mol_type = other DNA
atgaaggtgctgtctgagggccagctgaagctgtgtgtggtgcagcctgtgcacctgacctcctggctgctgatcttcttcatcctgaagagcatcagctgcctgaagccagcccggctgcccatctaccagaggaagcccttcatcgccgcctggaatgcccccacagaccagtgcctgatcaagtactag

SEQ ID NO: 155686 - DNA, 15366 bp, synthetic construct
  misc_feature 1..15366: note = Description of Artificial Sequence: Synthetic coding sequence
  source 1..15366: mol_type = other DNA
atgaccagccggcggctggaggagagcatgggcgctgtgcagatgggcctggtgaacatgttcaagggcttccagagcaaggtgctgccccccctgagccccaaggtggtgacagaggaggaggtgaacaggatgctgaccccatctgagttcctgaaggagatgagcctgaccacagagcagaggctggccaagacccggctgatgtgccggccccagatcatcgagctgctggacatgggagagaccacccaccagaagttctctggaattgacctggaccaggccctcttccagcccttccccagcgagatcatcttccagaactacaccccctgtgaggtgtatgaggtgcccctcatcctgagaaataatgacaagatcccccggctggtgaaggtggtggaggagagcagcccctacttcaaggtgatcagccccaaggacatcggccacaaggtggcccctggggtgcccagcatcttccgcatcctcttcaccccagaggagaacaaggactatgcccacaccctgacctgtgtgacagagcgggagaagttcatcgtgcccatcaaggcccggggggcccgggccatcctggacttcccagacaagctgaacttcagcacctgccctgtgaagtacagcacccagaagatcctgctggtgaggaacatcggcaacaagaatgctgtgttccacatcaagacctgccggcccttcagcattgaaccagccatcggcaccctgaatgtgggggagagcatgcagctggaggtggagtttgagccccagagcgtgggggaccacagcggccgcctgattgtgtgctatgacaccggggagaaggtgtttgtgtccctgtatggagctgccatcgacatgaacatccggctggacaagaacagcctgaccatcgagaagacctacatcagcctggccaaccagaggaccatcaccatccacaacagaagcaacatcatcgcccacttcctgtggaaggtgtttgccacccagcaggaggaggaccgggagaagtaccgggcctgtgatgacctgatcaaggaggagaaggatgaaacagatgagttctttgaggagtgcatcacagaccccctgctgcgggagcacctgtctgtgctgagcaggacctttgccaaccagaggcggctggtgcagggcgacagcaagctgttcttcaacaacgtgttcaccgtggagcccctggagggagatgtgtggcccaacagcagcgctgagatcaccgtgtacttcaaccccctggaggccaagctgtaccagcagaccatctactgtgacatcctgggccgggagatccggctgcccctgcgcatcaagggggagggcatgggccccaagatccacttcaactttgagctgctggacatcggcaaggtgttcaccggcagcgcccactgctatgaggccatcctgtacaacaagggcagcattgatgccctcttcaacatgaccccacccaccagcgccctgggcgcctgctttgtgttcagccccaaggagggcatcatcgagcccagcggcgtgcaggccatccagatctccttcagcagcaccatcctgggcaactttgaggaggagttcctggtgaatgtgaatggcagccctgagcctgtgaagctgaccatccggggctgtgtgattggccccaccttccacttcaacgtgcctgccctgcactttggagatgtgtcctttggcttcccccacaccctcatctgcagcctgaacaacaccagcctcatccccatgacctacaagctgcgcatccctggagatggcctgggccacaagagcatctcctactgtgagcagcacgtggactacaagaggcccagctggaccaaggaggagatcagctccatgaagcccaaggagttcaccatcagcccagactgtggcaccatccggccccagggctttgctgccatccgggtgaccctgtgcagcaacacagtgcagaagtatgagctggccctggtggtggatgtggagggcatcggggaggaggtgctggccctgctgatcacagcccgctgtgtggtgcctgccctgcacctggtgaacacagaggtggactttggccactgcttcctgaagtacccctatgagaagaccctgcagctggccaaccaggatgacctgcccggcttctatgaggtgcagccccaggtgtgtgaggaggtgcccaccgtgctcttcagcagccccaccccatctggagtcatcagccccagcagcaccatccacatccccctggtgctggagacccaggtgactggagagcacaggagcacagtgtacatcagcatcttcggcagccaggacccccccctggtgtgccacctgaagtctgctggggagggccctgtgatctacgtgcaccccaaccaggtggactttggaaacatctacgtgctgaaggacagcagccgcatcctgaacctgtgcaaccagagcttcatcccagccttcttccaggcccacatggcccacaagaagagcctgtggaccatcgagcccaatgaaggcatggtgcccccagagacagatgtgcagctggccctgacagccaacctgaatgacaccctgaccttcaaggactgtgtgatcctggacatcgagaacagcagcacctaccgcatccctgtgcaggccagcggcaccggcagcaccatcgtgtctgacaagccctttgcccctgagctgaacctgggcgcccacttcagcctggacacccactactaccacttcaagctgatcaacaagggccgccgcatccagcagctgttctggatgaatgacagcttccggccccaggccaagctgagcaagaagggccgggtgaagaagggccacgcccacgtgcagccccagcccagcggcagccaggagccccgggacccccagagccctgtgttccacctgcacccagcctccatggagctgtacccaggccaggccattgatgtgatcctggagggctacagcgccaccccaagaattgtgaaggagaagctggtgtgccacgccatcatcggggcccagaagggcaagagcctggtgatggctgtgaacatcacctgtgaatttgtggcccccctcatccagctgagcaccaagcagctgatctaccgcctggagaagaagcccaacagcatcctgaagccagactaccagcccctggccatcaagaacatcagcaccctgcctgtgaacctgctgctgagcaccagcggccccttcttcatctgtgaaacagacaagagcctgctgcctgccaccccagagcccatcaagctggagattgatgaggagaagaacctgctgatcaagtttgaccccagctacagaaatgacctgaacaactgggtggccgaggagatcctggccatcaagtatgtggagcacccccagattgacagcctggacctgcggggggaggtgcactaccccaacctgagctttgagaccaaggagctggactttggctgcatcctgaatgacacagagctgatccgctacgtgaccatcaccaactgcagccccctggtggtgaagttccgctggttcttcctggtgaatgatgaggagaaccagatccgctttgtgaccctgcccaagaagccctacagcgcccctgtgtcccagatggagagcatcccagccaccagcgaggccgccagccccccagccatcctggtgacagtggagagccctgagatggacctgaatgactttgtgaagacagtgctggtggatgaagatgcccggcctgaggagaaggagctgaggaagaccaaggccagcagcgtcatcagtgatgagatcaagatcagcagcacagaaattgagcgcatctacagcagccagagccaggtggaggaccaggagagcctgcagacctgtgagcagaatgagatgctgagcatcggcatcgaggaggtgtttgacatcctgcccctgtttggagtgctgcagccccacagcagccaccagatctccttcaccttctacggccacgccaacatcatcgcccaggccaaggccctgtgtgaggtggaggagggccccacctatgagatcaccctgaagggggaggccagcctggtgaactacagctttgacaccaaggacatccactacggcctgcagctgtttgaccacgtgacagagcgggagatcaccctgaccaacatgggcaaggtgggctttgagttcaaggtgctgacagaccaccagagcagcccagacaacctgctgcccggggtgcccctcatcctgcctgtgtctggcttcatcagcagccaccaggagcaggtgctgaaggtgtactacctgcccggggtgcctgaggtgttcaagaggagcttccagatccagatcgcccacctggaccctgagaacatcaccctgagcggggagggcatcttcccccagatctgcctggacctgcccaggaacctgacagccaatgagaagtatgagatgttcctgaaccaggccaggaagaacacagacaaggagtacaacaagtgtgagatgctggaccactttgacatcatcacagaggaggtgcctgaagatgagcctgctgaggtgtctgcccacctgcagatggaggtggagcggctgattgtgcagagctatgtgctggagcaccagaagaccaccaccccagaccccatggatgacccctgcttcagccacaggagcaggaggaagctggccaagatccagctgcctgagtacatcctggactttggctacatcatcctgggggaggtgaggacccacatcatcaagatcatcaacaccagccacttccctgtgtccttccacgccgacaagagggtgctgcacgagaccggcttcagcacagagctggacagagtgaagaacctgccccactgtgaaacagagatctttgaggtgcgctttgacccccagggcgccaacctgcctgtgggcagcaaggaggtgatcctgcccatcaaggtggtgggcggccccaccgtgcacatctgcctgcaggccaaggtgaccatccccaccatgaccctgagccggggcaaggtggactttgccaccatccagtgtggccagtgcctggtggagaccatccagctgagcaaccacctgcaggtgccctgtgagtggtttgtgcagagccagaagcctgtggacaagctggagaagcacatgcccaagtacctgcggcagaagctgcgggcagagctgaagcccaagacccgcatctttgagatccagcccatctctggagtgctggaccccggggagaagagcaatgtgcaggtgaagttcatgcccaaggaggagaagttctacagccagaccctggtgttccagatcgcccagagcgcccagaagctgaccctgctggcccggggccagggcctggagccccggctggagttcagccccagcgtgctggacctgggccccctgctgctgtgtgcccctggagatgaagctgaggtgattgtgaagaacccctgcaacttccccatcgagttctacagcctggagtttgaccagcagtacctgattgaggagaagatcctgaggaagctgaagggctatgacagctacaacaccctgctgctgccccccaggaaccctggagagaagctgcccccagagctgtatgagtacttcaaggagatcaagaagagcaaggaggagcagatgagggccaagtacctggagaacctggcccaggagaatgaggaggaggacatcaccagcagtgaccagggcaccagcaacagcaccaagaggaccagcctgagccggggcatctctgtgaccagcaacctggaggagtggcacgccctgctggtggagagcaagacctacctggaggaggaggaggatgaggagagcctggagaagatcatcttccagacagacaagctgcagagcattgacagccacagcatggaggaggtgggggaggtggagaacaaccctgtgtccaaggccatcgcccggcacctgggcatcgacatctctgctgagggccgcctggccaagaacagaaaaggaattgccatcatcatccacggcacccccctgagcggcaagagcgccaatgctgtgtctgtggccaagtactacaatgctgcctgcctgagcattgacagcatcgtgctggaggccgtggccaacagcaacaacatccctggcatccgggcccgggagctgtgcatccgggccgccatcgagcagagcgtgaaggagggggaggaggccgcccaggaggccgctgtgggccagaatgtcatcggccagggccgcctgagcacagacaccctgggcaagctggccagcgagatgaccctggtggcccctgagatcaagccaggcaagtctgtgcggggctctgtggtgatcaccaagagcaaggctgacagccacggcagcggcagccagaagcagcaccacagccaccagagcgagaccccccagatcagcagcagccccctgcccccaggccccatccaccgctggctgtctgtgagccccagcgtgggcggggagaccggcctgatgagctgtgtgctgcctgatgagctgctggtgcagatcctggccgagcgcatccagctgagtgactgctaccggggcgtggtgtttgatggcctggacaccctgtttgcccagaatgctgctgctgccctgctgtgcctgctgaaggccatcggcagccgggagcacatctacatcctgaacatggcccaggactatgctgccatgaaggcccaggagaaggccaagaaggagcaggaggagaggaagcacaagggggccctggagaaggagaaggagcggctgcagaacatggatgaggaggagtatgatgccctgacagaggaggagaagctgacctttgaccggggcatccagcaggccctgcgggagaggaagaagcgggagcaggagcggctggccaaggagatgcaggagaagaagctgcagcaggagctggagcggcagaaggaggaggatgagctgaagagaagagtgaagaagggcaagcagggccccatcaaggaggagccccccatgaagaagagccaggccgccaacaagcaggtgccccccctgaccaaggtggatgtgaagatggagaccatcgagaggaagatctctgtgcgggagcagaccatgtctgagaaggaggagctgaacaagaagaagaggaacatgggagatgtgtccatgcacggcctgcccctggtgcaggaccaggaggacagcgagggggacaacagcaaggaccctgacaagcagctggcccccaagttcaagacctatgagctgaccctgaaggatgtgcagaacatcctgatgtactgggacaggaagcagggcgtgcagctgcccccagctggcatggaggaggcccctcatgagccagatgaccagaggcaggtgcccctgggcggcagaagaggaaggaaggaccgggagcgggagcggctggagaaggagaggacagagaaggagcggctggagcgggagaaggccgagcgggagcggctggagaagctgcgggccctggaggagaggagtgactgggagggggagggggaggaggaccacgagggcaagaaggagaaggacctgggcgtgcccttcctggacatccagaccccagactttgagggcctgtcctggaagcaggccctggagagtgacaagctgcccaagggggagcagatcctggacatcctgggcctgggcgccagcggcccccccatccccccaccagccctcttcagcatcgtgtcctaccctgtgaagaggcctcccctgaccatgacagatgacctggagcactttgtgtttgtgattcctccttctgaggacatcagcctggatgagaagaaggagatggagattgaaagtgacttcctggccaccaccaacaccaccaaggcccaggaggagcagaccagcagcagcaagggcggcaagcagaagatgaaggagaagattgaccaggtgtttgagatccagaaggacaagaggcacatggccctgaacaggaaggtgctgtctggagagcctgctggcaccatcagccagctgagtgacacagacctggacaacttcaacggccagcacagccaggagaagttcacccggctgaaccacttccgctggatcgtgcctgccaatggagaggtgaccctgcaggtgcacttcagcagtgatgaatttggaaactttgaccagaccttcaactttgagatcctgggcacctgctgccagtaccagctgtactgccggggcatctgcacctacccctacatctgccaggaccccaaggtggtgttcccccagaggaagatggacatgaagaccaatgaggtgatcttcaagaagtatgtgatgagcacagagacctactacttcggccccctgctgtgtgggaagagccgggacaagtacaagagcagcctcttccctggcaacatggagaccctgaccatcctgaacaccagcctgatggtggtggaggccagcttctacttccagaatgatgtgaaggccaacacctacttcctggagcccaacaccatggtgctgaagcccaatgagaagcagatcctgaatgtgtgggcctaccccacctctgtgggcgtgtttgaagattccatcgtgtgctgcatcaatgacaaccctgagcccgccatcttccagctgagctgccagggcatccggcctgagctggagctggagccccggcagctgcactttgaccggctgctgctgcaccggcaggagagccgggtggtgctgctgagaaatgtgaccctgctgcctgtggcctggaggatcaccagcctggagcacctgggagatgacttcaccgtgtccctgatgcagggcaccatccccccagaggccgagtatggcctgcacctgtacttccagcccaccaagcctgtgaacatcaagaaggccatccggctggaggtgctggatgctgagaacctgctgggcgtggtgcagatcgagaacatcatggtgtttgctgaggcctatgacatcgccctggacatcaccttccccaagggagctgagggcggcctggactttggaattgtgcgggtgacagaggaggccaagcagcccctgcagctgaagaacagaggcaagtatgagatcgccttctccttctctgtggacagcgtgggcatcagcacccccaacatcaacagcatgatctctgtgcagcccaagaagggcagcctgacccccacagagaagcccaccaacgtgcaggtgttcttccacgccaagaaggaggtgaagattgagcaccagcctgtgctgcgctgccagatcatcgagcccaacatcagcgagggcggggagatcatcgccagcatccccatcaagttcagcgccaatgctgtgtacagcaagtacaacatcacccccagcagcgtcatcaactttggagccctgatctgtggcaccaggaagagcaccaccttcaccatcgagaaccagggcgtgacagacttcaagtttgccctgtacaagctgactggagagagccccatccaccagaagaaggccgccagccacgtgagacatgcccggagccgggagagcgagagcttctacaagacaggcagcagccgggccgccaagttcagtgacaccatccagaaggaggtgaccaccaccggccaggccaggtttgcccacggcatgttcaccgtgtacccaggcttcggcagcatccccagcggcggccagcaggtgatcaacgtggactgtgtggctgatgccatgggcaaatgtgaggagttcatcgccatcgacatcagcggccgggaccctgctgtgcaccctgctggcatcctgtacaccctgctggccgaggcctgcctgcctgcctttgtgacagaaaataatgccctgatctttgaggagcaccagatctgcaccagcgccaacctgcaccacatcctgcagaccattgaaagtggcggcctgtttgtggaggatgagaacaagttcatcttctgcaatgtgctggtgggccggcaggccaaggcccgcttcaagatcagcaatgtgggcaagatcacctgtgatgtgaacatcgtggtgcggcccatcagcaacaagccctttgcccgcatcgtggacatctttgaggtggagcccagcaagatgtgcatcgccagccacagccacgcctttgccaccgtgtccttcaccccccagatcatgcagaactaccagtgcatctttgaggccaccctggatggcctgcccagcaccctggccaagagccggggcctggtgtttgatattgctggggagggcaacctgccccgggtgacagtggtgcggcctgtgctgcacaaccagtatggcaaccccctgctgctcttcaagaggctgctgctgggccacagcgagaagctgcccctcatcctgaagaacaatggagtgctgcctgcccagctgcacgtggacctgcaggatgagctgggcgtcttcagcctgaagggccggcccaccacagcctacatctacatcacagaggagaacaagccccacgtgaaggccaagaaggcccacacagccagcctggtggtgtcccctggggacacagctgagtttgatgtggtgttccacagccagaaggtgggccgcatgaggggcatcatccacctgagcgtcatcaacaaccagtatgaggagaccagcatccacatggtgggggagggctatgaagatgacatcaccctggacaacatccacggcctggtggcccccaccagccaggaggacatcagcatcagcgagttcacagagatcatcgaggacaatgacatggaggacctggtggccgccgccctggtggaccacatccagtttggagactgccacatcggccacagctacaatgccagcttcaccgtgaccaaccacagccaggtgaacctgatccgctttgagtggcctgtgtctgccaccatcgccttcagcccccagatgggccacctgcaccctggctgtgccaaggacatcgtggtgaccatgaagagtgatgtgcccatcaacctgaagaacatgaggatccgctgcaagctgagccgcatcatgttccagctgcctgctgaccaggtgcctgactgggatgacaggatgcacacagtgaagtgggtggatgtgcccaggaacatgcctggcaccttcaccaccaagaggaaggtgattgaaacagatcctgagcccgcccacagcgtgctggaggagaactaccaggagctgcagctgcagatcagcgccaacgtggactttgccagctaccactgccaggccagagatgtgcgcttcaaggagaccctggtgtaccagaccagggtgtttgaatttgatgtgatcaacagcggccgggtgcagctggagttctcctgggtgtctgaggacaccagcaaggctgtgtcctttgccaagccagaccaccagggcagcgcccagaaggaccagctgagccagggcaccatgcacacaggcagcaccctggacagcaccatggaccactgggccgagggcagcccccagcccttctctgtggagcccagcagcggcatcgtgcctgtgggcaagatccagaagttcaaggtgaagttcagccccctggacatcggggactttgagagcaacctcttctgccagatccccaacctgcccccaggagagcagggccctgtgctggtggccaagggccgcagcaccctgcccatctgccactttgacctgaaggacagcgactacatcagcggccaccagagaaatcctgagctgcggggcagcagtggaggagccctggaccccaacaccagggtcatcgagttcaccaccgtgggcattggaggcaagaacctgcggaccttcaccatcctgaaccccaccaacagcacctacagcttctgctggatcagcgaggagattgagagcctgcagaacccagctgccttcacctgcctgacagagaagggcttcatccaccctgagaagaaggccgagatcgtgttccagttcacccccttccacctgggcatcacagagagctcctggaccttcctgatccctgagcacaacatcaccgtgcccttcctgctggtgggcaagaccacagagcccctcatcagcctgaacaagagccacctgaacttcagcagcctgctgattggccgggaggcccgggagaccgtgcagatcatcaacaaggaggagcagggctttgacttctccttccaggacaacagccgctacagcgagggcttcagcaacagcctgctggtgtgccccatggagggctggatcccccccctgagccgcttccccatcgacatcttcttcacccccaagcaggagggagatgtgaacttcaacctgatctgcaatgtggagaagaaggtgcaccctgtgaccctgaatgtgaaggccgagggctacaccatgaatgtggagatcaagtgcaaggacagaacaggcagcatcaccctgctgacccccaaccagaccaacatcatcaacttctatgaggtggagctgaatgaatgtgtgcagtgtgagttcaacttcatcaacacaggcaagttcaccttctccttccaggcccagctgtgtggcagcaagaccctgctgcagtacctggagttcagccccatcgacagcacagtggatgtgggccagagcgtgcacgccaccctgtccttccagcccctgaagaagtgtgtgctgacagacctggagctgatcatcaagatcagccacggccccaccttcatgtgcaacatcagcggctgtgctgtgtccccagccatccacttctccttcaccagctacaactttggcacctgcttcatctaccaggccggcatgccaccctacaagcagaccctggtgatcaccaacaaggaggagacccccatgagcattgactgcctgtacaccaacaccacccacctggaggtgaacagccgggtggatgtggtgaagccaggcaacaccctggagatccccatcaccttctacccccgggagagcatcaactaccaggagctgatcccctttgagatcaatggcctgagccagcagacagtggagatcaagggcaagggcaccaagatgaagatcctggtgctggaccctgccaaccgcatcgtgaagctgggcgctgtgctgcccggccaggtggtgaagaggacagtgtccatcatgaacaacagcctggcccagctgaccttcaaccagagcatcctcttcaccatccctgagctgcaggagcccaaggtgctgaccctggcccccttccacaacatcaccctgaagcccaaggaggtgtgcaagctggaggtgatctttgcccccaagaagagggtgccccccttcagcgaggaggtgttcatggagtgcatgggcctgctgcggcccctcttcctgctgagcggctgctgccaggccctggagatcagcctggaccaggagcacatccccttcggccctgtggtgtaccagacccaggccacccggcgcatcctgatgatgaacacaggagatgtgggcgcccgcttcaagtgggacatcaagaagtttgagccccacttcagcatcagccctgaggagggctacatcaccagcggcatggaggtgtcctttgaggtgacctaccaccccacagaggtgggcaaggagagcctgtgcaagaacatcctgtgctacatccagggcggcagccccctgagcctgaccctgagcggcgtgtgtgtgggccccccagctgtgaaggaggtggtgaacttcacctgccaggtgcgcagcaagcacacccagaccatcctgctgagcaacagaaccaaccagacctggaacctgcaccccatctttgaaggagagcactgggagggccctgagttcatcaccctggaggcccaccagcagaacaagccctatgagatcacctaccggcccaggaccatgaacctggagaacaggaagcaccagggcaccctcttcttccccctgcctgatggcaccggctggctgtatgccctgcacggcaccagcgagctgcccaaggctgtggccaacatctaccgggaggtgccctgcaagaccccctacacagagctgctgcccatcaccaactggctgaacaagccccagcgcttccgggtgattgtggagatcctgaagccagagaagccagacctgagcatcaccatgaagggcctggactacattgatgtgctgagcggcagcaagaaggactacaagctgaacttcttcagccacaaggagggcacctatgctgccaaggtgatcttcagaaatgaggtgaccaatgagttcctgtactacaacgtgtccttccgggtcatccccagcggcatcatcaagaccatcgagatggtgacccctgtgcggcaggtggccagcgccagcatcaagctggagaaccccctgccctacagcgtgaccttcagcacagaatgtaggatgccagacatcgccctgcccagccagtttgtggtgcctgccaacagcgagggcaccttctcctttgagttccagcccctgaaggccggggagaccttcggccgcctgaccctgcacaacacagacctgggctactaccagtatgagctgtacctgaaggccaccccagccctgcctgagaagcctgtgcacttccagacagtgctgggcagcagccagatcatcctggtgaagttcatcaactacacccggcagaggacagagtactactgcaggacagactgcacagacttccacgccgagaagctgatcaatgctgcccctgggggccagggcggcacagaggcctctgtggaggtgctgtttgagcccagccacctgggggagaccaagggcatcctgatcctgagcagcctggccggcggggagtacatcatccccctgtttggcatggccctgccccccaagccccagggccccttcagcatccgggccggctacagcatcatcatccccttcaagaatgtgttctaccacatggtgaccttcagcatcatcgtggacaacccagccttcaccatccgggccggggagagcgtgcggcccaagaagatcaacaacatcaccgtgtcctttgagggcaaccccagcggcagcaagacccccatcaccaccaagctgactgtgtcctgccccccaggagagggcagcgagaccggggtgaagtgggtgtactacctgaagggcatcaccctgtag

SEQ ID NO: 155687 - DNA, 2853 bp, synthetic construct
  misc_feature 1..2853: note = Description of Artificial Sequence: Synthetic coding sequence
  source 1..2853: mol_type = other DNA
atggagagcgctgggggcttcaagctgggcatggagcccctgagcggcggcggcgtgtgtgagaagaagaagctgctgaagatgaccagccggcggctggaggagagcatgggcgctgtgcagatgggcctggtgaacatgttcaagggcttccagagcaaggtgctgccccccctgagccccaaggtggtgacagaggaggaggtgaacaggatgctgacccccagcgagttcctgaaggagatgagcctgaccacagagcagaggctggccaagacccggctgatgtgccggccccagatcatcgagctgctggacatgggagagaccacccaccagaagttcagcggcatcgacctggaccaggccctcttccagcccttccccagcgagatcatcttccagaactacaccccctgtgaggtgtatgaggtgcccctcatcctgaggaacaatgacaagatcccccggctggtgaaggtggtggaggagagcagcccctacttcaaggtgatcagccccaaggacatcggccacaaggtggcccctggggtgcccagcatcttccgcatcctcttcaccccagaggagaacaaggactatgcccacaccctgacctgtgtgacagagcgggagaagttcatcgtgcccatcaaggcccggggggcccgggccatcctggacttcccagacaagctgaacttcagcacctgccctgtgaagtacagcacccagaagatcctgctggtgagaaatattggcaacaagaatgctgtgttccacatcaagacctgccggcccttcagcattgagcccgccatcggcaccctgaatgtgggggagagcatgcagctggaggtggagtttgagccccagagcgtgggggaccacagcggccgcctcatcgtgtgctatgacacaggagagaaggtgtttgtgtccctgtatggagctgccatcgacatgaacatccggctggacaagaacagcctgaccatcgagaagacctacatcagcctggccaaccagaggaccatcaccatccacaacagaagcaacatcatcgcccacttcctgtggaaggtgtttgccacccagcaggaggaggaccgggagaagtaccgggcctgtgatgacctgatcaaggaggagaaggatgaaacagatgagttctttgaggagtgcatcacagaccccctgctgcgggagcacctgtctgtgctgagcaggacctttgccaaccagaggcggctggtgcagggcgacagcaagctgttcttcaacaacgtgttcaccgtggagcccctggagggagatgtgtggcccaacagcagcgctgagatcaccgtgtacttcaaccccctggaggccaagctgtaccagcagaccatctactgtgacatcctgggccgggagatccggctgcccctgcgcatcaagggggagggcatgggccccaagatccacttcaactttgagctgctggacatcggcaaggtgttcaccggcagcgcccactgctatgaggccatcctgtacaacaagggcagcattgatgccctcttcaacatgaccccacccaccagcgccctgggcgcctgctttgtgttcagccccaaggagggcatcatcgagcccagcggcgtgcaggccatccagatctccttcagcagcaccatcctgggcaactttgaggaggagttcctggtgaatgtgaatggcagccctgagcctgtgaagctgaccatccggggctgcgtcatcggccccaccttccacttcaacgtgcctgccctgcactttggagatgtgtcctttggcttcccccacaccctcatctgcagcctgaacaacaccagcctcatccccatgacctacaagctgcgcatccctggagatggcctgggccacaagagcatctcctactgtgagcagcacgtggactacaagaggcccagctggaccaaggaggagatcagctccatgaagcccaaggagttcaccatcagcccagactgtggcaccatccggccccagggctttgctgccatccgggtgaccctgtgcagcaacacagtgcagaagtatgagctggccctggtggtggatgtggagggcattggagaggaggtgctggccctgctgatcacagcccgctgtgtggtgcctgccctgcacctggtgaacacagaggtggactttggccactgcttcctgaagtacccctatgagaagaccctgcagctggccaaccaggatgacctgcccggcttctatgaggtgcagccccaggtgtgtgaggaggtgcccaccgtgctcttcagcagccccacccccagcggggtcatcagccccagcagcaccatccacatccccctggtgctggagacccaggtgactggagagcacaggagcacagtgtacatcagcatcttcggcagccaggacccccccctggtgtgccacctgaagtctgctggggagggccctgtgatctacgtgcaccccaaccaggtggactttggaaacatctacgtgctgaaggacagcagccgcatcctgaacctgtgcaaccagagcttcatcccagccttcttccaggcccacatggcccacaagaagagcctgtggaccatcgagcccaatgaaggcatggtgcccccagagacagatgtgcagctggccctgacagccaacctgaatgacaccctgaccttcaaggactgtgtgatcctggacatcgagaacagcagcacctaccgcatccctgtgcaggccagcggcaccggcagcaccatcgtgtctgacaagccctttgcccctgagctgaacctgggcgcccacttcagatag

SEQ ID NO: 155688 - DNA, 2823 bp, synthetic construct
  misc_feature 1..2823: note = Description of Artificial Sequence: Synthetic coding sequence
  source 1..2823: mol_type = other DNA
atggagagcgctgggggcttcaagctgggggagaagaagaagctgctgaagatgaccagccggcggctggaggagagcatgggcgctgtgcagatgggcctggtgaacatgttcaagggcttccagagcaaggtgctgccccccctgagccccaaggtggtgacagaggaggaggtgaacaggatgctgacccccagcgagttcctgaaggagatgagcctgaccacagagcagaggctggccaagacccggctgatgtgccggccccagatcatcgagctgctggacatgggagagaccacccaccagaagttcagcggcatcgacctggaccaggccctcttccagcccttccccagcgagatcatcttccagaactacaccccctgtgaggtgtatgaggtgcccctcatcctgaggaacaatgacaagatcccccggctggtgaaggtggtggaggagagcagcccctacttcaaggtgatcagccccaaggacatcggccacaaggtggcccctggggtgcccagcatcttccgcatcctcttcaccccagaggagaacaaggactatgcccacaccctgacctgtgtgacagagcgggagaagttcatcgtgcccatcaaggcccggggggcccgggccatcctggacttcccagacaagctgaacttcagcacctgccctgtgaagtacagcacccagaagatcctgctggtgagaaatattggcaacaagaatgctgtgttccacatcaagacctgccggcccttcagcattgagcccgccatcggcaccctgaatgtgggggagagcatgcagctggaggtggagtttgagccccagagcgtgggggaccacagcggccgcctcatcgtgtgctatgacacaggagagaaggtgtttgtgtccctgtatggagctgccatcgacatgaacatccggctggacaagaacagcctgaccatcgagaagacctacatcagcctggccaaccagaggaccatcaccatccacaacagaagcaacatcatcgcccacttcctgtggaaggtgtttgccacccagcaggaggaggaccgggagaagtaccgggcctgtgatgacctgatcaaggaggagaaggatgaaacagatgagttctttgaggagtgcatcacagaccccctgctgcgggagcacctgtctgtgctgagcaggacctttgccaaccagaggcggctggtgcagggcgacagcaagctgttcttcaacaacgtgttcaccgtggagcccctggagggagatgtgtggcccaacagcagcgctgagatcaccgtgtacttcaaccccctggaggccaagctgtaccagcagaccatctactgtgacatcctgggccgggagatccggctgcccctgcgcatcaagggggagggcatgggccccaagatccacttcaactttgagctgctggacatcggcaaggtgttcaccggcagcgcccactgctatgaggccatcctgtacaacaagggcagcattgatgccctcttcaacatgaccccacccaccagcgccctgggcgcctgctttgtgttcagccccaaggagggcatcatcgagcccagcggcgtgcaggccatccagatctccttcagcagcaccatcctgggcaactttgaggaggagttcctggtgaatgtgaatggcagccctgagcctgtgaagctgaccatccggggctgcgtcatcggccccaccttccacttcaacgtgcctgccctgcactttggagatgtgtcctttggcttcccccacaccctcatctgcagcctgaacaacaccagcctcatccccatgacctacaagctgcgcatccctggagatggcctgggccacaagagcatctcctactgtgagcagcacgtggactacaagaggcccagctggaccaaggaggagatcagctccatgaagcccaaggagttcaccatcagcccagactgtggcaccatccggccccagggctttgctgccatccgggtgaccctgtgcagcaacacagtgcagaagtatgagctggccctggtggtggatgtggagggcattggagaggaggtgctggccctgctgatcacagcccgctgtgtggtgcctgccctgcacctggtgaacacagaggtggactttggccactgcttcctgaagtacccctatgagaagaccctgcagctggccaaccaggatgacctgcccggcttctatgaggtgcagccccaggtgtgtgaggaggtgcccaccgtgctcttcagcagccccacccccagcggggtcatcagccccagcagcaccatccacatccccctggtgctggagacccaggtgactggagagcacaggagcacagtgtacatcagcatcttcggcagccaggacccccccctggtgtgccacctgaagtctgctggggagggccctgtgatctacgtgcaccccaaccaggtggactttggaaacatctacgtgctgaaggacagcagccgcatcctgaacctgtgcaaccagagcttcatcccagccttcttccaggcccacatggcccacaagaagagcctgtggaccatcgagcccaatgaaggcatggtgcccccagagacagatgtgcagctggccctgacagccaacctgaatgacaccctgaccttcaaggactgtgtgatcctggacatcgagaacagcagcacctaccgcatccctgtgcaggccagcggcaccggcagcaccatcgtgtctgacaagccctttgcccctgagctgaacctgggcgcccacttcagatag

SEQ ID NO: 155689 - DNA, 15363 bp, synthetic construct
  misc_feature 1..15363: note = Description of Artificial Sequence: Synthetic coding sequence
  source 1..15363: mol_type = other DNA
atgaccagccggcggctggaggagagcatgggcgctgtgcagatgggcctggtgaacatgttcaagggcttccagagcaaggtgctgccccccctgagccccaaggtggtgacagaggaggaggtgaacaggatgctgaccccatctgagttcctgaaggagatgagcctgaccacagagcagaggctggccaagacccggctgatgtgccggccccagatcatcgagctgctggacatgggagagaccacccaccagaagttctctggaattgacctggaccaggccctcttccagcccttccccagcgagatcatcttccagaactacaccccctgtgaggtgtatgaggtgcccctcatcctgagaaataatgacaagatcccccggctggtgaaggtggtggaggagagcagcccctacttcaaggtgatcagccccaaggacatcggccacaaggtggcccctggggtgcccagcatcttccgcatcctcttcaccccagaggagaacaaggactatgcccacaccctgacctgtgtgacagagcgggagaagttcatcgtgcccatcaaggcccggggggcccgggccatcctggacttcccagacaagctgaacttcagcacctgccctgtgaagtacagcacccagaagatcctgctggtgaggaacatcggcaacaagaatgctgtgttccacatcaagacctgccggcccttcagcattgaaccagccatcggcaccctgaatgtgggggagagcatgcagctggaggtggagtttgagccccagagcgtgggggaccacagcggccgcctgattgtgtgctatgacaccggggagaaggtgtttgtgtccctgtatggagctgccatcgacatgaacatccggctggacaagaacagcctgaccatcgagaagacctacatcagcctggccaaccagaggaccatcaccatccacaacagaagcaacatcatcgcccacttcctgtggaaggtgtttgccacccagcaggaggaggaccgggagaagtaccgggcctgtgatgacctgatcaaggaggagaaggatgaaacagatgagttctttgaggagtgcatcacagaccccctgctgcgggagcacctgtctgtgctgagcaggacctttgccaaccagaggcggctggtgcagggcgacagcaagctgttcttcaacaacgtgttcaccgtggagcccctggagggagatgtgtggcccaacagcagcgctgagatcaccgtgtacttcaaccccctggaggccaagctgtaccagcagaccatctactgtgacatcctgggccgggagatccggctgcccctgcgcatcaagggggagggcatgggccccaagatccacttcaactttgagctgctggacatcggcaaggtgttcaccggcagcgcccactgctatgaggccatcctgtacaacaagggcagcattgatgccctcttcaacatgaccccacccaccagcgccctgggcgcctgctttgtgttcagccccaaggagggcatcatcgagcccagcggcgtgcaggccatccagatctccttcagcagcaccatcctgggcaactttgaggaggagttcctggtgaatgtgaatggcagccctgagcctgtgaagctgaccatccggggctgtgtgattggccccaccttccacttcaacgtgcctgccctgcactttggagatgtgtcctttggcttcccccacaccctcatctgcagcctgaacaacaccagcctcatccccatgacctacaagctgcgcatccctggagatggcctgggccacaagagcatctcctactgtgagcagcacgtggactacaagaggcccagctggaccaaggaggagatcagctccatgaagcccaaggagttcaccatcagcccagactgtggcaccatccggccccagggctttgctgccatccgggtgaccctgtgcagcaacacagtgcagaagtatgagctggccctggtggtggatgtggagggcatcggggaggaggtgctggccctgctgatcacagcccgctgtgtggtgcctgccctgcacctggtgaacacagaggtggactttggccactgcttcctgaagtacccctatgagaagaccctgcagctggccaaccaggatgacctgcccggcttctatgaggtgcagccccaggtgtgtgaggaggtgcccaccgtgctcttcagcagccccaccccatctggagtcatcagccccagcagcaccatccacatccccctggtgctggagacccaggtgactggagagcacaggagcacagtgtacatcagcatcttcggcagccaggacccccccctggtgtgccacctgaagtctgctggggagggccctgtgatctacgtgcaccccaaccaggtggactttggaaacatctacgtgctgaaggacagcagccgcatcctgaacctgtgcaaccagagcttcatcccagccttcttccaggcccacatggcccacaagaagagcctgtggaccatcgagcccaatgaaggcatggtgcccccagagacagatgtgcagctggccctgacagccaacctgaatgacaccctgaccttcaaggactgtgtgatcctggacatcgagaacagcagcacctaccgcatccctgtgcaggccagcggcaccggcagcaccatcgtgtctgacaagccctttgcccctgagctgaacctgggcgcccacttcagcctggacacccactactaccacttcaagctgatcaacaagggccgccgcatccagcagctgttctggatgaatgacagcttccggccccaggccaagctgagcaagaagggccgggtgaagaagggccacgcccacgtgcagccccagcccagcggcagccaggagccccgggacccccagagccctgtgttccacctgcacccagcctccatggagctgtacccaggccaggccattgatgtgatcctggagggctacagcgccaccccaagaattgtgaaggagaagctggtgtgccacgccatcatcggggcccagaagggcaagagcctggtgatggctgtgaacatcacctgtgaatttgtggcccccctcatccagctgagcaccaagcagctgatctaccgcctggagaagaagcccaacagcatcctgaagccagactaccagcccctggccatcaagaacatcagcaccctgcctgtgaacctgctgctgagcaccagcggccccttcttcatctgtgaaacagacaagagcctgctgcctgccaccccagagcccatcaagctggagattgatgaggagaagaacctgctgatcaagtttgaccccagctacagaaatgacctgaacaactgggtggccgaggagatcctggccatcaagtatgtggagcacccccagattgacagcctggacctgcggggggaggtgcactaccccaacctgagctttgagaccaaggagctggactttggctgcatcctgaatgacacagagctgatccgctacgtgaccatcaccaactgcagccccctggtggtgaagttccgctggttcttcctggtgaatgatgaggagaaccagatccgctttgtgaccctgcccaagaagccctacagcgcccctgtgtcccagatggagagcatcccagccaccagcgaggccgccagccccccagccatcctggtgacagtggagagccctgagatggacctgaatgactttgtgaagacagtgctggtggatgaagatgcccggcctgaggagaaggagctgaggaagaccaaggccagcagcgtcatcagtgatgtgcgctgccccttccacggggaggagcgcatctacagcagccagagccaggtggaggaccaggagagcctgcagacctgtgagcagaatgagatgctgagcattggaattgaggaggtgtttgacatcctgcccctgtttggagtgctgcagccccacagcagccaccagatctccttcaccttctacggccacgccaacatcatcgcccaggccaaggccctgtgtgaggtggaggagggccccacctatgagatcaccctgaagggggaggccagcctggtgaactacagctttgacaccaaggacatccactacggcctgcagctgtttgaccacgtgacagagcgggagatcaccctgaccaacatgggcaaggtgggctttgagttcaaggtgctgacagaccaccagagcagcccagacaacctgctgcccggggtgcccctcatcctgcctgtgtctggcttcatcagcagccaccaggagcaggtgctgaaggtgtactacctgcccggggtgcctgaggtgttcaagaggagcttccagatccagatcgcccacctggaccctgagaacatcaccctgtctggagagggcatcttcccccagatctgcctggacctgcccaggaacctgacagccaatgagaagtatgagatgttcctgaaccaggccaggaagaacacagacaaggagtacaacaagtgtgagatgctggaccactttgacatcatcacagaggaggtgcctgaagatgagcctgctgaggtgtctgcccacctgcagatggaggtggagcggctcatcgtgcagagctatgtgctggagcaccagaagaccaccaccccagaccccatggatgacccctgcttcagccacaggagcaggaggaagctggccaagatccagctgcctgagtacatcctggactttggctacatcatcctgggggaggtgaggacccacatcatcaagatcatcaacaccagccacttccctgtgtccttccacgccgacaagagggtgctgcatgaaacaggcttcagcacagagctggacagagtgaagaacctgccccactgtgaaacagagatctttgaggtgcgctttgacccccagggcgccaacctgcctgtgggcagcaaggaggtgatcctgcccatcaaggtggtgggcggccccaccgtgcacatctgcctgcaggccaaggtgaccatccccaccatgaccctgagccggggcaaggtggactttgccaccatccagtgtggccagtgcctggtggagaccatccagctgagcaaccacctgcaggtgccctgtgagtggtttgtgcagagccagaagcctgtggacaagctggagaagcacatgcccaagtacctgcggcagaagctgcgggcagagctgaagcccaagacccgcatctttgagatccagcccatcagcggcgtgctggaccctggagagaagagcaatgtgcaggtgaagttcatgcccaaggaggagaagttctacagccagaccctggtgttccagatcgcccagagcgcccagaagctgaccctgctggcccggggccagggcctggagccccggctggagttcagccccagcgtgctggacctgggccccctgctgctgtgtgcccctggagatgaggccgaggtgattgtgaagaacccctgcaacttccccatcgagttctacagcctggagtttgaccagcagtacctgattgaggagaagatcctgaggaagctgaagggctatgacagctacaacaccctgctgctgcccccaagaaatcctggagagaagctgcccccagagctgtatgagtacttcaaggagatcaagaagagcaaggaggagcagatgagggccaagtacctggagaacctggcccaggagaatgaggaggaggacatcaccagcagtgaccagggcaccagcaacagcaccaagaggaccagcctgagccggggcatctctgtgaccagcaacctggaggagtggcacgccctgctggtggagagcaagacctacctggaggaggaggaggatgaggagagcctggagaagatcatcttccagacagacaagctgcagagcattgacagccacagcatggaggaggtgggggaggtggagaacaaccctgtgtccaaggccatcgcccggcacctgggcatcgacatctctgctgagggccgcctggccaagaacaggaagggcatcgccatcatcatccacggcacccccctgagcggcaagagcgccaatgctgtgtctgtggccaagtactacaatgctgcctgcctgagcattgacagcatcgtgctggaggccgtggccaacagcaacaacatccctggcatccgggcccgggagctgtgcatccgggccgccatcgagcagagcgtgaaggagggggaggaggccgcccaggaggccgctgtgggccagaatgtgattggccagggccgcctgagcacagacaccctgggcaagctggccagcgagatgaccctggtggcccctgagatcaagccaggcaagtctgtgcggggctctgtggtgatcaccaagagcaaggctgacagccacggcagcggcagccagaagcagcaccacagccaccagagcgagaccccccagatcagcagcagccccctgcccccaggccccatccaccgctggctgtctgtgagccccagcgtgggcggggagaccggcctgatgagctgtgtgctgcctgatgagctgctggtgcagatcctggccgagcgcatccagctgagtgactgctacagaggagtggtgtttgatggcctggacaccctgtttgcccagaatgctgctgctgccctgctgtgcctgctgaaggccatcggcagccgggagcacatctacatcctgaacatggcccaggactatgctgccatgaaggcccaggagaaggccaagaaggagcaggaggagaggaagcacaagggggccctggagaaggagaaggagcggctgcagaacatggatgaggaggagtatgatgccctgacagaggaggagaagctgacctttgaccggggcatccagcaggccctgcgggagaggaagaagcgggagcaggagcggctggccaaggagatgcaggagaagaagctgcagcaggagctggagcggcagaaggaggaggatgagctgaagagaagagtgaagaagggcaagcagggccccatcaaggaggagccccccatgaagaagagccaggccgccaacaagcaggtgccccccctgaccaaggtggatgtgaagatggagaccattgaaaggaagatctctgtgcgggagcagaccatgtctgagaaggaggagctgaacaagaagaagaggaacatgggagatgtgtccatgcacggcctgcccctggtgcaggaccaggaggacagcgagggggacaacagcaaggaccctgacaagcagctggcccccaagttcaagacctatgagctgaccctgaaggatgtgcagaacatcctgatgtactgggacaggaagcagggcgtgcagctgcccccagctggcatggaggaggcccctcatgagccagatgaccagaggcaggtgcccctgggcggccggcggggcaggaaggaccgggagcgggagcggctggagaaggagaggacagagaaggagcggctggagcgggagaaggccgagcgggagcggctggagaagctgcgggccctggaggagaggagtgactgggagggggagggggaggaggaccacgagggcaagaaggagaaggacctgggcgtgcccttcctggacatccagaccccagactttgagggcctgtcctggaagcaggccctggagagtgacaagctgcccaagggggagcagatcctggacatcctgggcctgggcgccagcggcccccccatccccccaccagccctcttcagcatcgtgtcctaccctgtgaagaggcctcccctgaccatgacagatgacctggagcactttgtgtttgtgatccccccatctgaggacatcagcctggatgagaagaaggagatggagattgaaagtgacttcctggccaccaccaacaccaccaaggcccaggaggagcagaccagcagcagcaaaggaggcaagcagaagatgaaggagaagattgaccaggtgtttgagatccagaaggacaagaggcacatggccctgaacaggaaggtgctgagcggggagcccgccggcaccatcagccagctgagtgacacagacctggacaacttcaacggccagcacagccaggagaagttcacccggctgaaccacttccgctggatcgtgcctgccaacggggaggtgaccctgcaggtgcacttcagcagtgatgaatttggaaactttgaccagaccttcaactttgagatcctgggcacctgctgccagtaccagctgtactgccggggcatctgcacctacccctacatctgccaggaccccaaggtggtgttcccccagaggaagatggacatgaagaccaatgaagtcatcttcaagaagtatgtgatgagcacagagacctactacttcggccccctgctgtgtgggaagagccgggacaagtacaagagcagcctcttccctggcaacatggagaccctgaccatcctgaacaccagcctgatggtggtggaggccagcttctacttccagaatgatgtgaaggccaacacctacttcctggagcccaacaccatggtgctgaagcccaatgagaagcagatcctgaatgtgtgggcctaccccacctctgtgggcgtgtttgaggacagcatcgtgtgctgcatcaatgacaaccctgagcccgccatcttccagctgagctgccagggcatccggcctgagctggagctggagccccggcagctgcactttgaccggctgctgctgcaccggcaggagagccgggtggtgctgctgagaaatgtgaccctgctgcctgtggcctggaggatcaccagcctggagcacctgggagatgacttcaccgtgtccctgatgcagggcaccatccccccagaggccgagtatggcctgcacctgtacttccagcccaccaagcctgtgaacatcaagaaggccatccggctggaggtgctggatgctgagaacctgctgggcgtggtgcagatcgagaacatcatggtgtttgctgaggcctatgacatcgccctggacatcaccttccccaagggagctgagggcggcctggactttggcatcgtgcgggtgacagaggaggccaagcagcccctgcagctgaagaacagaggcaagtatgaaattgccttctccttctctgtggacagcgtgggcatcagcacccccaacatcaacagcatgatctctgtgcagcccaagaagggcagcctgacccccacagagaagcccaccaacgtgcaggtgttcttccacgccaagaaggaggtgaagattgagcaccagcctgtgctgcgctgccagatcatcgagcccaacatcagcgagggcggggagatcatcgccagcatccccatcaagttcagcgccaatgctgtgtacagcaagtacaacatcacccccagcagcgtcatcaactttggagccctgatctgtggcaccaggaagagcaccaccttcaccatcgagaaccagggcgtgacagacttcaagtttgccctgtacaagctgaccggggagagccccatccaccagaagaaggccgccagccacgtgagacatgcccggagccgggagagcgagagcttctacaagacaggcagcagcagagctgccaagttcagtgacaccatccagaaggaggtgaccaccaccggccaggccaggtttgcccacggcatgttcaccgtgtacccaggcttcggcagcatccccagcggcggccagcaggtgatcaacgtggactgtgtggctgatgccatgggcaaatgtgaggagttcatcgccatcgacatcagcggccgggaccctgctgtgcaccctgctggcatcctgtacaccctgctggccgaggcctgcctgcctgcctttgtgacagagaacaatgccctgatctttgaggagcaccagatctgcaccagcgccaacctgcaccacatcctgcagaccatcgagagcggcggcctgtttgtggaggatgagaacaagttcatcttctgcaatgtgctggtgggccggcaggccaaggcccgcttcaagatcagcaatgtgggcaagatcacctgtgatgtgaacatcgtggtgcggcccatcagcaacaagccctttgccagaattgtggacatctttgaggtggagcccagcaagatgtgcatcgccagccacagccacgcctttgccaccgtgtccttcaccccccagatcatgcagaactaccagtgcatctttgaggccaccctggatggcctgcccagcaccctggccaagagccggggcctggtgtttgatattgctggggagggcaacctgccccgggtgacagtggtgcggcctgtgctgcacaaccagtatggcaaccccctgctgctcttcaagaggctgctgctgggccacagcgagaagctgcccctcatcctgaagaacaacggggtgctgcctgcccagctgcacgtggacctgcaggatgagctgggcgtcttcagcctgaagggccggcccaccacagcctacatctacatcacagaggagaacaagccccacgtgaaggccaagaaggcccacacagccagcctggtggtgtcccctggggacacagctgagtttgatgtggtgttccacagccagaaggtgggccgcatgaggggcatcatccacctgagcgtcatcaacaaccagtatgaggagaccagcatccacatggtgggggagggctatgaagatgacatcaccctggacaacatccacggcctggtggcccccaccagccaggaggacatcagcatcagcgagttcacagagatcattgaagataatgacatggaggacctggtggccgccgccctggtggaccacatccagtttggagactgccacatcggccacagctacaatgccagcttcaccgtgaccaaccacagccaggtgaacctgatccgctttgagtggcctgtgtctgccaccatcgccttcagcccccagatgggccacctgcaccctggctgtgccaaggacatcgtggtgaccatgaagagtgatgtgcccatcaacctgaagaacatgaggatccgctgcaagctgagccgcatcatgttccagctgcctgctgaccaggtgcctgactgggatgacaggatgcacacagtgaagtgggtggatgtgcccaggaacatgcctggcaccttcaccaccaagaggaaggtgattgaaacagatcctgagcccgcccacagcgtgctggaggagaactaccaggagctgcagctgcagatcagcgccaacgtggactttgccagctaccactgccaggccagagatgtgcgcttcaaggagaccctggtgtaccagaccagggtgtttgaatttgatgtgatcaacagcggccgggtgcagctggagttctcctgggtgtctgaggacaccagcaaggctgtgtcctttgccaagccagaccaccagggcagcgcccagaaggaccagctgagccagggcaccatgcacacaggcagcaccctggacagcaccatggaccactgggccgagggcagcccccagcccttctctgtggagcccagcagcggcatcgtgcctgtgggcaagatccagaagttcaaggtgaagttcagccccctggacattggagactttgagagcaacctcttctgccagatccccaacctgcccccaggagagcagggccctgtgctggtggccaagggccgcagcaccctgcccatctgccactttgacctgaaggacagcgactacatcagcggccaccagaggaaccctgagctgcggggcagcagcggcggggccctggaccccaacaccagggtgattgagttcaccaccgtgggcatcggcggcaagaacctgcggaccttcaccatcctgaaccccaccaacagcacctacagcttctgctggatcagcgaggagattgagagcctgcagaacccagctgccttcacctgcctgacagagaagggcttcatccaccctgagaagaaggccgagatcgtgttccagttcacccccttccacctgggcatcacagagagctcctggaccttcctgatccctgagcacaacatcaccgtgcccttcctgctggtgggcaagaccacagagcccctcatcagcctgaacaagagccacctgaacttcagcagcctgctgattggccgggaggcccgggagaccgtgcagatcatcaacaaggaggagcagggctttgacttctccttccaggacaacagccgctacagcgagggcttcagcaacagcctgctggtgtgccccatggagggctggatcccccccctgagccgcttccccatcgacatcttcttcacccccaagcaggagggagatgtgaacttcaacctgatctgcaatgtggagaagaaggtgcaccctgtgaccctgaatgtgaaggccgagggctacaccatgaatgtggagatcaagtgcaaggacagaacaggcagcatcaccctgctgacccccaaccagaccaacatcatcaacttctatgaggtggagctgaatgaatgtgtgcagtgtgagttcaacttcatcaacacaggcaagttcaccttctccttccaggcccagctgtgtggcagcaagaccctgctgcagtacctggagttcagccccatcgacagcacagtggatgtgggccagagcgtgcacgccaccctgtccttccagcccctgaagaagtgtgtgctgacagacctggagctgatcatcaagatcagccacggccccaccttcatgtgcaacatcagcggctgtgctgtgtccccagccatccacttctccttcaccagctacaactttggcacctgcttcatctaccaggccggcatgccaccctacaagcagaccctggtgatcaccaacaaggaggagacccccatgagcattgactgcctgtacaccaacaccacccacctggaggtgaacagccgggtggatgtggtgaagccaggcaacaccctggagatccccatcaccttctacccccgggagagcatcaactaccaggagctgatcccctttgagatcaatggcctgagccagcagacagtggagatcaagggcaagggcaccaagatgaagatcctggtgctggaccctgccaacagaattgtgaagctgggcgctgtgctgcccggccaggtggtgaagaggacagtgtccatcatgaacaacagcctggcccagctgaccttcaaccagagcatcctcttcaccatccctgagctgcaggagcccaaggtgctgaccctggcccccttccacaacatcaccctgaagcccaaggaggtgtgcaagctggaggtgatctttgcccccaagaagagggtgccccccttcagcgaggaggtgttcatggagtgcatgggcctgctgcggcccctcttcctgctgagcggctgctgccaggccctggagatcagcctggaccaggagcacatcccctttggacctgtggtgtaccagacccaggccacccggcgcatcctgatgatgaacacaggagatgtgggcgcccgcttcaagtgggacatcaagaagtttgagccccacttcagcatcagccctgaggagggctacatcaccagcggcatggaggtgtcctttgaggtgacctaccaccccacagaggtgggcaaggagagcctgtgcaagaacatcctgtgctacatccagggcggcagccccctgagcctgaccctgtctggagtgtgtgtgggccccccagctgtgaaggaggtggtgaacttcacctgccaggtgcgcagcaagcacacccagaccatcctgctgagcaacagaaccaaccagacctggaacctgcaccccatctttgaaggagagcactgggagggccctgagttcatcaccctggaggcccaccagcagaacaagccctatgagatcacctaccggcccaggaccatgaacctggagaacaggaagcaccagggcaccctcttcttccccctgcctgatggcaccggctggctgtatgccctgcacggcaccagcgagctgcccaaggctgtggccaacatctaccgggaggtgccctgcaagaccccctacacagagctgctgcccatcaccaactggctgaacaagccccagcgcttccgggtcatcgtggagatcctgaagccagagaagccagacctgagcatcaccatgaagggcctggactacattgatgtgctgagcggcagcaagaaggactacaagctgaacttcttcagccacaaggagggcacctacgccgccaaggtgatcttcagaaatgaggtgaccaatgagttcctgtactacaacgtgtccttccgggtcatccccagcggcatcatcaagaccatcgagatggtgacccctgtgcggcaggtggccagcgccagcatcaagctggagaaccccctgccctacagcgtgaccttcagcacagagtgcaggatgccagacatcgccctgcccagccagtttgtggtgcctgccaacagcgagggcaccttctcctttgagttccagcccctgaaggccggggagaccttcggccgcctgaccctgcacaacacagacctgggctactaccagtatgagctgtacctgaaggccaccccagccctgcctgagaagcctgtgcacttccagacagtgctgggcagcagccagatcatcctggtgaagttcatcaactacacccggcagaggacagagtactactgcaggacagactgcacagacttccacgccgagaagctgatcaatgctgcccctgggggccagggcggcacagaggcctctgtggaggtgctgtttgagcccagccacctgggggagaccaagggcatcctgatcctgagcagcctggccggcggggagtacatcatccccctgtttggcatggccctgccccccaagccccagggccccttcagcatccgggccggctacagcatcatcatccccttcaagaatgtgttctaccacatggtgaccttcagcatcatcgtggacaacccagccttcaccatccgggccggggagagcgtgcggcccaagaagatcaacaacatcaccgtgtcctttgagggcaaccccagcggcagcaagacccccatcaccaccaagctgactgtgtcctgccccccaggagagggcagcgagactggagtgaagtgggtgtactacctgaagggcatcaccctgtag

SEQ ID NO: 155690 - DNA, 3054 bp, synthetic construct
  misc_feature 1..3054: note = Description of Artificial Sequence: Synthetic coding sequence
  source 1..3054: mol_type = other DNA
atgaccagccggcggctggaggagagcatgggcgctgtgcagatgggcctggtgaacatgttcaagggcttccagagcaaggtgctgccccccctgagccccaaggtggtgacagaggaggaggtgaacaggatgctgaccccatctgagttcctgaaggagatgagcctgaccacagagcagaggctggccaagacccggctgatgtgccggccccagatcatcgagctgctggacatgggagagaccacccaccagaagttctctggaattgacctggaccaggccctcttccagcccttccccagcgagatcatcttccagaactacaccccctgtgaggtgtatgaggtgcccctcatcctgagaaataatgacaagatcccccggctggtgaaggtggtggaggagagcagcccctacttcaaggtgatcagccccaaggacatcggccacaaggtggcccctggggtgcccagcatcttccgcatcctcttcaccccagaggagaacaaggactatgcccacaccctgacctgtgtgacagagcgggagaagttcatcgtgcccatcaaggcccggggggcccgggccatcctggacttcccagacaagctgaacttcagcacctgccctgtgaagtacagcacccagaagatcctgctggtgaggaacatcggcaacaagaatgctgtgttccacatcaagacctgccggcccttcagcattgaaccagccatcggcaccctgaatgtgggggagagcatgcagctggaggtggagtttgagccccagagcgtgggggaccacagcggccgcctgattgtgtgctatgacaccggggagaaggtgtttgtgtccctgtatggagctgccatcgacatgaacatccggctggacaagaacagcctgaccatcgagaagacctacatcagcctggccaaccagaggaccatcaccatccacaacagaagcaacatcatcgcccacttcctgtggaaggtgtttgccacccagcaggaggaggaccgggagaagtaccgggcctgtgatgacctgatcaaggaggagaaggatgaaacagatgagttctttgaggagtgcatcacagaccccctgctgcgggagcacctgtctgtgctgagcaggacctttgccaaccagaggcggctggtgcagggcgacagcaagctgttcttcaacaacgtgttcaccgtggagcccctggagggagatgtgtggcccaacagcagcgctgagatcaccgtgtacttcaaccccctggaggccaagctgtaccagcagaccatctactgtgacatcctgggccgggagatccggctgcccctgcgcatcaagggggagggcatgggccccaagatccacttcaactttgagctgctggacatcggcaaggtgttcaccggcagcgcccactgctatgaggccatcctgtacaacaagggcagcattgatgccctcttcaacatgaccccacccaccagcgccctgggcgcctgctttgtgttcagccccaaggagggcatcatcgagcccagcggcgtgcaggccatccagatctccttcagcagcaccatcctgggcaactttgaggaggagttcctggtgaatgtgaatggcagccctgagcctgtgaagctgaccatccggggctgtgtgattggccccaccttccacttcaacgtgcctgccctgcactttggagatgtgtcctttggcttcccccacaccctcatctgcagcctgaacaacaccagcctcatccccatgacctacaagctgcgcatccctggagatggcctgggccacaagagcatctcctactgtgagcagcacgtggactacaagaggcccagctggaccaaggaggagatcagctccatgaagcccaaggagttcaccatcagcccagactgtggcaccatccggccccagggctttgctgccatccgggtgaccctgtgcagcaacacagtgcagaagtatgagctggccctggtggtggatgtggagggcatcggggaggaggtgctggccctgctgatcacagcccgctgtgtggtgcctgccctgcacctggtgaacacagaggtggactttggccactgcttcctgaagtacccctatgagaagaccctgcagctggccaaccaggatgacctgcccggcttctatgaggtgcagccccaggtgtgtgaggaggtgcccaccgtgctcttcagcagccccaccccatctggagtcatcagccccagcagcaccatccacatccccctggtgctggagacccaggtgactggagagcacaggagcacagtgtacatcagcatcttcggcagccaggacccccccctggtgtgccacctgaagtctgctggggagggccctgtgatctacgtgcaccccaaccaggtggactttggaaacatctacgtgctgaaggacagcagccgcatcctgaacctgtgcaaccagagcttcatcccagccttcttccaggcccacatggcccacaagaagagcctgtggaccatcgagcccaatgaaggcatggtgcccccagagacagatgtgcagctggccctgacagccaacctgaatgacaccctgaccttcaaggactgtgtgatcctggacatcgagaacagcagcacctaccgcatccctgtgcaggccagcggcaccggcagcaccatcgtgtctgacaagccctttgcccctgagctgaacctgggcgcccacttcagcctggacacccactactaccacttcaagctgatcaacaagggccgccgcatccagcagctgttctggatgaatgacagcttccggccccaggccaagctgagcaagaagggccgggtgaagaagggccacgcccacgtgcagccccagcccagcggcagccaggagccccgggacccccagagccctgtgttccacctgcacccagcctccatggagctgtacccaggccaggccattgatgtgatcctggagggctacagcgccaccccccgggtgcggggctag

SEQ ID NO: 155691 - DNA, 2223 bp, synthetic construct
  misc_feature 1..2223: note = Description of Artificial Sequence: Synthetic coding sequence
  source 1..2223: mol_type = other DNA
atgaccagccggcggctggaggagagcatgggcgctgtgcagatgggcctggtgaacatgttcaagggcttccagagcaaggtgctgccccccctgagccccaaggtggtgacagaggaggaggtgaacaggatgctgaccccatctgagttcctgaaggagatgagcctgaccacagagcagaggctggccaagacccggctgatgtgccggccccagatcatcgagctgctggacatgggagagaccacccaccagaagttctctggaattgacctggaccaggccctcttccagcccttccccagcgagatcatcttccagaactacaccccctgtgaggtgtatgaggtgcccctcatcctgagaaataatgacaagatcccccggctggtgaaggtggtggaggagagcagcccctacttcaaggtgatcagccccaaggacatcggccacaaggtggcccctggggtgcccagcatcttccgcatcctcttcaccccagaggagaacaaggactatgcccacaccctgacctgtgtgacagagcgggagaagttcatcgtgcccatcaaggcccggggggcccgggccatcctggacttcccagacaagctgaacttcagcacctgccctgtgaagtacagcacccagaagatcctgctggtgaggaacatcggcaacaagaatgctgtgttccacatcaagacctgccggcccttcagcattgaaccagccatcggcaccctgaatgtgggggagagcatgcagctggaggtggagtttgagccccagagcgtgggggaccacagcggccgcctgattgtgtgctatgacaccggggagaaggtgtttgtgtccctgtatggagctgccatcgacatgaacatccggctggacaagaacagcctgaccatcgagaagacctacatcagcctggccaaccagaggaccatcaccatccacaacagaagcaacatcatcgcccacttcctgtggaaggtgtttgccacccagcaggaggaggaccgggagaagtaccgggcctgtgatgacctgatcaaggaggagaaggatgaaacagatgagttctttgaggagtgcatcacagaccccctgctgcgggagcacctgtctgtgctgagcaggacctttgccaaccagaggcggctggtgcagggcgacagcaagctgttcttcaacaacgtgttcaccgtggagcccctggagggagatgtgtggcccaacagcagcgctgagatcaccgtgtacttcaaccccctggaggccaagctgtaccagcagaccatctactgtgacatcctgggccgggagatccggctgcccctgcgcatcaagggggagggcatgggccccaagatccacttcaactttgagctgctggacatcggcaaggtgttcaccggcagcgcccactgctatgaggccatcctgtacaacaagggcagcattgatgccctcttcaacatgaccccacccaccagcgccctgggcgcctgctttgtgttcagccccaaggagggcatcatcgagcccagcggcgtgcaggccatccagatctccttcagcagcaccatcctgggcaactttgaggaggagttcctggtgaatgtgaatggcagccctgagcctgtgaagctgaccatccggggctgtgtgattggccccaccttccacttcaacgtgcctgccctgcactttggagatgtgtcctttgccacccaggagctgcgggacccccaggtgctgatccccttccagcgcttcccccacaccctcatctgcagcctgaacaacaccagcctcatccccatgacctacaagctgcgcatccctggagatggcctgggccacaagagcatctcctactgtgagcagcacgtggactacaagaggcccagctggaccaaggaggagatcagctccatgaagcccaaggagttcaccatcagcccagactgtggcaccatccggccccagggctttgctgccatccgggtgaccctgtgcagcaacacagtgcagaagtatgagctggccctggtggtggatgtggagggcattggagaggaggtgctggccctgctgatcacagccagcgcccctgagctgtgcaacaggaaggtgatgctgtctgtgctgcagtggaagatccaccgggccaagaggagcctgccccgggacacagtggccgtgacctag

SEQ ID NO: 155692 - DNA, 3645 bp, synthetic construct
  misc_feature 1..3645: note = Description of Artificial Sequence: Synthetic coding sequence
  source 1..3645: mol_type = other DNA
atgaccagccggcggctggaggagagcatgggcgctgtgcagatgggcctggtgaacatgttcaagggcttccagagcaaggtgctgccccccctgagccccaaggtggtgacagaggaggaggtgaacaggatgctgaccccatctgagttcctgaaggagatgagcctgaccacagagcagaggctggccaagacccggctgatgtgccggccccagatcatcgagctgctggacatgggagagaccacccaccagaagttctctggaattgacctggaccaggccctcttccagcccttccccagcgagatcatcttccagaactacaccccctgtgaggtgtatgaggtgcccctcatcctgagaaataatgacaagatcccccggctggtgaaggtggtggaggagagcagcccctacttcaaggtgatcagccccaaggacatcggccacaaggtggcccctggggtgcccagcatcttccgcatcctcttcaccccagaggagaacaaggactatgcccacaccctgacctgtgtgacagagcgggagaagttcatcgtgcccatcaaggcccggggggcccgggccatcctggacttcccagacaagctgaacttcagcacctgccctgtgaagtacagcacccagaagatcctgctggtgaggaacatcggcaacaagaatgctgtgttccacatcaagacctgccggcccttcagcattgaaccagccatcggcaccctgaatgtgggggagagcatgcagctggaggtggagtttgagccccagagcgtgggggaccacagcggccgcctgattgtgtgctatgacaccggggagaaggtgtttgtgtccctgtatggagctgccatcgacatgaacatccggctggacaagaacagcctgaccatcgagaagacctacatcagcctggccaaccagaggaccatcaccatccacaacagaagcaacatcatcgcccacttcctgtggaaggtgtttgccacccagcaggaggaggaccgggagaagtaccgggcctgtgatgacctgatcaaggaggagaaggatgaaacagatgagttctttgaggagtgcatcacagaccccctgctgcgggagcacctgtctgtgctgagcaggacctttgccaaccagaggcggctggtgcagggcgacagcaagctgttcttcaacaacgtgttcaccgtggagcccctggagggagatgtgtggcccaacagcagcgctgagatcaccgtgtacttcaaccccctggaggccaagctgtaccagcagaccatctactgtgacatcctgggccgggagatccggctgcccctgcgcatcaagggggagggcatgggccccaagatccacttcaactttgagctgctggacatcggcaaggtgttcaccggcagcgcccactgctatgaggccatcctgtacaacaagggcagcattgatgccctcttcaacatgaccccacccaccagcgccctgggcgcctgctttgtgttcagccccaaggagggcatcatcgagcccagcggcgtgcaggccatccagatctccttcagcagcaccatcctgggcaactttgaggaggagttcctggtgaatgtgaatggcagccctgagcctgtgaagctgaccatccggggctgtgtgattggccccaccttccacttcaacgtgcctgccctgcactttggagatgtgtcctttggcttcccccacaccctcatctgcagcctgaacaacaccagcctcatccccatgacctacaagctgcgcatccctggagatggcctgggccacaagagcatctcctactgtgagcagcacgtggactacaagaggcccagctggaccaaggaggagatcagctccatgaagcccaaggagttcaccatcagcccagactgtggcaccatccggccccagggctttgctgccatccgggtgaccctgtgcagcaacacagtgcagaagtatgagctggccctggtggtggatgtggagggcatcggggaggaggtgctggccctgctgatcacagcccgctgtgtggtgcctgccctgcacctggtgaacacagaggtggactttggccactgcttcctgaagtacccctatgagaagaccctgcagctggccaaccaggatgacctgcccggcttctatgaggtgcagccccaggtgtgtgaggaggtgcccaccgtgctcttcagcagccccaccccatctggagtcatcagccccagcagcaccatccacatccccctggtgctggagacccaggtgactggagagcacaggagcacagtgtacatcagcatcttcggcagccaggacccccccctggtgtgccacctgaagtctgctggggagggccctgtgatctacgtgcaccccaaccaggtggactttggaaacatctacgtgctgaaggacagcagccgcatcctgaacctgtgcaaccagagcttcatcccagccttcttccaggcccacatggcccacaagaagagcctgtggaccatcgagcccaatgaaggcatggtgcccccagagacagatgtgcagctggccctgacagccaacctgaatgacaccctgaccttcaaggactgtgtgatcctggacatcgagaacagcagcacctaccgcatccctgtgcaggccagcggcaccggcagcaccatcgtgtctgacaagccctttgcccctgagctgaacctgggcgcccacttcagcctggacacccactactaccacttcaagctgatcaacaagggccgccgcatccagcagctgttctggatgaatgacagcttccggccccaggccaagctgagcaagaagggccgggtgaagaagggccacgcccacgtgcagccccagcccagcggcagccaggagccccgggacccccagagccctgtgttccacctgcacccagcctccatggagctgtacccaggccaggccattgatgtgatcctggagggctacagcgccacccccaggaagcccaacagcatcctgaagccagactaccagcccctggccatcaagaacatcagcaccctgcctgtgaacctgctgctgagcaccagcggccccttcttcatctgtgaaacagacaagagcctgctgcctgccaccccagagcccatcaagctggagattgatgaggagaagaacctgctgatcaagtttgaccccagctacagaaatgacctgaacaactgggtggccgaggagatcctggccatcaagtatgtggagcacccccagattgacagcctggacctgcggggggaggtgcactaccccaacctgagctttgagaccaaggagctggactttggctgcatcctgaatgacacagagctgatccgctacgtgaccatcaccaactgcagccccctggtggtgaagttccgctggttcttcctggtgaatgatgaggagaaccagatccgctttgtgaccctgcccaagaagccctacagcgcccctgtgtcccagatggagagcatcccagccaccagcgaggccgccagccccccagccatcctggtgacagtggagagccctgagatggacctgaatgactttgtgaagtag

SEQ ID NO: 155693 - DNA, 3054 bp, synthetic construct; identical to SEQ ID NO: 155690
  misc_feature 1..3054: note = Description of Artificial Sequence: Synthetic coding sequence
  source 1..3054: mol_type = other DNA

SEQ ID NO: 155694 - DNA, 822 bp, synthetic construct
  misc_feature 1..822: note = Description of Artificial Sequence: Synthetic coding sequence
  source 1..822: mol_type = other DNA
atggccacctgggatgagaaggctgtgacccggcgggccaaggtggccccagctgagaggatgagcaagttcctgcggcacttcaccgtggtgggagatgactaccacgcctggaacatcaactacaagaagtgggagaatgaggaggaggaggaggaggaggagcagcccccacccacccctgtgtctggagaggagggccgggccgccgccccagatgtggccccagcccctggccctgccccccgggcccccctggacttccggggcatgctgaggaagctgttcagcagccaccgcttccaggtgatcatcatctgcctggtggtgctggatgccctgctggtgctggccgagctgatcctggacctgaagatcatccagcctgacaagaacaactatgctgccatggtgttccactacatgagcatcaccatcctggtgttcttcatgatggagatcatcttcaagctgtttgtgttccggctggagttcttccaccacaagtttgagatcctggatgctgtggtggtggtggtgtccttcatcctggacatcgtgctgctcttccaggagcaccagtttgaggccctgggcctgctgatcctgctgcggctgtggagggtggcccgcatcatcaatggcatcatcatctctgtgaagaccaggtctgagcggcagctgctgcggctgaagcagatgaatgtgcagctggccgccaagatccagcacctggagttcagctgcagcgagaaggagcaggagattgaaaggctgaacaagctgctgcggcagcacggcctgctgggggaggtgaactag

SEQ ID NO: 155695 - DNA, 822 bp, synthetic construct; identical to SEQ ID NO: 155694
  misc_feature 1..822: note = Description of Artificial Sequence: Synthetic coding sequence
  source 1..822: mol_type = other DNA

SEQ ID NO: 155696 - DNA, 237 bp, synthetic construct
  misc_feature 1..237: note = Description of Artificial Sequence: Synthetic coding sequence
  source 1..237: mol_type = other DNA
atggccacctgggatgagaaggctgtgacccggcgggccaaggtggccccagctgagaggatgagcaagttcctgcggcacttcaccgtggtgggagatgactaccacgcctggaacatcaactacaagaagtgggagaatgaggaggaggaggaggaggaggagcagcccccacccacccctgtgtctggagaggagggccgggccgccgccccagatgtggccccagccccctag

SEQ ID NO: 155697 - DNA, 900 bp, synthetic construct
  misc_feature 1..900: note = Description of Artificial Sequence: Synthetic coding sequence
  source 1..900: mol_type = other DNA
atggaggagctgctgcctgatggccagatctgggccaacatggaccctgaggagaggatgctggccgccgccacagccttcacccacatctgtgccggccagggcgagggagatgtgcggcgggaggcccagagcatccagtatgacccctacagcaaggcctctgtggcccctgggaagaggcctgccctgcctgtgcagctgcagtacccccacgtggagagcaatgtgcccagcgagaccgtgtctgaggccagccagaggctgaggaagcctgtgatgaagaggaaggtgctgcggaggaagccagatggagaggtgctggtgacagatgagagcatcatcagcgagagcgagagcggcacagaaaatgaccaggacctgtgggacctgcggcagaggctgatgaatgtgcagttccaggaggacaaggagagcagctttgatgtgtcccagaagttcaacctgccccatgagtaccagggcatcagccaggaccagctgatctgcagcctgcagcgggagggcatgggcagccctgcctatgagcaggacctgattgtggccagccggcccaagagcttcatcctgcccaagctggaccagctgagcaggaacagaggcaagacagacagagtggcccgctactttgagtacaagagggactgggacagcatccggctgcctggagaggaccacaggaaggagctgcgctggggcgtgcgggagcagatgctgtgcagagctgagccccagagcaagccccagcacatctacgtgcccaacaactacctggtgcccacagagaagaagaggtctgccctgcgctggggcgtgcgctgtgacctggccaatggagtcatccccaggaagctgcccttccccctgagccccagctag

SEQ ID NO: 155698 - DNA, 900 bp, synthetic construct; identical to SEQ ID NO: 155697
  misc_feature 1..900: note = Description of Artificial Sequence: Synthetic coding sequence
  source 1..900: mol_type = other DNA

SEQ ID NO: 155699 - DNA, 900 bp, synthetic construct; identical to SEQ ID NO: 155697
  misc_feature 1..900: note = Description of Artificial Sequence: Synthetic coding sequence
  source 1..900: mol_type = other DNA

SEQ ID NO: 155700 - DNA, 1113 bp, synthetic construct
  misc_feature 1..1113: note = Description of Artificial Sequence: Synthetic coding sequence
  source 1..1113: mol_type = other DNA
atgctgcccaggctcatctgcatcaatgactatgagcagcacgccaagtctgtgctgcccaagagcatctatgactactacagaagtggggccaatgatgaggagaccctggccgacaacattgctgccttcagccgctggaagctgtaccccaggatgctgagaaatgtggccgagacagacctgagcacctctgtgctgggccagagggtgtccatgcccatctgtgtgggcgccacagccatgcagaggatggcccacgtggatggagagctggccaccgtgcgggcctgccagagcctgggcaccggcatgatgctgagctcctgggccaccagcagcattgaggaggtggccgaggccggccctgaggccctgcgctggctgcagctgtacatctacaaggaccgggaggtgaccaagaagctggtgcggcaggccgagaagatgggctacaaggccatctttgtgacagtggacaccccctacctgggcaaccggctggatgatgtgaggaaccgcttcaagctgcccccccagctgaggatgaagaactttgagaccagcaccctgtccttctccccagaagaaaattttggagatgattctggcctggccgcctacgtggccaaggccatcgaccccagcatctcctgggaggacatcaagtggctgcggcggctgaccagcctgcccatcgtggccaagggcatcctgcggggagatgatgcccgggaggccgtgaagcacggcctgaatggcatcctggtgagcaaccacggggcccggcagctggatggagtgcctgccaccattgatgtgctgcctgagatcgtggaggccgtggagggcaaggtggaggtgttcctggatggaggagtgaggaagggcacagatgtgctgaaggccctggccctgggcgccaaggctgtgtttgtgggccggcccatcgtgtggggcctggccttccagggcgagaagggcgtgcaggatgtgctggagatcctgaaggaggagttccggctggccatggccctgagcggctgccagaatgtgaaggtgattgacaagaccctggtgaggaagaaccccctggccgtgtccaagatctag

SEQ ID NO: 155701 - DNA, 1056 bp, synthetic construct
  misc_feature 1..1056: note = Description of Artificial Sequence: Synthetic coding sequence
  source 1..1056: mol_type = other DNA
atgagcctggtgtgcctgacagacttccaggcccacgcccgggagcagctgagcaagagcacccgggacttcattgaaggaggagcagatgacagcatcaccagagatgacaacattgctgccttcaagaggatccggctgcggccccgctacctgagagatgtgtctgaggtggacaccaggaccaccatccagggcgaggagatcagcgcccccatctgcatcgcccccaccggcttccactgcctggtgtggccagatggagagatgagcacagcccgggccgcccaggccgccggcatctgctacatcaccagcacctttgccagctgcagcctggaggacatcgtgattgctgcccctgagggcctgcgctggttccagctgtatgtgcacccagacctgcagctgaacaagcagctgatccagagggtggagagcctgggcttcaaggccctggtgatcaccctggacacccctgtgtgtggcaacagaagacatgacatccggaaccagctgcggaggaacctgaccctgacagacctgcagagccccaagaagggaaatgccatcccctacttccagatgacccccatcagcaccagcctgtgctggaatgacctgtcctggttccagagcatcacccggctgcccatcatcctgaagggcatcctgaccaaggaggatgctgagctggccgtgaagcacaacgtgcagggcatcatcgtgagcaaccacggcggccggcagctggatgaggtgctggccagcattgatgccctgacagaggtggtggccgctgtgaagggcaagattgaggtgtacctggatggaggagtgaggactggaaatgatgtgctgaaggccctggccctgggcgccaagtgcatcttcctgggccggcccatcctgtggggcctggcctgcaagggggagcacggcgtgaaggaggtgctgaacatcctgaccaatgagttccacacctccatggccctgaccggctgccgctctgtggccgagatcaacagaaacctggtgcagttcagccggctgtag

SEQ ID NO: 155702 - DNA, 1095 bp, synthetic construct
  misc_feature 1..1095: note = Description of Artificial Sequence: Synthetic coding sequence
  source 1..1095: mol_type = other DNA
atggaggacaagatgtggagcgaatgtgagggccctgagatgagcctggtgtgcctgacagacttccaggcccacgcccgggagcagctgagcaagagcacccgggacttcatcgagggcggcgcagatgacagcatcaccagagatgacaacattgctgccttcaagaggatccggctgcggccccgctacctgagagatgtgtctgaggtggacaccaggaccaccatccagggcgaggagatcagcgcccccatctgcatcgcccccaccggcttccactgcctggtgtggccagatggagagatgagcacagcccgggccgcccaggccgccggcatctgctacatcaccagcacctttgccagctgcagcctggaggacatcgtgattgctgcccctgagggcctgcgctggttccagctgtatgtgcacccagacctgcagctgaacaagcagctgatccagagggtggagagcctgggcttcaaggccctggtgatcaccctggacacccctgtgtgtggcaacagaagacatgacatccggaaccagctgcggaggaacctgaccctgacagacctgcagagccccaagaagggaaatgccatcccctacttccagatgacccccatcagcaccagcctgtgctggaatgacctgtcctggttccagagcatcacccggctgcccatcatcctgaagggcatcctgaccaaggaggatgctgagctggccgtgaagcacaacgtgcagggcatcatcgtgagcaaccacggcggccggcagctggatgaggtgctggccagcattgatgccctgacagaggtggtggccgctgtgaagggcaagattgaggtgtacctggatggcggcgtgaggactggaaatgatgtgctgaaggccctggccctgggcgccaagtgcatcttcctgggccggcccatcctgtggggcctggcctgcaagggggagcacggcgtgaaggaggtgctgaacatcctgaccaatgagttccacacctccatggccctgaccggctgccgctctgtggccgagatcaacagaaacctggtgcagttcagccggctgtag

SEQ ID NO: 155703 - DNA, 561 bp, synthetic construct
  misc_feature 1..561: note = Description of Artificial Sequence: Synthetic coding sequence
  source 1..561: mol_type = other DNA
atgagcctggtgtgcctgacagacttccaggcccacgcccgggagcagctgagcaagagcacccgggacttcattgaaggaggagcagatgacagcatcaccagagatgacaacattgctgccttcaagaggatccggctgcggccccgctacctgagagatgtgtctgaggtggacaccaggaccaccatccagggcgaggagatcagcgcccccatctgcatcgcccccaccggcttccactgcctggtgtggccagatggagagatgagcacagcccgggcccctgagggcctgcgctggttccagctgtatgtgcacccagacctgcagctgaacaagcagctgatccagagggtggagagcctgggcttcaaggccctggtgatcaccctggacacccctgtgtgtggcaacagaagacatgacatccggaaccagctgcggaggaacctgaccctgacagacctgcagagccccaagaagggaaatgccatcccctacttccagatgacccccatcagcaccagcctgtgctggaatgacctgtcctggttctag

SEQ ID NO: 155704 - DNA, 2292 bp, synthetic construct
  misc_feature 1..2292: note = Description of Artificial Sequence: Synthetic coding sequence
  source 1..2292: mol_type = other DNA
atggtggcctgccgggccatcggcatcctgagccgcttcagcgccttccgcatcctgcggagccggggctacatctgcaggaacttcaccggcagcagcgccctgctgaccaggacccacatcaactatggagtgaagggagatgtggccgtggtgcgcatcaacagccccaacagcaaggtgaacaccctgagcaaggagctgcacagcgagttcagcgaggtgatgaatgagatctgggccagtgaccagatccgctctgctgtgctgatcagcagcaagccaggctgcttcatcgccggggctgacatcaacatgctggccgcctgcaagaccctgcaggaggtgacccagctgagccaggaggcccagagaattgtggagaagctggagaagagcaccaagcccatcgtggccgccatcaatggcagctgcctgggcggcggcctggaggtggccatcagctgccagtaccgcatcgccaccaaggacaggaagacagtgctgggcaccccagaggtgctgctgggcgccctgcccggggccggcggcacccagaggctgcccaagatggtgggcgtgcctgctgccctggacatgatgctgaccggccgcagcatccgggctgaccgggccaagaagatgggcctggtggaccagctggtggagcccctgggccctggcctgaagcccccagaggagaggaccatcgagtacctggaggaggtggccatcacctttgccaagggcctggccgacaagaagatcagccccaagagggacaagggcctggtggagaagctgacagcctatgccatgaccatcccctttgtgcggcagcaggtgtacaagaaggtggaggagaaggtgaggaagcagaccaagggcctgtacccagcccccctgaagatcattgatgtggtgaagacaggcatcgagcagggcagtgatgctggctacctgtgtgagagccagaagtttggagagctggtgatgaccaaggagagcaaggccctgatgggcctgtaccacggccaggtgctgtgcaagaagaacaagtttggagccccccagaaggatgtgaagcacctggccatcctgggcgccggcctgatgggcgccggcatcgcccaggtgtctgtggacaagggcctgaagaccatcctgaaggatgccaccctgacagccctggaccggggccagcagcaggtgttcaagggcctgaatgacaaggtgaagaagaaggccctgaccagctttgagcgggacagcatcttcagcaacctgaccggccagctggactaccagggctttgagaaggctgacatggtgattgaagctgtgtttgaggacctgagcctgaagcaccgggtgctgaaggaggtggaggccgtcatcccagaccactgcatctttgccagcaacaccagcgccctgcccatcagcgagattgctgctgtgtccaagaggcctgagaaggtgattggcatgcactacttcagccctgtggacaagatgcagctgctggagatcatcaccacagagaagaccagcaaggacaccagcgccagcgctgtggccgtgggcctgaagcagggcaaggtgatcatcgtggtgaaggatggccctggcttctacaccacccgctgcctggcccccatgatgtctgaggtgatccgcatcctgcaggagggcgtggaccccaagaagctggacagcctgaccaccagctttggcttccctgtgggcgccgccaccctggtggatgaggtgggcgtggatgtggccaagcacgtggccgaggacctgggcaaggtgtttggagagagatttggaggcggcaaccctgagctgctgacccagatggtgtccaagggcttcctgggcaggaagagcggcaagggcttctacatctaccaggagggcgtgaagaggaaggacctgaacagcgacatggacagcatcctggccagcctgaagctgccccccaagtctgaggtgtccagtgatgaggacatccagttccggctggtgaccaggtttgtgaatgaagctgtgatgtgcctgcaggagggcatcctggccaccccagctgagggggacatcggggctgtgtttggcctgggcttccccccctgcctgggcggccccttccgctttgtggacctgtatggagcccagaagatcgtggaccggctgaagaagtatgaggccgcctacggcaagcagttcaccccctgccagctgctggccgaccacgccaacagccccaacaagaagttctaccagtag

SEQ ID NO: 155705 - DNA, 783 bp, synthetic construct
  misc_feature 1..783: note = Description of Artificial Sequence: Synthetic coding sequence
  source 1..783: mol_type = other DNA
atggagagcaagggcatgtggcagctgtttgagctgaccctgcccatccagagcatgctggccgcctgcaagaccctgcaggaggtgacccagctgagccaggaggcccagagaattgtggagaagctggagaagagcaccaagcccatcgtggccgccatcaatggcagctgcctgggcggcggcctggaggtggccatcagctgccagtacagaattgccaccaaggacaggaagacagtgctgggcaccccagaggtgctgctgggcgccctgcctggagctgggggcacccagaggctgcccaagatggtgggcgtgcctgctgccctggacatgatgctgaccggccgcagcatccgggctgaccgggccaagaagatgggcctggtggaccagctggtggagcccctgggccctggcctgaagcccccagaggagaggaccatcgagtacctggaggaggtggccatcacctttgccaagggcctggccgacaagaagatcagccccaagagggacaagggcctggtggagaagctgacagcctatgccatgaccatcccctttgtgcggcagcaggtgtacaagaaggtggaggagaaggtgaggaagcagaccaagggcctgtacccagcccccctgaagatcattgatgtggtgaagacaggaattgagcagggcagtgatgctggctacctgtgtgagagccaggtgaacctcttccccttcaacgtgctgctgtctgtgaagggcaagctgaagatccagagctctgtgtag

SEQ ID NO: 155706 - DNA, 1425 bp, synthetic construct
  misc_feature 1..1425: note = Description of Artificial Sequence: Synthetic coding sequence
  source 1..1425: mol_type = other DNA
atgaccatcctgacctaccccttcaagaacctgcccacagccagcaagtgggccctgcgcttcagcatccggcccctgagctgcagcagccagctgcgggccgccccagctgtgcagaccaagaccaagaagaccctggccaagcccaacatcagaaatgtggtggtggtggatggagtgaggacccccttcctgctgagcggcaccagctacaaggacctgatgcctcatgacctggcccgggccgccctgaccggcctgctgcacaggacctctgtgcccaaggaggtggtggactacatcatctttggaacagtcatccaggaggtgaagaccagcaatgtggcccgggaggccgccctgggcgccggcttcagtgacaagaccccagcccacacagtgaccatggcctgcatcagcgccaaccaggccatgaccactggagtgggcctcatcgccagcggccagtgtgatgtgattgtggccggcggcgtggagctgatgtctgatgtgcccatccgccacagcaggaagatgaggaagctgatgctggacctgaacaaggccaagtccatgggccagaggctgagcctcatcagcaagttccgcttcaacttcctggcccctgagctgcctgctgtgtctgagttcagcaccagcgagaccatgggccacagcgctgaccggctggccgccgcctttgctgtgtcccggctggagcaggatgaatatgccctgcggagccacagcctggccaagaaggcccaggatgagggcctgctgagtgatgtggtgcccttcaaggtgcctgggaaggacacagtgaccaaggacaatggcatccggcccagcagcctggagcagatggccaagctgaagccagccttcatcaagccctacggcaccgtgacagctgccaacagcagcttcctgacagatggagccagcgccatgctgatcatggccgaggagaaggccctggccatgggctacaagcccaaggcctacctgcgggacttcatgtatgtgtcccaggaccccaaggaccagctgctgctgggccccacctacgccacccccaaggtgctggagaaggccggcctgaccatgaatgacattgatgcctttgagttccacgaggccttcagcggccagatcctggccaacttcaaggccatggacagcgactggtttgctgagaactacatgggcaggaagaccaaggtgggcctgccccccctggagaagttcaacaactggggcggcagcctgagcctgggccacccctttggagccaccggctgccgcctggtgatggctgctgccaaccggctgaggaaggagggcggccagtatggcctggtggccgcctgtgccgccggcggccagggccacgccatgattgtggaggcctaccccaagtag

SEQ ID NO: 155707 - DNA, 258 bp, synthetic construct
  misc_feature 1..258: note = Description of Artificial Sequence: Synthetic coding sequence
  source 1..258: mol_type = other DNA
atgaccatcctgacctaccccttcaagaacctgcccacagccagcaagtgggccctgcgcttcagcatccggcccctgagctgcagcagccagctgcgggccgccccagctgtgcagaccaagaccaagaagaccctggccaagcccaacatcagaaatgtggtggtggtggatggagtgaggacccccttcctgctgagcggcaccagctacaaggacctgatgcctcatgacctggcccgggccgccctgacctag

SEQ ID NO: 155708 - DNA, 531 bp, synthetic construct
  misc_feature 1..531: note = Description of Artificial Sequence: Synthetic coding sequence
  source 1..531: mol_type = other DNA
atgaccatcctgacctaccccttcaagaacctgcccacagccagcaagtgggccctgcgcttcagcatccggcccctgagctgcagcagccagctgcgggccgccccagctgtgcagaccaagaccaagaagaccctggccaagcccaacatcagaaatgtggtggtggtggatggagtgaggacccccttcctgctgagcggcaccagctacaaggacctgatgcctcatgacctggcccgggccgccctgaccggcctgctgcacaggacctctgtgcccaaggaggtggtggactacatcatctttggaacagtcatccaggaggtgaagaccagcaatgtggcccgggaggccgccctgggcgccggcttcagtgacaagaccccagcccacacagtgaccatggcctgcatcagcgccaaccaggccatgaccactggagtgggcctcatcgccagcggccagtgtgatgtgattgtggccggcggcgtggagctgatgtctgatgtgcccatccgccacagctag

SEQ ID NO: 155709 - DNA, 453 bp, synthetic construct
  misc_feature 1..453: note = Description of Artificial Sequence: Synthetic coding sequence
  source 1..453: mol_type = other DNA
atgaccatcctgacctaccccttcaagaacctgcccacagccagcaagtgggccctgcgcttcagcatccggcccctgagctgcagcagccagctgcgggccgccccagctgtgcagaccaagaccaagaagaccctggccaagcccaacatcagaaatgtggtggtggtggatggagtgaggacccccttcctgctgagcggcaccagctacaaggacctgatgcctcatgacctggcccgggccgccctgaccggcctgctgcacaggacctctgtgcccaaggaggtggtggactacatcatctttggaacagtcatccaggaggtgaagaccagcaatgtggcccgggaggccgccctgggcgccggcttcagtgacaagaccccagcccacacagtgaccatggcctgcatcagcgccaaccaggccatgaccactggagtgggctag

SEQ ID NO: 155710 - DNA, 1380 bp, synthetic construct
  misc_feature 1..1380: note = Description of Artificial Sequence: Synthetic coding sequence
  source 1..1380: mol_type = other DNA
atgaccatcctgacctaccccttcaagaacctgcccacagccagcaagtgggccctgcgcttcagcatccggcccctgagctgcagcagccagctgcgggccgccccagctgtgcagaccaagaccaagaagaccctggccaagcccaacatcagaaatgtggtggtggtggatggagtgaggacccccttcctgctgagcggcaccagcggcctgctgcacaggacctctgtgcccaaggaggtggtggactacatcatcttcggcaccgtcatccaggaggtgaagaccagcaatgtggcccgggaggccgccctgggcgccggcttcagtgacaagaccccagcccacacagtgaccatggcctgcatcagcgccaaccaggccatgaccaccggggtgggcctgattgccagcggccagtgtgatgtgattgtggccggcggcgtggagctgatgtctgatgtgcccatccgccacagcaggaagatgaggaagctgatgctggacctgaacaaggccaagtccatgggccagaggctgagcctcatcagcaagttccgcttcaacttcctggcccctgagctgcctgctgtgtctgagttcagcaccagcgagaccatgggccacagcgctgaccggctggccgccgcctttgctgtgtcccggctggagcaggatgaatatgccctgcggagccacagcctggccaagaaggcccaggatgagggcctgctgagtgatgtggtgcccttcaaggtgcctgggaaggacacagtgaccaaggacaatggcatccggcccagcagcctggagcagatggccaagctgaagccagccttcatcaagccctatggaacagtgacagctgccaacagcagcttcctgacagatggagccagcgccatgctgatcatggccgaggagaaggccctggccatgggctacaagcccaaggcctacctgcgggacttcatgtatgtgtcccaggaccccaaggaccagctgctgctgggccccacctacgccacccccaaggtgctggagaaggccggcctgaccatgaatgacattgatgcctttgagttccacgaggccttcagcggccagatcctggccaacttcaaggccatggacagcgactggtttgctgagaactacatgggcaggaagaccaaggtgggcctgccccccctggagaagttcaacaactggggcggcagcctgagcctgggccacccctttggagccaccggctgccgcctggtgatggccgccgccaaccggctgaggaaggagggcggccagtatggcctggtggccgcctgtgccgccggcggccagggccacgccatgattgtggaggcctaccccaagtag

SEQ ID NO: 155711 - DNA, 1359 bp, synthetic construct
  misc_feature 1..1359: note = Description of Artificial Sequence: Synthetic coding sequence
  source 1..1359: mol_type = other DNA
atgaccctggtgtctggctggctgctgtatggctggatcatcgctgtgcagaccaagaccaagaagaccctggccaagcccaacatcagaaatgtggtggtggtggatggagtgaggacccccttcctgctgagcggcaccagctacaaggacctgatgcctcatgacctggcccgggccgccctgaccggcctgctgcacaggacctctgtgcccaaggaggtggtggactacatcatctttggaacagtcatccaggaggtgaagaccagcaatgtggcccgggaggccgccctgggcgccggcttcagtgacaagaccccagcccacacagtgaccatggcctgcatcagcgccaaccaggccatgaccactggagtgggcctcatcgccagcggccagtgtgatgtgattgtggccggcggcgtggagctgatgtctgatgtgcccatccgccacagcaggaagatgaggaagctgatgctggacctgaacaaggccaagtccatgggccagaggctgagcctcatcagcaagttccgcttcaacttcctggcccctgagctgcctgctgtgtctgagttcagcaccagcgagaccatgggccacagcgctgaccggctggccgccgcctttgctgtgtcccggctggagcaggatgaatatgccctgcggagccacagcctggccaagaaggcccaggatgagggcctgctgagtgatgtggtgcccttcaaggtgcctgggaaggacacagtgaccaaggacaatggcatccggcccagcagcctggagcagatggccaagctgaagccagccttcatcaagccctacggcaccgtgacagctgccaacagcagcttcctgacagatggagccagcgccatgctgatcatggccgaggagaaggccctggccatgggctacaagcccaaggcctacctgcgggacttcatgtatgtgtcccaggaccccaaggaccagctgctgctgggccccacctacgccacccccaaggtgctggagaaggccggcctgaccatgaatgacattgatgcctttgagttccacgaggccttcagcggccagatcctggccaacttcaaggccatggacagcgactggtttgctgagaactacatgggcaggaagaccaaggtgggcctgccccccctggagaagttcaacaactggggcggcagcctgagcctgggccacccctttggagccaccggctgccgcctggtgatggctgctgccaaccggctgaggaaggagggcggccagtatggcctggtggccgcctgtgccgccggcggccagggccacgccatgattgtggaggcctaccccaagtag

SEQ ID NO: 155712 - DNA, 783 bp, synthetic construct
  misc_feature 1..783: note = Description of Artificial Sequence: Synthetic coding sequence
  source 1..783: mol_type = other DNA
atgaaggtggaggtgctgcctgccctgacagacaactacatgtacctggtgattgatgatgagaccaaggaggccgccatcgtggaccctgtgcagccccagaaggtggtggatgctgccaggaagcatggagtgaagctgaccaccgtgctgaccacccaccaccactgggaccacgccggcggcaatgagaagctggtgaagctggagagcggcctgaaggtgtatggaggagatgaccgcatcggggccctgacccacaagatcacccacctgagcaccctgcaggtgggcagcctgaatgtgaagtgcctggccaccccctgccacaccagcggccacatctgctactttgtgtccaagccaggcggcagcgagcccccagctgtgttcaccggggacaccctgtttgtggccggctgcggcaagttctatgagggcacagcagatgagatgtgcaaggccctgctggaggtgctgggccgcctgcccccagacaccagggtgtactgcggccacgagtacaccatcaacaacctgaagtttgcccggcacgtggagcctggaaatgctgccatccgggagaagctggcctgggccaaggagaagtacagcatcggggagcccaccgtgcccagcaccctggccgaggagttcacctacaaccccttcatgagggtgcgggagaagacagtgcagcagcacgccggggagacagatcctgtgaccaccatgagagctgtgagaagagagaaggaccagttcaagatgccccgggactag

SEQ ID NO: 155713 - DNA, 927 bp, synthetic construct
  misc_feature 1..927: note = Description of Artificial Sequence: Synthetic coding sequence
  source 1..927: mol_type = other DNA
atggtggtgggccggggcctgctgggccgccgcagcctggccgccctgggcgccgcctgtgcccggcggggcctgggccctgccctgctgggcgtcttctgccacacagacctgaggaagaacctgactgtggatgagggcaccatgaaggtggaggtgctgcctgccctgacagacaactacatgtacctggtgattgatgatgagaccaaggaggccgccatcgtggaccctgtgcagccccagaaggtggtggatgctgccaggaagcatggagtgaagctgaccaccgtgctgaccacccaccaccactgggaccacgccggcggcaatgagaagctggtgaagctggagagcggcctgaaggtgtatggaggagatgaccgcatcggggccctgacccacaagatcacccacctgagcaccctgcaggtgggcagcctgaatgtgaagtgcctggccaccccctgccacaccagcggccacatctgctactttgtgtccaagccaggcggcagcgagcccccagctgtgttcaccggggacaccctgtttgtggccggctgcggcaagttctatgagggcacagcagatgagatgtgcaaggccctgctggaggtgctgggccgcctgcccccagacaccagggtgtactgcggccacgagtacaccatcaacaacctgaagtttgcccggcacgtggagcctggaaatgctgccatccgggagaagctggcctgggccaaggagaagtacagcatcggggagcccaccgtgcccagcaccctggccgaggagttcacctacaaccccttcatgagggtgcgggagaagacagtgcagcagcacgccggggagacagatcctgtgaccaccatgagagctgtgagaagagagaaggaccagttcaagatgccccgggactag

SEQ ID NO: 155714 - DNA, 711 bp, synthetic construct
  misc_feature 1..711: note = Description of Artificial Sequence: Synthetic coding sequence
  source 1..711: mol_type = other DNA
atggtggtgggccggggcctgctgggccgccgcagcctggccgccctgggcgccgcctgtgcccggcggggcctgggccctgccctgctgggcgtcttctgccacacagacctgaggaagaacctgactgtggatgagggcaccatgaaggtggaggtgctgcctgccctgacagacaactacatgtacctggtgattgatgatgagaccaaggaggccgccatcgtggaccctgtgcagccccagaaggtggtggatgctgccaggaagcatggagtgaagctgaccaccgtgctgaccacccaccaccactgggaccacgccggcggcaatgagaagctggtgaagctggagagcggcctgaaggtgtatggaggagatgaccgcatcggggccctgacccacaagatcacccacctgagcaccctgcaggtgaccccctgcctgtggctggccgccggcagctccatgaagggcctgaggatgagatgtgtgaagctgtgctggaggtcctgggccggcagccccaggacccaggagagcacagtggccaccagcacccccagcaccaccagcagcctgcacgccacctggagccctgccatgcctccttctggccgctcctggccaggccccaggaggagcacagccagcggcagcccccagtgccaccccccctggcagaggagcctgcccaccacccccagctag

SEQ ID NO: 155715 - DNA, 1128 bp, synthetic construct
  misc_feature 1..1128: note = Description of Artificial Sequence: Synthetic coding sequence
  source 1..1128: mol_type = other DNA
atggccatgacaggctggagctgcctggtgactggagctgggggcttcctgggccagaggatcatccggctgctggtgaaggagaaggagctgaaggagatccgggtgctggacaaggcctttggacctgagctgcgggaggagttcagcaagctgcagaacaagaccaagctgactgtgctggagggggacatcctggatgagcccttcctgaagagggcctgccaggatgtgtctgtcatcatccacacagcctgcatcattgatgtgtttggagtgacccaccgggagagcatcatgaatgtgaatgtgaagggcacccagctgctgctggaggcctgtgtgcaggcctctgtgcctgtgttcatctacaccagcagcattgaggtggccggccccaacagctacaaggagatcatccagaatggccacgaggaggagcccctggagaacacctggccagccccctacccccacagcaagaagctggccgagaaggctgtgctggccgccaacggctggaacctgaagaatggaggcaccctgtacacctgtgccctgcggcccatgtacatctatggagagggcagccgcttcctgagcgccagcatcaatgaggccctgaacaacaacggcatcctgagctctgtgggcaagttcagcacagtgaaccctgtgtatgtgggcaatgtggcctgggcccacatcctggccctgcgggccctgcaggaccccaagaaggcccccagcatccggggccagttctactacatcagtgatgacaccccccaccagagctatgacaacctgaactacaccctgagcaaggagtttggcctgcggctggacagccgctggagcttccccctgagcctgatgtactggattggcttcctgctggagatcgtgtccttcctgctgcggcccatctacacctacagaccacccttcaacagacacatcgtgaccctgagcaacagcgtcttcaccttctcctacaagaaggcccagagggacctggcctacaagcccctgtacagctgggaggaggccaagcagaagacagtggagtgggtgggcagcctggtggacagacacaaggagaccctgaagagcaagacccagtag

SEQ ID NO: 155716 - DNA, 1122 bp, synthetic construct
  misc_feature 1..1122: note = Description of Artificial Sequence: Synthetic coding sequence
  source 1..1122: mol_type = other DNA
atgacaggctggagctgcctggtgactggagctgggggcttcctgggccagaggatcatccggctgctggtgaaggagaaggagctgaaggagatccgggtgctggacaaggcctttggacctgagctgcgggaggagttcagcaagctgcagaacaagaccaagctgactgtgctggagggggacatcctggatgagcccttcctgaagagggcctgccaggatgtgtctgtcatcatccacacagcctgcatcattgatgtgtttggagtgacccaccgggagagcatcatgaatgtgaatgtgaagggcacccagctgctgctggaggcctgtgtgcaggcctctgtgcctgtgttcatctacaccagcagcattgaggtggccggccccaacagctacaaggagatcatccagaatggccacgaggaggagcccctggagaacacctggccagccccctacccccacagcaagaagctggccgagaaggctgtgctggccgccaacggctggaacctgaagaatggaggcaccctgtacacctgtgccctgcggcccatgtacatctatggagagggcagccgcttcctgagcgccagcatcaatgaggccctgaacaacaacggcatcctgagctctgtgggcaagttcagcacagtgaaccctgtgtatgtgggcaatgtggcctgggcccacatcctggccctgcgggccctgcaggaccccaagaaggcccccagcatccggggccagttctactacatcagtgatgacaccccccaccagagctatgacaacctgaactacaccctgagcaaggagtttggcctgcggctggacagccgctggagcttccccctgagcctgatgtactggattggcttcctgctggagatcgtgtccttcctgctgcggcccatctacacctacagaccacccttcaacagacacatcgtgaccctgagcaacagcgtcttcaccttctcctacaagaaggcccagagggacctggcctacaagcccctgtacagctgggaggaggccaagcagaagacagtggagtgggtgggcagcctggtggacagacacaaggagaccctgaagagcaagacccagtag

SEQ ID NO: 155717 - DNA, 1122 bp, synthetic construct; identical to SEQ ID NO: 155716
  misc_feature 1..1122: note = Description of Artificial Sequence: Synthetic coding sequence
  source 1..1122: mol_type = other DNA

SEQ ID NO: 155718 - DNA, 249 bp, synthetic construct
  misc_feature 1..249: note = Description of Artificial Sequence: Synthetic coding sequence
  source 1..249: mol_type = other DNA
atgacaggctggagctgcctggtgactggagctgggggcttcctgggccagaggatcatccggctgctggtgaaggagaaggagctgaaggagatccgggtgctggacaaggcctttggacctgagctgcgggaggagttcagcaagctgcagaacaagaccaagctgactgtgctggagggggacatcctggatgagcccttcctgaagagggcctgccaggatgtgtctgtcatcatccacacctag

SEQ ID NO: 155719 - DNA, 1119 bp, synthetic construct
  misc_feature 1..1119: note = Description of Artificial Sequence: Synthetic coding sequence
  source 1..1119: mol_type = other DNA
atgggctggagctgcctggtgactggagctgggggcctgctgggccagagaattgtgcggctgctggtggaggagaaggagctgaaggagatccgggccctggacaaggccttccggcctgagctgcgggaggagttcagcaagctgcagaacagaaccaagctgactgtgctggagggggacatcctggatgagcccttcctgaagagggcctgccaggatgtgtctgtggtgatccacacagcctgcatcattgatgtgtttggagtgacccaccgggagagcatcatgaatgtgaatgtgaagggcacccagctgctgctggaggcctgtgtgcaggcctctgtgcctgtgttcatctacaccagcagcattgaggtggccggccccaacagctacaaggagatcatccagaatggacatgaggaggagcccctggagaacacctggcccaccccctacccctacagcaagaagctggccgagaaggctgtgctggccgccaacggctggaacctgaagaatggagacaccctgtacacctgtgccctgcggcccacctacatctacggggagggcggccccttcctgagcgccagcatcaatgaggccctgaacaacaacggcatcctgagctctgtgggcaagttcagcacagtgaaccctgtgtatgtgggcaatgtggcctgggcccacatcctggccctgcgggccctgcgggaccccaagaaggcccccagcgtgcggggccagttctactacatcagtgatgacaccccccaccagagctatgacaacctgaactacatcctgagcaaggagtttggcctgcggctggacagccgctggagcctgcccctgaccctgatgtactggattggcttcctgctggaggtggtgtccttcctgctgagccccatctacagctaccagccccccttcaacagacacacagtgaccctgagcaacagcgtcttcaccttctcctacaagaaggcccagagggacctggcctacaagcccctgtacagctgggaggaggccaagcagaagacagtggagtgggtgggcagcctggtggacagacacaaggagaccctgaagagcaagacccagtag

SEQ ID NO: 155720 - DNA, 588 bp, synthetic construct
  misc_feature 1..588: note = Description of Artificial Sequence: Synthetic coding sequence
  source 1..588: mol_type = other DNA
atgggctggagctgcctggtgactggagctgggggcctgctgggccagagaattgtgcggctgctggtggaggagaaggagctgaaggagatccgggccctggacaaggccttccggcctgagctgcgggaggagttcagcaagctgcagaacagaaccaagctgactgtgctggagggggacatcctggatgagcccttcctgaagagggcctgccaggatgtgtctgtggtgatccacacagcctgcatcattgatgtgtttggagtgacccaccgggagagcatcatgaatgtgaatgtgaagggcacccagctgctgctggaggcctgtgtgcaggcctctgtgcctgtgttcatctacaccagcagcattgaggtggccggccccaacagctacaaggagatcatccagaatggacatgaggaggagcccctggagaacacctggcccaccccctacccctacagcaagaagctggccgagaaggctgtgctggccgccaacggctggaacctgaagaatggagacaccctgtacacctgtgccctgcggcccacctacatctacggggagggcggcccctag

SEQ ID NO: 155721 - DNA, 1119 bp, synthetic construct; identical to SEQ ID NO: 155719
  misc_feature 1..1119: note = Description of Artificial Sequence: Synthetic coding sequence
  source 1..1119: mol_type = other DNA

SEQ ID NO: 155722 - DNA, 591 bp, synthetic construct
  misc_feature 1..591: note = Description of Artificial Sequence: Synthetic coding sequence
  source 1..591: mol_type = other DNA
atggctgacagcgcccaggcccagaagctggtgtacctggtgactggaggctgcggcttcctgggggagcacgtggtgaggatgctgctgcagcgggagccccggctgggggagctgcgggtgtttgaccagcacctgggcccctggctggaggagctgaagacaggccctgtgcgggtgacagccatccagggagatgtgacccaggcccacgaggtggccgctgctgtggccggggcccacgtggtgatccacacagctggcctggtggatgtgtttggccgggccagccccaagaccatccacgaggtgaatgtgcagggcaccagaaatgtgattgaggcctgtgtgcagacaggcacccgcttcctggtgtacaccagctccatggaggtggtgggccccaacaccaagggccaccccttctacagaggaaatgaagacaccccctatgaagctgtgcaccgccacccctacccctgcagcaaggccctggccgagtggctggtgctggaggccaacggcaggaaggccatgctgcccggctgcacctgctggcagcccggctcctggagcagcggccagccctag

SEQ ID NO: 155723 - DNA, 1110 bp, synthetic construct
  misc_feature 1..1110: note = Description of Artificial Sequence: Synthetic coding sequence
  source 1..1110: mol_type = other DNA
atggctgacagcgcccaggcccagaagctggtgtacctggtgactggaggctgcggcttcctgggggagcacgtggtgaggatgctgctgcagcgggagccccggctgggggagctgcgggtgtttgaccagcacctgggcccctggctggaggagctgaagacaggccctgtgcgggtgacagccatccagggagatgtgacccaggcccacgaggtggccgctgctgtggccggggcccacgtggtgatccacacagctggcctggtggatgtgtttggccgggccagccccaagaccatccacgaggtgaatgtgcagggcaccagaaatgtgattgaggcctgtgtgcagacaggcacccgcttcctggtgtacaccagctccatggaggtggtgggccccaacaccaagggccaccccttctacagaggaaatgaagacaccccctatgaagctgtgcaccgccacccctacccctgcagcaaggccctggccgagtggctggtgctggaggccaacggcaggaaggtgcggggcggcctgcccctggtgacctgtgccctgcggcccaccggcatctatggagagggccaccagatcatgagggacttctaccggcagggcctgcggctgggcggctggctgttccgggccatcccagcctctgtggagcacggccgggtgtatgtgggcaatgtggcctggatgcacgtgctggccgcccgggagctggagcagagggccaccctgatgggcggccaggtgtacttctgctatgatggcagcccctaccgctcctatgaggacttcaacatggagttcctgggcccctgtggcctgcggctggtgggcgcccggcccctgctgccctactggctgctggtgttcctggccgccctgaatgccctgctgcagtggctgctgcggcccctggtgctgtatgcccccctgctgaacccctacaccctggccgtggccaacaccaccttcaccgtgtccacagacaaggcccagaggcacttcggctatgagcccctcttctcctgggaggacagcaggaccaggaccatcctgtgggtgcaggccgccactggaagtgcccagtag

SEQ ID NO: 155724 - DNA, 591 bp, synthetic construct; identical to SEQ ID NO: 155722
  misc_feature 1..591: note = Description of Artificial Sequence: Synthetic coding sequence
  source 1..591: mol_type = other DNA

SEQ ID NO: 155725 - DNA, 1086 bp, synthetic construct
  misc_feature 1..1086: note = Description of Artificial Sequence: Synthetic coding sequence
  source 1..1086: mol_type = other DNA
atgtctggaaatggaaatgctgctgccacagctgaggagaacagccccaagatgagggtcatccgggtgggcaccaggaagagccagctggcccgcatccagacagattctgtggtggccaccctgaaggccagctacccaggcctgcagtttgagatcatcgccatgagcaccactggagacaagatcctggacacagccctgagcaagattggagagaagagcctcttcaccaaggagctggagcacgccctggagaagaatgaggtggacctggtggtgcacagcctgaaggacctgcccaccgtgctgcccccaggcttcaccatcggggccatctgcaagcgggagaacccccatgatgctgtggtgttccaccccaagtttgtgggcaagaccctggagaccctgcctgagaagtctgtggtgggcaccagcagcctgcggcgggccgcccagctgcagaggaagttcccccacctggagttccgcagcatccggggcaacctgaacacccggctgaggaagctggatgagcagcaggagttcagcgccatcatcctggccacagctggcctgcagaggatgggctggcacaacagagtgggccagatcctgcaccctgaggagtgcatgtatgctgtgggccagggcgccctgggcgtggaggtgcgggccaaggaccaggacatcctggacctggtgggcgtgctgcatgaccctgagaccctgctgcgctgcatcgccgagcgggccttcctgcggcacctggagggcggctgcagcgtgcctgtggccgtgcacacagccatgaaggatggccagctgtacctgactggaggagtgtggagcctggatggcagtgacagcatccaggagaccatgcaggccaccatccacgtgcctgcccagcatgaagatggcccagaagatgacccccagctggtgggcatcacagccaggaacatcccccggggcccccagctggccgcccagaacctgggcatcagcctggccaacctgctgctgagcaaaggagccaagaacatcctggatgtggcccggcagctgaatgatgcccactag

SEQ ID NO: 155726 - DNA, 1035 bp, synthetic construct
  misc_feature 1..1035: note = Description of Artificial Sequence: Synthetic coding sequence
  source 1..1035: mol_type = other DNA
atgagggtcatccgggtgggcaccaggaagagccagctggcccgcatccagacagacagcgtggtggccaccctgaaggccagctacccaggcctgcagtttgagatcatcgccatgagcaccaccggggacaagatcctggacacagccctgagcaagatcggggagaagagcctcttcaccaaggagctggagcacgccctggagaagaatgaggtggacctggtggtgcacagcctgaaggacctgcccaccgtgctgcccccaggcttcaccatcggggccatctgcaagcgggagaacccccatgatgctgtggtgttccaccccaagtttgtgggcaagaccctggagaccctgcctgagaagtctgtggtgggcaccagcagcctgcggcgggccgcccagctgcagaggaagttcccccacctggagttccgcagcatccggggcaacctgaacacccggctgaggaagctggatgagcagcaggagttcagcgccatcatcctggccacagctggcctgcagaggatgggctggcacaacagagtgggccagatcctgcaccctgaggagtgcatgtatgctgtgggccagggcgccctgggcgtggaggtgcgggccaaggaccaggacatcctggacctggtgggcgtgctgcatgaccctgagaccctgctgcgctgcatcgccgagcgggccttcctgcggcacctggagggcggctgcagcgtgcctgtggccgtgcacacagccatgaaggatggccagctgtacctgaccggcggcgtgtggagcctggatggcagtgacagcatccaggagaccatgcaggccaccatccacgtgcctgcccagcatgaagatggcccagaagatgacccccagctggtgggcatcacagccaggaacatcccccggggcccccagctggccgcccagaacctgggcatcagcctggccaacctgctgctgagcaagggggccaagaacatcctggatgtggcccggcagctgaatgatgcccactag

SEQ ID NO: 155727 - DNA, 1035 bp, synthetic construct; identical to SEQ ID NO: 155726
  misc_feature 1..1035: note = Description of Artificial Sequence: Synthetic coding sequence
  source 1..1035: mol_type = other DNA

SEQ ID NO: 155728 - DNA, 564 bp, synthetic construct
  misc_feature 1..564: note = Description of Artificial Sequence: Synthetic coding sequence
  source 1..564: mol_type = other DNA
atgagggtcatccgggtgggcaccaggaagagccagctggcccgcatccagacagacagcgtggtggccaccctgaaggccagctacccaggcctgcagtttgagatcatcgccatgagcaccaccggggacaagatcctggacacagccctgagcaagatcggggagaagagcctcttcaccaaggagctggagcacgccctggagaagaatgaggtggacctggtggtgcacagcctgaaggacctgcccaccgtgctgcccccaggcttcaccatcggggccatctgcaagcgggagaacccccatgatgctgtggtgttccaccccaagtttgtgggcaagaccctggagaccctgcctgagaagtctgtggtgggcaccagcagcctgcggcgggccgcccagctgcagaggaagttcccccacctggagttccgcagcatccggggcaacctgaacacccggctgaggaagctggatgagcagcaggagttcagcgccatcatcctggccacagctggcctgcagaggatgggctggcacaacagagtgggccagtag

SEQ ID NO: 155729 - DNA, 1035 bp, synthetic construct; identical to SEQ ID NO: 155726
  misc_feature 1..1035: note = Description of Artificial Sequence: Synthetic coding sequence
  source 1..1035: mol_type = other DNA

SEQ ID NO: 155730 - DNA, 564 bp, synthetic construct; identical to SEQ ID NO: 155728
  misc_feature 1..564: note = Description of Artificial Sequence: Synthetic coding sequence
  source 1..564: mol_type = other DNA

SEQ ID NO: 155731 - DNA, 915 bp, synthetic construct
  misc_feature 1..915: note = Description of Artificial Sequence: Synthetic coding sequence
  source 1..915: mol_type = other DNA
atgagggtcatccgggtgggcaccaggaagagccagctggcccgcatccagacagacagcgtggtggccaccctgaaggccagctacccaggcctgcagtttgagatcatcgccatgagcaccaccggggacaagatcctggacacagccctgagcaagatcggggagaagagcctcttcaccaaggagctggagcacgccctggagaagaatgaggtggacctggtggtgcacagcctgaaggacctgcccaccgtgctgcccccaggcttcaccatcggggccatctgcaagcgggagaacccccatgatgctgtggtgttccaccccaagtttgtgggcaagaccctggagaccctgcctgagaagtctgtggtgggcaccagcagcctgcggcgggccgcccagctgcagaggaagttcccccacctggagttccgcagcatccggggcaacctgaacacccggctgaggaagctggatgagcagcaggagttcagcgccatcatcctggccacagctggcctgcagaggatgggctggcacaacagagtgggccagatcctgcaccctgaggagtgcatgtatgctgtgggccaggagggcggctgcagcgtgcctgtggccgtgcacacagccatgaaggatggccagctgtacctgaccggcggcgtgtggagcctggatggcagtgacagcatccaggagaccatgcaggccaccatccacgtgcctgcccagcatgaagatggcccagaagatgacccccagctggtgggcatcacagccaggaacatcccccggggcccccagctggccgcccagaacctgggcatcagcctggccaacctgctgctgagcaagggggccaagaacatcctggatgtggcccggcagctgaatgatgcccactag

SEQ ID NO: 155732 - DNA, 966 bp, synthetic construct
  misc_feature 1..966: note = Description of Artificial Sequence: Synthetic coding sequence
  source 1..966: mol_type = other DNA
atgtctggaaatggaaatgctgctgccacagctgaggagaacagccccaagatgagggtcatccgggtgggcaccaggaagagccagctggcccgcatccagacagattctgtggtggccaccctgaaggccagctacccaggcctgcagtttgagatcatcgccatgagcaccactggagacaagatcctggacacagccctgagcaagattggagagaagagcctcttcaccaaggagctggagcacgccctggagaagaatgaggtggacctggtggtgcacagcctgaaggacctgcccaccgtgctgcccccaggcttcaccatcggggccatctgcaagcgggagaacccccatgatgctgtggtgttccaccccaagtttgtgggcaagaccctggagaccctgcctgagaagtctgtggtgggcaccagcagcctgcggcgggccgcccagctgcagaggaagttcccccacctggagttccgcagcatccggggcaacctgaacacccggctgaggaagctggatgagcagcaggagttcagcgccatcatcctggccacagctggcctgcagaggatgggctggcacaacagagtgggccagatcctgcaccctgaggagtgcatgtatgctgtgggccaggagggcggctgcagcgtgcctgtggccgtgcacacagccatgaaggatggccagctgtacctgactggaggagtgtggagcctggatggcagtgacagcatccaggagaccatgcaggccaccatccacgtgcctgcccagcatgaagatggcccagaagatgacccccagctggtgggcatcacagccaggaacatcccccggggcccccagctggccgcccagaacctgggcatcagcctggccaacctgctgctgagcaaaggagccaagaacatcctggatgtggcccggcagctgaatgatgcccactag

SEQ ID NO: 155733 - DNA, 879 bp, synthetic construct
  misc_feature 1..879: note = Description of Artificial Sequence: Synthetic coding sequence
  source 1..879: mol_type = other DNA
atggccttcatgaagaagtacctgctgcccatcctgggcctcttcatggcctactactactacagcgccaatgaggagttccggcctgagatgctgcagggcaagaaggtgattgtgactggagccagcaagggcatcggccgggagatggcctaccacctggccaagatgggcgcccacgtggtggtgacagcccggagcaaggagaccctgcagaaggtggtgagccactgcctggagctgggcgccgccagcgcccactacatcgccggcaccatggaggacatgacctttgctgagcagtttgtggcccaggccggcaagctgatgggcggcctggacatgctgatcctgaaccacatcaccaacaccagcctgaacctcttccatgatgacatccaccacgtgaggaagtccatggaggtgaacttcctgtcctatgtggtgctgactgtggccgccctgcccatgctgaagcagagcaatggcagcatcgtggtggtgagcagcctggccggcaaggtggcctaccccatggtggccgcctacagcgccagcaagtttgccctggatggcttcttcagcagcatcaggaaggagtacagcgtgtcccgggtgaatgtgtccatcaccctgtgtgtgctgggcctgattgacacagaaacagccatgaaggctgtgtctggcatcgtgcacatgcaggccgcccccaaggaggagtgtgccctggagatcatcaagggcggggccctgcggcaggaggaggtgtactatgacagcagcctgtggaccaccctgctgatccggaacccctgcaggaagatcctggagttcctgtacagcaccagctacaacatggaccgcttcatcaacaagtag

SEQ ID NO: 155734 - DNA, 879 bp, synthetic construct; identical to SEQ ID NO: 155733
  misc_feature 1..879: note = Description of Artificial Sequence: Synthetic coding sequence
  source 1..879: mol_type = other DNA

SEQ ID NO: 155735 - DNA, 879 bp, synthetic construct; identical to SEQ ID NO: 155733
  misc_feature 1..879: note = Description of Artificial Sequence: Synthetic coding sequence
  source 1..879: mol_type = other DNA

SEQ ID NO: 155736 - DNA, 1218 bp, synthetic construct
  misc_feature 1..1218: note = Description of Artificial Sequence: Synthetic coding sequence
  source 1..1218: mol_type = other DNA
atggagcgctggccctggcccagcggcggggcctggctgctggtggccgcccgggccctgctgcagctgctgcggagtgacctgcggctgggccggcccctgctggccgccctggccctgctggccgccctggactggctgtgccagaggctgctgcccccacctgctgccctggccgtgctggccgccgccggctggatcgccctgagccggctggcccggccccagaggctgcctgtggccaccagggctgtgctgatcaccggctgtgacagcggctttgggaaggagacagccaagaagctggacagcatgggcttcaccgtgctggccaccgtgctggagctgaacagccctggggccatcgagctgcggacctgctgcagcccccggctgcggctgctgcagatggacctgaccaagccaggggacatcagccgggtgctggagttcaccaaggcccacaccaccagcacaggcctgtggggcctggtgaacaatgccggccacaatgaggtggtggctgatgctgagctgagccctgtggccaccttccgcagctgcatggaggtgaacttcttcggggccctggagctgaccaagggcctgctgcccctgctgcggagcagccggggccgcatcgtgacagtgggcagccctgctggggacatgccctacccctgcctgggcgcctacggcaccagcaaggctgctgtggccctgctgatggacaccttcagctgtgagctgctgccctggggcgtgaaggtgtccatcatccagcccggctgcttcaagacagaatctgtgagaaatgtgggccagtgggagaagaggaagcagctgctgctggccaacctgccccaggagctgctgcaggcctacggcaaggactacatcgagcacctgcacggccagttcctgcacagcctgcggctggccatgtctgacctgacccctgtggtggatgccatcacagatgccctgctggccgcccggccccggcggcgctactacccaggccagggcctgggcctgatgtacttcatccactactacctgcctgagggcctgcggcggcgcttcctgcaggccttcttcatcagccactgcctgccccgggccctgcagcccggccagcccggcaccaccccaccccaggatgctgcccaggaccccaacctgagccctggccccagccctgctgtggccaggtag

SEQ ID NO: 155737 - DNA, 2232 bp, synthetic construct
  misc_feature 1..2232: note = Description of Artificial Sequence: Synthetic coding sequence
  source 1..2232: mol_type = other DNA
atggaggccgtggccgtggccgctgctgtgggcgtgctgctgctggccggggccggcggcgctgctggagatgaggcccgggaggccgctgctgtgcgggccctggtggcccggctgctgggccctggccctgctgctgacttctctgtgtctgtggagcgggccctggccgccaagccaggcctggacacctacagcctgggcggcggcggggccgcccgggtgcgggtgcggggcagcactggagtggccgctgctgctggcctgcaccgctacctgcgggacttctgtggctgccacgtggcctggagcggcagccagctgcggctgccccggcccctgcctgctgtgcctggagagctgacagaggccacccccaaccgctaccgctactaccagaatgtgtgcacccagagctacagctttgtgtggtgggactgggcccgctgggagcgggagattgactggatggccctgaatggcatcaacctggccctggcctggagcggccaggaggccatctggcagagggtgtacctggccctgggcctgacccaggccgagatcaatgagttcttcaccggccctgccttcctggcctggggccgcatgggcaacctgcacacctgggatggccccctgcccccatcctggcacatcaagcagctgtacctgcagcaccgggtgctggaccagatgaggagctttggcatgacccctgtgctgcctgcctttgctggccacgtgcctgaggccgtgaccagggtcttcccccaggtgaatgtgaccaagatgggctcctggggccacttcaactgcagctacagctgcagcttcctgctggcccctgaggaccccatcttccccatcatcggcagcctcttcctgcgggagctgatcaaggagtttggaacagaccacatctatggagctgacaccttcaatgagatgcagccccccagcagcgagcccagctacctggccgccgccaccacagctgtgtatgaggccatgacagctgtggacacagaagctgtgtggctgctgcagggctggctgttccagcaccagccccagttctggggccctgcccagatccgggctgtgctgggcgctgtgccccggggccgcctgctggtgctggacctgtttgctgagagccagcctgtgtacaccaggacagccagcttccagggccagcccttcatctggtgcatgctgcacaactttggaggcaaccacggcctgtttggagccctggaggccgtgaatggaggccctgaggccgcccggctcttccccaacagcaccatggtgggcaccggcatggcccctgagggcatcagccagaatgaggtggtgtacagcctgatggccgagctgggctggaggaaggaccctgtgcctgacctggccgcctgggtgaccagctttgctgccaggagatatggagtgagccacccagatgctggggccgcctggaggctgctgctgcggtctgtgtacaactgcagcggggaggcctgccggggccacaacagaagccccctggtgagaagacccagcctgcagatgaacaccagcatctggtacaacagaagtgatgtgtttgaggcctggaggctgctgctgaccagcgcccccagcctggccaccagccctgccttccgctatgacctgctggacctgacccggcaggccgtgcaggagctggtgtccctgtactatgaggaggcccggagcgcctacctgagcaaggagctggccagcctgctgcgggccggcggcgtgctggcctatgagctgctgcctgccctggatgaggtgctggccagtgacagccgcttcctgctgggctcctggctggagcaggcccgggctgctgctgtgtctgaggccgaggccgacttctatgagcagaacagccgctaccagctgaccctgtggggccctgagggcaacatcctggactatgccaacaagcagctggccggcctggtggccaactactacaccccccgctggaggctcttcctggaggccctggtggacagcgtggcccagggcatccccttccagcagcaccagtttgacaagaatgtgttccagctggagcaggcctttgtgctgagcaagcagcgctaccccagccagcccaggggggacacagtggacctggccaagaagatcttcctgaagtactacccccgctgggtggccggctcctggtag

SEQ ID NO: 155738 - DNA, 450 bp, synthetic construct
  misc_feature 1..450: note = Description of Artificial Sequence: Synthetic coding sequence
  source 1..450: mol_type = other DNA
atggccaggacagtggtgctgatcaccggctgcagcagcggcatcggcctgcacctggccgtgcggctggccagtgaccccagccagagcttcaaggtgtatgccaccctgcgggacctgaagacccagggccgcctgtgggaggccgcccgggccctggcctgccccccaggcagcctggagaccctgcagctggatgtgcgggacagcaagtctgtggccgccgcccgggagcgggtgacagagggccgggtggatgtgctggtgtgcaatgccggcctgggcctgctgggccccctggaggccctgggagaagatgctgtggcctctgtgctggatgtgaatgtggtgggcaccgtgaggatgctgcaggccttcctgcctgacatgaagaggcggggcagcggccgggtgctggtgactggatctgtgggcggcctgatggcctag

SEQ ID NO: 155739 - DNA, 987 bp, synthetic construct
  misc_feature 1..987: note = Description of Artificial Sequence: Synthetic coding sequence
  source 1..987: mol_type = other DNA
atggccaggacagtggtgctgatcaccggctgcagcagcggcatcggcctgcacctggccgtgcggctggccagtgaccccagccagagcttcaaggtgtatgccaccctgcgggacctgaagacccagggccgcctgtgggaggccgcccgggccctggcctgccccccaggcagcctggagaccctgcagctggatgtgcgggacagcaagtctgtggccgccgcccgggagcgggtgacagagggccgggtggatgtgctggtgtgcaatgccggcctgggcctgctgggccccctggaggccctgggagaagatgctgtggcctctgtgctggatgtgaatgtggtgggcaccgtgaggatgctgcaggccttcctgcctgacatgaagaggcggggcagcggccgggtgctggtgactggatctgtgggcggcctgatgggcctgcccttcaatgatgtgtactgtgccagcaagtttgccctggagggcctgtgtgagagcctggccgtgctgctgctgccctttggagtgcacctgagcctgattgaatgtggccctgtgcacacagccttcatggagaaggtgctgggcagccctgaggaggtgctggacagaacagacatccacaccttccaccgcttctaccagtacctggcccacagcaagcaggtgttccgggaggccgcccagaaccctgaggaggtggccgaggtgttcctgacagccctgcgggcccccaagcccaccctgcgctacttcaccacagagcgcttcctgcccctgctgaggatgaggctggatgaccccagcggcagcaactacgtgacagccatgcaccgggaggtgtttggagatgtgcctgccaaggccgaggccggggctgaggccggcggcggggccggccctggagcagaagatgaggccggccgcggggctgtgggggaccctgagctgggggaccccccagctgccccccagtag

SEQ ID NO: 155740 - DNA, 447 bp, synthetic construct
  misc_feature 1..447: note = Description of Artificial Sequence: Synthetic coding sequence
  source 1..447: mol_type = other DNA
atggcctgcaccgtggtgctgatcaccggctgcagcagcggcatcggcctgcacctggccatccacctggccctggaccccagccagagcttcaaggtgtatgccaccctgcgggacctgaagacccagggccgcctgtgggaggccgcccgggccctggcctgcccccagggcagcctggagcggctgcagctggatgtgaggaacagcagcagcctggccgccgcccgggagcgggtgacagagggccgggtggatgtgctggtgtgtgacaccggcctgggcctgctgggccccctgggggaggatgctgtggcctctgtgctggatgtgaatgtggtgggcaccgtgcgggtgctgcaggacttcctgcctgacatgaagaggcctggcagcggccgggtgctggtgacaggctccatgggcggcctgatgggagagtggtag

SEQ ID NO: 155741 - DNA, 786 bp, synthetic construct
  misc_feature 1..786: note = Description of Artificial Sequence: Synthetic coding sequence
  source 1..786: mol_type = other DNA
atggctgctgcctgccgctctgtgaagggcctggtggccgtcatcaccggcggggccagcggcctgggcctggccacagctgagcggctggtgggccagggcgccagcgctgtgctgctggacctgcccaacagcggcggggaggcccaggccaagaagctgggcaacaactgtgtgtttgccccagcagatgtgaccagcgagaaggatgtgcagacagccctggccctggccaagggcaagtttggccgggtggatgtggccgtgaactgtgccggcattgctgtggccagcaagacctacaacctgaagaagggccagacccacaccctggaggacttccagagggtgctggatgtgaacctgatgggcaccttcaacgtcatccggctggtggccggggagatgggccagaatgaaccagaccagggcggccagaggggcgtcatcatcaacacagcctctgtggccgcctttgagggccaggtgggccaggccgcctacagcgccagcaagggcggcatcgtgggcatgaccctgcccatcgcccgggacctggcccccatcggcatccgggtgatgaccatcgcccctggcctgtttggcacccccctgctgaccagcctgcctgagaaggtgtgcaacttcctggccagccaggtgcccttccccagccggctgggggaccctgcagaatatgcccacctggtgcaggccatcatcgagaaccccttcctgaatggagaggtgatccggctggatggagccatccgcatgcagccctag

SEQ ID NO: 155742 - DNA, 510 bp, synthetic construct
  misc_feature 1..510: note = Description of Artificial Sequence: Synthetic coding sequence
  source 1..510: mol_type = other DNA
atggctgctgcctgccgctctgtgaagggcctggtggccgtcatcaccggcggggccagcggcctgggcctggccacagctgagcggctggtgggccagggcgccagcgctgtgctgctggacctgcccaacagcggcggggaggcccaggccaagaagctgggcaacaactgtgtgtttgccccagcagatgtgaccagcgagaaggatgtgcagacagccctggccctggccaagggcaagtttggccgggtggatgtggccgtgaactgtgccggcattgctgtggccagcaagacctacaacctgaagaagggccagacccacaccctggaggacttccagagggtgctggatgtgaacctgatgggcaccttcaacgtcatccggctggtggccggggagatgggccagaatgaaccagaccagggcggccagaggggcgtcatcatcaacacagcctctgtggccgcctttgagggccaggtgtgcctggccccccactgctag

SEQ ID NO: 155743 - DNA, 759 bp, synthetic construct
  misc_feature 1..759: note = Description of Artificial Sequence: Synthetic coding sequence
  source 1..759: mol_type = other DNA
atggctgctgcctgccgctctgtgaagggcctggtggccgtcatcaccggcggggccagcggcctgggcctggccacagctgagcggctggtgggccagggcgccagcgctgtgctgctggacctgcccaacagcggcggggaggcccaggccaagaagctgggcaacaactgtgtgtttgccccagcagatgtgaccagcgagaaggatgtgcagacagccctggccctggccaagggcaagtttggccgggtggatgtggccgtgaactgtgccggcattgctgtggccagcaagacctacaacctgaagaagggccagacccacaccctggaggacttccagagggtgctggatgtgaacctgatgggcaccttcaacgtcatccggctggtggccggggagatgggccagaatgaaccagaccagggcggccagaggggcgtcatcatcaacacagcctctgtggccgcctttgagggccaggtgggccaggccgcctacagcgccagcaagggcggcatcgtgggcatgaccctgcccatcgcccgggacctggcccccatcggcctgtttggcacccccctgctgaccagcctgcctgagaaggtgtgcaacttcctggccagccaggtgcccttccccagccggctgggggaccctgcagaatatgcccacctggtgcaggccatcatcgagaaccccttcctgaatggagaggtgatccggctggatggagccatccgcatgcagccctag

SEQ ID NO: 155744 - DNA, 903 bp, synthetic construct
  misc_feature 1..903: note = Description of Artificial Sequence: Synthetic coding sequence
  source 1..903: mol_type = other DNA
atgaagttcctgctggacatcctgctgctgctgcccctgctgattgtgtgcagcctggagagctttgtgaagctgttcatccccaagaggaggaagtctgtgactggagagatcgtgctgatcaccggggccggccacggcatcggccgcctgacagcctatgaatttgccaagctgaagagcaagctggtgctgtgggacatcaacaagcacggcctggaggagacagctgccaagtgcaagggcctgggcgccaaggtgcacacctttgtggtggactgcagcaaccgggaggacatctacagcagcgccaagaaggtgaaggccgagattggagatgtgtccatcctggtgaacaatgccggcgtggtgtacaccagtgacctgtttgccacccaggacccccagatcgagaagacctttgaggtgaatgtgctggcccacttctggaccaccaaggccttcctgcctgccatgaccaagaacaaccacggccacatcgtgacagtggccagcgctgctggccacgtgtctgtgcccttcctgctggcctactgcagcagcaagtttgctgctgtgggcttccacaagaccctgacagatgagctggccgccctgcagatcactggagtgaagaccacctgcctgtgccccaactttgtgaacacaggcttcatcaagaaccccagcaccagcctgggccccaccctggagcctgaggaggtggtgaaccggctgatgcacggcatcctgacagagcagaagatgatcttcatccccagcagcatcgccttcctgaccaccctggagcgcatcctgcctgagcgcttcctggccgtgctgaagcagaagatctctgtgaagtttgatgctgtgattggctacaagatgaaggcccagtag

SEQ ID NO: 155745 - DNA, 795 bp, synthetic construct
  misc_feature 1..795: note = Description of Artificial Sequence: Synthetic coding sequence
  source 1..795: mol_type = other DNA
atgaacatcatcctggagatcctgctgctgctgatcaccatcatctacagctacctggagagcctggtgaagttcttcatcccccagaggaggaagtctgtggccggggagatcgtgctgatcaccggggccggccacggcatcggccggcagaccacctatgaatttgccaagaggcagagcatcctggtgctgtgggacatcaacaaggtgaagaaggaggtgggagatgtgaccatcgtggtgaacaatgccggcaccgtgtacccagctgacctgctgagcaccaaggatgaggagatcaccaagacctttgaggtgaacatcctgggccacttctggatcaccaaggccctgctgcccagcatgatggagaggaaccacggccacatcgtgacagtggcctctgtgtgtggccacgagggcatcccctacctgatcccctactgcagcagcaagtttgctgctgtgggcttccaccggggcctgaccagcgagctgcaggccctgggcaagacaggcatcaagaccagctgcctgtgccctgtgtttgtgaacacaggcttcaccaagaaccccagcacccggctgtggcctgtgctggagacagatgaggtggtgcgcagcctgattgatggcatcctgaccaacaagaagatgatctttgtgcccagctacatcaacatcttcctgcggctgcagaagttcctgcctgagcgggccagcgccatcctgaacaggatgcagaacatccagtttgaagctgtggtgggccacaagatcaagatgaagtag

SEQ ID NO: 155746 - DNA, 903 bp, synthetic construct
  misc_feature 1..903: note = Description of Artificial Sequence: Synthetic coding sequence
  source 1..903: mol_type = other DNA
atgaacatcatcctggagatcctgctgctgctgatcaccatcatctacagctacctggagagcctggtgaagttcttcatcccccagaggaggaagtctgtggccggggagatcgtgctgatcaccggggccggccacggcatcggccggcagaccacctatgaatttgccaagaggcagagcatcctggtgctgtgggacatcaacaagaggggcgtggaggagacagctgctgaatgtaggaagctgggcgtgacagcccacgcctacgtggtggactgcagcaaccgggaggagatctaccgcagcctgaaccaggtgaagaaggaggtgggagatgtgaccatcgtggtgaacaatgccggcaccgtgtacccagctgacctgctgagcaccaaggatgaggagatcaccaagacctttgaggtgaacatcctgggccacttctggatcaccaaggccctgctgcccagcatgatggagaggaaccacggccacatcgtgacagtggcctctgtgtgtggccacgagggcatcccctacctgatcccctactgcagcagcaagtttgctgctgtgggcttccaccggggcctgaccagcgagctgcaggccctgggcaagacaggcatcaagaccagctgcctgtgccctgtgtttgtgaacacaggcttcaccaagaaccccagcacccggctgtggcctgtgctggagacagatgaggtggtgcgcagcctgattgatggcatcctgaccaacaagaagatgatctttgtgcccagctacatcaacatcttcctgcggctgcagaagttcctgcctgagcgggccagcgccatcctgaacaggatgcagaacatccagtttgaagctgtggtgggccacaagatcaagatgaagtag

SEQ ID NO: 155747 - DNA, 813 bp, synthetic construct
  misc_feature 1..813: note = Description of Artificial Sequence: Synthetic coding sequence
  source 1..813: mol_type = other DNA
atggccaccggcaccaggtatgctgggaaggtggtggtggtgactggaggcggccggggcattggagctggcatcgtgcgggcctttgtgaacagcggggcccgggtggtgatctgtgacaaggatgagagcggcggccgggccctggagcaggagctgcccggggctgtgttcatcctgtgtgatgtgacccaggaggatgatgtgaagaccctggtgtctgagaccatccgccgcttcggccgcctggactgtgtggtgaacaatgccggccaccaccccccaccccagaggcctgaggagaccagcgcccagggcttccggcagctgctggagctgaacctgctgggcacctacaccctgaccaagctggccctgccctacctgaggaagagccagggcaatgtcatcaacatcagcagcctggtgggcgccatcggccaggcccaggccgtgccctacgtggccaccaagggagctgtgacagccatgaccaaggccctggccctggatgagagcccctatggagtgcgggtgaactgcatcagccctggcaacatctggacccccctgtgggaggagctggccgccctgatgccagacccccgggccaccatccgggagggcatgctggcccagcccctgggccgcatgggccagcctgctgaggtgggcgctgctgctgtgttcctggccagcgaggccaacttctgcacaggaattgagctgctggtgactggaggagctgagctgggctacggctgcaaggccagccgcagcacccctgtggatgccccagacatccccagctag

SEQ ID NO: 155748 - DNA, 1164 bp, synthetic construct
  misc_feature 1..1164: note = Description of Artificial Sequence: Synthetic coding sequence
  source 1..1164: mol_type = other DNA
atgagcaccttcttcagtgacacagcctggatctgcctggccgtgcccaccgtgctgtgtggcaccgtcttctgcaagtacaagaagagcagcggccagctgtggagctggatggtgtgcctggccggcctgtgtgctgtgtgcctgctgatcctgagccccttctggggcctcatcctcttctctgtgtcctgcttcctgatgtacacctacctgagcggccaggagctgctgcctgtggaccagaaggctgtgctggtgactggaggagactgtggcctgggccacgccctgtgcaagtacctggatgagctgggcttcaccgtgtttgctggggtgctgaatgaaaatggacctggagctgaggagctgcggaggacctgcagcccccggctgtctgtgctgcagatggacatcaccaagcctgtgcagatcaaggatgcctacagcaaggtggccgccatgctgcaggaccggggcctgtgggccgtcatcaacaatgctggggtgctgggcttccccacagatggagagctgctgctgatgacagactacaagcagtgcatggctgtgaacttcttcggcaccgtggaggtgaccaagaccttcctgcccctgctgaggaagagcaagggccgcctggtgaatgtgtcctccatgggcggcggggcccccatggagcggctggccagctatggcagcagcaaggctgctgtgaccatgttcagctctgtgatgaggctggagctgagcaagtggggcatcaaggtggccagcatccagcccggcggcttcctgaccaacattgctggcaccagtgacaagtgggagaagctggagaaggacatcctggaccacctgcctgctgaggtgcaggaggactatggccaggactacatcctggcccagaggaacttcctgctgctgatcaacagcctggccagcaaggacttcagccctgtgctgcgggacatccagcacgccatcctggccaagagcccctttgcctactacacccctgggaagggggcctacctgtggatctgcctggcccactacctgcccatcggcatctatgactactttgccaagaggcacttcggccaggacaagcccatgccccgggccctgaggatgcccaactacaagaagaaggccacctag

SEQ ID NO: 155749 - DNA, 783 bp, synthetic construct
  misc_feature 1..783: note = Description of Artificial Sequence: Synthetic coding sequence
  source 1..783: mol_type = other DNA
atgggagatgtgctggagcagttcttcatcctgaccggcctgctggtgtgcctggcctgcctggccaagtgtgtgcgcttcagccgctgtgtgctgctgaactactggaaggtgctgcccaagagcttcctgcgctccatgggccagtgggccgtcatcaccggggctggagatggcatcggcaaggcctacagctttgagctggccaagaggggcctgaatgtggtgctgatcagcaggaccctggagaagctggaggccatcgccacagaaattgaaagaaccaccggccgctctgtgaagatcatccaggccgacttcaccaaggatgacatctatgagcacatcaaggagaagctggccggcctggagatcggcatcctggtgaacaacgtgggcatgctgcccaacctgctgcccagccacttcctgaatgccccagatgagatccagagcctcatccactgcaacatcacctctgtggtgaagatgacccagctgatcctgaagcacatggagagccggcagaagggcctcatcctgaacatcagcagcggcatcgccctcttcccctggcccctgtacagcatgtacagcgccagcaaggcctttgtgtgtgccttcagcaaggccctgcaggaggagtacaaggccaaggaggtgatcatccaggccggcttcctgagcctcatcccagcctgggccttctacagcggggccttccagaggctgctgctgacccactacgtggcctacctgaagctgaacaccaaggtgaggtag

SEQ ID NO: 155750 - DNA, 933 bp, synthetic construct
  misc_feature 1..933: note = Description of Artificial Sequence: Synthetic coding sequence
  source 1..933: mol_type = other DNA
atgggagatgtgctggagcagttcttcatcctgaccggcctgctggtgtgcctggcctgcctggccaagtgtgtgcgcttcagccgctgtgtgctgctgaactactggaaggtgctgcccaagagcttcctgcgctccatgggccagtgggccgtcatcaccggggctggagatggcatcggcaaggcctacagctttgagctggccaagaggggcctgaatgtggtgctgatcagcaggaccctggagaagctggaggccatcgccacagaaattgaaagaaccaccggccgctctgtgaagatcatccaggccgacttcaccaaggatgacatctatgagcacatcaaggagaagctggccggcctggagatcggcatcctggtgaacaacgtgggcatgctgcccaacctgctgcccagccacttcctgaatgccccagatgagatccagagcctcatccactgcaacatcacctctgtggtgaagatgacccagctgatcctgaagcacatggagagccggcagaagggcctcatcctgaacatcagcagcggcatcgccctcttcccctggcccctgtacagcatgtacagcgccagcaaggcctttgtgtgtgccttcagcaaggccctgcaggaggagtacaaggccaaggaggtgatcatccaggtgctgaccccctatgctgtgtccacagccatgaccaagtacctgaacaccaacgtcatcaccaagacagcagatgaatttgtgaaggagagcctgaactacgtgaccatcggcggggagacctgtggctgcctggcccacgagatcctggccggcttcctgagcctcatcccagcctgggccttctacagcggggccttccagaggctgctgctgacccactacgtggcctacctgaagctgaacaccaaggtgaggtag

SEQ ID NO: 155751 - DNA, 2211 bp, synthetic construct
  misc_feature 1..2211: note = Description of Artificial Sequence: Synthetic coding sequence
  source 1..2211: mol_type = other DNA
atgggcagccccctgcgctttgatggccgggtggtgctggtgactggagctggagctggcctgggccgggcctatgccctggcctttgctgagcggggggccctggtggtggtgaatgacctgggcggggacttcaagggcgtgggcaagggcagcctggccgctgacaaggtggtggaggagatcagaagaagaggaggcaaggctgtggccaactatgattctgtggaggagggggagaaggtggtgaagacagccctggatgccttcggcagaattgatgtggtggtgaacaatgccggcatcctgcgggacaggagctttgcccgcatcagtgatgaggactgggacatcatccaccgggtgcacctgcggggcagcttccaggtgaccagggctgcctgggagcacatgaagaagcagaagtatggccgcatcatcatgaccagcagcgccagcggcatctacggcaactttggccaggccaactacagcgctgccaagctgggcctgctgggcctggccaacagcctggccatcgagggcaggaagagcaacatccactgcaacaccatcgccccaaatgccggcagcaggatgacccagacagtgatgcctgaggacctggtggaggccctgaagccagaatatgtggcccccctggtgctgtggctgtgccacgagagctgtgaggagaatggaggcctgtttgaggtgggcgccggctggattggcaagctgcgctgggagaggaccctgggcgccatcgtgcggcagaagaaccaccccatgaccccagaggccgtgaaggccaactggaagaagatctgtgactttgaaaatgccagcaagccccagagcatccaggagagcacaggcagcatcatcgaggtgctgagcaagattgacagcgagggcggcgtgtctgccaaccacaccagccgggccaccagcacagccaccagcggctttgctggggccatcggccagaagctgccccccttctcctatgcctacacagagctggaggccatcatgtatgccctgggcgtgggcgccagcatcaaggaccccaaggacctgaagttcatctatgagggcagcagtgacttcagctgcctgcccacctttggagtcatcatcggccagaagtccatgatgggcggcggcctggccgagatccctggcctgagcatcaactttgccaaggtgctgcacggggagcagtacctggagctgtacaagcccctgccccgggccggcaagctgaagtgtgaggccgtggtggctgatgtgctggacaagggcagcggcgtggtgatcatcatggatgtgtacagctacagcgagaaggagctgatctgccacaaccagttcagcctcttcctggtgggcagcggcggctttggaggcaagaggaccagtgacaaggtgaaggtggccgtggccatccccaaccggcccccagatgctgtgctgacagacaccaccagcctgaaccaggccgccctgtaccgcctgagcggggactggaaccccctgcacatcgaccccaactttgccagcctggccggctttgacaagcccatcctgcacggcctgtgcaccttcggcttcagcgcccggcgggtgctgcagcagtttgctgacaatgatgtgagccgcttcaaggccatcaaggccaggtttgccaagcctgtgtacccaggccagaccctgcagacagagatgtggaaggagggcaaccgcatccacttccagaccaaggtgcaggagactggagacatcgtcatcagcaatgcctacgtggacctggcccccaccagcggcaccagcgccaagaccccatctgagggcggcaagctgcagagcacctttgtgtttgaggagattggaagaaggctgaaggacatcggccctgaggtggtgaagaaggtgaatgctgtgtttgagtggcacatcaccaagggcggcaacatcggggccaagtggaccatcgacctgaagagcggcagcggcaaggtgtaccagggccctgccaagggagctgctgacaccaccatcatcctgagtgatgaggacttcatggaggtggtgctgggcaagctggacccccagaaggccttcttcagcggccgcctgaaggcccggggcaacatcatgctgagccagaagctgcagatgatcctgaaggactatgccaagctgtag

SEQ ID NO: 155752 - DNA, 2286 bp, synthetic construct
  misc_feature 1..2286: note = Description of Artificial Sequence: Synthetic coding sequence
  source 1..2286: mol_type = other DNA
atggtgatcctggaggccccccacctgctgcggaggaaggagcctgagaccccaggcctgagcagccgcatcggccccagcctgtgccccggcttctgcaggaagaggtctgtgtcctgctgcttccagaacctgtgcaacaaccccatggagaagatcatcagccagtgccgcttctttgtgtccatgaatgacctgggcggggacttcaagggcgtgggcaagggcagcctggccgctgacaaggtggtggaggagatcagaagaagaggaggcaaggctgtggccaactatgacagcgtggaggagggggagaaggtggtgaagacagccctggatgccttcggcagaattgatgtggtggtgaacaatgccggcatcctgcgggacaggagctttgcccgcatcagtgatgaggactgggacatcatccaccgggtgcacctgcggggcagcttccaggtgacccgggccgcctgggagcacatgaagaagcagaagtatggccgcatcatcatgaccagcagcgccagcggcatctacggcaactttggccaggccaactacagcgctgccaagctgggcctgctgggcctggccaacagcctggccatcgagggcaggaagagcaacatccactgcaacaccatcgccccaaatgccggcagcaggatgacccagacagtgatgcctgaggacctggtggaggccctgaagccagaatatgtggcccccctggtgctgtggctgtgccacgagagctgtgaagaaaatggaggcctgtttgaggtgggcgccggctggattggcaagctgcgctgggagaggaccctgggcgccatcgtgcggcagaagaaccaccccatgaccccagaggccgtgaaggccaactggaagaagatctgtgactttgaaaatgccagcaagccccagagcatccaggagagcacaggcagcatcatcgaggtgctgagcaagattgattctgagggcggcgtgtctgccaaccacaccagccgggccaccagcacagccaccagcggctttgctggggccatcggccagaagctgccccccttctcctatgcctacacagagctggaggccatcatgtatgccctgggcgtgggcgccagcatcaaggaccccaaggacctgaagttcatctatgagggcagcagtgacttcagctgcctgcccaccttcggggtcatcatcggccagaagtccatgatgggcggcggcctggccgagatccctggcctgagcatcaactttgccaaggtgctgcatggagagcagtacctggagctgtacaagcccctgcccagggctgggaagctgaagtgtgaggccgtggtggctgatgtgctggacaagggcagcggcgtggtgatcatcatggatgtgtacagctacagcgagaaggagctgatctgccacaaccagttcagcctcttcctggtgggcagcggcggctttggaggcaagaggaccagtgacaaggtgaaggtggccgtggccatccccaacagacctccagatgctgtgctgacagacaccaccagcctgaaccaggccgccctgtaccgcctgagcggggactggaaccccctgcacatcgaccccaactttgccagcctggccggctttgacaagcccatcctgcacggcctgtgcaccttcggcttcagcgccaggagagtgctgcagcagtttgctgacaatgatgtgagccgcttcaaggccatcaaggccaggtttgccaagcctgtgtacccaggccagaccctgcagacagagatgtggaaggagggcaaccgcatccacttccagaccaaggtgcaggagaccggggacatcgtcatcagcaatgcctacgtggacctggcccccaccagcggcaccagcgccaagacccccagcgagggcggcaagctgcagagcacctttgtgtttgaggagatcggccggcggctgaaggacatcggccctgaggtggtgaagaaggtgaatgctgtgtttgagtggcacatcaccaagggcggcaacattggagccaagtggaccatcgacctgaagagcggcagcggcaaggtgtaccagggccctgccaagggagctgctgacaccaccatcatcctgagtgatgaggacttcatggaggtggtgctgggcaagctggacccccagaaggccttcttcagcggccgcctgaaggcccggggcaacatcatgctgagccagaagctgcagatgatcctgaaggactatgccaagctgtag

SEQ ID NO: 155753 - DNA, 2139 bp, synthetic construct
  misc_feature 1..2139: note = Description of Artificial Sequence: Synthetic coding sequence
  source 1..2139: mol_type = other DNA
atggagaagatcatcagccagtgccgcttctttgtgtccatgaatgacctgggcggggacttcaagggcgtgggcaagggcagcctggccgctgacaaggtggtggaggagatcagaagaagaggaggcaaggctgtggccaactatgattctgtggaggagggggagaaggtggtgaagacagccctggatgccttcggcagaattgatgtggtggtgaacaatgccggcatcctgcgggacaggagctttgcccgcatcagtgatgaggactgggacatcatccaccgggtgcacctgcggggcagcttccaggtgaccagggctgcctgggagcacatgaagaagcagaagtatggccgcatcatcatgaccagcagcgccagcggcatctacggcaactttggccaggccaactacagcgctgccaagctgggcctgctgggcctggccaacagcctggccatcgagggcaggaagagcaacatccactgcaacaccatcgccccaaatgccggcagcaggatgacccagacagtgatgcctgaggacctggtggaggccctgaagccagaatatgtggcccccctggtgctgtggctgtgccacgagagctgtgaggagaatggaggcctgtttgaggtgggcgccggctggattggcaagctgcgctgggagaggaccctgggcgccatcgtgcggcagaagaaccaccccatgaccccagaggccgtgaaggccaactggaagaagatctgtgactttgaaaatgccagcaagccccagagcatccaggagagcacaggcagcatcatcgaggtgctgagcaagattgacagcgagggcggcgtgtctgccaaccacaccagccgggccaccagcacagccaccagcggctttgctggggccatcggccagaagctgccccccttctcctatgcctacacagagctggaggccatcatgtatgccctgggcgtgggcgccagcatcaaggaccccaaggacctgaagttcatctatgagggcagcagtgacttcagctgcctgcccacctttggagtcatcatcggccagaagtccatgatgggcggcggcctggccgagatccctggcctgagcatcaactttgccaaggtgctgcacggggagcagtacctggagctgtacaagcccctgccccgggccggcaagctgaagtgtgaggccgtggtggctgatgtgctggacaagggcagcggcgtggtgatcatcatggatgtgtacagctacagcgagaaggagctgatctgccacaaccagttcagcctcttcctggtgggcagcggcggctttggaggcaagaggaccagtgacaaggtgaaggtggccgtggccatccccaaccggcccccagatgctgtgctgacagacaccaccagcctgaaccaggccgccctgtaccgcctgagcggggactggaaccccctgcacatcgaccccaactttgccagcctggccggctttgacaagcccatcctgcacggcctgtgcaccttcggcttcagcgcccggcgggtgctgcagcagtttgctgacaatgatgtgagccgcttcaaggccatcaaggccaggtttgccaagcctgtgtacccaggccagaccctgcagacagagatgtggaaggagggcaaccgcatccacttccagaccaaggtgcaggagactggagacatcgtcatcagcaatgcctacgtggacctggcccccaccagcggcaccagcgccaagaccccatctgagggcggcaagctgcagagcacctttgtgtttgaggagattggaagaaggctgaaggacatcggccctgaggtggtgaagaaggtgaatgctgtgtttgagtggcacatcaccaagggcggcaacatcggggccaagtggaccatcgacctgaagagcggcagcggcaaggtgtaccagggccctgccaagggagctgctgacaccaccatcatcctgagtgatgaggacttcatggaggtggtgctgggcaagctggacccccagaaggccttcttcagcggccgcctgaaggcccggggcaacatcatgctgagccagaagctgcagatgatcctgaaggactatgccaagctgtag

SEQ ID NO: 155754 - DNA, 1800 bp, synthetic construct
  misc_feature 1..1800: note = Description of Artificial Sequence: Synthetic coding sequence
  source 1..1800: mol_type = other DNA
atgaagaagcagaagtatggccgcatcatcatgaccagcagcgccagcggcatctacggcaactttggccaggccaactacagcgctgccaagctgggcctgctgggcctggccaacagcctggccatcgagggcaggaagagcaacatccactgcaacaccatcgccccaaatgccggcagcaggatgacccagacagtgatgcctgaggacctggtggaggccctgaagccagaatatgtggcccccctggtgctgtggctgtgccacgagagctgtgaagaaaatggaggcctgtttgaggtgggcgccggctggattggcaagctgcgctgggagaggaccctgggcgccatcgtgcggcagaagaaccaccccatgaccccagaggccgtgaaggccaactggaagaagatctgtgactttgaaaatgccagcaagccccagagcatccaggagagcacaggcagcatcatcgaggtgctgagcaagattgattctgagggcggcgtgtctgccaaccacaccagccgggccaccagcacagccaccagcggctttgctggggccatcggccagaagctgccccccttctcctatgcctacacagagctggaggccatcatgtatgccctgggcgtgggcgccagcatcaaggaccccaaggacctgaagttcatctatgagggcagcagtgacttcagctgcctgcccaccttcggggtcatcatcggccagaagtccatgatgggcggcggcctggccgagatccctggcctgagcatcaactttgccaaggtgctgcatggagagcagtacctggagctgtacaagcccctgcccagggctgggaagctgaagtgtgaggccgtggtggctgatgtgctggacaagggcagcggcgtggtgatcatcatggatgtgtacagctacagcgagaaggagctgatctgccacaaccagttcagcctcttcctggtgggcagcggcggctttggaggcaagaggaccagtgacaaggtgaaggtggccgtggccatccccaacagacctccagatgctgtgctgacagacaccaccagcctgaaccaggccgccctgtaccgcctgagcggggactggaaccccctgcacatcgaccccaactttgccagcctggccggctttgacaagcccatcctgcacggcctgtgcaccttcggcttcagcgccaggagagtgctgcagcagtttgctgacaatgatgtgagccgcttcaaggccatcaaggccaggtttgccaagcctgtgtacccaggccagaccctgcagacagagatgtggaaggagggcaaccgcatccacttccagaccaaggtgcaggagaccggggacatcgtcatcagcaatgcctacgtggacctggcccccaccagcggcaccagcgccaagacccccagcgagggcggcaagctgcagagcacctttgtgtttgaggagatcggccggcggctgaaggacatcggccctgaggtggtgaagaaggtgaatgctgtgtttgagtggcacatcaccaagggcggcaacattggagccaagtggaccatcgacctgaagagcggcagcggcaaggtgtaccagggccctgccaagggagctgctgacaccaccatcatcctgagtgatgaggacttcatggaggtggtgctgggcaagctggacccccagaaggccttcttcagcggccgcctgaaggcccggggcaacatcatgctgagccagaagctgcagatgatcctgaaggactatgccaagctgtag

SEQ ID NO: 155755 - DNA, 2157 bp, synthetic construct
  misc_feature 1..2157: note = Description of Artificial Sequence: Synthetic coding sequence
  source 1..2157: mol_type = other DNA
atgggcagccccctgcgctttgatggccgggtggtgctggtgactggagctggagctgtgaatgacctgggcggggacttcaagggcgtgggcaagggcagcctggccgctgacaaggtggtggaggagatcagaagaagaggaggcaaggctgtggccaactatgattctgtggaggagggggagaaggtggtgaagacagccctggatgccttcggcagaattgatgtggtggtgaacaatgccggcatcctgcgggacaggagctttgcccgcatcagtgatgaggactgggacatcatccaccgggtgcacctgcggggcagcttccaggtgaccagggctgcctgggagcacatgaagaagcagaagtatggccgcatcatcatgaccagcagcgccagcggcatctacggcaactttggccaggccaactacagcgctgccaagctgggcctgctgggcctggccaacagcctggccatcgagggcaggaagagcaacatccactgcaacaccatcgccccaaatgccggcagcaggatgacccagacagtgatgcctgaggacctggtggaggccctgaagccagaatatgtggcccccctggtgctgtggctgtgccacgagagctgtgaggagaatggaggcctgtttgaggtgggcgccggctggattggcaagctgcgctgggagaggaccctgggcgccatcgtgcggcagaagaaccaccccatgaccccagaggccgtgaaggccaactggaagaagatctgtgactttgaaaatgccagcaagccccagagcatccaggagagcacaggcagcatcatcgaggtgctgagcaagattgacagcgagggcggcgtgtctgccaaccacaccagccgggccaccagcacagccaccagcggctttgctggggccatcggccagaagctgccccccttctcctatgcctacacagagctggaggccatcatgtatgccctgggcgtgggcgccagcatcaaggaccccaaggacctgaagttcatctatgagggcagcagtgacttcagctgcctgcccacctttggagtcatcatcggccagaagtccatgatgggcggcggcctggccgagatccctggcctgagcatcaactttgccaaggtgctgcacggggagcagtacctggagctgtacaagcccctgccccgggccggcaagctgaagtgtgaggccgtggtggctgatgtgctggacaagggcagcggcgtggtgatcatcatggatgtgtacagctacagcgagaaggagctgatctgccacaaccagttcagcctcttcctggtgggcagcggcggctttggaggcaagaggaccagtgacaaggtgaaggtggccgtggccatccccaaccggcccccagatgctgtgctgacagacaccaccagcctgaaccaggccgccctgtaccgcctgagcggggactggaaccccctgcacatcgaccccaactttgccagcctggccggctttgacaagcccatcctgcacggcctgtgcaccttcggcttcagcgcccggcgggtgctgcagcagtttgctgacaatgatgtgagccgcttcaaggccatcaaggccaggtttgccaagcctgtgtacccaggccagaccctgcagacagagatgtggaaggagggcaaccgcatccacttccagaccaaggtgcaggagactggagacatcgtcatcagcaatgcctacgtggacctggcccccaccagcggcaccagcgccaagaccccatctgagggcggcaagctgcagagcacctttgtgtttgaggagattggaagaaggctgaaggacatcggccctgaggtggtgaagaaggtgaatgctgtgtttgagtggcacatcaccaagggcggcaacatcggggccaagtggaccatcgacctgaagagcggcagcggcaaggtgtaccagggccctgccaagggagctgctgacaccaccatcatcctgagtgatgaggacttcatggaggtggtgctgggcaagctggacccccagaaggccttcttcagcggccgcctgaaggcccggggcaacatcatgctgagccagaagctgcagatgatcctgaaggactatgccaagctgtag

SEQ ID NO: 155756 - DNA, 1026 bp, synthetic construct
  misc_feature 1..1026: note = Description of Artificial Sequence: Synthetic coding sequence
  source 1..1026: mol_type = other DNA
atgaggaaggtggtgctgatcaccggggccagcagcggcatcggcctggccctgtgcaagaggctgctggctgaagatgatgagctgcacctgtgcctggcctgcaggaacatgagcaaggccgaggccgtgtgtgccgccctgctggccagccaccccacagctgaggtgaccatcgtgcaggtggatgtgagcaacctgcagagcgtcttccgggccagcaaggagctgaagcagcgcttccagaggctggactgcatctacctgaatgccggcatcatgcccaacccccagctgaacatcaaggccctcttcttcggcctcttcagcaggaaggtgatccacatgttcagcacagctgagggcctgctgacccagggcgacaagatcacagcagatggcctgcaggaggtgtttgagaccaacgtgtttggccacttcatcctgatccgggagctggagcccctgctgtgccacagcgacaaccccagccagctgatctggaccagcagccgcagcgccaggaagagcaacttcagcctggaggacttccagcacagcaagggcaaggagccctacagcagcagcaaatatgccacagacctgctgtctgtggccctgaacagaaacttcaaccagcagggcctgtacagcaatgtggcctgccctggaacagccctgaccaacctgacctacggcatcctgccccccttcatctggaccctgctgatgcctgccatcctgctgctgcgcttctttgccaatgccttcaccctgaccccctacaatggaacagaggccctggtgtggctgttccaccagaagccagagagcctgaaccccctcatcaagtacctgagcgccaccaccggcttcggcaggaactacatcatgacccagaagatggacctggatgaggacacagctgagaagttctaccagaagctgctggagctggagaagcacatccgggtgaccatccagaagacagacaaccaggcccggctgagcggcagctgcctgtag

SEQ ID NO: 155757 - DNA, 336 bp, synthetic construct
  misc_feature 1..336: note = Description of Artificial Sequence: Synthetic coding sequence
  source 1..336: mol_type = other DNA
atgaggaaggtggtgctgatcaccggggccagcagcggcatcggcctggccctgtgcaagaggctgctggctgaagatgatgagctgcacctgtgcctggcctgcaggaacatgagcaaggccgaggccgtgtgtgccgccctgctggccagccaccccacagctgaggtgaccatcgtgcaggtggatgtgagcaacctgcagagcgtcttccgggccagcaaggagctgaagcagcgcttccagaggctggactgcatctacctgaatgccggcatcatgcccaacccccagctgaacatcaaggccctcttcttcggcctcttcagcagctag

SEQ ID NO: 155758 - DNA, 255 bp, synthetic construct
  misc_feature 1..255: note = Description of Artificial Sequence: Synthetic coding sequence
  source 1..255: mol_type = other DNA
atgaggaaggtggtgctgatcaccggggccagcagcggcatcggcctggccctgtgcaagaggctgctggctgaagatgatgagctgcacctgtgcctggcctgcaggaacatgagcaaggccgaggccgtgtgtgccgccctgctggccagccaccccacagctgaggtgaccatcgtgcaggtggatgtgagcaacctgcagagcgtcttccgggccagcaaggagctgaagcagcgctacatcagctgctag

SEQ ID NO: 155759 - DNA, 921 bp, synthetic construct
  misc_feature 1..921: note = Description of Artificial Sequence: Synthetic coding sequence
  source 1..921: mol_type = other DNA
atgaggaaggtggtgctgatcaccggggccagcagcggcatcggcctggccctgtgcaagaggctgctggctgaagatgatgagctgcacctgtgcctggcctgcaggaacatgagcaaggccgaggccgtgtgtgccgccctgctggccagccaccccacagctgaggtgaccatcgtgcaggtggatgtgagcaacctgcagagcgtcttccgggccagcaaggagctgaagcagcgcttccagaggctggactgcatctacctgaatgccggcatcatgcccaacccccagctgaacatcaaggccctcttcttcggcctcttcagcaggaaggtgatccacatgttcagcacagctgagggcctgctgacccagggcgacaagatcacagcagatggcctgcaggaggtgtttgagaccaacgtgtttggccacttcatcctgatccgggagctggagcccctgctgtgccacagcgacaaccccagccagctgatctggaccagcagccgcagcgccaggaagagcaacttcagcctggaggacttccagcacagcaagggcaaggagccctacagcagcagcaaatatgccacagacctgctgtctgtggccctgaacagaaacttcaaccagcagctgcgcttctttgccaatgccttcaccctgaccccctacaacggcacagaggccctggtgtggctgttccaccagaagccagagagcctgaaccccctcatcaagtacctgagcgccaccactggatttggaagaaactacatcatgacccagaagatggacctggatgaggacacagctgagaagttctaccagaagctgctggagctggagaagcacatccgggtgaccatccagaagacagacaaccaggcccggctgagcggcagctgcctgtag

SEQ ID NO: 155760 - DNA, 360 bp, synthetic construct
  misc_feature 1..360: note = Description of Artificial Sequence: Synthetic coding sequence
  source 1..360: mol_type = other DNA
gtggtgatccgggagctggagcccctgctgtgccacagcgacaaccccagccagctgatctggaccagcagccgcagcgccaggaagagcaacttcagcctggaggacttccagcacagcaagggcaaggagccctacagcagcagcaaatatgccacagacctgctgtctgtggccctgaacagaaacttcaaccagcagctgcgcttctttgccaatgccttcaccctgaccccctacaatggaacagaggccctggtgtggctgttccaccagaagccagagagcctgaaccccctcatcaagtacctgagcgccaccaccggcttcggcaggaactacatcatgacccagaagtag

SEQ ID NO: 155761 - DNA, 966 bp, synthetic construct
  misc_feature 1..966: note = Description of Artificial Sequence: Synthetic coding sequence
  source 1..966: mol_type = other DNA
atggagaggaagaaccagacagccatcacagagttcatcatcctgggcttcagcaacctgaatgagtggcagttcctgctcttcaccatcttcttcctgacctacttctgcaccctgggcggcaacatcctgatcatcctgaccaccgtgacagacccccacctgcacacccccatgtactacttcctgggcaacctggccttcatcgacatctgctacaccaccagcaatgtgccccagatgatggtgcacctgctgagcaagaagaagagcatctcctatgtgggctgtgtggtgcagctgtttgcctttgtgttctttgtgggctctgaatgtctgctgctggccgccatggcctatgaccgctacatcgccatctgcaaccccctgcgctacagcgtcatcctgagcaaggtgctgtgcaaccagctggccgccagctgctgggccgccggcttcctgaacagcgtggtgcacacagtgctgaccttctgcctgcccttctgtggcaacaaccagatcaactacttcttctgtgacatcccccccctgctgatcctgagctgtggcaacacctctgtgaatgagctggccctgctgagcactggagtcttcatcggctggacccccttcctgtgcatcgtgctgagctacatctgcatcatcagcaccatcctgcgcatccagagcagcgagggccgcaggaaggccttcagcacctgtgccagccacctggccatcgtgttcctgttctacggcagcgccatcttcacctacgtgcggcccatcagcacctacagcctgaagaaggaccggctggtgtctgtgctgtacagcgtggtgacccccatgctgaaccccatcatctacaccctgaggaacaaggacatcaaggaggccgtgaagaccatcggcagcaagtggcagccccccatcagcagcctggacagcaagctgacctactag

SEQ ID NO: 155762 - DNA, 786 bp, synthetic construct
  misc_feature 1..786: note = Description of Artificial Sequence: Synthetic coding sequence
  source 1..786: mol_type = other DNA
atggccagccagctgcagaaccggctgcggagcgccctggccctggtgactggagctggcagcggcatcggccgggctgtgtctgtgcggctggccggggagggcgccaccgtggccgcctgtgacctggacagagctgctgcccaggagaccgtgcggctgctgggcggccctggcagcaaggagggccccccccggggcaaccacgccgccttccaggctgatgtgtctgaggcccgggccgcccgctgcctgctggagcaggtgcaggcctgcttcagccggccccccagcgtggtggtgtcctgtgccggcatcacccaggatgagttcctgctgcacatgtctgaagatgactgggacaaggtgattgctgtgaacctgaagggcaccttcctggtgacccaggccgccgcccaggccctggtgtccaatggctgccggggcagcatcatcaacatcagcagcatcgtgggcaaggtgggcaatgtgggccagaccaactatgctgccagcaaggccggcgtgattggcctgacccagacagctgcccgggagctgggccgccacggcatccgctgcaacagcgtgctgcccggcttcatcgccacccccatgacccagaaggtgccccagaaggtggtggacaagatcacagagatgatccccatgggccacctgggggaccctgaagatgtggctgatgtggtggccttcctggcctctgaagattctggctacatcaccggcacctctgtggaggtgactggaggcctcttcatgtag

SEQ ID NO: 155763 - DNA, 786 bp, synthetic construct; identical to SEQ ID NO: 155762
  misc_feature 1..786: note = Description of Artificial Sequence: Synthetic coding sequence
  source 1..786: mol_type = other DNA

SEQ ID NO: 155764 - DNA, 786 bp, synthetic construct; identical to SEQ ID NO: 155762
  misc_feature 1..786: note = Description of Artificial Sequence: Synthetic coding sequence
  source 1..786: mol_type = other DNA

SEQ ID NO: 155765 - DNA, 786 bp, synthetic construct; identical to SEQ ID NO: 155762
  misc_feature 1..786: note = Description of Artificial Sequence: Synthetic coding sequence
  source 1..786: mol_type = other DNA

SEQ ID NO: 155766 - DNA, 786 bp, synthetic construct; identical to SEQ ID NO: 155762
  misc_feature 1..786: note = Description of Artificial Sequence: Synthetic coding sequence
  source 1..786: mol_type = other DNA

SEQ ID NO: 155767 - DNA, 1848 bp, synthetic construct
  misc_feature 1..1848: note = Description of Artificial Sequence: Synthetic coding sequence
  source 1..1848: mol_type = other DNA
atggtgtctggccccctggccctgcgctggtgtgcctgggccggccgcggggacatgggccctgacatggagctgcccagccacagcaagcagctgctgctgcagctgaaccagcagaggaccaagggcttcctgtgtgatgtgatcatcatggtggagaacagcatcttccgggcccacaagaatgtgctggccgccagcagcatctacttcaagagcctggtgctgcatgacaacctgatcaacctggacacagacatggtgagcagcacagtgttccagcagatcctggacttcatctacaccgggaagctgctgcccagcgaccagcctgctgagcccaacttcagcaccctgctgacagctgccagctacctgcagctgcctgagctggccgccctgtgcaggaggaagctgaagagagctgggaagcccttcggcagcggccgggccggcagcacaggcatgggccggcccccaagaagccagaggctgagcacagccagcgtcatccaggcccgctaccagggcctggtggatggcaggaaaggagcccacgccccccaggagctgccccaggccaagggcagtgatgatgagctgttcctgggcggcagcaaccaggacagcgtgcagggcctgggccgggctgtgtgcccagctggaggagaggccggcctgggcggctgcagcagcagcaccaacggcagcagcggcggctgtgagcaggagctgggcctggacctgagcaagaagagcccccccctgcccccagccaccccaggcccccacctgaccccagatgatgctgcccagctgagtgacagccagcacggcagccccccagctgccagcgcccctcctgtggccaacagcgccagctacagcgagctgggcggcaccccagatgagcccatggacctggagggcgctgaggacaaccacctgagcctgctggaggcccctgggggccagcccaggaagagcctgcggcacagcaccaggaagaaggagtggggcaagaaggagcctgtggccggcagcccctttgagcggcgggaggccggccccaagggcccctgccctggagaggagggggagggcgtgggggacagagtgcccaacggcatcctggccagcggggccggccccagcggcccctacggggagcccccctacccctgcaaggaggaggaggagaatggcaaggatgcctctgaagattctgcccagagcggcagcgagggcggcagcggccacgccagcgcccactacatgtaccggcaggagggctatgagaccgtgtcctatggagacaacctgtatgtgtgcatcccctgtgccaagggcttccccagcagcgagcagctgaatgcccacgtggagacccacacagaggaggagctgttcatcaaggaggagggcgcctatgaaacaggcagcggcggcgctgaggaggaggccgaggacctgagcgcccccagcgctgcctacacagctgagccccggcccttcaagtgcagcgtgtgtgagaagacctacaaggaccctgccaccctgcggcagcacgagaagacccactggctgacccggcccttcccctgcaacatctgtgggaagatgttcacccagaggggcaccatgaccaggcacatgaggagccacctgggcctgaagccctttgcctgtgatgaatgtggcatgaggttcacccggcagtaccgcctgacagagcacatgagggtgcacagcggggagaagccctatgagtgccagctgtgtggcggcaagttcacccagcagaggaacctgatcagccacctgaggatgcacaccagccccagctag

SEQ ID NO: 155768 - DNA, 1848 bp, synthetic construct; identical to SEQ ID NO: 155767
  misc_feature 1..1848: note = Description of Artificial Sequence: Synthetic coding sequence
  source 1..1848: mol_type = other DNA

SEQ ID NO: 155769 - DNA, 1848 bp, synthetic construct; identical to SEQ ID NO: 155767
  misc_feature 1..1848: note = Description of Artificial Sequence: Synthetic coding sequence
  source 1..1848: mol_type = other DNA

SEQ ID NO: 155770 - DNA, 2670 bp, synthetic construct
  misc_feature 1..2670: note = Description of Artificial Sequence: Synthetic coding sequence
  source 1..2670: mol_type = other DNA
atggatgcccggggcggcggcggccggcctggagagagccctggggccaccccagcccctggccccccacctcctcctcctccagccccaccccagcagcagcccccacctcctcctcctccagcccctcctcctggccctggccctgccccaccccagcacccccccagggctgaggccctgcccccagaggccgcagatgaaggaggcccccggggccgcctgcggagccgggacagcagctgtggccggcccggcacccctggggccgccagcacagccaagggcagccccaatggagaatgtggccgcggggagccccagtgcagccctgctggccctgagggccctgcccggggccccaaggtgtccttcagctgccgcggggccgccagcggccctgcccctggccctggccctgctgaggaggccggcagcgaggaggccggccctgctggggagccccggggcagccaggccagcttcatgcagaggcagtttggagccctgctgcagcccggggtgaacaagttcagcctgaggatgtttggcagccagaaggctgtggagcgggagcaggagcgggtgaagtctgctggggcctggatcatccacccctacagcgacttccgcttctactgggacttcaccatgctgctcttcatggtgggcaacctgatcatcatccctgtgggcatcaccttcttcaaggatgagaccacagccccctggatcgtgttcaacgtggtgtctgacaccttcttcctgatggacctggtgctgaacttcagaactggaattgtgattgaggacaacacagagatcatcctggaccctgagaagatcaagaagaagtacctgcggacctggtttgtggtggactttgtgagcagcatccctgtggactacatcttcctgattgtggagaagggcatcgacagcgaggtgtacaagacagcccgggccctgagaattgtgcgcttcaccaagatcctgagcctgctgcggctgctgcggctgagccgcctcatccgctacatccaccagtgggaggagatcttccacatgacctatgacctggccagcgctgtgatgaggatctgcaacctgatctccatgatgctgctgctgtgccactgggatggctgcctgcagttcctggtgcccatgctgcaggacttccccaggaactgctgggtgtccatcaatggcatggtgaaccacagctggagcgagctgtacagctttgccctcttcaaggccatgagccacatgctgtgcatcggctacggccggcaggcccctgagagcatgacagacatctggctgaccatgctgtccatgattgtgggcgccacctgctacgccatgtttattggacatgccacagccctgatccagagcctggacagcagccggcggcagtaccaggagaagtacaagcaggtggagcagtacatgtccttccacaagctgcctgctgacttccggcagaagatccatgactactatgagcaccgctaccagggcaagatgtttgatgaagattccatcctgggggagctgaatggccccctgcgggaggagatcgtgaacttcaactgcaggaagctggtggcctccatgcccctgtttgccaatgctgaccccaactttgtgacagccatgctgaccaagctgaagtttgaggtgttccagcccggggactacatcatccgggagggcaccatcggcaagaagatgtacttcatccagcacggcgtggtgtctgtgctgaccaagggcaacaaggagatgaagctgagtgatggcagctactttggagagatctgcctgctgacccggggcagaagaacagcctctgtgcgggctgacacctactgccgcctgtacagcctgtctgtggacaacttcaatgaggtgctggaggagtaccccatgatgagaagagcctttgagaccgtggccatcgaccggctggacagaattggcaagaagaacagcatcctgctgcacaaggtgcagcacgacctgaacagcggggtcttcaacaaccaggagaatgccatcatccaggagatcgtgaagtatgaccgggagatggtgcagcaggccgagctgggccagagggtgggcctcttccccccacctcctcctccaccccaggtgaccagcgccatcgccaccctgcagcaggccgccgccatgtccttctgcccccaggtggcccggcccctggtgggccccctggccctgggcagcccccggctggtgagaagacctcctcctggccctgccccagctgctgccagccctggccccccacctccagccagccccccaggggccccagccagcccccgggcccccaggaccagcccctatggaggcctgcctgctgcccccctggccggccctgccctgcctgcccggcggctgagccgggccagccggcccctgagcgccagccagcccagcctgccccatggagcccctggccctgctgccagcaccaggcctgccagcagcagcaccccccggctgggccccaccccagctgcccgggctgctgcccccagcccagacagaagagacagcgccagccctggagctgctgggggcctggacccccaggacagcgcccggagccggctgagcagcaacctgtag

SEQ ID NO: 155771 - DNA, 2325 bp, synthetic construct
  misc_feature 1..2325: note = Description of Artificial Sequence: Synthetic coding sequence
  source 1..2325: mol_type = other DNA
atggaggccgagcagaggcctgctgctggggccagcgagggcgccaccccaggcctggaggccgtgccccctgtggcccctcctccagccacagctgccagcggccccatccccaagagcggccctgagcccaagaggaggcacctgggcaccctgctgcagcccaccgtgaacaagttcagcctgcgggtgtttggcagccacaaggctgtggagattgagcaggagcgggtgaagtctgctggggcctggatcatccacccctacagcgacttccgcttctactgggacctgatcatgctgctgctgatggtgggcaacctgattgtgctgcctgtgggcatcaccttcttcaaggaggagaacagccccccctggatcgtgttcaacgtgctgagtgacaccttcttcctgctggacctggtgctgaacttcagaactggaattgtggtggaggagggcgctgagatcctgctggccccccgggccatccgcacccgctacctgcggacctggttcctggtggacctgatcagcagcatccctgtggactacatcttcctggtggtggagctggagccccggctggatgctgaggtgtacaagacagcccgggccctgagaattgtgcgcttcaccaagatcctgagcctgctgcggctgctgcggctgagccgcctcatccgctacatccaccagtgggaggagatcttccacatgacctatgacctggccagcgctgtggtgcgcatcttcaacctgattggcatgatgctgctgctgtgccactgggatggctgcctgcagttcctggtgcccatgctgcaggacttccccccagactgctgggtgtccatcaaccacatggtgaaccacagctggggccggcagtacagccacgccctcttcaaggccatgagccacatgctgtgcatcggctacggccagcaggcccctgtgggcatgccagatgtgtggctgaccatgctgtccatgattgtgggcgccacctgctacgccatgtttattggacatgccacagccctgatccagagcctggacagcagccggcggcagtaccaggagaagtacaagcaggtggagcagtacatgtccttccacaagctgcctgctgacacccggcagagaattcatgagtactatgagcaccgctaccagggcaagatgtttgatgaggagagcatcctgggggagctgtctgagcccctgcgggaggagatcatcaacttcacctgccggggcctggtggcccacatgcccctgtttgcccacgccgaccccagctttgtgacagctgtgctgaccaagctgcgctttgaggtgttccagcccggggacctggtggtgcgggagggctctgtgggcaggaagatgtacttcatccagcacggcctgctgtctgtgctggcccggggggcccgggacacccggctgacagatggcagctactttggagagatctgcctgctgacccggggcagaagaacagcctctgtgcgggctgacacctactgccgcctgtacagcctgtctgtggaccacttcaatgctgtgctggaggagttccccatgatgagaagagcctttgagaccgtggccatggaccggctgctgagaattggcaagaagaacagcatcctgcagaggaagaggtctgagcccagccctggcagcagcggcggcatcatggagcagcacctggtgcagcacgaccgggacatggcccggggcgtgcggggccgggcccccagcactggagcccagctgagcggcaagcctgtgctgtgggagcccctggtgcacgcccccctgcaggccgctgctgtgaccagcaatgtggccatcgccctgacccaccagaggggccccctgcccctgagcccagacagccctgccaccctgctggcccggagcgcctggaggtctgctggcagccctgccagccccctggtgcctgtgcgggccggcccctgggccagcaccagccggctgcctgcccccccagcccggaccctgcacgccagcctgagccgggccggccgcagccaggtgtccctgctgggccccccacctgggggcggcggccgccgcctgggcccccggggccggcccctgagcgccagccagcccagcctgccccagagggccactggagatggcagccctggcaggaagggcagcggcagcgagcggctgccccccagcggcctgctggccaagccacccaggacagcccagccccccaggcctcctgtgcctgagcccgccaccccccggggcctgcagctgagcgccaacatgtag

SEQ ID NO: 155772 - DNA, 3612 bp, synthetic construct
  misc_feature 1..3612: note = Description of Artificial Sequence: Synthetic coding sequence
  source 1..3612: mol_type = other DNA
atggacaagctgcccccatccatgaggaagaggctgtacagcctgccccagcaggtgggcgccaaggcctggatcatggatgaggaggaggatgctgaggaggagggcgccggcggccggcaggaccccagcagaagaagcatccggctgcggcccctgcccagccccagccccagcgctgctgctgggggcacagagagccgcagcagcgccctgggcgctgctgacagcgagggccctgcccggggggccggcaagagcagcaccaacggggactgccgccgcttccggggcagcctggccagcctgggcagcagaggaggcggcagcggcggcactggaagtggcagcagccacggccacctgcatgattctgctgaggagcggcggctgattgctgaaggagatgccagccctggagaggacaggaccccacctggcctggccgctgagcctgagaggcctggggccagcgcccagcctgctgccagccccccaccaccccagcagcccccccagcctgccagcgccagctgtgagcagcccagcgtggacacagccatcaaggtggagggcggcgctgctgctggggaccagatcctgcctgaggccgaggtgcggctgggccaggccggcttcatgcagaggcagtttggagccatgctgcagcccggggtgaacaagttcagcctgaggatgtttggcagccagaaggctgtggagcgggagcaggagcgggtgaagtctgctggcttctggatcatccacccctacagcgacttccgcttctactgggacctgaccatgctgctgctgatggtgggcaacctgatcatcatccctgtgggcatcaccttcttcaaggatgagaacaccaccccctggatcgtgttcaacgtggtgtctgacaccttcttcctgattgacctggtgctgaacttcagaacaggcatcgtggtggaggacaacacagagatcatcctggacccccagaggatcaagatgaagtacctgaagtcctggttcatggtggacttcatcagcagcatccctgtggactacatcttcctgattgtggagaccagaattgattctgaggtgtacaagacagcccgggccctgcgcatcgtgcgcttcaccaagatcctgagcctgctgcggctgctgcggctgagccgcctcatccgctacatccaccagtgggaggagatcttccacatgacctatgacctggccagcgctgtggtgcgcatcgtgaacctgattggcatgatgctgctgctgtgccactgggatggctgcctgcagttcctggtgcccatgctgcaggacttcccagatgactgctgggtgtccatcaacaacatggtgaacaacagctggggcaagcagtacagctatgccctcttcaaggccatgagccacatgctgtgcatcggctacggccggcaggcccctgtgggcatgtctgatgtgtggctgaccatgctgtccatgattgtgggcgccacctgctacgccatgttcatcggccacgccacagccctgatccagagcctggacagcagccggcggcagtaccaggagaagtacaagcaggtggagcagtacatgtccttccacaagctgcccccagacacccggcagagaattcatgactactatgagcaccgctaccagggcaagatgtttgatgaggagagcatcctgggggagctgtctgagcccctgcgggaggagatcatcaacttcaactgcaggaagctggtggcctccatgcccctgtttgccaatgctgaccccaactttgtgacctccatgctgaccaagctgcgctttgaggtgttccagcccggggactacatcatccgggagggcaccatcggcaagaagatgtacttcatccagcacggcgtggtgtctgtgctgaccaagggcaacaaggagaccaagctggctgatggcagctactttggagagatctgcctgctgacccggggccgcaggacagcctctgtgcgggctgacacctactgccgcctgtacagcctgtctgtggacaacttcaatgaggtgctggaggagtaccccatgatgaggcgggcctttgaaacagtggccctggaccggctggaccgcatcggcaagaagaacagcatcctgctgcacaaggtgcagcacgacctgaacagcggggtcttcaactaccaggagaatgagatcatccagcagatcgtgcagcacgaccgggagatggcccactgtgcccaccgggtgcaggccgccgccagcgccacccccacccccacccctgtgatctggacccccctcatccaggcccccctgcaggccgccgccgccaccacctctgtggccatcgccctgacccaccacccccggctgcctgctgccatcttccggcccccacctggcagcggcctgggcaacctgggcgccggccagacccccaggcacctgaagaggctgcagagcctcatccccagcgccctgggcagcgccagccctgccagcagccccagccaggtggacacccccagcagcagcagcttccacatccagcagctggccggcttcagcgccccagctggcctgagccccctgctgcccagcagcagcagcagccccccacctggggcctgtggcagccccagcgcccccacccccagcgctggggtggccgccaccaccatcgccggcttcggccacttccacaaggccctgggcggcagcctgagcagcagtgacagccccctgctgacccccctgcagcccggggcccggagcccccaggccgcccagcccagccctgcccctcctggggcccggggcggcctgggcctgcctgagcacttcctgcccccaccacccagcagccgcagccccagcagcagccctggccagctgggccagcccccaggagagctgagcctgggcctggccaccggccccctgagcaccccagagaccccaccccggcagcctgagccccccagcctggtggccggggccagcggcggggccagccctgtgggcttcaccccccggggcggcctgagccccccaggccacagccctggcccccccaggaccttccccagcgccccaccccgggccagcggcagccacggcagcctgctgctgcccccagccagcagccccccaccaccccaggtgccccagaggcggggcaccccacccctgaccccaggccgcctgacccaggacctgaagctgatcagcgccagccagcctgccctgccccaggatggagcccagaccctgcggcgggccagcccccacagcagtggagagagcatggccgccttccccctcttcccccgggccggcggcggcagcggcggcagcggcagcagcggcggcctgggccccccaggccggccctacggggccatccctggccagcacgtgaccctgcccaggaagaccagcagcggcagcctgcccccacccctgagcctgtttggagcccgggccaccagcagcggcggcccccccctgacagctggcccccagcgggagcccggggcccggcctgagcctgtgcgcagcaagctgcccagcaacctgtag

SEQ ID NO: 155773 - DNA, 396 bp, synthetic construct
  misc_feature 1..396: note = Description of Artificial Sequence: Synthetic coding sequence
  source 1..396: mol_type = other DNA
atgaacctgcccagcaccaaggtgtcctgggccgctgtgaccctgctgctgctgctgctgctgctgcccccagccctgctgagcagtggagctgctgcccagcccctgcctgactgctgccggcagaagacctgcagctgccgcctgtatgagctgctgcacggggccggcaaccacgccgccggcatcctgaccctgggcaagagaagaagtggccccccaggcctgcagggccgcctgcagaggctgctgcaggccagcggcaaccacgccgccggcatcctgaccatgggcagaagagctggagctgagcccgccccccggccctgcctgggccgccgctgcagcgccccagctgctgcctctgtggcccctgggggccagagcggcatctag

SEQ ID NO: 155774 - DNA, 1050 bp, synthetic construct
  misc_feature 1..1050: note = Description of Artificial Sequence: Synthetic coding sequence
  source 1..1050: mol_type = other DNA
atggccgccacagctgctgaggccgtggccagcggcagcggggagccccgggaggaggccggggccctgggccctgcctgggatgagagccagctgcggagctacagcttccccacccggcccatcccccggctgagccagagcgaccccagggctgaggagctgattgaaaatgaggagcctgtggtgctgacagacaccaacctggtgtacccagccctgaagtgggacctggagtacctgcaggagaacattggaaatggagacttctctgtgtacagcgccagcacccacaagttcctgtactatgatgagaagaagatggccaacttccagaacttcaagcccaggagcaaccgggaggagatgaagttccacgagtttgtggagaagctgcaggacatccagcagagaggaggagaggagcggctgtacctgcagcagaccctgaatgacacagtgggcaggaagatcgtgatggacttcctgggcttcaactggaactggatcaacaagcagcagggcaagaggggctggggccagctgaccagcaacctgctgctgattggcatggagggcaatgtgaccccagcccactatgatgagcagcagaacttctttgcccagatcaagggctacaagcgctgcatcctcttccccccagaccagtttgaatgtctgtacccctaccctgtgcaccacccctgtgaccggcagagccaggtggactttgacaacccagactatgagcgcttccccaacttccagaatgtggtgggctatgaaacagtggtgggccctggagatgtgctgtacatccccatgtactggtggcaccacatcgagagcctgctgaatggaggcatcaccatcaccgtgaacttctggtacaagggggcccccacccccaagagaattgagtaccccctgaaggcccaccagaaggtggccatcatgaggaacatcgagaagatgctgggggaggccctgggcaacccccaggaggtgggccccctgctgaacaccatgatcaagggccgctacaactag

SEQ ID NO: 155775 - DNA, 1149 bp, synthetic construct
  misc_feature 1..1149: note = Description of Artificial Sequence: Synthetic coding sequence
  source 1..1149: mol_type = other DNA
atggtgtctgtgggctgtgtggtgttcctgttcttcttcttcggcgtgaggaacagaagaagcttccgcttccgctggggccccagcctggccgctgagatggccgccacagctgctgaggccgtggccagcggcagcggggagccccgggaggaggccggggccctgggccctgcctgggatgagagccagctgcggagctacagcttccccacccggcccatcccccggctgagccagagcgaccccagggctgaggagctgattgaaaatgaggagcctgtggtgctgacagacaccaacctggtgtacccagccctgaagtgggacctggagtacctgcaggagaacattggaaatggagacttctctgtgtacagcgccagcacccacaagttcctgtactatgatgagaagaagatggccaacttccagaacttcaagcccaggagcaaccgggaggagatgaagttccatgaatttgtggagaagctgcaggacatccagcagaggggcggggaggagcggctgtacctgcagcagaccctgaatgacacagtgggcaggaagatcgtgatggacttcctgggcttcaactggaactggatcaacaagcagcagggcaagaggggctggggccagctgaccagcaacctgctgctgattggcatggagggcaatgtgaccccagcccactatgatgagcagcagaacttctttgcccagatcaagggctacaagcgctgcatcctcttccccccagaccagtttgagtgcctgtacccctaccctgtgcaccacccctgtgaccggcagagccaggtggactttgacaacccagactatgagcgcttccccaacttccagaatgtggtgggctatgagaccgtggtgggccctggagatgtgctgtacatccccatgtactggtggcaccacatcgagagcctgctgaatggaggcatcaccatcaccgtgaacttctggtacaagggggcccccacccccaagagaattgagtaccccctgaaggcccaccagaaggtggccatcatgagaaatattgagaagatgctgggggaggccctgggcaacccccaggaggtgggccccctgctgaacaccatgatcaagggccgctacaactag

SEQ ID NO: 155776 - DNA, 579 bp, synthetic construct
  misc_feature 1..579: note = Description of Artificial Sequence: Synthetic coding sequence
  source 1..579: mol_type = other DNA
atggccaacttccagaacttcaagcccaggagcaaccgggaggagatgaagttccatgaatttgtggagaagctgcaggacatccagcagaggggcggggaggagcggctgtacctgcagcagaccctgaatgacacagtgggcaggaagatcgtgatggacttcctgggcttcaactggaactggatcaacaagcagcagggcaagaggggctggggccagctgaccagcaacctgctgctgattggcatggagggcaatgtgaccccagcccactatgatgagcagcagaacttctttgcccagatcaagggctacaagcgctgcatcctcttccccccagaccagtttgagtgcctgtacccctaccctgtgcaccacccctgtgaccggcagagccaggtggactttgacaacccagactatgagcgcttccccaacttccagaatgtggtgggctatgagaccgtggtgggccctggagatgtgctgtacatccccatgtactggtggcaccacatcgagagcctgctgaatggaggcatcaccatcaccgtgaacttctggtacaagggctag

SEQ ID NO: 155777 - DNA, 1803 bp, synthetic construct
  misc_feature 1..1803: note = Description of Artificial Sequence: Synthetic coding sequence
  source 1..1803: mol_type = other DNA
atgaggcctgctgctggagctgcccggcggccccgctgctgcacctcctggctgacccgctgccccagccctgctgccagcgcccccacctggacccggcccctgagctgtgccagccccagcgccacctgtgcctgcacagccagcgccccccagctggagctgattggccacagcatctttgacttcatccacccctgtgaccaggaggagctgcaggatgccctgaccccccagcagaccctgagcaggaggaaggtggaggcccccacagagcgctgcttcagcctgaggatgaagagcaccctgaccagccggggccgcaccctgaacctgaaggccgccacctggaaggtgctgaactgcagcggccacatgagggcctacaagcccccagcccagaccagccctgctggcagcccagattctgagccccccctgcagtgcctggtgctgatctgtgaggccatcccccaccctggcagcctggagccccccctgggccgcggggccttcctgagccgccacagcctggacatgaagttcacctactgtgatgacagaattgctgaggtggccggctacagcccagatgacctgattggctgcagcgcctatgagtacatccacgccctggacagtgatgctgtgtccaagagcatccacaccctgctgagcaagggccaggccgtgacaggccagtaccgcttcctggcccggagcggcggctacctgtggacccagacccaggccaccgtggtgtctgggggccggggcccccagagcgagagcatcgtgtgtgtgcacttcctgatcagccaggtggaggagaccggggtggtgctgagcctggagcagacagagcagcacagccggcggcccatccagagaggagcccccagccagaaggacacccccaaccctggggacagcctggacaccccaggcccccgcatcctggccttcctgcacccccccagcctgtctgaggccgccctggccgctgacccccggcgcttctgcagcccagacctgcggcggctgctgggccccatcctggatggagcctctgtggccgccacccccagcacccccctggccaccaggcacccccagagccccctgtctgctgacctgcctgatgagctgcctgtgggcacagaaaatgtgcacaggctcttcaccagcggcaaggacacagaggccgtggagacagacctggacatcgcccaggatgctgatgccctggacctggagatgctggccccctacatctccatggatgatgacttccagctgaatgccagcgagcagctgccccgggcctaccaccggcccctgggcgctgtgccccggccccgggcccgctccttccacggcctgagccccccagccctggagcccagcctgctgccccgctggggcagtgacccccggctgagctgcagcagccccagcagaggagaccccagcgccagcagccccatggccggggccaggaagaggaccctggcccagagcagtgaagatgaagatgagggcgtggagctgctgggcgtgcggccccccaagaggagccccagccctgagcacgagaacttcctgctcttccccctgagcctgtccttcctgctgaccggcggccctgcccctggcagcctgcaggaccccagcacccccctgctgaacctgaatgagcccctgggcctgggccccagcctgctgagcccctacagtgatgaggacaccacccagcccggcggccccttccagccccgggccggcagcgcccaggccgactag

SEQ ID NO: 155778 - DNA, 1353 bp, synthetic construct
  misc_feature 1..1353: note = Description of Artificial Sequence: Synthetic coding sequence
  source 1..1353: mol_type = other DNA
atgaggcctgctgctggagctgcccggcggccccgctgctgcacctcctggctgacccgctgccccagccctgctgccagcgcccccacctggacccggcccctgagctgtgccagccccagcgccacctgtgcctgcacagccagcgccccccagctggagctgattggccacagcatctttgacttcatccacccctgtgaccaggaggagctgcaggatgccctgaccccccagcagaccctgagcaggaggaaggtggaggcccccacagagcgctgcttcagcctgaggatgaagagcaccctgaccagccggggccgcaccctgaacctgaaggccgccacctggaaggtgctgaactgcagcggccacatgagggcctacaagcccccagcccagaccagccctgctggcagcccagattctgagccccccctgcagtgcctggtgctgatctgtgaggccatcccccaccctggcagcctggagccccccctgggccgcggggccttcctgagccgccacagcctggacatgaagttcacctactgtgatgacagaattgctgaggtggccggctacagcccagatgacctgattggctgcagcgcctatgagtacatccacgccctggacagtgatgctgtgtccaagagcatccacaccctgctgagcaagggccaggccgtgacaggccagtaccgcttcctggcccggagcggcggctacctgtggacccagacccaggccaccgtggtgtctgggggccggggcccccagagcgagagcatcgtgtgtgtgcacttcctgatcagccaggtggaggagaccggggtggtgctgagcctggagcagacagagcagcacagccggcggcccatccagagaggagcccccagccagaaggacacccccaaccctggggacagcctggacaccccaggcccccgcatcctggccttcctgcacccccccagcctgtctgaggccgccctggccgctgacccccggcgcttctgcagcccagacctgcggcggctgctgggccccatcctggatggagcctctgtggccgccacccccagcacccccctggccaccaggcacccccagagccccctgtctgctgacctgcctgatgagctgcctgtgggcacagaaaatgtgcacaggctcttcaccagcggcaaggacacagaggccgtggagacagacctggacatcgcccaggaccccagcacccccctgctgaacctgaatgagcccctgggcttccactttgtgacccagagcggcgtgcagtggcacaagcacagcagcccccagccccggcccccaggcctgaagtag

SEQ ID NO: 155779 - DNA, 1899 bp, synthetic construct
  misc_feature 1..1899: note = Description of Artificial Sequence: Synthetic coding sequence
  source 1..1899: mol_type = other DNA
atggccctgggcctgcagagggcccggagcaccacagagctgaggaaggagaagagcagagatgctgcccggagccgccgcagccaggagacagaggtgctgtaccagctggcccacaccctgccctttgcccggggcgtgtctgcccacctggacaaggccagcatcatgaggctgaccatctcctacctgaggatgcaccggctgtgtgccgccggggagtggaaccaggtgggcgctggaggagagcccctggatgcctgctacctgaaggccctggagggctttgtgatggtgctgacagctgagggggacatggcctacctgtctgaaaatgtgtccaagcacctgggcctgagccagctggagctgattggccacagcatctttgacttcatccacccctgtgaccaggaggagctgcaggatgccctgaccccccagcagaccctgagcaggaggaaggtggaggcccccacagagcgctgcttcagcctgaggatgaagagcaccctgaccagccggggccgcaccctgaacctgaaggccgccacctggaaggtgctgaactgcagcggccacatgagggcctacaagcccccagcccagaccagccctgctggcagcccagacagcgagccccccctgcagtgcctggtgctgatctgtgaggccatcccccaccctggcagcctggagccccccctgggccgcggggccttcctgagccgccacagcctggacatgaagttcacctactgtgatgacagaattgctgaggtggccggctacagcccagatgacctgattggctgcagcgcctatgagtacatccacgccctggacagtgatgctgtgtccaagagcatccacaccctgctgagcaagggccaggccgtgacaggccagtaccgcttcctggcccggagcggcggctacctgtggacccagacccaggccaccgtggtgtctgggggccggggcccccagagcgagagcatcgtgtgtgtgcacttcctgatcagccaggtggaggagactggagtggtgctgagcctggagcagacagagcagcacagcagaagacccatccagagaggagcccccagccagaaggacacccccaaccctggggacagcctggacaccccaggcccccgcatcctggccttcctgcacccccccagcctgtctgaggccgccctggccgctgacccccggcgcttctgcagcccagacctgcggcggctgctgggccccatcctggatggagcctctgtggccgccacccccagcacccccctggccaccaggcacccccagagccccctgtctgctgacctgcctgatgagctgcctgtgggcacagaaaatgtgcacaggctcttcaccagcggcaaggacacagaagctgtggagacagacctggacatcgcccaggatgctgatgccctggacctggagatgctggccccctacatctccatggatgatgacttccagctgaatgccagcgagcagctgccccgggcctaccaccggcccctgggcgctgtgccccggccccgggcccggagcttccacggcctgagccccccagccctggagcccagcctgctgccccgctggggcagtgacccccggctgagctgcagcagccccagcagaggagaccccagcgccagcagccccatggccggggccaggaagaggaccctggcccagagcagtgaagatgaagatgaaggagtggagctgctgggcgtgcggccccccaagaggagccccagccctgagcacgagaacttcctgctcttccccctgagcctggtgtgctggggcatcaatggcatcctgtggcccagcctgcccagctggctgaagcccaccgtgctgtag

SEQ ID NO: 155780 - DNA, 1731 bp, synthetic construct
  misc_feature 1..1731: note = Description of Artificial Sequence: Synthetic coding sequence
  source 1..1731: mol_type = other DNA
atgaggctgaccatctcctacctgaggatgcaccggctgtgtgccgccggggagtggaaccaggtgggcgctggaggagagcccctggatgcctgctacctgaaggccctggagggctttgtgatggtgctgacagctgagggggacatggcctacctgtctgaaaatgtgtccaagcacctgggcctgagccagctggagctgattggccacagcatctttgacttcatccacccctgtgaccaggaggagctgcaggatgccctgaccccccagcagaccctgagcaggaggaaggtggaggcccccacagagcgctgcttcagcctgaggatgaagagcaccctgaccagccggggccgcaccctgaacctgaaggccgccacctggaaggtgctgaactgcagcggccacatgagggcctacaagcccccagcccagaccagccctgctggcagcccagacagcgagccccccctgcagtgcctggtgctgatctgtgaggccatcccccaccctggcagcctggagccccccctgggccgcggggccttcctgagccgccacagcctggacatgaagttcacctactgtgatgacagaattgctgaggtggccggctacagcccagatgacctgattggctgcagcgcctatgagtacatccacgccctggacagtgatgctgtgtccaagagcatccacaccctgctgagcaagggccaggccgtgacaggccagtaccgcttcctggcccggagcggcggctacctgtggacccagacccaggccaccgtggtgtctgggggccggggcccccagagcgagagcatcgtgtgtgtgcacttcctgatcagccaggtggaggagactggagtggtgctgagcctggagcagacagagcagcacagcagaagacccatccagagaggagcccccagccagaaggacacccccaaccctggggacagcctggacaccccaggcccccgcatcctggccttcctgcacccccccagcctgtctgaggccgccctggccgctgacccccggcgcttctgcagcccagacctgcggcggctgctgggccccatcctggatggagcctctgtggccgccacccccagcacccccctggccaccaggcacccccagagccccctgtctgctgacctgcctgatgagctgcctgtgggcacagaaaatgtgcacaggctcttcaccagcggcaaggacacagaagctgtggagacagacctggacatcgcccaggatgctgatgccctggacctggagatgctggccccctacatctccatggatgatgacttccagctgaatgccagcgagcagctgccccgggcctaccaccggcccctgggcgctgtgccccggccccgggcccggagcttccacggcctgagccccccagccctggagcccagcctgctgccccgctggggcagtgacccccggctgagctgcagcagccccagcagaggagaccccagcgccagcagccccatggccggggccaggaagaggaccctggcccagagcagtgaagatgaagatgaaggagtggagctgctgggcgtgcggccccccaagaggagccccagccctgagcacgagaacttcctgctcttccccctgagcctggtgtgctggggcatcaatggcatcctgtggcccagcctgcccagctggctgaagcccaccgtgctgtag

SEQ ID NO: 155781 - DNA, 2004 bp, synthetic construct
  misc_feature 1..2004: note = Description of Artificial Sequence: Synthetic coding sequence
  source 1..2004: mol_type = other DNA
atggactggcaggaccacaggagcaccacagagctgaggaaggagaagagcagagatgctgcccggagccgccgcagccaggagacagaggtgctgtaccagctggcccacaccctgccctttgcccggggcgtgtctgcccacctggacaaggccagcatcatgaggctgaccatctcctacctgaggatgcaccggctgtgtgccgccggggagtggaaccaggtgggcgctggaggagagcccctggatgcctgctacctgaaggccctggagggctttgtgatggtgctgacagctgagggggacatggcctacctgtctgaaaatgtgtccaagcacctgggcctgagccagctggagctgattggccacagcatctttgacttcatccacccctgtgaccaggaggagctgcaggatgccctgaccccccagcagaccctgagcaggaggaaggtggaggcccccacagagcgctgcttcagcctgaggatgaagagcaccctgaccagccggggccgcaccctgaacctgaaggccgccacctggaaggtgctgaactgcagcggccacatgagggcctacaagcccccagcccagaccagccctgctggcagcccagacagcgagccccccctgcagtgcctggtgctgatctgtgaggccatcccccaccctggcagcctggagccccccctgggccgcggggccttcctgagccgccacagcctggacatgaagttcacctactgtgatgacagaattgctgaggtggccggctacagcccagatgacctgattggctgcagcgcctatgagtacatccacgccctggacagtgatgctgtgtccaagagcatccacaccctgctgagcaagggccaggccgtgacaggccagtaccgcttcctggcccggagcggcggctacctgtggacccagacccaggccaccgtggtgtctgggggccggggcccccagagcgagagcatcgtgtgtgtgcacttcctgatcagccaggtggaggagactggagtggtgctgagcctggagcagacagagcagcacagcagaagacccatccagagaggagcccccagccagaaggacacccccaaccctggggacagcctggacaccccaggcccccgcatcctggccttcctgcacccccccagcctgtctgaggccgccctggccgctgacccccggcgcttctgcagcccagacctgcggcggctgctgggccccatcctggatggagcctctgtggccgccacccccagcacccccctggccaccaggcacccccagagccccctgtctgctgacctgcctgatgagctgcctgtgggcacagaaaatgtgcacaggctcttcaccagcggcaaggacacagaagctgtggagacagacctggacatcgcccaggatgctgatgccctggacctggagatgctggccccctacatctccatggatgatgacttccagctgaatgccagcgagcagctgccccgggcctaccaccggcccctgggcgctgtgccccggccccgggcccggagcttccacggcctgagccccccagccctggagcccagcctgctgccccgctggggcagtgacccccggctgagctgcagcagccccagcagaggagaccccagcgccagcagccccatggccggggccaggaagaggaccctggcccagagcagtgaagatgaagatgaaggagtggagctgctgggcgtgcggccccccaagaggagccccagccctgagcacgagaacttcctgctcttccccctgagcctgtccttcctgctgactggaggccctgcccctggcagcctgcaggaccccagcacccccctgctgaacctgaatgagcccctgggcctgggccccagcctgctgagcccctacagtgatgaggacaccacccagcccggcggccccttccagcccagggctggcagcgcccaggccgactag

SEQ ID NO: 155782 - DNA, 1842 bp, synthetic construct
  misc_feature 1..1842: note = Description of Artificial Sequence: Synthetic coding sequence
  source 1..1842: mol_type = other DNA
atgaggctgaccatctcctacctgaggatgcaccggctgtgtgccgccggggagtggaaccaggtgggcgctggaggagagcccctggatgcctgctacctgaaggccctggagggctttgtgatggtgctgacagctgagggggacatggcctacctgtctgaaaatgtgtccaagcacctgggcctgagccagctggagctgattggccacagcatctttgacttcatccacccctgtgaccaggaggagctgcaggatgccctgaccccccagcagaccctgagcaggaggaaggtggaggcccccacagagcgctgcttcagcctgaggatgaagagcaccctgaccagccggggccgcaccctgaacctgaaggccgccacctggaaggtgctgaactgcagcggccacatgagggcctacaagcccccagcccagaccagccctgctggcagcccagacagcgagccccccctgcagtgcctggtgctgatctgtgaggccatcccccaccctggcagcctggagccccccctgggccgcggggccttcctgagccgccacagcctggacatgaagttcacctactgtgatgacagaattgctgaggtggccggctacagcccagatgacctgattggctgcagcgcctatgagtacatccacgccctggacagtgatgctgtgtccaagagcatccacaccctgctgagcaagggccaggccgtgacaggccagtaccgcttcctggcccggagcggcggctacctgtggacccagacccaggccaccgtggtgtctgggggccggggcccccagagcgagagcatcgtgtgtgtgcacttcctgatcagccaggtggaggagactggagtggtgctgagcctggagcagacagagcagcacagcagaagacccatccagagaggagcccccagccagaaggacacccccaaccctggggacagcctggacaccccaggcccccgcatcctggccttcctgcacccccccagcctgtctgaggccgccctggccgctgacccccggcgcttctgcagcccagacctgcggcggctgctgggccccatcctggatggagcctctgtggccgccacccccagcacccccctggccaccaggcacccccagagccccctgtctgctgacctgcctgatgagctgcctgtgggcacagaaaatgtgcacaggctcttcaccagcggcaaggacacagaagctgtggagacagacctggacatcgcccaggatgctgatgccctggacctggagatgctggccccctacatctccatggatgatgacttccagctgaatgccagcgagcagctgccccgggcctaccaccggcccctgggcgctgtgccccggccccgggcccggagcttccacggcctgagccccccagccctggagcccagcctgctgccccgctggggcagtgacccccggctgagctgcagcagccccagcagaggagaccccagcgccagcagccccatggccggggccaggaagaggaccctggcccagagcagtgaagatgaagatgaaggagtggagctgctgggcgtgcggccccccaagaggagccccagccctgagcacgagaacttcctgctcttccccctgagcctgtccttcctgctgactggaggccctgcccctggcagcctgcaggaccccagcacccccctgctgaacctgaatgagcccctgggcctgggccccagcctgctgagcccctacagtgatgaggacaccacccagcccggcggccccttccagcccagggctggcagcgcccaggccgactag

SEQ ID NO: 155783 - DNA, 2010 bp, synthetic construct
  misc_feature 1..2010: note = Description of Artificial Sequence: Synthetic coding sequence
  source 1..2010: mol_type = other DNA
atggccctgggcctgcagagggcccggagcaccacagagctgaggaaggagaagagcagagatgctgcccggagccgccgcagccaggagacagaggtgctgtaccagctggcccacaccctgccctttgcccggggcgtgtctgcccacctggacaaggccagcatcatgaggctgaccatctcctacctgaggatgcaccggctgtgtgccgccggggagtggaaccaggtgggcgctggaggagagcccctggatgcctgctacctgaaggccctggagggctttgtgatggtgctgacagctgagggggacatggcctacctgtctgaaaatgtgtccaagcacctgggcctgagccagctggagctgattggccacagcatctttgacttcatccacccctgtgaccaggaggagctgcaggatgccctgaccccccagcagaccctgagcaggaggaaggtggaggcccccacagagcgctgcttcagcctgaggatgaagagcaccctgaccagccggggccgcaccctgaacctgaaggccgccacctggaaggtgctgaactgcagcggccacatgagggcctacaagcccccagcccagaccagccctgctggcagcccagacagcgagccccccctgcagtgcctggtgctgatctgtgaggccatcccccaccctggcagcctggagccccccctgggccgcggggccttcctgagccgccacagcctggacatgaagttcacctactgtgatgacagaattgctgaggtggccggctacagcccagatgacctgattggctgcagcgcctatgagtacatccacgccctggacagtgatgctgtgtccaagagcatccacaccctgctgagcaagggccaggccgtgacaggccagtaccgcttcctggcccggagcggcggctacctgtggacccagacccaggccaccgtggtgtctgggggccggggcccccagagcgagagcatcgtgtgtgtgcacttcctgatcagccaggtggaggagactggagtggtgctgagcctggagcagacagagcagcacagcagaagacccatccagagaggagcccccagccagaaggacacccccaaccctggggacagcctggacaccccaggcccccgcatcctggccttcctgcacccccccagcctgtctgaggccgccctggccgctgacccccggcgcttctgcagcccagacctgcggcggctgctgggccccatcctggatggagcctctgtggccgccacccccagcacccccctggccaccaggcacccccagagccccctgtctgctgacctgcctgatgagctgcctgtgggcacagaaaatgtgcacaggctcttcaccagcggcaaggacacagaagctgtggagacagacctggacatcgcccaggatgctgatgccctggacctggagatgctggccccctacatctccatggatgatgacttccagctgaatgccagcgagcagctgccccgggcctaccaccggcccctgggcgctgtgccccggccccgggcccggagcttccacggcctgagccccccagccctggagcccagcctgctgccccgctggggcagtgacccccggctgagctgcagcagccccagcagaggagaccccagcgccagcagccccatggccggggccaggaagaggaccctggcccagagcagtgaagatgaagatgaaggagtggagctgctgggcgtgcggccccccaagaggagccccagccctgagcacgagaacttcctgctcttccccctgagcctgtccttcctgctgactggaggccctgcccctggcagcctgcaggaccccagcacccccctgctgaacctgaatgagcccctgggcctgggccccagcctgctgagcccctacagtgatgaggacaccacccagcccggcggccccttccagcccagggctggcagcgcccaggccgactag

SEQ ID NO: 155784 - DNA, 1092 bp, synthetic construct
  misc_feature 1..1092: note = Description of Artificial Sequence: Synthetic coding sequence
  source 1..1092: mol_type = other DNA
atggccctgggcctgcagagggcccggagcaccacagagctgaggaaggagaagagcagagatgctgcccggagccgccgcagccaggagacagaggtgctgtaccagctggcccacaccctgccctttgcccggggcgtgtctgcccacctggacaaggccagcatcatgaggctgaccatctcctacctgaggatgcaccggctgtgtgccgccggggagtggaaccaggtgggcgctggaggagagcccctggatgcctgctacctgaaggccctggagggctttgtgatggtgctgacagctgagggggacatggcctacctgtctgaaaatgtgtccaagcacctgggcctgagccagctggagctgattggccacagcatctttgacttcatccacccctgtgaccaggaggagctgcaggatgccctgaccccccagcagaccctgagcaggaggaaggtggaggcccccacagagcgctgcttcagcctgaggatgaagagcaccctgaccagccggggccgcaccctgaacctgaaggccgccacctggaaggtgctgaactgcagcggccacatgagggcctacaagcccccagcccagaccagccctgctggcagcccagacagcgagccccccctgcagtgcctggtgctgatctgtgaggccatcccccaccctggcagcctggagccccccctgggccgcggggccttcctgagccgccacagcctggacatgaagttcacctactgtgatgacagaattgctgaggtggccggctacagcccagatgacctgattggctgcagcgcctatgagtacatccacgccctggacagtgatgctgtgtccaagagcatccacacctgcatgtaccccatcagccctggggccaagccagctgccacctggcccccagctgacaccaggaccccccagctgcccatcccccaggatgccctgcccccccacctgaacaccagcagcctgctgcccaagccccagggcaccgtgtccttcctggcccccagctaccctgtgccccgctacttcagcccccacctgcccccctggtggccctag

SEQ ID NO: 155785 - DNA, 1839 bp, synthetic construct
  misc_feature 1..1839: note = Description of Artificial Sequence: Synthetic coding sequence
  source 1..1839: mol_type = other DNA
atgctgcccatgcccagcggccggcccaggagctgtgccaggaagagccctggcatgaggcctgctgctggagctgcccggcggccccgctgctgcacctcctggctgacccgctgccccagccctgctgccagcgcccccacctggacccggcccctgagctgtgccagccccagcgccacctgtgcctgcacagccagcgccccccagctggagctgattggccacagcatctttgacttcatccacccctgtgaccaggaggagctgcaggatgccctgaccccccagcagaccctgagcaggaggaaggtggaggcccccacagagcgctgcttcagcctgaggatgaagagcaccctgaccagccggggccgcaccctgaacctgaaggccgccacctggaaggtgctgaactgcagcggccacatgagggcctacaagcccccagcccagaccagccctgctggcagcccagattctgagccccccctgcagtgcctggtgctgatctgtgaggccatcccccaccctggcagcctggagccccccctgggccgcggggccttcctgagccgccacagcctggacatgaagttcacctactgtgatgacagaattgctgaggtggccggctacagcccagatgacctgattggctgcagcgcctatgagtacatccacgccctggacagtgatgctgtgtccaagagcatccacaccctgctgagcaagggccaggccgtgacaggccagtaccgcttcctggcccggagcggcggctacctgtggacccagacccaggccaccgtggtgtctgggggccggggcccccagagcgagagcatcgtgtgtgtgcacttcctgatcagccaggtggaggagaccggggtggtgctgagcctggagcagacagagcagcacagccggcggcccatccagagaggagcccccagccagaaggacacccccaaccctggggacagcctggacaccccaggcccccgcatcctggccttcctgcacccccccagcctgtctgaggccgccctggccgctgacccccggcgcttctgcagcccagacctgcggcggctgctgggccccatcctggatggagcctctgtggccgccacccccagcacccccctggccaccaggcacccccagagccccctgtctgctgacctgcctgatgagctgcctgtgggcacagaaaatgtgcacaggctcttcaccagcggcaaggacacagaggccgtggagacagacctggacatcgcccaggatgctgatgccctggacctggagatgctggccccctacatctccatggatgatgacttccagctgaatgccagcgagcagctgccccgggcctaccaccggcccctgggcgctgtgccccggccccgggcccgctccttccacggcctgagccccccagccctggagcccagcctgctgccccgctggggcagtgacccccggctgagctgcagcagccccagcagaggagaccccagcgccagcagccccatggccggggccaggaagaggaccctggcccagagcagtgaagatgaagatgagggcgtggagctgctgggcgtgcggccccccaagaggagccccagccctgagcacgagaacttcctgctcttccccctgagcctgtccttcctgctgaccggcggccctgcccctggcagcctgcaggaccccagcacccccctgctgaacctgaatgagcccctgggcttccactttgtgacccagagcggcgtgcagtggcacaagcacagcagcccccagccccggcccccaggcctgaagtag

SEQ ID NO: 155786 - DNA, 600 bp, synthetic construct
  misc_feature 1..600: note = Description of Artificial Sequence: Synthetic coding sequence
  source 1..600: mol_type = other DNA
atgaggcctgctgctggagctgcccggcggccccgctgctgcacctcctggctgacccgctgccccagccctgctgccagcgcccccacctggacccggcccctgagctgtgccagccccagcgccacctgtgcctgcacagccagcgccccccagctggagctgattggccacagcatctttgacttcatccacccctgtgaccaggaggagctgcaggatgccctgaccccccagcagaccctgagcaggaggaaggtggaggcccccacagagcgctgcttcagcctgaggatgaagagcaccctgaccagccggggccgcaccctgaacctgaaggccgccacctggaaggtgctgaactgcagcggccacatgagggcctacaagcccccagcccagaccagccctgctggcagcccagattctgagccccccctgcagtgcctggtgctgatctgtgaggccatcccccaccctggcagcctggagccccccctgggccgcggggccttcctgagccgccacagcctggacatgaagttcacctactgtgatgacagaattgctgaggtggccggctacagccccatgacctag

SEQ ID NO: 155787 - DNA, 714 bp, synthetic construct
  misc_feature 1..714: note = Description of Artificial Sequence: Synthetic coding sequence
  source 1..714: mol_type = other DNA
atgaggcctgctgctggagctgcccggcggccccgctgctgcacctcctggctgacccgctgccccagccctgctgccagcgcccccacctggacccggcccctgagctgtgccagccccagcgccacctgtgcctgcacagccagcgccccccaggaggagctgcaggatgccctgaccccccagcagaccctgagcaggaggaaggtggaggcccccacagagcgctgcttcagcctgaggatgaagagcaccctgaccagccggggccgcaccctgaacctgaaggccgccacctggaaggtgctgaactgcagcggccacatgagggcctacaagcccccagcccagaccagccctgctggcagcccagacagcgagccccccctgcagtgcctggtgctgatctgtgaggccatcccccaccctggcagcctggagagatttgtgcctgtgagcagcgctgccaccagcctgtgcctgcccagcctgagccccagcaaggtggccggctacagcccagatgacctgattggctgcagcgcctatgagtacatccacgccctggacagtgatgccccccaggatgccctgcccccccacctgaacaccagcagcctgctgcccaagccccagggcaccgtgtccttcctggcccccagctaccctgtgccccgctacttcagcccccacctgcccccctggtggccctag

SEQ ID NO: 155788 - DNA, 1092 bp, synthetic construct; identical to SEQ ID NO: 155784
  misc_feature 1..1092: note = Description of Artificial Sequence: Synthetic coding sequence
  source 1..1092: mol_type = other DNA

SEQ ID NO: 155789 - DNA, 2976 bp, synthetic construct
  misc_feature 1..2976: note = Description of Artificial Sequence: Synthetic coding sequence
  source 1..2976: mol_type = other DNA
atggctgacaaggtgcggcggcagaggccccggcggcgggtgtgctgggccctggtggccgtgctgctggccgacctgctggccctgagtgacaccctggccgtgatgtctgtggacctgggcagcgagagcatgaaggtggccatcgtgctgaacaaggagagcaggaggaagacccctgtgattgtgaccctgaaggaaaatgaacgcttcttcggggacagcgctgcctccatggccatcaagaaccccaaggccaccctgcgctacttccagcacctgctgggcaagcaggccgacaacccccacgtggccctgtaccaggcccgcttccctgagcacgagctgacctttgacccccagaggcagacagtgcacttccagatcagcagccagctgcagttcagccctgaggaggtgctgggcatggtgctgaactacagccgcagcctggctgaagattttgctgagcagcccatcaaggatgctgtgatcaccgtgcctgtgttcttcaaccaggccgagcggcgggctgtgctgcaggccgccaggatggccggcctgaaggtgctgcagctgatcaatgacaacacagccacagccctgtcctatggagtcttccggaggaaggacatcaacaccacagcccagaacatcatgttttatgacatgggcagcggcagcacagtgtgcaccatcgtgacctaccagatggtgaagaccaaggaggccggcatgcagccccagctgcagatccggggcgtgggctttgacaggaccctgggcggcctggagatggagctgcggctgcgggagcggctggccggcctcttcaatgagcagaggaagggccagagggccaaggatgtgcgggagaacccccgggccatggccaagctgctgcgggaggccaaccggctgaagacagtgctgagcgccaatgctgaccacatggcccagatcgagggcctgatggatgatgtggacttcaaggccaaggtgaccagggtggagtttgaggagctgtgtgccgacctgtttgagcgggtgcccggccctgtgcagcaggccctgcagagcgctgagatgagcctggatgaaattgagcaggtgatcctggtgggcggggccaccagggtgccccgggtgcaggaggtgctgctgaaggctgtgggcaaggaggagctgggcaagaacatcaatgctgatgaagctgctgccatgggcgctgtgtaccaggccgccgccctgagcaaggccttcaaggtgaagccctttgtggtgagagatgctgtggtgtaccccatcctggtggagttcacccgggaggtggaggaggagcccggcatccacagcctgaagcacaacaagagggtgctcttcagcaggatgggcccctacccccagaggaaggtgatcaccttcaaccgctacagccatgacttcaacttccacatcaactacggggacctgggcttcctgggccctgaggacctgcgggtgtttggcagccagaacctgaccaccgtgaagctgaagggcgtgggggacagcttcaagaagtacccagactatgagagcaagggcatcaaggcccacttcaacctggatgaaagtggagtgctgagcctggacagagtggagagcgtgtttgagaccctggtggaggacagcgctgaggaggagagcaccctgaccaagctgggcaacaccatcagcagcctgtttggaggcggcaccaccccagatgccaaggaaaatggaacagacacagtgcaggaggaggaggagagccctgctgagggcagcaaggatgagcctggagagcaggtggagctgaaggaggaggccgaggcccctgtggaggatggcagccagcccccacctcctgagcccaagggagatgccaccccagagggggagaaggccacagagaaggaaaatggagacaagtctgaggcccagaagcccagcgagaaggccgaggccggccctgagggcgtggccccagcccctgagggggagaagaagcagaagccagccaggaagaggaggatggtggaggagattggagtggagctggtggtgctggacctgcctgacctgcctgaggacaagctggcccagagcgtgcagaagctgcaggacctgaccctgcgggacctggagaagcaggagcgggagaaggccgccaacagcctggaggccttcatctttgagacccaggacaagctgtaccagcctgagtaccaggaggtgtccacagaggagcagcgggaggagatcagcggcaagctgtctgctgccagcacctggctggaggatgaaggagtgggcgccaccaccgtgatgctgaaggagaagctggccgagctgaggaagctgtgccagggcctcttcttccgggtggaggagaggaagaagtggccagagcggctgagcgccctggacaacctgctgaaccacagctccatgttcctgaagggggcccggctcatccctgagatggaccagatcttcacagaggtggagatgaccaccctggagaaggtgatcaatgagacctgggcctggaagaatgccaccctggccgagcaggccaagctgcctgccacagagaagcctgtgctgctgagcaaggacatcgaggccaagatgatggccctggaccgggaggtgcagtacctgctgaacaaggccaagttcaccaagccccggccccggcccaaggacaagaatggcaccagggctgagccccccctgaatgccagcgccagtgaccagggcgagaaggtgatccccccagctggccagacagaagatgctgagcccatcagcgagcctgagaaggtggagacagctggcagcgagcccggggacacagagcccctggagctgggcggccctggagctgagcctgagcagaaggagcagagcacaggccagaagaggcccctgaagaatgatgagctgtag

SEQ ID NO: 155790 - DNA, 3000 bp, synthetic construct
  misc_feature 1..3000: note = Description of Artificial Sequence: Synthetic coding sequence
  source 1..3000: mol_type = other DNA
atggctgacaaggtgcggcggcagaggccccggcggcgggtgtgctgggccctggtggccgtgctgctggccgacctgctggccctgagtgacaccctggccgtgatgtctgtggacctgggcagcgagagcatgaaggtggccatcgtgaagccaggagtgcccatggagatcgtgctgaacaaggagagcaggaggaagacccctgtgattgtgaccctgaaggaaaatgaacgcttctttggagacagcgctgcctccatggccatcaagaaccccaaggccaccctgcgctacttccagcacctgctgggcaagcaggccgacaacccccacgtggccctgtaccaggcccgcttccctgagcacgagctgacctttgacccccagaggcagacagtgcacttccagatcagcagccagctgcagttcagccctgaggaggtgctgggcatggtgctgaactacagccgcagcctggccgaggactttgctgagcagcccatcaaggatgctgtgatcaccgtgcctgtgttcttcaaccaggccgagaggagagctgtgctgcaggccgccaggatggccggcctgaaggtgctgcagctgatcaatgacaacacagccacagccctgtcctatggagtcttccggaggaaggacatcaacaccacagcccagaacatcatgttttatgacatgggcagcggcagcacagtgtgcaccatcgtgacctaccagatggtgaagaccaaggaggccggcatgcagccccagctgcagatccggggcgtgggctttgacaggaccctgggcggcctggagatggagctgcggctgcgggagcggctggccggcctcttcaatgagcagaggaagggccagagggccaaggatgtgcgggagaacccccgggccatggccaagctgctgcgggaggccaaccggctgaagacagtgctgagcgccaatgctgaccacatggcccagatcgagggcctgatggatgatgtggacttcaaggccaaggtgaccagggtggagtttgaggagctgtgtgccgacctgtttgagcgggtgcccggccctgtgcagcaggccctgcagagcgctgagatgagcctggatgaaattgagcaggtgatcctggtgggcggggccaccagggtgccccgggtgcaggaggtgctgctgaaggctgtgggcaaggaggagctgggcaagaacatcaatgctgatgaggccgccgccatgggcgctgtgtaccaggccgccgccctgagcaaggccttcaaggtgaagccctttgtggtgagagatgctgtggtgtaccccatcctggtggagttcacccgggaggtggaggaggagcccggcatccacagcctgaagcacaacaagagggtgctcttcagcaggatgggcccctacccccagaggaaggtgatcaccttcaaccgctacagccatgacttcaacttccacatcaactatggagacctgggcttcctgggccctgaggacctgcgggtgtttggcagccagaacctgaccaccgtgaagctgaagggcgtgggggacagcttcaagaagtacccagactatgagagcaagggcatcaaggcccacttcaacctggatgagagcggcgtgctgagcctggacagagtggagagcgtgtttgagaccctggtggaggacagcgctgaggaggagagcaccctgaccaagctgggcaacaccatcagcagcctgtttggaggcggcaccaccccagatgccaaggaaaatggaacagacacagtgcaggaggaggaggagagccctgctgagggcagcaaggatgagcccggggagcaggtggagctgaaggaggaggccgaggcccctgtggaggatggcagccagcccccacctcctgagcccaagggagatgccaccccagagggggagaaggccacagagaaggaaaatggagacaagtctgaggcccagaagcccagcgagaaggccgaggccggccctgagggcgtggccccagcccctgagggggagaagaagcagaagccagccaggaagaggaggatggtggaggagattggagtggagctggtggtgctggacctgcctgacctgcctgaggacaagctggcccagagcgtgcagaagctgcaggacctgaccctgcgggacctggagaagcaggagcgggagaaggccgccaacagcctggaggccttcatctttgagacccaggacaagctgtaccagcctgagtaccaggaggtgtccacagaggagcagcgggaggagatcagcggcaagctgtctgctgccagcacctggctggaggatgagggcgtgggcgccaccaccgtgatgctgaaggagaagctggccgagctgaggaagctgtgccagggcctcttcttccgggtggaggagaggaagaagtggccagagcggctgagcgccctggacaacctgctgaaccacagctccatgttcctgaagggggcccggctcatccctgagatggaccagatcttcacagaggtggagatgaccaccctggagaaggtgatcaatgagacctgggcctggaagaatgccaccctggccgagcaggccaagctgcctgccacagagaagcctgtgctgctgagcaaggacatcgaggccaagatgatggccctggaccgggaggtgcagtacctgctgaacaaggccaagttcaccaagccccggccccggcccaaggacaagaatggcaccagggctgagccccccctgaatgccagcgccagtgaccagggcgagaaggtgattcctcctgctggccagacagaagatgctgagcccatcagcgagcctgagaaggtggagaccggcagcgagcccggggacacagagcccctggagctgggcggccctggagctgagcctgagcagaaggagcagagcacaggccagaagaggcccctgaagaatgatgagctgtag

SEQ ID NO: 155791 - DNA, 2547 bp, synthetic construct
  misc_feature 1..2547: note = Description of Artificial Sequence: Synthetic coding sequence
  source 1..2547: mol_type = other DNA
atggtgctgaactacagccgcagcctggctgaagattttgctgagcagcccatcaaggatgctgtgatcaccgtgcctgtgttcttcaaccaggccgagcggcgggctgtgctgcaggccgccaggatggccggcctgaaggtgctgcagctgatcaatgacaacacagccacagccctgtcctatggagtcttccggaggaaggacatcaacaccacagcccagaacatcatgttttatgacatgggcagcggcagcacagtgtgcaccatcgtgacctaccagatggtgaagaccaaggaggccggcatgcagccccagctgcagatccggggcgtgggctttgacaggaccctgggcggcctggagatggagctgcggctgcgggagcggctggccggcctcttcaatgagcagaggaagggccagagggccaaggatgtgcgggagaacccccgggccatggccaagctgctgcgggaggccaaccggctgaagacagtgctgagcgccaatgctgaccacatggcccagatcgagggcctgatggatgatgtggacttcaaggccaaggtgaccagggtggagtttgaggagctgtgtgccgacctgtttgagcgggtgcccggccctgtgcagcaggccctgcagagcgctgagatgagcctggatgaaattgagcaggtgatcctggtgggcggggccaccagggtgccccgggtgcaggaggtgctgctgaaggctgtgggcaaggaggagctgggcaagaacatcaatgctgatgaagctgctgccatgggcgctgtgtaccaggccgccgccctgagcaaggccttcaaggtgaagccctttgtggtgagagatgctgtggtgtaccccatcctggtggagttcacccgggaggtggaggaggagcccggcatccacagcctgaagcacaacaagagggtgctcttcagcaggatgggcccctacccccagaggaaggtgatcaccttcaaccgctacagccatgacttcaacttccacatcaactacggggacctgggcttcctgggccctgaggacctgcgggtgtttggcagccagaacctgaccaccgtgaagctgaagggcgtgggggacagcttcaagaagtacccagactatgagagcaagggcatcaaggcccacttcaacctggatgaaagtggagtgctgagcctggacagagtggagagcgtgtttgagaccctggtggaggacagcgctgaggaggagagcaccctgaccaagctgggcaacaccatcagcagcctgtttggaggcggcaccaccccagatgccaaggaaaatggaacagacacagtgcaggaggaggaggagagccctgctgagggcagcaaggatgagcctggagagcaggtggagctgaaggaggaggccgaggcccctgtggaggatggcagccagcccccacctcctgagcccaagggagatgccaccccagagggggagaaggccacagagaaggaaaatggagacaagtctgaggcccagaagcccagcgagaaggccgaggccggccctgagggcgtggccccagcccctgagggggagaagaagcagaagccagccaggaagaggaggatggtggaggagattggagtggagctggtggtgctggacctgcctgacctgcctgaggacaagctggcccagagcgtgcagaagctgcaggacctgaccctgcgggacctggagaagcaggagcgggagaaggccgccaacagcctggaggccttcatctttgagacccaggacaagctgtaccagcctgagtaccaggaggtgtccacagaggagcagcgggaggagatcagcggcaagctgtctgctgccagcacctggctggaggatgaaggagtgggcgccaccaccgtgatgctgaaggagaagctggccgagctgaggaagctgtgccagggcctcttcttccgggtggaggagaggaagaagtggccagagcggctgagcgccctggacaacctgctgaaccacagctccatgttcctgaagggggcccggctcatccctgagatggaccagatcttcacagaggtggagatgaccaccctggagaaggtgatcaatgagacctgggcctggaagaatgccaccctggccgagcaggccaagctgcctgccacagagaagcctgtgctgctgagcaaggacatcgaggccaagatgatggccctggaccgggaggtgcagtacctgctgaacaaggccaagttcaccaagccccggccccggcccaaggacaagaatggcaccagggctgagccccccctgaatgccagcgccagtgaccagggcgagaaggtgatccccccagctggccagacagaagatgctgagcccatcagcgagcctgagaaggtggagactggaagtgagcccggggacacagagcccctggagctgggcggccctggagctgagcctgagcagaaggagcagagcacaggccagaagaggcccctgaagaatgatgagctgtag

SEQ ID NO: 155792 - DNA, 2040 bp, synthetic construct
  misc_feature 1..2040: note = Description of Artificial Sequence: Synthetic coding sequence
  source 1..2040: mol_type = other DNA
atggctgacaaggtgcggcggcagaggccccggcggcgggtgtgctgggccctggtggccgtgctgctggccgacctgctggccctgagtgacaccctggccgtgatgtctgtggacctgggcagcgagagcatgaaggtggccatcgtgaagccaggagtgcccatggagatcgtgctgaacaaggagagcaggaggaagacccctgtgattgtgaccctgaaggaaaatgaacgcttctttggagacagcgctgcctccatggccatcaagaaccccaaggccaccctgcgctacttccagcacctgctgggcaagcaggccgacaacccccacgtggccctgtaccaggcccgcttccctgagcacgagctgacctttgacccccagaggcagacagtgcacttccagatcagcagccagctgcagttcagccctgaggaggtgctgggcatggtgctgaactacagccgcagcctggccgaggactttgctgagcagcccatcaaggatgctgtgatcaccgtgcctgtgttcttcaaccaggccgagaggagagctgtgctgcaggccgccaggatggccggcctgaaggtgctgcagctgatcaatgacaacacagccacagccctgtcctatggagtcttccggaggaaggacatcaacaccacagcccagaacatcatgttttatgacatgggcagcggcagcacagtgtgcaccatcgtgacctaccagatggtgaagaccaaggaggccggcatgcagccccagctgcagatccggggcgtgggctttgacaggaccctgggcggcctggagatggagctgcggctgcgggagcggctggccggcctcttcaatgagcagaggaagggccagagggccaaggatgtgcgggagaacccccgggccatggccaagctgctgcgggaggccaaccggctgaagacagtgctgagcgccaatgctgaccacatggcccagatcgagggcctgatggatgatgtggacttcaaggccaaggtgaccagggtggagtttgaggagctgtgtgccgacctgtttgagcgggtgcccggccctgtgcagcaggccctgcagagcgctgagatgagcctggatgaaattgagcaggtgatcctggtgggcggggccaccagggtgccccgggtgcaggaggtgctgctgaaggctgtgggcaaggaggagctgggcaagaacatcaatgctgatgaggccgccgccatgggcgctgtgtaccaggccgccgccctgagcaaggccttcaaggtgaagccctttgtggtgagagatgctgtggtgtaccccatcctggtggagttcacccgggaggtggaggaggagcccggcatccacagcctgaagcacaacaagagggtgctcttcagcaggatgggcccctacccccagaggaaggtgatcaccttcaaccgctacagccatgacttcaacttccacatcaactatggagacctgggcttcctgggccctgaggacctgcgggtgtttggcagccagaacctgaccaccgtgaagctgaagggcgtgggggacagcttcaagaagtacccagactatgagagcaagggcatcaaggcccacttcaacctggatgagagcggcgtgctgagcctggacagagtggagagcgtgtttgagaccctggtggaggacagcgctgaggaggagagcaccctgaccaagctgggcaacaccatcagcagcctgtttggaggcggcaccaccccagatgccaaggaaaatggaacagacacagtgcaggaggaggaggagagccctgctgagggcagcaaggatgagcccggggagcaggtggagctgaaggaggaggccgaggcccctgtggaggatggcagccagcccccacctcctgagcccaagggagatgccaccccagagggggagaaggccacagagaaggaaaatggagacaagtctgaggcccagaagcccacctctgtgtgccgggcctctgtgaccaggtttggcttctag

SEQ ID NO: 155793 - DNA, 444 bp, synthetic construct
  misc_feature 1..444: note = Description of Artificial Sequence: Synthetic coding sequence
  source 1..444: mol_type = other DNA
atggctgacaaggtgcggcggcagaggccccggcggcgggtgtgctgggccctggtggccgtgctgctggccgacctgctggccctgagtgacaccctggccgtgatgtctgtggacctgggcagcgagagcatgaaggtggccatcgtgaagccaggagtgcccatggagatcgtgctgaacaaggagagcaggaggaagacccctgtgattgtgaccctgaaggaaaatgaacgcttctttggagacagcgctgcctccatggccatcaagaaccccaaggccaccctgcgctacttccagcacctgctgggcaagcaggccgacaacccccacgtggccctgtaccaggcccgcttccctgagcacgagctgacctttgacccccagaggcagacagtgcacttccagatcagcagccagctgcagttcagccccctgtag

SEQ ID NO: 155794 - DNA, 1680 bp, synthetic construct
  misc_feature 1..1680: note = Description of Artificial Sequence: Synthetic coding sequence
  source 1..1680: mol_type = other DNA
atggccatcaagaaccccaaggccaccctgcgctacttccagcacctgctgggcaagcaggccgacaacccccacgtggccctgtaccaggcccgcttccctgagcacgagctgacctttgacccccagaggcagacagtgcacttccagatcagcagccagctgcagttcagccctgaggaggtgctgggcatggtgctgaactacagccgcagcctggctgaagattttgctgagcagcccatcaaggatgctgtgatcaccgtgcctgtgttcttcaaccaggccgagcggcgggctgtgctgcaggccgccaggatggccggcctgaaggtgctgcagctgatcaatgacaacacagccacagccctgtcctatggagtcttccggaggaaggacatcaacaccacagcccagaacatcatgttttatgacatgggcagcggcagcacagtgtgcaccatcgtgacctaccagatggtgaagaccaaggaggccggcatgcagccccagctgcagatccggggcgtgggctttgacaggaccctgggcggcctggagatggagctgcggctgcgggagcggctggccggcctcttcaatgagcagaggaagggccagagggccaaggatgtgcgggagaacccccgggccatggccaagctgctgcgggaggccaaccggctgaagacagtgctgagcgccaatgctgaccacatggcccagatcgagggcctgatggatgatgtggacttcaaggccaaggtgaccagggtggagtttgaggagctgtgtgccgacctgtttgagcgggtgcccggccctgtgcagcaggccctgcagagcgctgagatgagcctggatgaaattgagcaggtgatcctggtgggcggggccaccagggtgccccgggtgcaggaggtgctgctgaaggctgtgggcaaggaggagctgggcaagaacatcaatgctgatgaagctgctgccatgggcgctgtgtaccaggccgccgccctgagcaaggccttcaaggtgaagccctttgtggtgagagatgctgtggtgtaccccatcctggtggagttcacccgggaggtggaggaggagcccggcatccacagcctgaagcacaacaagagggtgctcttcagcaggatgggcccctacccccagaggaaggtgatcaccttcaaccgctacagccatgacttcaacttccacatcaactacggggacctgggcttcctgggccctgaggacctgcgggtgtttggcagccagaacctgaccaccgtgaagctgaagggcgtgggggacagcttcaagaagtacccagactatgagagcaagggcatcaaggcccacttcaacctggatgaaagtggagtgctgagcctggacagagtggagagcgtgtttgagaccctggtggaggacagcgctgaggaggagagcaccctgaccaagctgggcaacaccatcagcagcctgtttggaggcggcaccaccccagatgccaaggaaaatggaacagacacagtgcagatgctgttcctgtgcccagcccggctgccccagagcaagcaggccatcgaccgcttccacacagctgtgacctgcatggagcccccctggggccgccgctgccgggcccggcctgcctggaggctgtgcagctag

SEQ ID NO: 155795 - DNA, 2943 bp, synthetic construct
  misc_feature 1..2943: note = Description of Artificial Sequence: Synthetic coding sequence
  source 1..2943: mol_type = other DNA
atgtggcagagccggggccccatgctgttccacctgggcctgtgtgtgggcgctgctggcatgatccgggagtggtttgtgcccatccggcgggagaagggcagccgcctcatctgccctgggggcaccatggctgacaaggtgcggcggcagaggcccaggagaagagtgtgctgggccctggtggccgtgctgctggccgacctgctggccctgagtgacaccctggccgtgatgtctgtggacctgggcagcgagagcatgaaggtggccatcgtgaagccaggagtgcccatggagatcgtgctgaacaaggagagcaggaggaagacccctgtgattgtgaccctgaaggaaaatgaacgcttcttcggggacagcgctgcctccatggccatcaagaaccccaaggccaccctgcgctacttccagcacctgctgggcaagcaggccgacaacccccacgtggccctgtaccaggcccgcttccctgagcacgagctgacctttgacccccagaggcagacagtgcacttccagatcagcagccagctgcagttcagccctgaggaggtgctgggcatggtgctgaactacagccgcagcctggctgaagattttgctgagcagcccatcaaggatgctgtgatcaccgtgcctgtgttcttcaaccaggccgagcggcgggctgtgctgcaggccgccaggatggccggcctgaaggtgctgcagctgatcaatgacaacacagccacagccctgtcctatggagtcttccggaggaaggacatcaacaccacagcccagaacatcatgttttatgacatgggcagcggcagcacagtgtgcaccatcgtgacctaccagatggtgaagaccaaggaggccggcatgcagccccagctgcagatccggggcgtgggctttgacaggaccctgggcggcctggagatggagctgcggctgcgggagcggctggccggcctcttcaatgagcagaggaagggccagagggccaaggatgtgcgggagaacccccgggccatggccaagctgctgcgggaggccaaccggctgaagacagtgctgagcgccaatgctgaccacatggcccagatcgagggcctgatggatgatgtggacttcaaggccaaggtgaccagggtggagtttgaggagctgtgtgccgacctgtttgagcgggtgcccggccctgtgcagcaggccctgcagagcgctgagatgagcctggatgaaattgagcaggtgatcctggtgggcggggccaccagggtgccccgggtgcaggaggtgctgctgaaggctgtgggcaaggaggagctgggcaagaacatcaatgctgatgaagctgctgccatgggcgctgtgtaccaggccgccgccctgagcaaggccttcaaggtgaagccctttgtggtgagagatgctgtggtgtaccccatcctggtggagttcacccgggaggtggaggaggagcccggcatccacagcctgaagcacaacaagagggtgctcttcagcaggatgggcccctacccccagaggaaggtgatcaccttcaaccgctacagccatgacttcaacttccacatcaactacggggacctgggcttcctgggccctgaggacctgcgggtgtttggcagccagaacctgaccaccgtgaagctgaagggcgtgggggacagcttcaagaagtacccagactatgagagcaagggcatcaaggcccacttcaacctggatgaaagtggagtgctgagcctggacagagtggagagcgtgtttgagaccctggtggaggacagcgctgaggaggagagcaccctgaccaagctgggcaacaccatcagcagcctgtttggaggcggcaccaccccagatgccaaggaaaatggaacagacacagtgcagaagcccagcgagaaggccgaggccggccctgagggcgtggccccagcccctgagggggagaagaagcagaagccagccaggaagaggaggatggtggaggagattggagtggagctggtggtgctggacctgcctgacctgcctgaggacaagctggcccagagcgtgcagaagctgcaggacctgaccctgcgggacctggagaagcaggagcgggagaaggccgccaacagcctggaggccttcatctttgagacccaggacaagctgtaccagcctgagtaccaggaggtgtccacagaggagcagcgggaggagatcagcggcaagctgtctgctgccagcacctggctggaggatgaaggagtgggcgccaccaccgtgatgctgaaggagaagctggccgagctgaggaagctgtgccagggcctcttcttccgggtggaggagaggaagaagtggccagagcggctgagcgccctggacaacctgctgaaccacagctccatgttcctgaagggggcccggctcatccctgagatggaccagatcttcacagaggtggagatgaccaccctggagaaggtgatcaatgagacctgggcctggaagaatgccaccctggccgagcaggccaagctgcctgccacagagaagcctgtgctgctgagcaaggacatcgaggccaagatgatggccctggaccgggaggtgcagtacctgctgaacaaggccaagttcaccaagccccggccccggcccaaggacaagaatggcaccagggctgagccccccctgaatgccagcgccagtgaccagggcgagaaggtgatccccccagctggccagacagaagatgctgagcccatcagcgagcctgagaaggtggagactggaagtgagcccggggacacagagcccctggagctgggcggccctggagctgagcctgagcagaaggagcagagcacaggccagaagaggcccctgaagaatgatgagctgtag

SEQ ID NO: 155796 - DNA, 333 bp, synthetic construct
  misc_feature 1..333: note = Description of Artificial Sequence: Synthetic coding sequence
  source 1..333: mol_type = other DNA
atggccccccggggctgcatcgtggccgtgtttgccatcttctgcatcagccggctgctgtgcagccatggagcccctgtggcccccatgaccccctacctgatgctgtgccagccccacaagagatgtggggacaagttctatgaccccctgcagcactgctgctatgatgatgctgtggtgcccctggcccggacccagacctgtggcaactgcaccttccgggtgtgctttgagcagtgctgcccctggaccttcatggtgaagctgatcaaccagaactgtgacagcgcccggaccagtgatgaccggctgtgccgctctgtgtcctag

SEQ ID NO: 155797 - DNA, 360 bp, synthetic construct
  misc_feature 1..360: note = Description of Artificial Sequence: Synthetic coding sequence
  source 1..360: mol_type = other DNA
atggtgccccgcatctttgccccagcctacgtgtctgtgtgcctgctgctgctgtgcccccgggaggtgattgccccagctggcagcgagccctggctgtgccagcctgccccccgctgtggggacaagatctacaaccccctggagcagtgctgctacaatgatgccatcgtgtccctgtctgagacccggcagtgtggccccccctgcaccttctggccctgctttgagctgtgctgcctggacagctttggcctgaccaatgactttgtggtgaagctgaaggtgcagggcgtgaacagccagtgccacagcagccccatcagcagcaaatgtgagagcagaagacgcttcccctag

SEQ ID NO: 155798 - DNA, 393 bp, synthetic construct
  misc_feature 1..393: note = Description of Artificial Sequence: Synthetic coding sequence
  source 1..393: mol_type = other DNA
atgaggttctctgtgtctggcatgaggacagactaccccaggtctgtgctggccccagcctacgtgtctgtgtgcctgctgctgctgtgcccccgggaggtgattgccccagctggcagcgagccctggctgtgccagcctgccccccgctgtggggacaagatctacaaccccctggagcagtgctgctacaatgatgccatcgtgtccctgtctgagacccggcagtgtggccccccctgcaccttctggccctgctttgagctgtgctgcctggacagctttggcctgaccaatgactttgtggtgaagctgaaggtgcagggcgtgaacagccagtgccacagcagccccatcagcagcaaatgtgagagcagaagacgcttcccctag

SEQ ID NO: 155799 - DNA, 378 bp, synthetic construct
  misc_feature 1..378: note = Description of Artificial Sequence: Synthetic coding sequence
  source 1..378: mol_type = other DNA
atgaggccccgctgctgcatcctggccctggtgtgctggatcaccgtcttcctgctgcagtgcagcaagggcaccacagatgcccctgtgggcagcggcctgtggctgtgccagcccaccccccgctgtggcaacaagatctacaaccccagcgagcagtgctgctatgatgatgccatcctgagcctgaaggagacccggcgctgtggcagcacctgcaccttctggccctgctttgagctgtgctgcccagagagctttggcccccagcagaagttcctggtgaagctgcgggtgctgggcatgaagagccagtgccacctgagccccatcagccgcagctgcaccaggaacagaagacatgtgctgtacccctag

SEQ ID NO: 155800 - DNA, 375 bp, synthetic construct
  misc_feature 1..375: note = Description of Artificial Sequence: Synthetic coding sequence
  source 1..375: mol_type = other DNA
atggtgccccgcatctctgctgccatcttcatctttgagctgctgggcagcaacagcgagggcgtgacagacctgcggctgtggctgtgccagcctgccccccgctgtggggagtggacctacaaccccctggagcagtgctgtgatgatggagtcatcctggacctgaaccagacccggctgtgtggcagcagctgcaccttctggccctgcttccagcactgctgcctggagagcctgggcagccagaaccagacagtggtgcgcttcaaggtgcccggcatgaagccagactgcaagagcagccccatcacccgcatctgtgcccaggagtaccaccccaagagccctgtgtccagaagtgacctgatctag

SEQ ID NO: 155801 - DNA, 1068 bp, synthetic construct
  misc_feature 1..1068: note = Description of Artificial Sequence: Synthetic coding sequence
  source 1..1068: mol_type = other DNA
atgggccctggccgctgcctgctgacagccctgctgctgctggccctggcccctcctcctgaggccagccagtactgcggccgcctggagtactggaacccagacaacaagtgctgcagcagctgcctgcagcgcttcggccccccaccctgcccagactatgagttccgggagaactgtggcctgaatgaccatggagactttgtgaccccacccttcaggaagtgcagcagcggccagtgcaacccagatggagctgagctgtgcagcccctgtggcggcggcgctgtgacccccaccccagctgctgggggcggccgcaccccctggcgctgccgggagaggcctgtgcctgccaagggccactgccccctgaccccaggcaaccctggggcccccagcagccaggagaggagcagccctgccagcagcatcgcctggaggaccccagagcctgtgccccagcaggcctggcccaacttcctgcccctggtggtgctggtgctgctgctgaccctggccgtcatcgccatcctgctcttcatcctgctgtggcacctgtgctggcccaaggagaaggctgacccctacccctacccaggcctggtgtgtggggtgcccaacacccacacccccagcagcagccacctgagcagccctggggccctggagactggagacacctggaaggaggccagcctgctgcccctgctgagccgggagctgagcagcctggccagccagcccctgagccggctgctggatgagctggaggtgctggaggagctgattgtgctgctggaccctgagcccggccctgggggcggcatggcccacggcaccaccaggcacctggccgcccgctatggcctgcctgctgcctggagcacctttgcctacagcctgcggcccagccgcagccccctgcgggccctgattgagatggtggtggcccgggagcccagcgccagcctgggccagctgggcacccacctggcccagctgggccgggcagatgccctgcgggtgctgagcaagctgggcagcagcggcgtgtgctgggcctag

SEQ ID NO: 155802 - DNA, 504 bp, synthetic construct
  misc_feature 1..504: note = Description of Artificial Sequence: Synthetic coding sequence
  source 1..504: mol_type = other DNA
atgggccctggccgctgcctgctgacagccctgctgctgctggccctggcccctcctcctgaggccagccagtactgcggccgcctggagtactggaacccagacaacaagtgctgcagcagctgcctgcagcgcttcggccccccaccctgcccagagctgagcagcctggccagccagcccctgagccggctgctggatgagctggaggtgctggaggagctgattgtgctgctggaccctgagcccggccctgggggcggcatggcccacggcaccaccaggcacctggccgcccgctatggcctgcctgctgcctggagcacctttgcctacagcctgcggcccagccgcagccccctgcgggccctgattgagatggtggtggcccgggagcccagcgccagcctgggccagctgggcacccacctggcccagctgggccgggcagatgccctgcgggtgctgagcaagctgggcagcagcggcgtgtgctgggcctag

SEQ ID NO: 155803 - DNA, 723 bp, synthetic construct
  misc_feature 1..723: note = Description of Artificial Sequence: Synthetic coding sequence
  source 1..723: mol_type = other DNA
atgcctgagcgggacagcgagcccttcagcaaccccctggccccagatggccatgatgtggatgacccccacagcttccaccagagcaagctgaccaatgaagacttcaggaagctgctgatgacccccagggctgcccccaccagcgccccacccagcaagagccgccaccacgagatgccccgggagtacaatgaagatgaggaccctgctgcccggcggaggaagaagaagagctactatgccaagctgcggcagcaggagattgagcgggagcgggagctggccgagaagtacagagaccgggccaaggagaggagagatggagtgaacaaggactatgaggagacagagctgatcagcaccacagccaactacagagctgtgggccccacagctgaggccgacaagtctgctgctgagaagaggcggcagctgatccaggagagcaagttcctgggcggggacatggagcacacccacctggtgaagggcctggactttgccctgctgcagaaggtgcgggcagagatcgccagcaaggagaaggaggaggaggagctgatggagaagccccagaaggagaccaagaaggatgaggaccctgagaacaagattgagttcaagacccggctgggcagaaatgtgtacaggatgctgttcaagagcaaggcctatgaaagaaatgaactcttcctgcccggccgcatggccatgtggtag

SEQ ID NO: 155804 - DNA, 1674 bp, synthetic construct
  misc_feature 1..1674: note = Description of Artificial Sequence: Synthetic coding sequence
  source 1..1674: mol_type = other DNA
atgcctgagcgggacagcgagcccttcagcaaccccctggccccagatggccatgatgtggatgacccccacagcttccaccagagcaagctgaccaatgaagacttcaggaagctgctgatgacccccagggctgcccccaccagcgccccacccagcaagagccgccaccacgagatgccccgggagtacaatgaagatgaggaccctgctgcccggcggaggaagaagaagagctactatgccaagctgcggcagcaggagattgagcgggagcgggagctggccgagaagtacagagaccgggccaaggagaggagagatggagtgaacaaggactatgaggagacagagctgatcagcaccacagccaactacagagctgtgggccccacagctgaggccgacaagtctgctgctgagaagaggcggcagctgatccaggagagcaagttcctgggcggggacatggagcacacccacctggtgaagggcctggactttgccctgctgcagaaggtgcgggcagagatcgccagcaaggagaaggaggaggaggagctgatggagaagccccagaaggagaccaagaaggatgaggaccctgagaacaagattgagttcaagacccggctgggcagaaatgtgtacaggatgctgttcaagagcaaggcctatgaaagaaatgaactcttcctgcccggccgcatggcctacgtggtggacctggatgatgaatatgctgacacagacatccccaccaccctcatccgcagcaaggctgactgccccaccatggaggcccagaccaccctgaccaccaatgacatcgtcatcagcaagctgacccagatcctgagctacctgcggcagggcaccaggaacaagaagctgaagaagaaggacaagggcaagctggaggagaagaagcccccagaggccgacatgaacatctttgaggacatcggggactatgtgcccagcaccaccaagaccccccgggacaaggagcgggagcgctaccgggagcgggagcgggaccgggagcgggaccgggaccgggaccgggagcgggagcgggagcgggaccgggagcgggagcgggagcgggaccgggagcgggaggaggagaagaagaggcacagctactttgagaagcccaaggtggatgatgagcccatggatgtggacaagggccctggcagcaccaaggagctgatcaagagcatcaatgagaagtttgctggcagcgctggctgggagggcacagagagcctgaagaagccagaggacaagaagcagctgggggacttcttcggcatgagcaacagctatgcagagtgctacccagccaccatggatgacatggctgtggacagtgatgaggaggtggactacagcaagatggaccagggcaacaagaagggccccctgggccgctgggactttgacacccaggaggagtacagcgagtacatgaacaacaaggaggccctgcccaaggccgccttccagtatggcatcaagatgtctgagggcaggaagacccggcgcttcaaggagaccaatgacaaggccgagctggaccggcagtggaagaagatcagcgccatcatcgagaagaggaagaagatggaggctgatggagtggaggtgaagaggcccaagtactag

SEQ ID NO: 155805 - DNA, 1560 bp, synthetic construct
  misc_feature 1..1560: note = Description of Artificial Sequence: Synthetic coding sequence
  source 1..1560: mol_type = other DNA
atggatgctgatgagggccaggacatgagccaggtgtctgggaaggagagcccccctgtgtctgacaccccagatgaaggagatgagcccatgcccatccctgaggacctgagcaccaccagcggcggccagcagagcagcaagagtgacagagtggtggccagcaatgtgaaggtggagacccagagtgatgaggagaatggccgggcctgtgagatgaatggagaagaatgtgccgaggacctgaggatgctggatgccagcggggagaagatgaatggcagccaccgggaccagggcagcagcgccctgtctggagtgggcggcatccggctgcccaacgggaagctgaagtgtgacatctgtggcatcatctgcatcggccccaacgtgctgatggtgcacaagaggagccacactggagagcggcccttccagtgcaaccagtgtggggccagcttcacccagaagggcaacctgctgcggcacatcaagctgcacagcggggagaagcccttcaagtgccacctgtgcaactatgcctgcagaagaagagatgccctgaccggccacctgcggacccacagcgtgggcaagccccacaagtgtggctactgcggccgcagctacaagcagaggagcagcctggaggagcacaaggagcgctgccacaactacctggagagcatgggcctgcccggcaccctgtaccctgtgatcaaggaggagaccaaccacagcgagatggccgaggacctgtgcaagattggcagcgagaggagcctggtgctggaccggctggccagcaatgtggccaagaggaagagctccatgccccagaagttcctgggggacaagggcctgagtgacaccccctatgacagcagcgccagctatgagaaggaaaatgagatgatgaagagccacgtgatggaccaggccatcaacaatgccatcaactacctgggcgctgagagcctgcggcccctggtgcagaccccacctgggggcagcgaggtggtgcctgtgatcagccccatgtaccagctgcacaagcccctggccgagggcacccccaggagcaaccacagcgcccaggacagcgctgtggagaacctgctgctgctgagcaaggccaagctggtgcccagcgagcgggaggccagccccagcaacagctgccaggacagcacagacacagagagcaacaatgaggagcagaggagcggcctcatctacctgaccaaccacatcgcccctcatgccagaaatggcctgagcctgaaggaggagcaccgggcctatgacctgctgcgggccgccagcgagaacagccaggatgccctgcgggtggtgtccaccagcggggagcagatgaaggtgtacaagtgtgagcactgccgggtgctcttcctggaccacgtgatgtacaccatccacatgggctgccacggcttccgggacccctttgagtgcaacatgtgtggctaccacagccaggacagatatgagttcagcagccacatcaccagaggagagcaccgcttccacatgtcctag

SEQ ID NO: 155806 - DNA, 1299 bp, synthetic construct
  misc_feature 1..1299: note = Description of Artificial Sequence: Synthetic coding sequence
  source 1..1299: mol_type = other DNA
atggatgctgatgagggccaggacatgagccaggtgtctgggaaggagagcccccctgtgtctgacaccccagatgaaggagatgagcccatgcccatccctgaggacctgagcaccaccagcggcggccagcagagcagcaagagtgacagagtggtgggggagcggcccttccagtgcaaccagtgtggggccagcttcacccagaagggcaacctgctgcggcacatcaagctgcacagcggggagaagcccttcaagtgccacctgtgcaactatgcctgcagaagaagagatgccctgaccggccacctgcggacccacagcgtgggcaagccccacaagtgtggctactgcggccgcagctacaagcagaggagcagcctggaggagcacaaggagcgctgccacaactacctggagagcatgggcctgcccggcaccctgtaccctgtgatcaaggaggagaccaaccacagcgagatggccgaggacctgtgcaagattggcagcgagaggagcctggtgctggaccggctggccagcaatgtggccaagaggaagagctccatgccccagaagttcctgggggacaagggcctgagtgacaccccctatgacagcagcgccagctatgagaaggaaaatgagatgatgaagagccacgtgatggaccaggccatcaacaatgccatcaactacctgggcgctgagagcctgcggcccctggtgcagaccccacctgggggcagcgaggtggtgcctgtgatcagccccatgtaccagctgcacaagcccctggccgagggcacccccaggagcaaccacagcgcccaggacagcgctgtggagaacctgctgctgctgagcaaggccaagctggtgcccagcgagcgggaggccagccccagcaacagctgccaggacagcacagacacagagagcaacaatgaggagcagaggagcggcctcatctacctgaccaaccacatcgccccccacgccagaaatggcctgagcctgaaggaggagcaccgggcctatgacctgctgcgggccgccagcgagaacagccaggatgccctgcgggtggtgtccaccagcggggagcagatgaaggtgtacaagtgtgagcactgccgggtgctcttcctggaccacgtgatgtacaccatccacatgggctgccacggcttccgggacccctttgagtgcaacatgtgtggctaccacagccaggacagatatgagttcagcagccacatcaccagaggagagcaccgcttccacatgtcctag

SEQ ID NO: 155807 - DNA, 870 bp, synthetic construct
  misc_feature 1..870: note = Description of Artificial Sequence: Synthetic coding sequence
  source 1..870: mol_type = other DNA
atggatgctgatgagggccaggacatgagccaggtgtctgggaaggagagcccccctgtgtctgacaccccagatgaaggagatgagcccatgcccatccctgaggacctgagcaccaccagcggcggccagcagagcagcaagagtgacagagtggtgggggacaagggcctgagtgacaccccctatgacagcagcgccagctatgagaaggaaaatgagatgatgaagagccacgtgatggaccaggccatcaacaatgccatcaactacctgggcgctgagagcctgcggcccctggtgcagaccccacctgggggcagcgaggtggtgcctgtgatcagccccatgtaccagctgcacaagcccctggccgagggcacccccaggagcaaccacagcgcccaggacagcgctgtggagaacctgctgctgctgagcaaggccaagctggtgcccagcgagcgggaggccagccccagcaacagctgccaggacagcacagacacagagagcaacaatgaggagcagaggagcggcctcatctacctgaccaaccacatcgcccctcatgccagaaatggcctgagcctgaaggaggagcaccgggcctatgacctgctgcgggccgccagcgagaacagccaggatgccctgcgggtggtgtccaccagcggggagcagatgaaggtgtacaagtgtgagcactgccgggtgctcttcctggaccacgtgatgtacaccatccacatgggctgccacggcttccgggacccctttgagtgcaacatgtgtggctaccacagccaggacagatatgagttcagcagccacatcaccagaggagagcaccgcttccacatgtcctag

SEQ ID NO: 155808 - DNA, 1131 bp, synthetic construct
  misc_feature 1..1131: note = Description of Artificial Sequence: Synthetic coding sequence
  source 1..1131: mol_type = other DNA
atggatgctgatgagggccaggacatgagccaggtgtctgggaaggagagcccccctgtgtctgacaccccagatgaaggagatgagcccatgcccatccctgaggacctgagcaccaccagcggcggccagcagagcagcaagagtgacagagtggtggccagcaatgtgaaggtggagacccagagtgatgaggagaatggccgggcctgtgagatgaatggagaagaatgtgccgaggacctgaggatgctggatgccagcggggagaagatgaatggcagccaccgggaccagggcagcagcgccctgtctggagtgggcggcatccggctgcccaacgggaagctgaagtgtgacatctgtggcatcatctgcatcggccccaacgtgctgatggtgcacaagaggagccacactggagacaagggcctgagtgacaccccctatgacagcagcgccagctatgagaaggaaaatgagatgatgaagagccacgtgatggaccaggccatcaacaatgccatcaactacctgggcgctgagagcctgcggcccctggtgcagaccccacctgggggcagcgaggtggtgcctgtgatcagccccatgtaccagctgcacaagcccctggccgagggcacccccaggagcaaccacagcgcccaggacagcgctgtggagaacctgctgctgctgagcaaggccaagctggtgcccagcgagcgggaggccagccccagcaacagctgccaggacagcacagacacagagagcaacaatgaggagcagaggagcggcctcatctacctgaccaaccacatcgccccccacgccagaaatggcctgagcctgaaggaggagcaccgggcctatgacctgctgcgggccgccagcgagaacagccaggatgccctgcgggtggtgtccaccagcggggagcagatgaaggtgtacaagtgtgagcactgccgggtgctcttcctggaccacgtgatgtacaccatccacatgggctgccacggcttccgggacccctttgagtgcaacatgtgtggctaccacagccaggacagatatgagttcagcagccacatcaccagaggagagcaccgcttccacatgtcctag

SEQ ID NO: 155809 - DNA, 1299 bp, synthetic construct
  misc_feature 1..1299: note = Description of Artificial Sequence: Synthetic coding sequence
  source 1..1299: mol_type = other DNA
atggatgctgatgagggccaggacatgagccaggtgtctgggaaggagagcccccctgtgtctgacaccccagatgaaggagatgagcccatgcccatccctgaggacctgagcaccaccagcggcggccagcagagcagcaagagtgacagagtggtggccagcaatgtgaaggtggagacccagagtgatgaggagaatggccgggcctgtgagatgaatggagaagaatgtgccgaggacctgaggatgctggatgccagcggggagaagatgaatggcagccaccgggaccagggcagcagcgccctgtctggagtgggcggcatccggctgcccaacgggaagctgaagtgtgacatctgtggcatcatctgcatcggccccaacgtgctgatggtgcacaagaggagccacactggagagcggcccttccagtgcaaccagtgtggggccagcttcacccagaagggcaacctgctgcggcacatcaagctgcacagcggggagaagcccttcaagtgccacctgtgcaactatgcctgcagaagaagagatgccctgaccggccacctgcggacccacagcggggacaagggcctgagtgacaccccctatgacagcagcgccagctatgagaaggaaaatgagatgatgaagagccacgtgatggaccaggccatcaacaatgccatcaactacctgggcgctgagagcctgcggcccctggtgcagaccccacctgggggcagcgaggtggtgcctgtgatcagccccatgtaccagctgcacaagcccctggccgagggcacccccaggagcaaccacagcgcccaggacagcgctgtggagaacctgctgctgctgagcaaggccaagctggtgcccagcgagcgggaggccagccccagcaacagctgccaggacagcacagacacagagagcaacaatgaggagcagaggagcggcctcatctacctgaccaaccacatcgccccccacgccagaaatggcctgagcctgaaggaggagcaccgggcctatgacctgctgcgggccgccagcgagaacagccaggatgccctgcgggtggtgtccaccagcggggagcagatgaaggtgtacaagtgtgagcactgccgggtgctcttcctggaccacgtgatgtacaccatccacatgggctgccacggcttccgggacccctttgagtgcaacatgtgtggctaccacagccaggacagatatgagttcagcagccacatcaccagaggagagcaccgcttccacatgtcctag

SEQ ID NO: 155810 - DNA, 1434 bp, synthetic construct
  misc_feature 1..1434: note = Description of Artificial Sequence: Synthetic coding sequence
  source 1..1434: mol_type = other DNA
atggatgctgatgagggccaggacatgagccaggtgtctgggaaggagagcccccctgtgtctgacaccccagatgaaggagatgagcccatgcccatccctgaggacctgagcaccaccagcggcggccagcagagcagcaagagtgacagagtggtggccagcaatgtgaaggtggagacccagagtgatgaggagaatggccgggcctgtgagatgaatggagaagaatgtgccgaggacctgaggatgctggatgccagcggggagaagatgaatggcagccaccgggaccagggcagcagcgccctgtctggagtgggcggcatccggctgcccaacgggaagctgaagtgtgacatctgtggcatcatctgcatcggccccaacgtgctgatggtgcacaagaggagccacactggagagcggcccttccagtgcaaccagtgtggggccagcttcacccagaagggcaacctgctgcggcacatcaagctgcacagcggggagaagcccttcaagtgccacctgtgcaactatgcctgcagaagaagagatgccctgaccggccacctgcggacccacagcgtcatcaaggaggagaccaaccacagcgagatggccgaggacctgtgcaagattggcagcgagaggagcctggtgctggaccggctggccagcaatgtggccaagaggaagagctccatgccccagaagttcctgggggacaagggcctgagtgacaccccctatgacagcagcgccagctatgagaaggaaaatgagatgatgaagagccacgtgatggaccaggccatcaacaatgccatcaactacctgggcgctgagagcctgcggcccctggtgcagaccccacctgggggcagcgaggtggtgcctgtgatcagccccatgtaccagctgcacaagcccctggccgagggcacccccaggagcaaccacagcgcccaggacagcgctgtggagaacctgctgctgctgagcaaggccaagctggtgcccagcgagcgggaggccagccccagcaacagctgccaggacagcacagacacagagagcaacaatgaggagcagaggagcggcctcatctacctgaccaaccacatcgcccctcatgccagaaatggcctgagcctgaaggaggagcaccgggcctatgacctgctgcgggccgccagcgagaacagccaggatgccctgcgggtggtgtccaccagcggggagcagatgaaggtgtacaagtgtgagcactgccgggtgctcttcctggaccacgtgatgtacaccatccacatgggctgccacggcttccgggacccctttgagtgcaacatgtgtggctaccacagccaggacagatatgagttcagcagccacatcaccagaggagagcaccgcttccacatgtcctag

SEQ ID NO: 155811 - DNA, 1299 bp, synthetic construct; identical to SEQ ID NO: 155806
  misc_feature 1..1299: note = Description of Artificial Sequence: Synthetic coding sequence
  source 1..1299: mol_type = other DNA

SEQ ID NO: 155812 - DNA, 1434 bp, synthetic construct; identical to SEQ ID NO: 155810
  misc_feature 1..1434: note = Description of Artificial Sequence: Synthetic coding sequence
  source 1..1434: mol_type = other DNA

SEQ ID NO: 155813 - DNA, 681 bp, synthetic construct
  misc_feature 1..681: note = Description of Artificial Sequence: Synthetic coding sequence
  source 1..681: mol_type = other DNA
atggatgctgatgagggccaggacatgagccaggtgtctgggaaggagagcccccctgtgtctgacaccccagatgaaggagatgagcccatgcccatccctgaggacctgagcaccaccagcggcggccagcagagcagcaagagtgacagagtggtggccagcaatgtgaaggtggagacccagagtgatgaggagaatggccgggcctgtgagatgaatggagaagaatgtgccgaggacctgaggatgctggatgccagcggggagaagatgaatggcagccaccgggaccagggcagcagcgccctgtctggagtgggcggcatccggctgcccaacgggaagctgaagtgtgacatctgtggcatcatctgcatcggccccaacgtgctgatggtgcacaagaggagccacactggagagcggcccttccagtgcaaccagtgtggggccagcttcacccagaagggcaacctgctgcggcacatcaagctgcacagcggggagaagcccttcaagtgccacctgtgcaactatgcctgcagaagaagagatgccctgaccggccacctgcggacccacagcgtcatcaaggaggagaccaaccacagcgagatggccgaggacctgtgcaagattggcagcgagatcagcagagctggccagaccagcaagtag

SEQ ID NO: 155814 - DNA, 1758 bp, synthetic construct
  misc_feature 1..1758: note = Description of Artificial Sequence: Synthetic coding sequence
  source 1..1758: mol_type = other DNA
atgcacaccccaccagccctgccccggcgcttccagggcggcggccgggtgaggaccccaggcagccaccggcagggcaaggacaacctggagcgggaccccagcggcggctgtgtgcctgacttcctgccccaggcccaggacagcaaccacttcatcatggagagcctcttctgtgagagcagcggggacagcagcctggagaaggagttcctgggcgcccctgtgggccccagcgtgtccacccccaacagccagcacagcagccccagccgcagcctgagcgccaacagcatcaaggtggagatgtacagtgatgaggagagcagccggctgctgggcccagatgagcggctgctggagaaggatgattctgtgattgtggaggacagcctgtctgagcccctgggctactgtgatggcagcggccctgagccccacagccctgggggcatccggctgcccaacgggaagctgaagtgtgatgtgtgtggcatggtgtgcatcggccccaacgtgctgatggtgcacaagaggagccacactggagagcggcccttccactgcaaccagtgtggggccagcttcacccagaagggcaacctgctgcggcacatcaagctgcacagcggggagaagcccttcaagtgccccttctgcaactatgcctgcagaagaagagatgccctgaccggccacctgcggacccacagcgtgagcagccccaccgtgggcaagccctacaagtgcaactactgcggccgcagctacaagcagcagagcaccctggaggagcacaaggagcgctgccacaactacctgcagagcctgagcacagaggcccaggccctggccggccagcctggagatgagatccgggacctggagatggtgcctgacagcatgctgcacagcagcagcgagcggcccaccttcatcgaccggctggccaacagcctgaccaagaggaagaggagcaccccccagaagtttgtgggggagaagcagatgaggttcagcctgagtgacctgccctatgatgtgaacagcggcggctatgagaaggatgtggagctggtggcccaccacagcctggagcccggcttcggcagcagcctggcctttgtgggcgctgagcacctgcggcccctgcggctgccccccaccaactgcatcagcgagctgacccctgtgatcagctctgtgtacacccagatgcagcccctgcccggccgcctggagctgcccggcagccgggaggccggggagggccctgaggacctggctgatggcggccccctgctgtaccggccccggggccccctgacagatcctggggccagccccagcaatggctgccaggacagcacagacacagagagcaaccacgaggacagagtggccggcgtggtgtccctgccccagggccccccaccccagcccccacccaccatcgtggtgggccgccacagccctgcctatgccaaggaggaccccaagccccaggagggcctgctgcggggcaccccaggccccagcaaggaggtgctgcgggtggtgggggagagcggggagcctgtgaaggccttcaagtgtgagcactgccgcatcctcttcctggaccacgtgatgttcaccatccacatgggctgccacggcttccgggacccctttgagtgcaacatctgtggctaccacagccaggacagatatgagttcagcagccacatcgtgcggggggagcacaaggtgggctag

SEQ ID NO: 155815 - DNA, 1452 bp, synthetic construct
  misc_feature 1..1452: note = Description of Artificial Sequence: Synthetic coding sequence
  source 1..1452: mol_type = other DNA
atgtacagtgatgaggagagcagccggctgctgggcccagatgagcggctgctggagaaggatgattctgtgattgtggaggacagcctgtctgagcccctgggctactgtgatggcagcggccctgagccccacagccctgggggcatccggctgcccaacgggaagctgaagtgtgatgtgtgtggcatggtgtgcatcggccccaacgtgctgatggtgcacaagaggagccacactggagagcggcccttccactgcaaccagtgtggggccagcttcacccagaagggcaacctgctgcggcacatcaagctgcacagcggggagaagcccttcaagtgccccttctgcaactatgcctgcagaagaagagatgccctgaccggccacctgcggacccacagcgtgagcagccccaccgtgggcaagccctacaagtgcaactactgcggccgcagctacaagcagcagagcaccctggaggagcacaaggagcgctgccacaactacctgcagagcctgagcacagaggcccaggccctggccggccagcctggagatgagatccgggacctggagatggtgcctgacagcatgctgcacagcagcagcgagcggcccaccttcatcgaccggctggccaacagcctgaccaagaggaagaggagcaccccccagaagtttgtgggggagaagcagatgaggttcagcctgagtgacctgccctatgatgtgaacagcggcggctatgagaaggatgtggagctggtggcccaccacagcctggagcccggcttcggcagcagcctggcctttgtgggcgctgagcacctgcggcccctgcggctgccccccaccaactgcatcagcgagctgacccctgtgatcagctctgtgtacacccagatgcagcccctgcccggccgcctggagctgcccggcagccgggaggccggggagggccctgaggacctggctgatggcggccccctgctgtaccggccccggggccccctgacagatcctggggccagccccagcaatggctgccaggacagcacagacacagagagcaaccacgaggacagagtggccggcgtggtgtccctgccccagggccccccaccccagcccccacccaccatcgtggtgggccgccacagccctgcctatgccaaggaggaccccaagccccaggagggcctgctgcggggcaccccaggccccagcaaggaggtgctgcgggtggtgggggagagcggggagcctgtgaaggccttcaagtgtgagcactgccgcatcctcttcctggaccacgtgatgttcaccatccacatgggctgccacggcttccgggacccctttgagtgcaacatctgtggctaccacagccaggacagatatgagttcagcagccacatcgtgcggggggagcacaaggtgggctag

SEQ ID NO: 155816 - DNA, 1758 bp, synthetic construct; identical to SEQ ID NO: 155814
  misc_feature 1..1758: note = Description of Artificial Sequence: Synthetic coding sequence
  source 1..1758: mol_type = other DNA

SEQ ID NO: 155817 - DNA, 33 bp, synthetic construct
  misc_feature 1..33: note = Description of Artificial Sequence: Synthetic coding sequence
  source 1..33: mol_type = other DNA
atgcacaccccaccagccctgcccaggaggtag

SEQ ID NO: 155818 - DNA, 1863 bp, synthetic construct
  misc_feature 1..1863: note = Description of Artificial Sequence: Synthetic coding sequence
  source 1..1863: mol_type = other DNA
atgaacaacttcatcctgctggaggagcagctgatcaagaagagccagcagaagaggaggaccagccccagcaacttcaaggtgcgcttctttgtgctgaccaaggccagcctggcctactttgaggacagacatggcaagaagaggaccctgaagggcagcattgagctgagccgcatcaagtgtgtggagatcgtgaagagtgacatcagcatcccctgccactacaagtaccccttccaggtggtgcatgacaactacctgctgtatgtgtttgccccagaccgggagagccggcagcgctgggtgctggccctgaaggaggagaccaggaacaacaacagcctggtgcccaagtaccaccccaacttctggatggatggcaagtggcgctgctgcagccagctggagaagctggccaccggctgtgcccagtatgaccccaccaagaatgccagcaagaagcccctgccccccaccccagaggacaacagaagacccctgtgggagcctgaggagaccgtggtgattgccctgtatgactaccagaccaatgacccccaggagctggccctgcggagaaatgaggagtactgcctgctggacagcagcgagatccactggtggagggtgcaggacagaaatggacatgagggctacgtgcccagcagctacctggtggagaagagccccaacaacctggagacctatgagtggtacaacaagagcatcagccgggacaaggccgagaagctgctgctggacaccgggaaggagggcgccttcatggtgcgggacagcaggacagctggcacctacacagtgtctgtgttcaccaaggctgtggtgtctgagaacaacccctgcatcaagcactaccacatcaaggagaccaatgacaaccccaagcgctactacgtggccgagaagtatgtgtttgacagcatccccctgctgatcaactaccaccagcacaacggcggcggcctggtgacccggctgcgctaccctgtgtgcttcggccggcagaaggcccctgtgacagctggcctgcgctatggcaagtgggtgattgaccccagcgagctgacctttgtgcaggagatcggcagcggccagtttggcctggtgcacctgggctactggctgaacaaggacaaggtggccatcaagaccatccgggagggcgccatgtctgaggaggacttcatcgaggaggccgaggtgatgatgaagctgagccaccccaagctggtgcagctgtatggagtgtgcctggagcaggcccccatctgcctggtgtttgagttcatggagcacggctgcctgagtgactacctgcggacccagaggggcctgtttgctgctgagaccctgctgggcatgtgcctggatgtgtgtgagggcatggcctacctggaggaggcctgtgtgatccaccgggacctggccgccaggaactgcctggtgggggagaaccaggtgatcaaggtgtctgactttggcatgaccaggtttgtgctggatgaccagtacaccagcagcacaggcaccaagtttcctgtgaagtgggccagccctgaggtgttctccttcagccgctacagcagcaagagtgatgtgtggagctttggagtgctgatgtgggaggtgttttctgagggcaagatcccctatgagaacagaagcaacagcgaggtggtggaggacatcagcacaggcttccggctgtacaagccccggctggccagcacccacgtgtaccagatcatgaaccactgctggaaggagaggcctgaggacaggcctgccttcagccggctgctgcggcagctggccgagattgctgagagcggcctgtag

SEQ ID NO: 155819 - DNA, 1899 bp, synthetic construct
  misc_feature 1..1899: note = Description of Artificial Sequence: Synthetic coding sequence
  source 1..1899: mol_type = other DNA
atggagaccccagctgctgctgccccagctggcagcctcttccccagcttcctgctgctggcctgtggcaccctggtggccgccctgctgggcgccgcccaccggctgggcctcttctaccagctgctgcacaaggtggacaaggcctctgtgagacatggaggagaaaatgtggccgctgtgctgcgggcccatggagtgcgcttcatcttcaccctggtgggcggccacatcagccccctgctggtggcctgtgagaagctgggcatccgggtggtggacaccaggcatgaggtgacagctgtgtttgctgctgatgccatggcccggctgagcggcaccgtgggcgtggccgctgtgacagctggccctggcctgaccaacacagtgacagctgtgaagaatgcccagatggcccagagccccatcctgctgctgggcggggccgccagcaccctgctgcagaacagaggagccctgcaggccgtggaccagctgagcctcttccggcccctgtgcaagttctgtgtgtctgtgcggcgggtgcgggacatcgtgcccaccctgcgggccgccatggctgctgcccagagcggcaccccaggccctgtgtttgtggagctgcctgtggatgtgctgtacccctacttcatggtgcagaaggagatggtgcctgccaagccacccaagggcctggtgggccgggtggtgtcctggtacctggagaactacctggccaacctgtttgctggggcctgggagccccagcctgagggccccctgcccctggacatcccccaggccagcccccagcaggtgcagagatgtgtggagatcctgagccgggccaagaggcccctgatggtgctgggcagccaggccctgctgacccccaccagcgctgacaagctgcgggctgctgtggagaccctgggcgtgccctgcttcctgggcggcatggcccggggcctgctgggcaggaaccaccccctgcacatcagagaaaatagatctgctgccctgaagaaggcagatgtgattgtgctggccggcaccgtgtgtgacttccggctgtcctatggccgggtgctgagccacagcagcaagatcatcatcgtgaacagaaaccgggaggagatgctgctgaacagcgacatcttctggaagccccaggaggccgtgcagggagatgtgggcagctttgtgctgaagctggtggagggcctgcagggccagacctgggccccagactgggtggaggagctgcgggaggccgaccggcagaaggagcagaccttccgggagaaggccgccatgcctgtggcccagcacctgaaccctgtgcaggtgctgcagctggtggaggagaccctgcctgacaacagcatcctggtggtggatggaggagactttgtgggcacagctgcccacctggtgcagccccggggccccctgcgctggctggaccccggggccttcggcaccctgggcgtgggcgccggctttgccctgggcgccaagctgtgcaggccagatgctgaggtgtggtgcctgtttggagatggagccttcggctacagcctgattgaatttgacacctttgtgcgccacaagatccctgtgatggccctggtgggcaatgatgctggctggacccagatcagccgggagcaggtgcccagcctgggcagcaatgtggcctgtggcctggcctacacagactaccacaaggccgccatgggcctgggcgcccggggcctgctgctgagccgggagaatgaagaccaggtggtgaaggtgctgcatgatgcccagcagcagtgcagagatggccaccctgtggtggtgaacatcctgattggccgcacagacttcagagatggcagcattgctgtgtag

SEQ ID NO: 155820 - DNA, 678 bp, synthetic construct
  misc_feature 1..678: note = Description of Artificial Sequence: Synthetic coding sequence
  source 1..678: mol_type = other DNA
atggagaccccagctgctgctgccccagctggcagcctcttccccagcttcctgctgctggcctgtggcaccctggtggccgccctgctgggcgccgcccaccggctgggcctcttctaccagctgctgcacaaggtggacaaggcctctgtgagacatggaggagaaaatgtggccgctgtgctgcgggcccatggagtgcgcttcatcttcaccctggtgggcggccacatcagccccctgctggtggcctgtgagaagctgggcatccgggtggtggacaccaggcatgaggtgacagctgtgtttgctgctgatgccatggcccggctgagcggcaccgtgggcgtggccgctgtgacagctggccctggcctgaccaacacagtgacagctgtgaagaatgcccagatggcccagagccccatcctgctgctgggcggggccgccagcaccctgctgcagaacagaggagccctgcaggccgtggaccagctgagcctcttccggcccccacctggctgcggccagcacccccactgggaggatggcctgccccgctggctgcactgctgcatcggcccctgtggcagcggccgcctggccgccttcctgcccctggactgtgtgcagctggtgtggagcctcatcatcgcctgccccggccccatcccctag

SEQ ID NO: 155821 - DNA, 789 bp, synthetic construct
  misc_feature 1..789: note = Description of Artificial Sequence: Synthetic coding sequence
  source 1..789: mol_type = other DNA
atggagaccccagctgctgctgccccagctggcagcctcttccccagcttcctgctgctggcctgtggcaccctggtggccgccctgctgggcgccgcccaccggctgggcctcttctaccagctgctgcacaaggtggacaaggcctctgtgagacatggaggagaaaatgtggccgctgtgctgcgggcccatggagtgcgcttcatcttcaccctggtgggcggccacatcagccccctgctggtggcctgtgagaagctgggcatccgggtggtggacaccaggcatgaggtgacagctgtgtttgctgctgatgccatggcccggctgagcggcaccgtgggcgtggccgctgtgacagctggccctggcctgaccaacacagtgacagctgtgaagaatgcccagatggcccagagccccatcctgctgctgggcggggccgccagcaccctgctgcagaacagaggagccctgcaggccgtggaccagctgagcctcttccggcccctgtgcaagttctgtgtgtctgtgcggcgggtgcgggacatcgtgcccaccctgcgggccgccatggctgctgcccagagcggcaccccaggccctgtgtttgtggagctgcctgtggatgtgctgtacccctacttcatggtgcagaaggagatggtgcctgccaagccacccaagggcctggtgggccgggtggtgtcctggtacctggagaactacctggccaacctgtttgctggggcctgggagccccagcctgagggccccctgccctag

SEQ ID NO: 155822 - DNA, 501 bp, synthetic construct
  misc_feature 1..501: note = Description of Artificial Sequence: Synthetic coding sequence
  source 1..501: mol_type = other DNA
atggagaccccagctgctgctgccccagctggcagcctcttccccagcttcctgctgctggcctgtggcaccctggtggccgccctgctgggcgccgcccaccggctgggcctcttctaccagctgctgcacaaggtggacaaggcctctgtgagacatggaggagaaaatgtggccgctgtgctgcgggcccatggagtgcgcttcatcttcaccctggtgggcggccacatcagccccctgctggtggcctgtgagaagctgggcatccgggtggtggacaccaggcatgaggtgacagctgtgtttgctgctgatgccatggcccggctgagcggcaccgtgggcgtggccgctgtgacagctggccctggcctgaccaacacagtgacagctgtgaagaatgcccagatggcccagagccccatcctgctgctgggcggggccgccagcaccctgctgcagaacagaggagccctgcaggccgtggaccagctgtag

SEQ ID NO: 155823 - DNA, 621 bp, synthetic construct
  misc_feature 1..621: note = Description of Artificial Sequence: Synthetic coding sequence
  source 1..621: mol_type = other DNA
atggccgccacccgctgcctgcgctggggcctgagccgggccggcgtgtggctgctgcccccaccagcccgctgcccccggcgggccctgcacaagcagaaggatggaacagagttcaagagcatctacagcctggacaagctgtacccagagagccagggcagtgacacagcctggagggtgcccaatggagccaagcaggccgacagcgacatccccctggaccggctgaccatctcctactgccgcagcagcggccctgggggccagaatgtgaacaaggtgaacagcaaggccgaggtgcgcttccacctggccacagctgagtggattgctgagcctgtgcggcagaagatcgccatcacccacaagaacaagatcaaccggctgggggagctgatcctgaccagcgagagcagccgctaccagttcaggaacctggccgactgcctgcagaagatccgggacatgatcacagaggccagccagacccccaaggagcccaccaaggaggatgtgaagctgcaccgcatcagaattgagaacatgaaccgggagcggctgcggcagaagaggatccacagcgctgtgaagaccagcagaagagtggacatggactag

SEQ ID NO: 155824 - DNA, 471 bp, synthetic construct
  misc_feature 1..471: note = Description of Artificial Sequence: Synthetic coding sequence
  source 1..471: mol_type = other DNA
atgtgccacagccgcagctgccaccccaccatgaccatcctgcaggcccccaccccagcccccagcaccatccctggcccccggcggggcagcggccctgagatcttcacctttgaccccctgcctgagcctgctgctgccccagctggccggcccagcgccagccggggccacaggaagaggagcagaagagtgctgtacccccgggtggtgcggcggcagctgcctgtggaggagcccaacccagccaagaggctgctcttcctgctgctgaccatcgtgttctgccagatcctgatggccgaggagggcgtgcctgcccccctgcccccagaagatgccccaaatgctgccagcctggcccccacccctgtgtctgctgtgctggagcccttcaacctgaccagcgagcccagcgactatgccctggacctgagcaccttcctgcagcagcaccctgctgccttctag

SEQ ID NO: 155825 - DNA, 417 bp, synthetic construct
  misc_feature 1..417: note = Description of Artificial Sequence: Synthetic coding sequence
  source 1..417: mol_type = other DNA
atgtgccacagccgcagctgccaccccaccatgaccatcctgcaggcccccaccccagcccccagcaccatccctggcccccggcggggcagcggccctgagatcttcacctttgaccccctgcctgagcctgctgctgccccagctggccggcccagcgccagccggggccacaggaagaggagcagaagagtgctgtacccccgggtggtgtccattgctgaggtgggcatccggggcgtgcgctgccctggggtgactggagagaggccagacagccggggcctggacctgacctgcctgctcttctgcctgcccctgggccctgccccagctgccagccggggcacagagcccagccagaaggccagcctgtctgctgcccaccaccggctgctgcctgaccctgatggatag

SEQ ID NO: 155826 - DNA, 579 bp, synthetic construct
  misc_feature 1..579: note = Description of Artificial Sequence: Synthetic coding sequence
  source 1..579: mol_type = other DNA
atgtgccacagccgcagctgccaccccaccatgaccatcctgcaggcccccaccccagcccccagcaccatccctggcccccggcggggcagcggccctgagatcttcacctttgaccccctgcctgagcctgctgctgccccagctggccggcccagcgccagccggggccacaggaagaggagcagaagagtgctgcccagcagtggagagtacagaagaagtggccacagcagaggagccctgccctggagccactggggcaccacccggctgcagggcctggacctgacctgcctgctcttctgcctgcccctggtgcggcggcagctgcctgtggaggagcccaacccagccaagaggctgctcttcctgctgctgaccatcgtgttctgccagatcctgatggccgaggagggcgtgcctgcccccctgcccccagaagatgccccaaatgctgccagcctggcccccacccctgtgtctgctgtgctggagcccttcaacctgaccagcgagcccagcgactatgccctggacctgagcaccttcctgcagcagcaccctgctgccttctag

SEQ ID NO: 155827 - DNA, 471 bp, synthetic construct
  misc_feature 1..471: note = Description of Artificial Sequence: Synthetic coding sequence
  source 1..471: mol_type = other DNA
atgtgccacagccgcagctgccaccccaccatgaccatcctgcaggcccccaccccagcccccagcaccatccctggcccccggcggggcagcggccctgagatcttcacctttgaccccctgcctgagcctgctgctgccccagctggccggcccagcgccagccggggccacaggaagaggagcagaagagtgctgtacccccgggtggtgcggcggcagctgcctgtggaggagcccaacccagccaagaggctgctcttcctgctgctgaccatcgtgttctgccagatcctgatggccgaggagggcgtgcctgcccccctgcccccagaagatgccccaaatgctgccagcctggcccccacccctgtgtcccctgtgctggagcccttcaacctgaccagcgagcccagcgactatgccctggacctgagcaccttcctgcagcagcaccctgctgccttctag

SEQ ID NO: 155828 - DNA, 417 bp, synthetic construct; identical to SEQ ID NO: 155825
  misc_feature 1..417: note = Description of Artificial Sequence: Synthetic coding sequence
  source 1..417: mol_type = other DNA

SEQ ID NO: 155829 - DNA, 417 bp, synthetic construct; identical to SEQ ID NO: 155825
  misc_feature 1..417: note = Description of Artificial Sequence: Synthetic coding sequence
  source 1..417: mol_type = other DNA

SEQ ID NO: 155830 - DNA, 471 bp, synthetic construct; identical to SEQ ID NO: 155827
  misc_feature 1..471: note = Description of Artificial Sequence: Synthetic coding sequence
  source 1..471: mol_type = other DNA

SEQ ID NO: 155831 - DNA, 417 bp, synthetic construct; identical to SEQ ID NO: 155825
  misc_feature 1..417: note = Description of Artificial Sequence: Synthetic coding sequence
  source 1..417: mol_type = other DNA

SEQ ID NO: 155832 - DNA, 471 bp, synthetic construct; identical to SEQ ID NO: 155827
  misc_feature 1..471: note = Description of Artificial Sequence: Synthetic coding sequence
  source 1..471: mol_type = other DNA

SEQ ID NO: 155833 - DNA, 417 bp, synthetic construct; identical to SEQ ID NO: 155825
  misc_feature 1..417: note = Description of Artificial Sequence: Synthetic coding sequence
  source 1..417: mol_type = other DNA

SEQ ID NO: 155834 - DNA, 471 bp, synthetic construct; identical to SEQ ID NO: 155827
  misc_feature 1..471: note = Description of Artificial Sequence: Synthetic coding sequence
  source 1..471: mol_type = other DNA

SEQ ID NO: 155835 - DNA, 417 bp, synthetic construct; identical to SEQ ID NO: 155825
  misc_feature 1..417: note = Description of Artificial Sequence: Synthetic coding sequence
  source 1..417: mol_type = other DNA

SEQ ID NO: 155836 - DNA, 471 bp, synthetic construct; identical to SEQ ID NO: 155827
  misc_feature 1..471: note = Description of Artificial Sequence: Synthetic coding sequence
  source 1..471: mol_type = other DNA

SEQ ID NO: 155837 - DNA, 249 bp, synthetic construct
  misc_feature 1..249: note = Description of Artificial Sequence: Synthetic coding sequence
  source 1..249: mol_type = other DNA
atggccttcaccctgtacagcctgctgcaggccgccctgctgtgtgtgaatgccatcgctgtgctgcacgaggagcgcttcctgaagaacatcggctggggcacagaccagggcattggaggctttggagaggagcccggcatcaagagccagctgatgaacctgatccgctctgtgaggacagtgatgagggtgcccctcatcatcgtgaacagcatcgccatcgtgctgctgctgctgtttggatag

SEQ ID NO: 155838 - DNA, 984 bp, synthetic construct
  misc_feature 1..984: note = Description of Artificial Sequence: Synthetic coding sequence
  source 1..984: mol_type = other DNA
atggagttcaagctggaggcccaccgcatcgtgtccatcagcctgggcaagatctacaacagccgggtgcagaggggcggcatcaagctgcacaagaacctgctggtgtccctggtgctgcggagcgcccggcaggtgtacctgagtgacccctgccccggcctgtacctggccggccctgctggcaccccagcccccccaccccagcagcagcccggggagcctgctgctggccccccagctggctggggcgagcccccacctcctgctgcccgggcctcctggccagagacagagccccagcctgagaggagctctgtgtctgatgccccccgggtgggagatgaggtgcctgtggccaccgtgactggagtgggagatgtgttccagggcggggaggctgatgccacagaagctgcctggagccgggtggagggcccccggcaggccgccgcccgggaggccgagggcacagctgggggctggggcgtcttccctgaggtgtccagagctgcccggcggccctgtggctgccccctgggcggagaagatcctcctggcaccccagctgccacccccagggctgcctgctgctgtgccccccagcctgcagaagatgagcccccagcccctcctgctgtgtgccccaggaagagatgtgccgccggcgtgggcggcggccctgctggctgcccagcccctggcagcacccccctgaagaagcccaggaggaacctggagcagcccccatctggaggagaagatgatgatgctgaggagatggagactggaaatgtggccaacctgatcagcatcttcggcagcagcttcagcggcctgctgaggaagagccctgggggcggccgggaggaggaggagggggaggagagcggccctgaggccgctgagcccggccagatctgctgtgacaagcctgtgctgcgggacatgaacccctggagcacagccatcgtggccttctag

SEQ ID NO: 155839 - DNA, 420 bp, synthetic construct
  misc_feature 1..420: note = Description of Artificial Sequence: Synthetic coding sequence
  source 1..420: mol_type = other DNA
atggagttcaagctggaggcccaccgcatcgtgtccatcagcctgggcaagatctacaacagccgggtgcagaggggcggcatcaagctgcacaagaacctgctggtgtccctggtgctgcggagcgcccggcaggtgtacctgagtgacccctgccccggcctgtacctggccggccctgctggcaccccagcccccccaccccagcagcagcccggggagcctgctgctggccccccagctggctggggcgagcccccacctcctgctgcccgggcctcctggccagagacagagccccagcctgagaggagctctgtgtctgatgccccccgggtgggagatgaggtgcctgtggccaccgtgactggagtgggagatgtgttccagggccgctctgctgccatcagccgctgctag

SEQ ID NO: 155840 - DNA, 546 bp, synthetic construct
  misc_feature 1..546: note = Description of Artificial Sequence: Synthetic coding sequence
  source 1..546: mol_type = other DNA
atggaggccatgaatgtggagaaggccagcgcagatggcaacctgcctgaggtgatcagcaacatcaaggagaccctgaagatcgtgtccaggacccctgtgaacatcaccatggccggggacagcggaaatggcatgagcaccttcatcagcgccctgaggaacacaggccacgagggcaaggccagccccccaacagagctggtgaaggccacccagagatgtgccagctacttcagcagccacttcagcaatgtggtgctgtgggacctgcccggcaccggcagcgccaccaccaccctggagaactacctgatggagatgcagttcaacagatatgacttcatcatggtggccagcgcccagttctccatgaaccacgtgatgctggccaagacagctgaggacatgggcaagaagttctacatcgtgtggaccaagctggacatggacctgagcactggagccctgcctgaggtgcagctgctgcagatcagagaaaatgtgctggagaacctgcagaaggagcgggtgtgtgagtactag

SEQ ID NO: 155841 - DNA, 1020 bp, synthetic construct
  misc_feature 1..1020: note = Description of Artificial Sequence: Synthetic coding sequence
  source 1..1020: mol_type = other DNA
atggctgctgaagatgagctgcagctgccccggctgcctgagctgtttgagaccggccggcagctgctggatgaggtggaggtggccacagagcctgctggcagcagaattgtgcaggagaaggtgttcaagggcctggacctgctggagaaggctgctgagatgctgagccagctggacctcttcagcagaaatgaagacctggaggagatcgccagcacagacctgaagtacctgctggtgcctgccttccagggcgccctgaccatgaagcaggtgaaccccagcaagaggctggaccacctgcagagggcccgggagcacttcatcaactacctgacccagtgccactgctaccacgtggccgagtttgagctgcccaagaccatgaacaacagcgctgagaaccacacagccaacagctccatggcctaccccagcctggtggccatggccagccagaggcaggccaagatccagcgctacaagcagaagaaggagctggagcaccggctgagcgccatgaagtctgctgtggagagcggccaggctgatgatgagcgggtgcgggagtactacctgctgcacctgcagcgctggattgacatcagcctggaggagattgagagcattgaccaggagatcaagatcctgcgggagcgggacagcagccgggaggccagcaccagcaacagcagccggcaggagcggccccctgtgaagcccttcatcctgaccaggaacatggcccaggccaaggtgtttggagctggctaccccagcctgcccaccatgacagtgtctgactggtatgagcagcacaggaaatatggagccctgcctgaccagggcatcgccaaggccgcccctgaggagttcaggaaggccgcccagcagcaggaggagcaggaggagaaggaggaggaggatgatgagcagaccctgcaccgggcccgggagtgggatgactggaaggacacccacccccggggctacggcaaccggcagaacatgggctag

SEQ ID NO: 155842 - DNA, 1020 bp, synthetic construct; identical to SEQ ID NO: 155841
  misc_feature 1..1020: note = Description of Artificial Sequence: Synthetic coding sequence
  source 1..1020: mol_type = other DNA

SEQ ID NO: 155843 - DNA, 480 bp, synthetic construct
  misc_feature 1..480: note = Description of Artificial Sequence: Synthetic coding sequence
  source 1..480: mol_type = other DNA
atgaagaaccacctgctcttctggggcgtgctggccgtgttcatcaaggctgtgcacgtgaaggcccaggaggatgagcgcatcgtgctggtggacaacaagtgcaagtgtgcccgcatcaccagccgcatcatccgcagcagcgaggaccccaatgaagatattgtggagaggaacatccgcatcatcgtgcccctgaacaaccgggagaacatcagtgaccccaccagccccctgcggaccaggtttgtgtaccacctgagtgacctgtgcaagaagtgtgaccccacagaggtggagctggacaaccagatcgtgacagccacccagagcaacatctgtgatgaggacagcgccacagagacctgctacacctatgacaggaacaagtgctacacagctgtggtgcccctggtgtatggaggagagaccaagatggtggagacagccctgaccccagatgcctgctacccagactag

SEQ ID NO: 155844 - DNA, 213 bp, synthetic construct
  misc_feature 1..213: note = Description of Artificial Sequence: Synthetic coding sequence
  source 1..213: mol_type = other DNA
atgaagaaccacctgctcttctggggcgtgctggccgtgttcatcaaggctgtgcacgtgaaggcccaggaggatgagcgcatcgtgctggtggacaacaagtgcaagtgtgcccgcatcaccagccgcatcatccgcagcagcgaggaccccaatgaagatattgtggagaggaacatccgcatcatcgtgcccctgaacaaccgggagtag

SEQ ID NO: 155845 - DNA, 480 bp, synthetic construct; identical to SEQ ID NO: 155843
  misc_feature 1..480: note = Description of Artificial Sequence: Synthetic coding sequence
  source 1..480: mol_type = other DNA

SEQ ID NO: 155846 - DNA, 528 bp, synthetic construct
  misc_feature 1..528: note = Description of Artificial Sequence: Synthetic coding sequence
  source 1..528: mol_type = other DNA
atgaagaaccacctgctcttctggggcgtgctggccgtgttcatcaaggctgtgcacgtgaagggcagccgggacagcagcgccagcgccagccgggtggccggcatcacagcccaggaggatgagcgcatcgtgctggtggacaacaagtgcaagtgtgcccgcatcaccagccgcatcatccgcagcagcgaggaccccaatgaagatattgtggagaggaacatccgcatcatcgtgcccctgaacaaccgggagaacatcagtgaccccaccagccccctgcggaccaggtttgtgtaccacctgagtgacctgtgcaagaagtgtgaccccacagaggtggagctggacaaccagatcgtgacagccacccagagcaacatctgtgatgaggacagcgccacagagacctgctacacctatgacaggaacaagtgctacacagctgtggtgcccctggtgtatggaggagagaccaagatggtggagacagccctgaccccagatgcctgctacccagactag

SEQ ID NO: 155847 - DNA, 642 bp, synthetic construct
  misc_feature 1..642: note = Description of Artificial Sequence: Synthetic coding sequence
  source 1..642: mol_type = other DNA
atgaggcctggcaccggccagggcggcctggaggcccctggagagcccggccccaacctgcggcagcgctggcccctgctgctgctgggcctggccgtggtgacccacggcctgctgcggcccacagctgccagccagagccgggccctgggccctggggcccctgggggcagcagccgcagcagcctgcggagccgctggggccgcttcctgctgcagaggggctcctggacaggcccccgctgctggccccggggcttccagagcaagcacaacagcgtgacccacgtgtttggcagcggcacccagctgactgtgctgagccagcccaaggccaccccatctgtgaccctcttcccccccagcagcgaggagctgcaggccaacaaggccaccctggtgtgcctgatgaatgacttctacccaggcatcctgactgtgacctggaaggcagatggcacccccatcacccagggcgtggagatgaccacccccagcaagcagagcaacaacaagtatgctgccagcagctacctgagcctgaccccagagcagtggaggagcagaagaagctacagctgccaggtgatgcatgagggcagcacagtggagaagacagtggccccagcagaatgttcctag

SEQ ID NO: 155848 - DNA, 255 bp, synthetic construct
  misc_feature 1..255: note = Description of Artificial Sequence: Synthetic coding sequence
  source 1..255: mol_type = other DNA
atgaggcctggcaccggccagggcggcctggaggcccctggagagcccggccccaacctgcggcagcgctggcccctgctgctgctgggcctggccgtggtgacccacggcctgctgcggcccacagctgccagccagagccgggccctgggccctggggcccctgggggcagcagccgcagcagcctgcggagccgctggggccgcagcgcccagggccaccccctgggccacagcgtgcctgctgtgctgtag

SEQ ID NO: 155849 - DNA, 2982 bp, synthetic construct
  misc_feature 1..2982: note = Description of Artificial Sequence: Synthetic coding sequence
  source 1..2982: mol_type = other DNA
atggccagcgctgctgtggagagctttgtgaccaagcagctggacctgctggagctggagagagatgctgaggtggaggagcggcgctcctggcaggagaacatcagcctgaaggagctgcagagccggggcgtgtgcctgctgaagctgcaggtgagcagccagaggacaggcctgtatggccgcctgctggtgacctttgagccccggcgctatggcagcgctgctgccctgcccagcaacagcttcaccagcggggacatcgtgggcctgtatgatgctgccaatgaaggcagccagctggccaccggcatcctgaccagggtgacccagaagtctgtgacagtggcctttgatgagagccatgacttccagctgagcctggacagagaaaattcctaccgcctgctgaagctggccaatgatgtgacctaccgccgcctgaagaaggccctgattgccctgaagaagtaccacagcggccctgccagcagcctgattgaggtgctgtttggccgcagcgcccccagccctgccagcgagatccaccccctgaccttcttcaacacctgcctggacaccagccagaaggaggccgtgctgtttgccctgagccagaaggagctggccatcatccacggccccccaggcaccgggaagaccaccaccgtggtggagatcatcctgcaggccgtgaagcagggcctgaaggtgctgtgctgtgcccccagcaacattgctgtggacaacctggtggagcggctggccctgtgcaagcagaggatcctgcggctgggccacccagcccggctgctggagagcatccagcagcacagcctggatgctgtgctggcccggagtgacagcgcccagatcgtggccgacatcaggaaggacatcgaccaggtgtttgtgaagaacaagaagacccaggacaagcgggagaagagcaacttcagaaatgagatcaagctgctgaggaaggagctgaaggagcgggaggaggccgccatgctggagagcctgaccagcgccaacgtggtgctggccaccaacacaggagccagcgcagatggccccctgaagctgctgcctgagagctactttgatgtggtggtgattgatgaatgtgcccaggccctggaggccagctgctggatccccctgctgaaggccaggaagtgcatcctggccggggaccacaagcagctgccccccaccaccgtgagccacaaggccgccctggccggcctgagcctgagcctgatggagcggctggccgaggagtatggagcccgggtggtgaggaccctgactgtgcagtacaggatgcaccaggccatcatgcgctgggccagtgacaccatgtacctgggccagctgacagcccacagctctgtggcccggcacctgctgcgggacctgcccggggtggccgccacagaggagaccggggtgcccctgctgctggtggacacagctggctgcggcctgtttgagctggaggaggaggatgagcagagcaaaggaaatcctggagaggtgcggctggtgtccctgcacatccaggccctggtggatgctggggtgcctgcccgggacattgctgtggtgagcccctacaacctgcaggtggacctgctgcggcagagcctggtgcaccgccaccctgagctggagatcaagtctgtggatggcttccagggccgggagaaggaggccgtcatcctgagctttgtgcgcagcaacagaaaaggagaggtgggcttcctggctgaagatcggcgcatcaacgtggccgtgacccgggccaggagacatgtggccgtcatctgtgacagcaggacagtgaacaaccacgccttcctgaagaccctggtggagtacttcacccagcacggggaggtgaggacagcctttgagtacctggatgacatcgtgcctgagaactacagccatgagaacagccagggcagcagccacgccgccaccaagccccagggccctgccaccagcaccaggacaggcagccagaggcaggagggcggccaggaggccgccgccccagcccggcagggcaggaagaagccagctgggaagagcctggccagcgaggcccccagccagcccagcctgaatggaggcagccctgagggcgtggagagccaggatggagtggaccacttccgggccatgattgtggagttcatggccagcaagaagatgcagctggagttcccccccagcctgaacagccatgaccggctgcgggtgcaccagattgctgaggagcacggcctgcggcatgacagcagcggggagggcaagaggcgcttcatcaccgtgtccaagagggccccccggcccagggctgccctgggccccccagctggcactggaggccctgcccccctgcagcctgtgccccccaccccagcccagacagagcagcccccccgggagcagaggggccctgaccagcctgacctgcggaccctgcacctggagcggctgcagagggtgcgcagcgcccagggccagcctgccagcaaggagcagcaggccagcggccagcagaagctgcctgagaagaagaagaagaaggccaagggccacccagccacagacctgcccacagaagaagattttgaggccctggtgtctgctgctgtgaaggctgacaacacctgtggctttgccaagtgcacagctggggtgaccaccctgggccagttctgccagctgtgcagccgccgctactgcctgagccaccacctgcctgagatccacggctgtggggagcgggcccgggcccacgcccggcagaggatcagccgggagggcgtgctgtatgccggcagcggcaccaagaatggcagcctggaccctgccaagagggcccagctgcagaggcggctggacaagaagctgtctgagctgagcaaccagaggaccagcaggaggaaggagcggggcacctag

SEQ ID NO: 155850 - DNA, 1287 bp, synthetic construct
  misc_feature 1..1287: note = Description of Artificial Sequence: Synthetic coding sequence
  source 1..1287: mol_type = other DNA
atgcaggagctgcacctgctgtggtgggccctgctgctgggcctggcccaggcctgcccagagccctgtgactgtggggagaagtatggcttccagattgctgactgtgcctacagagacctggagagcgtgcccccaggcttccctgccaacgtgaccaccctgagcctgagcgccaaccggctgcccggcctgcctgagggcgccttccgggaggtgcccctgctgcagagcctgtggctggcccacaatgagatcagaacagtggccgccggggccctggccagcctgagccacctgaagagcctggacctgagccacaacctgatcagtgactttgcctggagcgacctgcacaacctgagcgccctgcagctgctgaagatggacagcaatgagctgaccttcatccccagagatgccttccgcagcctgcgggccctgcggagcctgcagctgaaccacaaccggctgcacaccctggccgagggcaccttcacccccctgacagccctgagccacctgcagatcaatgaaaacccctttgactgcacctgtggcatcgtgtggctgaagacctgggccctgaccacagctgtgtccatccctgagcaggacaacatcgcctgcaccagcccccacgtgctgaagggcacccccctgagccggctgccccccctgccctgcagcgcccccagcgtgcagctgagctaccagcccagccaggatggagctgagctgcggcccggctttgtgctggccctgcactgtgatgtggatggccagcctgccccccagctgcactggcacatccagatccccagcggcatcgtggagatcaccagccccaacgtgggcacagatggccgggccctgcccggcacccctgtggccagcagccagccccgcttccaggcctttgccaacggcagcctgctgatcccagactttgggaagctggaggagggcacctacagctgcctggccaccaatgagctgggcagcgctgagagctctgtggatgtggccctggccaccccaggagagggcggggaggacaccctgggccgccgcttccacggcaaggctgtggagggcaagggctgctacacagtggacaatgaggtgcagcccagcggccctgaggacaacgtggtgatcatctacctgagcagagctggcaaccctgaggccgctgtggccgagggcgtgcccggccagctgcccccaggcctgctgctgctgggccagagcctgctgctcttcttcttcctgaccagcttctag

SEQ ID NO: 155851 - DNA, 1287 bp, synthetic construct; identical to SEQ ID NO: 155850
  misc_feature 1..1287: note = Description of Artificial Sequence: Synthetic coding sequence
  source 1..1287: mol_type = other DNA

SEQ ID NO: 155852 - DNA, 444 bp, synthetic construct
  misc_feature 1..444: note = Description of Artificial Sequence: Synthetic coding sequence
  source 1..444: mol_type = other DNA
atgcaggagctgcacctgctgtggtgggccctgctgctgggcctggcccaggcctgcccagagccctgtgactgtggggagaagtatggcttccagattgctgactgtgcctacagagacctggagagcgtgcccccaggcttccctgccaacgtgaccaccctgagcctgagcgccaaccggctgcccggcctgcctgagggcgccttccgggaggtgcccctgctgcagagcctgtggctggcccacaatgagatcagaacagtggccgccggggccctggccagcctgagccacctgaagagcctggacctgagccacaacctgatcagtgactttgcctggagcgacctgcacaacctgagcgccctgcagctgctgaagatggacagcaatgagctgaccttcatccccagagatgccttccgcagcctgcgggcctag

SEQ ID NO: 155853 - DNA, 552 bp, synthetic construct
  misc_feature 1..552: note = Description of Artificial Sequence: Synthetic coding sequence
  source 1..552: mol_type = other DNA
atgcaggagctgcacctgctgtggtgggccctgctgctgggcctggcccaggcctgcccagagccctgtgactgtggggagaagtatggcttccagattgctgactgtgcctacagagacctggagagcgtgcccccaggcttccctgccaacgtgaccaccctgagcctgagcgccaaccggctgcccggcctgcctgagggcgccttccgggaggtgcccctgctgcagagcctgtggctggcccacaatgagatcagaacagtggccgccggggccctggccagcctgagccacctgaagagcctggacctgagccacaacctgatcagtgactttgcctggagcgacctgcacaacctgagcgccctgcagctgctgaagatggacagcaatgagctgaccttcatccccagagatgccttccgcagcctgcgggccctgcggagcctgcagctgaaccacaaccggctgcacaccctggccgagggcaccttcacccccctgacagccctgagccacctgcagatcaatgaaaacccctttgattag

SEQ ID NO: 155854 - DNA, 2238 bp, synthetic construct
  misc_feature 1..2238: note = Description of Artificial Sequence: Synthetic coding sequence
  source 1..2238: mol_type = other DNA
atgttccccctgcgggccctgtggctggtgtgggccctgctgggcgtggccggcagctgcccagagccctgtgcctgtgtggacaagtatgcccaccagtttgctgactgtgcctacaaggagctgcgggaggtgcctgagggcctgcctgccaacgtgaccaccctgagcctgagcgccaacaagatcaccgtgctgcggcggggggcctttgctgatgtgacccaggtgaccagcctgtggctggcccacaatgaggtgaggacagtggagcccggggccctggccgtgctgagccagctgaagaacctggacctgagccacaacttcatcagcagcttcccctggagcgacctgaggaacctgagcgccctgcagctgctgaagatgaaccacaaccggctgggcagcctgcccagagatgccctgggcgccctgcctgacctgcggagcctgcgcatcaacaacaaccggctgcggaccctggcccctggcacctttgatgccctgagcgccctgagccacctgcagctgtaccacaaccccttccactgcggctgcggcctggtgtggctgcaggcctgggccgccagcaccagggtgtccctgcctgagccagacagcatcgcctgtgccagccccccagccctgcagggcgtgcctgtgtaccgcctgcctgccctgccctgtgccccacccagcgtgcacctgtctgctgagccccccctggaggcccctggcacccccctgcgggccggcctggcctttgtgctgcactgcatcgcagatggccaccccaccccccggctgcagtggcagctgcagatccctgggggcaccgtggtgctggagccccctgtgctgtctggagaagatgatggagtgggcgctgaggagggggagggggagggagatggagacctgctgacccagacccaggcccagacccccaccccagccccagcctggccagcccccccagccaccccccgcttcctggccctggccaacggcagcctgctggtgcccctgctgagcgccaaggaggccggcgtgtacacctgccgggcccacaatgagctgggcgccaacagcaccagcatccgggtggccgtggccgccactggaccacccaagcacgcccctggggccggcggggagccagatggccaggcccccaccagcgagaggaagagcacagccaagggccggggcaacagcgtgctgcccagcaagccagagggcaagatcaagggccagggcctggccaaggtgtccatcctgggggagacagaaacagagcctgaggaggacaccagcgagggggaggaggccgaggaccagatcctggccgaccctgctgaggagcagagatgtggaaatggagaccccagccgctacgtgagcaaccacgccttcaaccagagcgctgagctgaagccccacgtgtttgagctgggcgtgattgccctggatgtggccgagcgggaggcccgggtgcagctgacccccctggccgcccgctggggccctggccctggaggagctgggggcgccccccggcccggccggcggcccctgcggctgctgtacctgtgcccagctgggggcggcgctgctgtgcagtggagccgggtggaggagggcgtgaatgcctactggttccggggcctgcggcccggcaccaactacagcgtgtgcctggccctggccggggaggcctgccacgtgcaggtggtgttcagcaccaagaaggagctgcccagcctgctggtgattgtggccgtgtctgtgttcctgctggtgctggccaccgtgcccctgctgggcgccgcctgctgccacctgctggccaagcaccctgggaagccctaccgcctcatcctgcggccccaggccccagaccccatggagaagagaattgctgctgactttgacccccgggccagctacctggagagcgagaagagctacccagctggaggagaggccggcggggaggagccagaagatgtgcagggcgagggcctggatgaagatgctgagcagggcgaccccagcggggacctgcagcgggaggagagcctggccgcctgcagcctggtggagagccagagcaaggccaaccaggaggagtttgaagctggcagcgagtacagcgaccggctgcccctgggcgctgaggccgtgaacatcgcccaggagatcaatggaaactaccggcagacagctggatag

SEQ ID NO: 155855 - DNA, 1005 bp, synthetic construct
  misc_feature 1..1005: note = Description of Artificial Sequence: Synthetic coding sequence
  source 1..1005: mol_type = other DNA
atgttccccctgcgggccctgtggctggtgtgggccctgctgggcgtggccggcagctgcccagagccctgtgcctgtgtggacaagtatgcccaccagtttgctgactgtgcctacaaggagctgcgggaggtgcctgagggcctgcctgccaacgtgaccaccctgagcctgagcgccaacaagatcaccgtgctgcggcggggggcctttgctgatgtgacccaggtgaccagcctgtggctggcccacaatgaggtgaggacagtggagcccggggccctggccgtgctgagccagctgaagaacctggacctgagccacaacttcatcagcagcttcccctggagcgacctgaggaacctgagcgccctgcagctgctgaagatgaaccacaaccggctgggcagcctgcccagagatgccctgggcgccctgcctgacctgcggagcctgcgcatcaacaacaaccggctggccggggaggcctgccacgtgcaggtggtgttcagcaccaagaaggagctgcccagcctgctggtgattgtggccgtgtctgtgttcctgctggtgctggccaccgtgcccctgctgggcgccgcctgctgccacctgctggccaagcaccctgggaagccctaccgcctcatcctgcggccccaggccccagaccccatggagaagagaattgctgctgactttgacccccgggccagctacctggagagcgagaagagctacccagctggaggagaggccggcggggaggagccagaagatgtgcagggcgagggcctggatgaagatgctgagcagggcgaccccagcggggacctgcagcgggaggagagcctggccgcctgcagcctggtggagagccagagcaaggccaaccaggaggagtttgaggccggcagcgagtacagcgaccggctgcccctgggcgctgaggccgtgaacatcgcccaggagatcaatggaaactaccggcagacagctggatag

SEQ ID NO: 155856 - DNA, 2238 bp, synthetic construct; identical to SEQ ID NO: 155854
  misc_feature 1..2238: note = Description of Artificial Sequence: Synthetic coding sequence
  source 1..2238: mol_type = other DNA

SEQ ID NO: 155857 - DNA, 2238 bp, synthetic construct; identical to SEQ ID NO: 155854
  misc_feature 1..2238: note = Description of Artificial Sequence: Synthetic coding sequence
  source 1..2238: mol_type = other DNA

SEQ ID NO: 155858 - DNA, 2238 bp, synthetic construct; identical to SEQ ID NO: 155854
  misc_feature 1..2238: note = Description of Artificial Sequence: Synthetic coding sequence
  source 1..2238: mol_type = other DNA

SEQ ID NO: 155859 - DNA, 2238 bp, synthetic construct; identical to SEQ ID NO: 155854
  misc_feature 1..2238: note = Description of Artificial Sequence: Synthetic coding sequence
  source 1..2238: mol_type = other DNA

SEQ ID NO: 155860 - DNA, 4011 bp, synthetic construct
  misc_feature 1..4011: note = Description of Artificial Sequence: Synthetic coding sequence
  source 1..4011: mol_type = other DNA
atgaccctggacaggcctggagagggcgccaccatgctgaagaccttcaccgtgctgctcttctgcatccgcatgagcctgggcatgaccagcatcgtgatggacccccagcctgagctgtggattgagagcaactacccccaggccccctgggagaacatcaccctgtggtgccgcagccccagccgcatcagcagcaagttcctgctgctgaaggacaagacccagatgacctggatccggcccagccacaagaccttccaggtgtccttcctgattggagccctgacagagagcaatgccggcctgtaccgctgctgctactggaaggagaccggctggagcaagcccagcaaggtgctggagctggaggcccctggccagctgcccaagcccatcttctggatccaggccgagaccccagccctgcccggctgcaatgtgaacatcctgtgccacggctggctgcaggacctggtgttcatgctgttcaaggagggctatgcagagcctgtggactaccaggtgcccaccggcaccatggccatcttcagcattgacaacctgaccccagaagatgaaggagtgtacatctgcaggacccacatccagatgctgcccaccctgtggagcgagcccagcaaccccctgaagctggtggtggccggcctgtaccccaagcccaccctgacagcccaccctggccccatcatggcccctggagagagcctgaacctgcgctgccagggccccatctacggcatgacctttgccctgatgagggtggaggacctggagaagagcttctaccacaagaagaccatcaagaatgaggccaacttcttcttccagagcctgaagatccaggacaccggccactacctgtgcttctactatgatgccagctaccggggcagcctgctgagtgatgtgctgaagatctgggtgacagacaccttccccaagacctggctgctggcccggcccagcgctgtggtgcagatgggccagaatgtgtccctgcgctgccggggccctgtggatggagtgggcctggccctgtacaagaagggggaggacaagcccctgcagttcctggatgccaccagcattgatgacaacaccagcttcttcctgaacaacgtgacctacagcgacaccggcatctacagctgccactacctgctgacctggaagaccagcatccgcatgcccagccacaacacagtggagctgatggtggtggacaagccacccaagcccagcctgagcgcctggcccagcacagtgttcaagctgggcaaggccatcaccctgcagtgccgggtgagccaccctgtgctggagttcagcctggagtgggaggagcgggagaccttccagaagttctctgtgaatggagacttcatcatcagcaatgtggatggaaaaggaacaggcacctacagctgcagctacagagtggagacccaccccaacatctggagccacaggtctgagcccctgaagctgatgggccctgctggctacctgacctggaactacgtgctgaatgaggccatccggctgagcctcatcatgcagctggtggccctgctgctggtggtgctgtggatccgctggaagtgccggcggctgcgcatccgggaggcctggctgctgggcacagcccagggcgtgaccatgctgttcatcgtgacagccctgctgtgctgcggcctgtgcaatggagtgctgattgaggagacagaaattgtgatgcccacccccaagccagagctgtgggccgagaccaacttccccctggccccctggaagaacctgaccctgtggtgccgcagccccagcggcagcaccaaggagtttgtgctgctgaaggatggcaccggctggatcgccaccaggcctgccagcgagcaggtgcgggccgccttccccctgggcgccctgacccagagccacacaggcagctaccactgccacagctgggaggagatggctgtgtctgagcccagcgaggccctggagctggtgggcacagacatcctgcccaagcctgtgatcagcgccagccccaccatccggggccaggagctgcagctgcgctgcaagggctggctggccggcatgggctttgccctgtacaaggagggggagcaggagcctgtgcagcagctgggcgctgtgggccgggaggccttcttcaccatccagaggatggaggacaaggatgagggcaactacagctgcaggacccacacagagaagaggcccttcaagtggagcgagcccagcgagcccctggagctggtgatcaaggagatgtaccccaagcccttcttcaagacctgggccagccctgtggtgacccctggggcccgggtgaccttcaactgcagcaccccccaccagcacatgtccttcatcctgtacaaggatggcagcgagatcgccagcagtgaccgctcctgggccagccctggggccagcgctgcccacttcctgatcatctctgtgggcattggagatggcggcaactacagctgccgctactatgacttcagcatctggagcgagcccagcgaccctgtggagctggtggtgacagagttctaccccaagcccaccctgctggcccagcccggccctgtggtgtttcctgggaagagcgtcatcctgcgctgccagggcaccttccagggcatgagatttgccctgctgcaggagggcgcccacgtgcccctgcagttccgctctgtgtctggcaacagcgctgacttcctgctgcacacagtgggcgcagaagattctggcaactacagctgcatctactatgagaccaccatgagcaacagaggcagctacctgtccatgcccctgatgatctgggtgacagacaccttccccaagccctggctgtttgctgagcccagctctgtggtgcccatgggccagaatgtgaccctgtggtgccggggccctgtgcacggcgtgggctacatcctgcacaaggagggggaggccacctccatgcagctgtggggcagcaccagcaatgatggagccttccccatcaccaacatcagcggcacctccatgggccgctacagctgctgctaccacccagactggaccagcagcatcaagatccagcccagcaacaccctggagctgctggtgacaggcctgctgcccaagcccagcctgctggcccagcccggccccatggtggcccctggagagaacatgaccctgcagtgccagggcgagctgcctgacagcacctttgtgctgctgaaggagggcgcccaggagcccctggagcagcagaggccttctggctacagagctgacttctggatgcctgctgtgagaggagaagattctggcatctacagctgtgtgtactacctggacagcaccccatttgctgccagcaaccacagcgacagcctggagatctgggtgacagacaagccacccaagcccagcctgagcgcctggcccagcaccatgttcaagctgggcaaggacatcaccctgcagtgccggggccccctgcccggggtggagtttgtgctggagcatgatggagaggaggccccccagcagttctctgaagatggagactttgtgatcaacaacgtggagggcaaaggaattggcaactacagctgcagctaccgcctgcaggcctacccagacatctggagcgagcccagcgaccccctggagctggtgggcgccgccggccctgtggcccaggagtgcaccgtgggcaacatcgtgcgcagcagcctcatcgtggtggtggtggtggccctgggcgtggtgctggccatcgagtggaagaagtggccccggctgcggacccggggcagcgagacagatggccgggaccagaccatcgccctggaggagtgcaaccaggagggggagcccggcaccccagccaacagccccagcagcaccagccagaggatctctgtggagctgcctgtgcccatctag

SEQ ID NO: 155861 - DNA, 729 bp, synthetic construct
  misc_feature 1..729: note = Description of Artificial Sequence: Synthetic coding sequence
  source 1..729: mol_type = other DNA
atgaccctggacaggcctggagagggcgccaccatgctgaagaccttcaccgtgctgctcttctgcatccgcatgagcctgggcatgaccagcatcgtgatggacccccagcctgagctgtggattgagagcaactacccccaggccccctgggagaacatcaccctgtggtgccgcagccccagccgcatcagcagcaagttcctgctgctgaaggacaagacccagatgacctggatccggcccagccacaagaccttccaggtgtccttcctgattggagccctgacagagagcaatgccggcctgtaccgctgctgctactggaaggagaccggctggagcaagcccagcaaggtgctggagctggaggcccctggccagctgcccaagcccatcttctggatccaggccgagaccccagccctgcccggctgcaatgtgaacatcctgtgccacggctggctgcaggacctggtgttcatgctgttcaaggagggctatgcagagcctgtggactaccaggtgcccaccggcaccatggccatcttcagcattgacaacctgaccccagaagatgaaggagtgtacatctgcaggacccacatccagatgctgcccaccctgtggagcgagcccagcaaccccctgaagctggtggtggccggcggctgcggctacggctgctggcacctggccatcgtggtgcccggcatcatggccggctag

SEQ ID NO: 155862 - DNA, 729 bp, synthetic construct; identical to SEQ ID NO: 155861
  misc_feature 1..729: note = Description of Artificial Sequence: Synthetic coding sequence
  source 1..729: mol_type = other DNA

SEQ ID NO: 155863 - DNA, 4026 bp, synthetic construct
  misc_feature 1..4026: note = Description of Artificial Sequence: Synthetic coding sequence
  source 1..4026: mol_type = other DNA
atgaccctggacaggcctggagagggcgccaccatgctgaagaccttcaccgtgctgctcttctgcatccgcatgagcctgggcatgaccagcatcgtgatggacccccagcctgagctgtggattgagagcaactacccccaggccccctgggagaacatcaccctgtggtgccgcagccccagccgcatcagcagcaagttcctgctgctgaaggacaagacccagatgacctggatccggcccagccacaagaccttccaggtgtccttcctgattggagccctgacagagagcaatgccggcctgtaccgctgctgctactggaaggagaccggctggagcaagcccagcaaggtgctggagctggaggcccctggccagctgcccaagcccatcttctggatccaggccgagaccccagccctgcccggctgcaatgtgaacatcctgtgccacggctggctgcaggacctggtgttcatgctgttcaaggagggctatgcagagcctgtggactaccaggtgcccaccggcaccatggccatcttcagcattgacaacctgaccccagaagatgaaggagtgtacatctgcaggacccacatccagatgctgcccaccctgtggagcgagcccagcaaccccctgaagctggtggtggccggcctgtaccccaagcccaccctgacagcccaccctggccccatcatggcccctggagagagcctgaacctgcgctgccagggccccatctacggcatgacctttgccctgatgagggtggaggacctggagaagagcttctaccacaagaagaccatcaagaatgaggccaacttcttcttccagagcctgaagatccaggacaccggccactacctgtgcttctactatgatgccagctaccggggcagcctgctgagtgatgtgctgaagatctgggtgacagacaccttccccaagacctggctgctggcccggcccagcgctgtggtgcagatgggccagaatgtgtccctgcgctgccggggccctgtggatggagtgggcctggccctgtacaagaagggggaggacaagcccctgcagttcctggatgccaccagcattgatgacaacaccagcttcttcctgaacaacgtgacctacagcgacaccggcatctacagctgccactacctgctgacctggaagaccagcatccgcatgcccagccacaacacagtggagctgatggtggtggacaagccacccaagcccagcctgagcgcctggcccagcacagtgttcaagctgggcaaggccatcaccctgcagtgccgggtgagccaccctgtgctggagttcagcctggagtgggaggagcgggagaccttccagaagttctctgtgaatggagacttcatcatcagcaatgtggatggaaaaggaacaggcacctacagctgcagctacagagtggagacccaccccaacatctggagccacaggtctgagcccctgaagctgatgggccctgctggctacctgacctggaactacgtgctgaatgaggccatccggctgagcctcatcatgcagctggtggccctgctgctggtggtgctgtggatccgctggaagtgccggcggctgcgcatccgggaggcctggctgctgggcacagcccagggcgtgaccatgctgttcatcgtgacagccctgctgtgctgtgccatcagctttgctggcctgtgcaatggagtgctgattgaggagacagagatcgtgatgcccacccccaagccagagctgtgggccgagaccaacttccccctggccccctggaagaacctgaccctgtggtgccgcagccccagcggcagcaccaaggagtttgtgctgctgaaggatggcaccggctggatcgccaccaggcctgccagcgagcaggtgcgggccgccttccccctgggcgccctgacccagagccacacaggcagctaccactgccacagctgggaggagatggctgtgtctgagcccagcgaggccctggagctggtgggcacagacatcctgcccaagcctgtgatcagcgccagccccaccatccggggccaggagctgcagctgcgctgcaagggctggctggccggcatgggctttgccctgtacaaggagggggagcaggagcctgtgcagcagctgggcgctgtgggccgggaggccttcttcaccatccagaggatggaggacaaggatgagggcaactacagctgcaggacccacacagagaagaggcccttcaagtggagcgagcccagcgagcccctggagctggtgatcaaggagatgtaccccaagcccttcttcaagacctgggccagccctgtggtgacccctggggcccgggtgaccttcaactgcagcaccccccaccagcacatgtccttcatcctgtacaaggatggcagcgagatcgccagcagtgaccgctcctgggccagccctggggccagcgctgcccacttcctgatcatctctgtgggcattggagatggcggcaactacagctgccgctactatgacttcagcatctggagcgagcccagcgaccctgtggagctggtggtgacagagttctaccccaagcccaccctgctggcccagcccggccctgtggtgtttcctgggaagagcgtcatcctgcgctgccagggcaccttccagggcatgagatttgccctgctgcaggagggcgcccacgtgcccctgcagttccgctctgtgtctggcaacagcgctgacttcctgctgcacacagtgggcgctgaggacagcggcaactacagctgcatctactatgagaccaccatgagcaacagaggcagctacctgtccatgcccctgatgatctgggtgacagacaccttccccaagccctggctgtttgctgagcccagctctgtggtgcccatgggccagaatgtgaccctgtggtgccggggccctgtgcatggagtgggctacatcctgcacaaggagggggaggccacctccatgcagctgtggggcagcaccagcaatgatggagccttccccatcaccaacatcagcggcacctccatgggccgctacagctgctgctaccacccagactggaccagcagcatcaagatccagcccagcaacaccctggagctgctggtgacaggcctgctgcccaagcccagcctgctggcccagcccggccccatggtggcccctggagagaacatgaccctgcagtgccagggcgagctgcctgacagcacctttgtgctgctgaaggagggcgcccaggagcccctggagcagcagaggcccagcggctacagagctgacttctggatgcctgctgtgcggggggaggacagcggcatctacagctgtgtgtactacctggacagcaccccatttgctgccagcaaccacagcgacagcctggagatctgggtgacagacaagccacccaagcccagcctgagcgcctggcccagcaccatgttcaagctgggcaaggacatcaccctgcagtgccggggccccctgcccggggtggagtttgtgctggagcatgatggagaggaggccccccagcagttctctgaagatggagactttgtgatcaacaacgtggagggcaagggcatcggcaactacagctgcagctaccgcctgcaggcctacccagacatctggagcgagcccagcgaccccctggagctggtgggcgctgctggccctgtggcccaggagtgcaccgtgggcaacatcgtgcgcagcagcctgattgtggtggtggtggtggccctgggcgtggtgctggccatcgagtggaagaagtggccccggctgcggacccggggcagcgagacagatggccgggaccagaccatcgccctggaggagtgcaaccaggagggggagcccggcaccccagccaacagccccagcagcaccagccagaggatctctgtggagctgcctgtgcccatctag

SEQ ID NO: 155864 - DNA, 3984 bp, synthetic construct
  misc_feature 1..3984: note = Description of Artificial Sequence: Synthetic coding sequence
  source 1..3984: mol_type = other DNA
atgaccctggacaggcctggagagggcgccaccatgctgaagaccttcaccgtgctgctcttctgcatcctgatggacccccagcctgagctgtggattgagagcaactacccccaggccccctgggagaacatcaccctgtggtgccgcagccccagccgcatcagcagcaagttcctgctgctgaaggacaagacccagatgacctggatccggcccagccacaagaccttccaggtgtccttcctgattggagccctgacagagagcaatgccggcctgtaccgctgctgctactggaaggagaccggctggagcaagcccagcaaggtgctggagctggaggcccctggccagctgcccaagcccatcttctggatccaggccgagaccccagccctgcccggctgcaatgtgaacatcctgtgccacggctggctgcaggacctggtgttcatgctgttcaaggagggctacgccgagcctgtggactaccaggtgcccaccggcaccatggccatcttcagcattgacaacctgaccccagaagatgagggcgtgtacatctgcaggacccacatccagatgctgcccaccctgtggagcgagcccagcaaccccctgaagctggtggtggccggcctgtaccccaagcccaccctgacagcccaccctggccccatcatggcccctggagagagcctgaacctgcgctgccagggccccatctacggcatgacctttgccctgatgagggtggaggacctggagaagagcttctaccacaagaagaccatcaagaatgaggccaacttcttcttccagagcctgaagatccaggacaccggccactacctgtgcttctactatgatgccagctaccggggcagcctgctgagtgatgtgctgaagatctgggtgacagacaccttccccaagacctggctgctggcccggcccagcgctgtggtgcagatgggccagaatgtgtccctgcgctgccggggccctgtggatggagtgggcctggccctgtacaagaagggggaggacaagcccctgcagttcctggatgccaccagcattgatgacaacaccagcttcttcctgaacaacgtgacctacagcgacaccggcatctacagctgccactacctgctgacctggaagaccagcatccgcatgcccagccacaacacagtggagctgatggtggtggacaagccacccaagcccagcctgagcgcctggcccagcaccgtcttcaagctgggcaaggccatcaccctgcagtgccgggtgagccaccctgtgctggagttcagcctggagtgggaggagcgggagaccttccagaagttctctgtgaatggagacttcatcatcagcaatgtggatggcaagggcaccggcacctacagctgcagctacagagtggagacccaccccaacatctggagccacaggtctgagcccctgaagctgatgggccctgctggctacctgacctggaactacgtgctgaatgaggccatccggctgagcctcatcatgcagctggtggccctgctgctggtggtgctgtggatccgctggaagtgccggcggctgcgcatccgggaggcctggctgctgggcacagcccagggcgtgaccatgctgttcatcgtgacagccctgctgtgctgcggcctgtgcaatggagtgctgattgaggagacagagatcgtgatgcccacccccaagccagagctgtgggccgagaccaacttccccctggccccctggaagaacctgaccctgtggtgccgcagccccagcggcagcaccaaggagtttgtgctgctgaaggatggcaccggctggatcgccaccaggcctgccagcgagcaggtgcgggccgccttccccctgggcgccctgacccagagccacacaggcagctaccactgccacagctgggaggagatggctgtgtctgagcccagcgaggccctggagctggtgggcacagacatcctgcccaagcctgtgatcagcgccagccccaccatccggggccaggagctgcagctgcgctgcaagggctggctggccggcatgggctttgccctgtacaaggagggggagcaggagcctgtgcagcagctgggcgctgtgggccgggaggccttcttcaccatccagaggatggaggacaaggatgagggcaactacagctgcaggacccacacagagaagaggcccttcaagtggagcgagcccagcgagcccctggagctggtgatcaaggagatgtaccccaagcccttcttcaagacctgggccagccctgtggtgacccctggggcccgggtgaccttcaactgcagcaccccccaccagcacatgtccttcatcctgtacaaggatggcagcgagatcgccagcagtgaccgctcctgggccagccctggggccagcgctgcccacttcctgatcatctctgtgggcattggagatggcggcaactacagctgccgctactatgacttcagcatctggagcgagcccagcgaccctgtggagctggtggtgacagagttctaccccaagcccaccctgctggcccagcccggccctgtggtgtttcctgggaagagcgtcatcctgcgctgccagggcaccttccagggcatgagatttgccctgctgcaggagggcgcccacgtgcccctgcagttccgctctgtgtctggcaacagcgctgacttcctgctgcacacagtgggcgctgaggacagcggcaactacagctgcatctactatgagaccaccatgagcaacagaggcagctacctgtccatgcccctgatgatctgggtgacagacaccttccccaagccctggctgtttgctgagcccagctctgtggtgcccatgggccagaatgtgaccctgtggtgccggggccctgtgcatggagtgggctacatcctgcacaaggagggggaggccacctccatgcagctgtggggcagcaccagcaatgatggagccttccccatcaccaacatcagcggcacctccatgggccgctacagctgctgctaccacccagactggaccagcagcatcaagatccagcccagcaacaccctggagctgctggtgacaggcctgctgcccaagcccagcctgctggcccagcccggccccatggtggcccctggagagaacatgaccctgcagtgccagggcgagctgcctgacagcacctttgtgctgctgaaggagggcgcccaggagcccctggagcagcagaggcccagcggctacagagctgacttctggatgcctgctgtgcggggggaggacagcggcatctacagctgtgtgtactacctggacagcaccccatttgctgccagcaaccacagcgacagcctggagatctgggtgacagacaagccacccaagcccagcctgagcgcctggcccagcaccatgttcaagctgggcaaggacatcaccctgcagtgccggggccccctgcccggggtggagtttgtgctggagcatgatggagaggaggccccccagcagttctctgaagatggagactttgtgatcaacaacgtggagggcaagggcatcggcaactacagctgcagctaccgcctgcaggcctacccagacatctggagcgagcccagcgaccccctggagctggtgggcgctgctggccctgtggcccaggagtgcaccgtgggcaacatcgtgcgcagcagcctgattgtggtggtggtggtggccctgggcgtggtgctggccatcgagtggaagaagtggccccggctgcggacccggggcagcgagacagatggccgggaccagaccatcgccctggaggagtgcaaccaggagggggagcccggcaccccagccaacagccccagcagcaccagccagaggatctctgtggagctgcctgtgcccatctag

SEQ ID NO: 155865 - DNA, 3984 bp, synthetic construct; identical to SEQ ID NO: 155864
  misc_feature 1..3984: note = Description of Artificial Sequence: Synthetic coding sequence
  source 1..3984: mol_type = other DNA

SEQ ID NO: 155866 - DNA, 3645 bp, synthetic construct
  misc_feature 1..3645: note = Description of Artificial Sequence: Synthetic coding sequence
  source 1..3645: mol_type = other DNA
atgaagtgcttcttccctgtgctgagctgcctggccgtgctgggcgtggtgtctgcccagaggcaggtgacagtgcaggagggccccctgtacagaacagagggcagccacatcaccatctggtgcaatgtgtctggctaccagggccccagcgagcagaacttccagtggagcatctacctgcccagcagccctgagcgggaggtgcagatcgtgtccaccatggacagcagcttcccctatgccatctacacccagagggtgcggggcggcaagatcttcatcgagcgggtgcagggcaacagcaccctgctgcacatcacagacctgcaggccagagatgctggggagtatgagtgccacacccccagcacagacaagcagtacttcggcagctacagcgccaagatgaacctggtggtgatcccagacagcctgcagaccacagccatgccccagaccctgcaccgggtggagcaggaccccctggagctgacctgtgaggtggccagcgagaccatccagcacagccacctgtctgtggcctggctgcggcagaaggtgggggagaagcctgtggaggtgatcagcctgagccgggacttcatgctgcacagcagcagtgaatatgcccagaggcagagcctgggggaggtgcggctggacaagctgggccgcaccaccttccggctgaccatcttccacctgcagcccagcgaccagggcgagttctactgtgaggccgctgagtggatccaggaccctgatggctcctggtacgccatgaccaggaagaggtctgagggcgctgtggtgaatgtgcagcccacagacaaggagttcaccgtgcggctggagacagagaagaggctgcacacagtgggggagcctgtggagttccgctgcatcctggaggcccagaatgtgcctgaccgctactttgctgtgtcctgggccttcaacagcagcctgattgccaccatgggccccaatgctgtgcctgtgctgaacagcgagtttgcccaccgggaggcccggggccagctgaaggtggccaaggagagtgacagcgtgtttgtgctgaagatctaccacctgcggcaggaggacagcggcaagtacaactgccgggtgacagagcgggagaagacagtgactggagagttcatcgacaaggagagcaagaggcccaagaacatccccatcatcgtgctgcccctgacagacaactgggtggtgaaggtgccccagcaccaccagctgctgagccagggccacctggagagcagcatctctgtggaggtggccagcaatgccagcgtcatcctggagggggaggacctgcgcttcagctgcagcgtgaggacagctggccggccccagggccgcttcagcgtcatctggcagctggtggaccggcagaacagaagaagcaacatcatgtggctggacagagatggcaccgtgcagcccggcagcagctactgggagaggagcagctttggaggagtgcagatggagcaggtgcagcccaacagcttcagcctgggcatcttcaacagcaggaaggaggatgagggccagtatgagtgccacgtgacagagtgggtgcgggctgtggatggagagtggcagatcgtgggggagcggcgggccagcacccccatcagcatcacagccctggagatgggctttgctgtgacagccatcagcaggaccccaggagtgacctacagcgacagctttgacctgcagtgcatcatcaagccccactacccagcctgggtgcctgtgtctgtgacctggaggttccagcctgtgggcaccgtggagttccatgacctggtgaccttcaccagagatggaggagtgcagtggggagacaggagcagcagcttccgcaccaggacagccatcgagaaggccgagagcagcaacaacgtgcggctgagcatcagccgggccagtgacacagaggccggcaagtaccagtgtgtggccgagctgtggaggaagaactacaacaacacctggacccggctggccgagaggaccagcaacctgctggagatccgggtgctgcagcctgtgaccaagctgcaggtgtccaagagcaagaggaccctgaccctggtggagaacaagcccatccagctgaactgcagcgtgaagagccagaccagccagaacagccactttgctgtgctgtggtacgtgcacaagcccagtgatgctgatggcaagctgatcctgaagaccacccacaacagcgcctttgaatatggcacctatgcagaggaggagggcctgcgggcccggctgcagtttgaaagacatgtgtctgggggcctcttcagcctgactgtgcagagagctgaggtgtctgattctggcagctactactgccacgtggaggagtggctgctgagccccaactatgcctggtacaagctggccgaggaggtgtctggccgcacagaggtgacagtgaagcagcctgacagccggctgcggctgagccaggcccagggcaacctgtctgtgctggagacccggcaggtgcagctggagtgtgtggtgctgaacagaaccagcatcaccagccagctgatggtggagtggtttgtgtggaagcccaaccaccctgagcgggagaccgtggcccggctgagcagagatgccaccttccactacggggagcaggccgccaagaacaacctgaagggccgcctgcacctggagagccccagccctggggtgtaccgcctcttcatccagaatgtggccgtgcaggacagcggcacctacagctgccacgtggaggagtggctgcccagccccagcggcatgtggtacaagagagctgaggacacagctggccagacagccctgactgtgatgaggccagatgccagcctgcaggtggacacagtggtgcccaatgccaccgtgtctgagaaggccgccttccagctggactgcagcatcgtgagccgcagcagccaggacagcagatttgctgtggcctggtacagcctgcggaccaaggccggcggcaagaggagcagccctggcctggaggagcaggaggaggagcgggaggaggaggaggaggaggatgatgatgatgatgatgaccccacagagaggacagccctgctgtctgtgggcccagatgctgtgtttggacctgagggcagcccctgggagggccgcctgcgcttccagaggctgagccctgtgctgtaccgcctgactgtgctgcaggccagcccccaggacaccggcaactacagctgccacgtggaggagtggctgcccagcccccagaaggagtggtaccgcctgacagaggaggagagcgcccccatcggcatccgggtgctggacaccagccccaccctgcagagcatcatctgcagcaatgatgccctcttctactttgtgttcttctaccccttccccatcttcggcatcctgatcatcaccatcctgctggtgcgcttcaagagcaggaacagcagcaagaacagtgatggcaagaatggagtgcccctgctgtggatcaaggagccccacctgaactacagccccacctgcctggagccccctgtgctgagcatccaccctggggccattgattag

SEQ ID NO: 155867 - DNA, 3645 bp, synthetic construct; identical to SEQ ID NO: 155866
  misc_feature 1..3645: note = Description of Artificial Sequence: Synthetic coding sequence
  source 1..3645: mol_type = other DNA

SEQ ID NO: 155868 - DNA, 3585 bp, synthetic construct
  misc_feature 1..3585: note = Description of Artificial Sequence: Synthetic coding sequence
  source 1..3585: mol_type = other DNA
atgaagtgcttcttccctgtgctgagctgcctggccgtgctgggcgtggtgtctgcccagaggcaggtgacagtgcaggagggccccctgtacagaacagagggcagccacatcaccatctggtgcaatgtgtctggctaccagggccccagcgagcagaacttccagtggagcatctacctgcccagcagccctgagcgggaggtgcagatcgtgtccaccatggacagcagcttcccctatgccatctacacccagagggtgcggggcggcaagatcttcatcgagcgggtgcagggcaacagcaccctgctgcacatcacagacctgcaggccagagatgctggggagtatgagtgccacacccccagcacagacaagcagtacttcggcagctacagcgccaagatgaacctggtggtgatcccagacagcctgcagaccacagccatgccccagaccctgcaccgggtggagcaggaccccctggagctgacctgtgaggtggccagcgagaccatccagcacagccacctgtctgtggcctggctgcggcagaaggtgggggagaagcctgtggaggtgatcagcctgagccgggacttcatgctgcacagcagcagtgaatatgcccagaggcagagcctgggggaggtgcggctggacaagctgggccgcaccaccttccggctgaccatcttccacctgcagcccagcgaccagggcgagttctactgtgaggccgctgagtggatccaggaccctgatggctcctggtacgccatgaccaggaagaggtctgagggcgctgtggtgaatgtgcagcccacagacaaggagttcaccgtgcggctggagacagagaagaggctgcacacagtgggggagcctgtggagttccgctgcatcctggaggcccagaatgtgcctgaccgctactttgctgtgtcctgggccttcaacagcagcctgattgccaccatgggccccaatgctgtgcctgtgctgaacagcgagtttgcccaccgggaggcccggggccagctgaaggtggccaaggagagtgacagcgtgtttgtgctgaagatctaccacctgcggcaggaggacagcggcaagtacaactgccgggtgacagagcgggagaagacagtgactggagagttcatcgacaaggagagcaagaggcccaagaacatccccatcatcgtgctgcccctgaagagcagcatctctgtggaggtggccagcaatgccagcgtcatcctggagggggaggacctgcgcttcagctgcagcgtgaggacagctggccggccccagggccgcttcagcgtcatctggcagctggtggaccggcagaacagaagaagcaacatcatgtggctggacagagatggcaccgtgcagcccggcagcagctactgggagaggagcagctttggaggagtgcagatggagcaggtgcagcccaacagcttcagcctgggcatcttcaacagcaggaaggaggatgagggccagtatgagtgccacgtgacagagtgggtgcgggctgtggatggagagtggcagatcgtgggggagcggcgggccagcacccccatcagcatcacagccctggagatgggctttgctgtgacagccatcagcaggaccccaggagtgacctacagcgacagctttgacctgcagtgcatcatcaagccccactacccagcctgggtgcctgtgtctgtgacctggaggttccagcctgtgggcaccgtggagttccatgacctggtgaccttcaccagagatggaggagtgcagtggggagacaggagcagcagcttccgcaccaggacagccatcgagaaggccgagagcagcaacaacgtgcggctgagcatcagccgggccagtgacacagaggccggcaagtaccagtgtgtggccgagctgtggaggaagaactacaacaacacctggacccggctggccgagaggaccagcaacctgctggagatccgggtgctgcagcctgtgaccaagctgcaggtgtccaagagcaagaggaccctgaccctggtggagaacaagcccatccagctgaactgcagcgtgaagagccagaccagccagaacagccactttgctgtgctgtggtacgtgcacaagcccagtgatgctgatggcaagctgatcctgaagaccacccacaacagcgcctttgaatatggcacctatgcagaggaggagggcctgcgggcccggctgcagtttgaaagacatgtgtctgggggcctcttcagcctgactgtgcagagagctgaggtgtctgattctggcagctactactgccacgtggaggagtggctgctgagccccaactatgcctggtacaagctggccgaggaggtgtctggccgcacagaggtgacagtgaagcagcctgacagccggctgcggctgagccaggcccagggcaacctgtctgtgctggagacccggcaggtgcagctggagtgtgtggtgctgaacagaaccagcatcaccagccagctgatggtggagtggtttgtgtggaagcccaaccaccctgagcgggagaccgtggcccggctgagcagagatgccaccttccactacggggagcaggccgccaagaacaacctgaagggccgcctgcacctggagagccccagccctggggtgtaccgcctcttcatccagaatgtggccgtgcaggacagcggcacctacagctgccacgtggaggagtggctgcccagccccagcggcatgtggtacaagagagctgaggacacagctggccagacagccctgactgtgatgaggccagatgccagcctgcaggtggacacagtggtgcccaatgccaccgtgtctgagaaggccgccttccagctggactgcagcatcgtgagccgcagcagccaggacagcagatttgctgtggcctggtacagcctgcggaccaaggccggcggcaagaggagcagccctggcctggaggagcaggaggaggagcgggaggaggaggaggaggaggatgatgatgatgatgatgaccccacagagaggacagccctgctgtctgtgggcccagatgctgtgtttggacctgagggcagcccctgggagggccgcctgcgcttccagaggctgagccctgtgctgtaccgcctgactgtgctgcaggccagcccccaggacaccggcaactacagctgccacgtggaggagtggctgcccagcccccagaaggagtggtaccgcctgacagaggaggagagcgcccccatcggcatccgggtgctggacaccagccccaccctgcagagcatcatctgcagcaatgatgccctcttctactttgtgttcttctaccccttccccatcttcggcatcctgatcatcaccatcctgctggtgcgcttcaagagcaggaacagcagcaagaacagtgatggcaagaatggagtgcccctgctgtggatcaaggagccccacctgaactacagccccacctgcctggagccccctgtgctgagcatccaccctggggccattgattag

SEQ ID NO: 155869 - DNA, 726 bp, synthetic construct
  misc_feature 1..726: note = Description of Artificial Sequence: Synthetic coding sequence
  source 1..726: mol_type = other DNA
atgggcacagccagccgcagcaacatcgcccggcacctgcagaccaacctgatcctcttctgtgtgggcgctgtgggcgcctgcaccctgtctgtgacccagccctggtacctggaggtggactacacccatgaggccgtgaccatcaagtgcaccttcagcgccaccggctgccccagcgagcagcccacctgcctgtggttccgctacggggcccaccagcctgagaacctgtgcctggatggctgcaagtctgaggccgacaagttcaccgtgcgggaggccctgaaggagaaccaggtgtccctgactgtgaacagagtgaccagcaatgattctgccatctacatctgtggcatcgccttccccagcgtgcctgaggcccgggccaagcagacaggaggcggcaccaccctggtggtgcgggagatcaagctgctgagcaaggagctgcgctccttcctgacagccctggtgtccctgctgtctgtgtatgtgactggagtgtgtgtggccttcatcctgctgagcaagagcaagagcaaccccctgaggaacaaggagatcaaggaggacagccagaagaagaagagcgcccggcgcatcttccaggagatcgcccaggagctgtaccacaagagacatgtggagaccaaccagcagagcgagaaggacaacaacacctatgagaacagaagagtgctgagcaactatgaaagaccctag

SEQ ID NO: 155870 - DNA, 1842 bp, synthetic construct
  misc_feature 1..1842: note = Description of Artificial Sequence: Synthetic coding sequence
  source 1..1842: mol_type = other DNA
atgggcgccctgcggcccaccctgctgccccccagcctgcccctgctgctgctgctgatgctgggcatgggctgctgggcccgggaggtgctggtgcctgagggccccctgtacagagtggccggcacagctgtgtccatcagctgcaatgtgacaggctatgagggccctgcccagcagaactttgagtggttcctgtacagacctgaggccccagacacagccctgggcatcgtgtccaccaaggacacccagttctcctatgctgtgttcaagagccgggtggtggccggggaggtgcaggtgcagaggctgcagggagatgctgtggtgctgaagatcgcccggctgcaggcccaggatgctggcatctatgagtgccacacccccagcacagacacccgctacctgggcagctacagcggcaaggtggagctgcgggtgctgcctgatgtgctgcaggtgtctgctgcccctcctggcccccggggccggcaggcccccaccagcccccccaggatgacagtgcatgagggccaggagctggccctgggctgcctggcccggaccagcacccagaagcacacccacctggccgtgtcctttggccgctctgtgcctgaggcccctgtgggccgcagcaccctgcaggaggtggtgggcatccgcagtgacctggccgtggaggccggggccccctatgcagagcggctggccgccggggagctgcggctgggcaaggagggcacagaccgctacaggatggtggtgggcggggcccaggccggagatgctggcacctaccactgcacagctgctgagtggatccaggaccctgatggctcctgggcccagattgctgagaagagagctgtgctggcccacgtggatgtgcagaccctgagcagccagctggccgtgacagtgggccctggagagcggcgcatcggccctggagagcccctggagctgctgtgcaatgtgtctggggccctgcccccagctggaagacatgctgcctacagcgtgggctgggagatggccccagctggggcccctggccctggccgcctggtggcccagctggacacagagggcgtgggcagcctgggccctggctatgagggccgccacatcgccatggagaaggtggccagcaggacctaccgcctgcggctggaggccgcccggcctggagatgctggcacctaccgctgcctggccaaggcctacgtgcggggcagcggcacccggctgcgggaggccgccagcgcccggagccggcccctgcctgtgcacgtgcgggaggagggcgtggtgctggaggccgtggcctggctggccggcggcaccgtgtacagaggagaaacagccagcctgctgtgcaacatctctgtgcggggcggccccccaggcctgcggctggccgcctcctggtgggtggagaggccagaagatggagagctgagctctgtgcctgcccagctggtgggcggcgtgggccaggatggagtggccgagctgggcgtgcggcctgggggcggccctgtgtctgtggagctggtgggccccaggagccaccggctgcggctgcacagcctgggcccagaagatgagggcgtgtaccactgtgcccccagcgcctgggtgcagcacgccgactacagctggtaccaggccggcagcgcccggagcggccctgtgacagtgtacccctacatgcacgccctggacaccctgtttgtgcccctgctggtgggcaccggggtggccctggtgactggagccaccgtgctgggcaccatcacctgctgcttcatgaagaggctgaggaagaggtag

SEQ ID NO: 155871 - DNA, 1581 bp, synthetic construct
  misc_feature 1..1581: note = Description of Artificial Sequence: Synthetic coding sequence
  source 1..1581: mol_type = other DNA
atgggcgccctgcggcccaccctgctgccccccagcctgcccctgctgctgctgctgatgctgggcatgggctgctgggcccgggaggtgctggtgcctgagggccccctgtacagagtggccggcacagctgtgtccatcagctgcaatgtgacaggctatgagggccctgcccagcagaactttgagtggttcctgtacagacctgaggccccagacacagccctgggcatcgtgtccaccaaggacacccagttctcctatgctgtgttcaagagccgggtggtggccggggaggtgcaggtgcagaggctgcagggagatgctgtggtgctgaagatcgcccggctgcaggcccaggatgctggcatctatgagtgccacacccccagcacagacacccgctacctgggcagctacagcggcaaggtggagctgcgggtgctgcctgatgtgctgcaggtgtctgctgcccctcctggcccccggggccggcaggcccccaccagcccccccaggatgacagtgcatgagggccaggagctggccctgggctgcctggcccggaccagcacccagaagcacacccacctggccgtgtcctttggccgctctgtgcctgaggcccctgtgggccgcagcaccctgcaggaggtggtgggcatccgcagtgacctggccgtggaggccggggccccctatgcagagcggctggccgccggggagctgcggctgggcaaggagggcacagaccgctacaggatggtggtgggcggggcccaggccggagatgctggcacctaccactgcacagctgctgagtggatccaggaccctgatggctcctgggcccagattgctgagaagagagctgtgctggcccacgtggatgtgcagaccctgagcagccagctggccgtgacagtgggccctggagagcggcgcatcggccctggagagcccctggagctgctgtgcaatgtgtctggggccctgcccccagctggaagacatgctgcctacagcgtgggctgggagatggccccagctggggcccctggccctggccgcctggtggcccagctggacacagagggcgtgggcagcctgggccctggctatgagggccgccacatcgccatggagaaggtggccagcaggacctaccgcctgcggctggaggccgcccggcctggagatgctggcacctaccgctgcctggccaaggcctacgtgcggggcagcggcacccggctgcgggaggccgccagcgcccggagccggcccctgcctgtgcacgtgcgggaggagggcgtggtgctggaggccgtggcctggctggccggcggcaccgtgtacagaggagaaacagccagcctgctgtgcaacatctctgtgcggggcggccccccaggcctgcggagcgcccggagcggccctgtgacagtgtacccctacatgcacgccctggacaccctgtttgtgcccctgctggtgggcactggagtggccctggtgactggagccaccgtgctgggcaccatcacctgctgcttcatgaagaggctgaggaagaggtag

SEQ ID NO: 155872 - DNA, 1842 bp, synthetic construct; identical to SEQ ID NO: 155870
  misc_feature 1..1842: note = Description of Artificial Sequence: Synthetic coding sequence
  source 1..1842: mol_type = other DNA

SEQ ID NO: 155873 - DNA, 906 bp, synthetic construct
  misc_feature 1..906: note = Description of Artificial Sequence: Synthetic coding sequence
  source 1..906: mol_type = other DNA
atgggcgccctgcggcccaccctgctgccccccagcctgcccctgctgctgctgctgatgctgggcatgggctgctgggcccgggaggtgctggtgcctgagggccccctgtacagagtggccggcacagctgtgtccatcagctgcaatgtgacaggctatgagggccctgcccagcagaactttgagtggttcctgtacagacctgaggccccagacacagccctgggcatcgtgtccaccaaggacacccagttctcctatgctgtgttcaagagccgggtggtggccggggaggtgcaggtgcagaggctgcagggagatgctgtggtgctgaagatcgcccggctgcaggcccaggatgctggcatctatgagtgccacacccccagcacagacacccgctacctgggcagctacagcggcaaggtggagctgcgggtgctgcctgatgtgctgcaggtgtctgctgcccctcctggcccccggggccggcaggcccccaccagcccccccaggatgacagtgcatgagggccaggagctggccctgggctgcctggcccggaccagcacccagaagcacacccacctggccgtgtcctttggccgctctgtgcctgaggcccctgtgggccgcagcaccctgcaggaggtggtgggcatccgcagtgacctggccgtggaggccggggccccctatgcagagcggctggccgccggggagctgcggctgggcaaggagggcacagaccgctacaggatggtggtgggcggggcccaggccggagatgctggcacctaccactgcacagctgctgagtggatccaggaccctgatggctcctgggcccagattgctgagaagagagctgtgctggcccacgtggatgtgcagaccctgtag

SEQ ID NO: 155874 - DNA, 2154 bp, synthetic construct
  misc_feature 1..2154: note = Description of Artificial Sequence: Synthetic coding sequence
  source 1..2154: mol_type = other DNA
atggtgtggtgcctgggcctggccgtgctgagcctggtgatcagccagggcgcagatggccggggcaagccagaggtggtgtctgtggtgggccgggccggggagagcgtggtgctgggctgtgacctgctgcccccagctggccggccccccctgcacgtgattgagtggctgcgcttcggcttcctgctgcccatcttcatccagtttggcctgtacagccccagaattgatcctgactatgtgggccgggtgcggctgcagaagggggccagcctgcagatcgagggcctgcgggtggaggaccagggctggtatgaatgtagagtcttcttcctggaccagcacatcccagaagatgactttgccaacggctcctgggtgcacctgactgtgaacagccccccccagttccaggagaccccacctgctgtgctggaggtgcaggagctggagcctgtgaccctgcgctgtgtggcccggggcagccccctgccccacgtgacctggaagctgcggggcaaggacctgggccagggccagggccaggtgcaggtgcagaatggcaccctgcgcatccggcgggtggagcggggcagcagtggagtgtacacctgccaggccagcagcacagagggcagcgccacccacgccacccagctgctggtgctgggcccccctgtgattgtggtgccccccaagaacagcacagtgaatgccagccaggatgtgtccctggcctgccacgccgaggcctacccagccaacctgacctacagctggttccaggacaacatcaacgtgttccacatcagccggctgcagccccgggtgcgcatcctggtggatggcagcctgcggctgctggccacccagccagatgatgctggctgctacacctgtgtgcccagcaatggcctgctgcacccccccagcgccagcgcctacctgactgtgctgtacccagcccaggtgacagccatgcctcctgagacccccctgcccatcggcatgcctggggtcatccgctgccctgtgcgggccaacccccccctgctgtttgtgtcctggaccaaggatggcaaggccctgcagctggacaagtttcctggctggagccagggcacagagggcagcctcatcatcgccctgggcaatgaagatgccctgggggagtacagctgcaccccctacaacagcctgggcacagctggccccagccctgtgaccagggtgctgctgaaggcccccccagccttcatcgagcggcccaaggaggagtacttccaggaggtgggccgggagctgctgatcccctgcagcgcccagggcgaccccccacctgctgccccacccagccccctgcccggccctggccccctgctgcagtacctgagcctgcccttcttccgggagatgaatgtggatggagactggccacccctggaggagcccagccctgctgcccccccagactacatggacacccggcgctgccccaccagcagcttcctgcggagccctgagaccccacctgtgagcccccgggagagcctgcccggggctgtggtgggcgctggggccacagctgagcccccctacacagccctggccgactggaccctgcgggagcggctgctgcccggcctgctgcctgctgccccccggggcagcctgaccagccagagcagcggccggggcagcgccagcttcctgcggccccccagcacagcccccagcgctgggggcagctacctgagccctgcccctggggacaccagctcctgggccagcggccctgagcgctggccccggcgggagcacgtggtgacagtgtccaagagaagaaacacctctgtggatgagaactatgagtgggacagcgagttccctggggacatggagctgctggagaccctgcacctgggcctggccagcagccggctgcggcctgaggccgagcctgagctgggcgtgaagaccccagaggagggctgcctgctgaacacagcccacgtgacaggccctgaggcccgctgtgccgccctgcgggaggagttcctggccttcagaagaagaagagatgccacccgggcccggctgcctgcctaccggcagcctgtgccccaccctgagcaggccaccctgctgtag

SEQ ID NO: 155875 - DNA, 3492 bp, synthetic construct
  misc_feature 1..3492: note = Description of Artificial Sequence: Synthetic coding sequence
  source 1..3492: mol_type = other DNA
atggtgtggtgcctgggcctggccgtgctgagcctggtgatcagccagggcgcagatggccggggcaagccagaggtggtgtctgtggtgggccgggccggggagagcgtggtgctgggctgtgacctgctgcccccagctggccggccccccctgcacgtgattgagtggctgcgcttcggcttcctgctgcccatcttcatccagtttggcctgtacagccccagaattgatcctgactatgtgggccgggtgcggctgcagaagggggccagcctgcagatcgagggcctgcgggtggaggaccagggctggtatgaatgtagagtcttcttcctggaccagcacatcccagaagatgactttgccaacggctcctgggtgcacctgactgtgaacagccccccccagttccaggagaccccacctgctgtgctggaggtgcaggagctggagcctgtgaccctgcgctgtgtggcccggggcagccccctgccccacgtgacctggaagctgcggggcaaggacctgggccagggccagggccaggtgcaggtgcagaatggcaccctgcgcatccggcgggtggagcggggcagcagtggagtgtacacctgccaggccagcagcacagagggcagcgccacccacgccacccagctgctggtgctgggcccccctgtgattgtggtgccccccaagaacagcacagtgaatgccagccaggatgtgtccctggcctgccacgccgaggcctacccagccaacctgacctacagctggttccaggacaacatcaacgtgttccacatcagccggctgcagccccgggtgcgcatcctggtggatggcagcctgcggctgctggccacccagccagatgatgctggctgctacacctgtgtgcccagcaatggcctgctgcacccccccagcgccagcgcctacctgactgtgctgtgcatgcctggggtcatccgctgccctgtgcgggccaacccccccctgctgtttgtgtcctggaccaaggatggcaaggccctgcagctggacaagtttcctggctggagccagggcacagagggcagcctcatcatcgccctgggcaatgaagatgccctgggggagtacagctgcaccccctacaacagcctgggcacagctggccccagccctgtgaccagggtgctgctgaaggcccccccagccttcatcgagcggcccaaggaggagtacttccaggaggtgggccgggagctgctgatcccctgcagcgcccagggcgaccccccacctgtggtgtcctggaccaaggtgggccggggcctgcagggccaggcccaggtggacagcaacagcagcctcatcctgcggcccctgaccaaggaggcccacggccactgggagtgcagcgccagcaatgctgtggcccgggtggccaccagcaccaacgtgtatgtgctgggcaccagcccccacgtggtgaccaacgtgtctgtggtggccctgcccaagggggccaacgtgtcctgggagcccggctttgatggcggctacctgcagcgcttctctgtgtggtacacccccctggccaagaggccagacaggatgcaccacgactgggtgtccctggccgtgcctgtgggcgccgcccacctgctggtgcccggcctgcagccccacacccagtaccagttctctgtgctggcccagaacaagctgggcagcggccccttcagcgagatcgtgctgagcgcccctgagggcctgcccaccaccccagctgcccctggcctgcccccaacagagatccccccacccctgagccccccccggggcctggtggccgtgaggaccccccggggcgtgctgctgcactgggaccccccagagctggtgcccaagaggctggatggctacgtgctggagggccggcagggcagccagggctgggaggtgctggaccctgctgtggccggcacagaaacagagctgctggtgcccggcctcatcaaggatgtgctgtatgagttccggctggtggcctttgctggcagctttgtgtctgaccccagcaacacagccaacgtgtccaccagcggcctggaggtgtaccccagcaggacccagctgcccggcctgctgccccagcctgtgctggccggcgtggtgggcggcgtgtgcttcctgggcgtggccgtgctggtgtccatcctggccggctgcctgctgaacagaagaagagctgccaggagaagaaggaagaggctgcggcaggaccccccactcatcttcagccccaccgggaagtctgctgcccccagcgccctgggcagcggcagcccagacagcgtggccaagctgaagctgcagggcagccctgtgcccagcctgcggcagagcctgctgtggggagaccctgctggcacccccagcccccacccagacccccccagcagccggggccccctgcccctggagcccatctgccggggcccagatggccgctttgtgatgggccccaccgtggccgccccccaggagaggagcggccgggagcaggccgagcccaggaccccagcccagaggctggcccggagctttgactgcagcagcagcagccccagcggggccccccagcccctgtgcatcgaggacatcagccctgtggcccctcctcctgctgccccacccagccccctgcccggccctggccccctgctgcagtacctgagcctgcccttcttccgggagatgaatgtggatggagactggccacccctggaggagcccagccctgctgcccccccagactacatggacacccggcgctgccccaccagcagcttcctgcggagccctgagaccccacctgtgagcccccgggagagcctgcccggggctgtggtgggcgctggggccacagctgagcccccctacacagccctggccgactggaccctgcgggagcggctgctgcccggcctgctgcctgctgccccccggggcagcctgaccagccagagcagcggccggggcagcgccagcttcctgcggccccccagcacagcccccagcgctgggggcagctacctgagccctgcccctggggacaccagctcctgggccagcggccctgagcgctggccccggcgggagcacgtggtgacagtgtccaagagaagaaacacctctgtggatgagaactatgagtgggacagcgagttccctggggacatggagctgctggagaccctgcacctgggcctggccagcagccggctgcggcctgaggccgagcctgagctgggcgtgaagaccccagaggagggctgcctgctgaacacagcccacgtgacaggccctgaggcccgctgtgccgccctgcgggaggagttcctggccttcagaagaagaagagatgccacccgggcccggctgcctgcctaccggcagcctgtgccccaccctgagcaggccaccctgctgtag

SEQ ID NO: 155876 - DNA, 3540 bp, synthetic construct
  misc_feature 1..3540: note = Description of Artificial Sequence: Synthetic coding sequence
  source 1..3540: mol_type = other DNA
atggtgtggtgcctgggcctggccgtgctgagcctggtgatcagccagggcgcagatggccggggcaagccagaggtggtgtctgtggtgggccgggccggggagagcgtggtgctgggctgtgacctgctgcccccagctggccggccccccctgcacgtgattgagtggctgcgcttcggcttcctgctgcccatcttcatccagtttggcctgtacagccccagaattgatcctgactatgtgggccgggtgcggctgcagaagggggccagcctgcagatcgagggcctgcgggtggaggaccagggctggtatgaatgtagagtcttcttcctggaccagcacatcccagaagatgactttgccaacggctcctgggtgcacctgactgtgaacagccccccccagttccaggagaccccacctgctgtgctggaggtgcaggagctggagcctgtgaccctgcgctgtgtggcccggggcagccccctgccccacgtgacctggaagctgcggggcaaggacctgggccagggccagggccaggtgcaggtgcagaatggcaccctgcgcatccggcgggtggagcggggcagcagtggagtgtacacctgccaggccagcagcacagagggcagcgccacccacgccacccagctgctggtgctgggcccccctgtgattgtggtgccccccaagaacagcacagtgaatgccagccaggatgtgtccctggcctgccacgccgaggcctacccagccaacctgacctacagctggttccaggacaacatcaacgtgttccacatcagccggctgcagccccgggtgcgcatcctggtggatggcagcctgcggctgctggccacccagccagatgatgctggctgctacacctgtgtgcccagcaatggcctgctgcacccccccagcgccagcgcctacctgactgtgctgtacccagcccaggtgacagccatgcctcctgagacccccctgcccatcggcatgcctggggtcatccgctgccctgtgcgggccaacccccccctgctgtttgtgtcctggaccaaggatggcaaggccctgcagctggacaagtttcctggctggagccagggcacagagggcagcctcatcatcgccctgggcaatgaagatgccctgggggagtacagctgcaccccctacaacagcctgggcacagctggccccagccctgtgaccagggtgctgctgaaggcccccccagccttcatcgagcggcccaaggaggagtacttccaggaggtgggccgggagctgctgatcccctgcagcgcccagggcgaccccccacctgtggtgtcctggaccaaggtgggccggggcctgcagggccaggcccaggtggacagcaacagcagcctcatcctgcggcccctgaccaaggaggcccacggccactgggagtgcagcgccagcaatgctgtggcccgggtggccaccagcaccaacgtgtatgtgctgggcaccagcccccacgtggtgaccaacgtgtctgtggtggccctgcccaagggggccaacgtgtcctgggagcccggctttgatggcggctacctgcagcgcttctctgtgtggtacacccccctggccaagaggccagacaggatgcaccacgactgggtgtccctggccgtgcctgtgggcgccgcccacctgctggtgcccggcctgcagccccacacccagtaccagttctctgtgctggcccagaacaagctgggcagcggccccttcagcgagatcgtgctgagcgcccctgagggcctgcccaccaccccagctgcccctggcctgcccccaacagagatccccccacccctgagccccccccggggcctggtggccgtgaggaccccccggggcgtgctgctgcactgggaccccccagagctggtgcccaagaggctggatggctacgtgctggagggccggcagggcagccagggctgggaggtgctggaccctgctgtggccggcacagaaacagagctgctggtgcccggcctcatcaaggatgtgctgtatgagttccggctggtggcctttgctggcagctttgtgtctgaccccagcaacacagccaacgtgtccaccagcggcctggaggtgtaccccagcaggacccagctgcccggcctgctgccccagcctgtgctggccggcgtggtgggcggcgtgtgcttcctgggcgtggccgtgctggtgtccatcctggccggctgcctgctgaacagaagaagagctgccaggagaagaaggaagaggctgcggcaggaccccccactcatcttcagccccaccgggaagtctgctgcccccagcgccctgggcagcggcagcccagacagcgtggccaagctgaagctgcagggcagccctgtgcccagcctgcggcagagcctgctgtggggagaccctgctggcacccccagcccccacccagacccccccagcagccggggccccctgcccctggagcccatctgccggggcccagatggccgctttgtgatgggccccaccgtggccgccccccaggagaggagcggccgggagcaggccgagcccaggaccccagcccagaggctggcccggagctttgactgcagcagcagcagccccagcggggccccccagcccctgtgcatcgaggacatcagccctgtggcccctcctcctgctgccccacccagccccctgcccggccctggccccctgctgcagtacctgagcctgcccttcttccgggagatgaatgtggatggagactggccacccctggaggagcccagccctgctgcccccccagactacatggacacccggcgctgccccaccagcagcttcctgcggagccctgagaccccacctgtgagcccccgggagagcctgcccggggctgtggtgggcgctggggccacagctgagcccccctacacagccctggccgactggaccctgcgggagcggctgctgcccggcctgctgcctgctgccccccggggcagcctgaccagccagagcagcggccggggcagcgccagcttcctgcggccccccagcacagcccccagcgctgggggcagctacctgagccctgcccctggggacaccagctcctgggccagcggccctgagcgctggccccggcgggagcacgtggtgacagtgtccaagagaagaaacacctctgtggatgagaactatgagtgggacagcgagttccctggggacatggagctgctggagaccctgcacctgggcctggccagcagccggctgcggcctgaggccgagcctgagctgggcgtgaagaccccagaggagggctgcctgctgaacacagcccacgtgacaggccctgaggcccgctgtgccgccctgcgggaggagttcctggccttcagaagaagaagagatgccacccgggcccggctgcctgcctaccggcagcctgtgccccaccctgagcaggccaccctgctgtag

SEQ ID NO: 155877 - DNA, 4050 bp, synthetic construct
  misc_feature 1..4050: note = Description of Artificial Sequence: Synthetic coding sequence
  source 1..4050: mol_type = other DNA
atgatctggtacgtggccaccttcatcgcctctgtgattggcacccggggcctggccgctgagggcgcccacggcctgcgggaggagcctgagtttgtgacagcccgggccggggagagcgtggtgctgcgctgtgatgtgatccaccctgtgacaggccagcccccaccctacgtggtggagtggttcaagtttggagtgcccatccccatcttcatcaagtttggctactacccacctcatgtggaccctgaatatgccggccgggccagcctgcatgacaaggccagcctgcggctggagcaggtgcgctctgaggaccagggctggtatgagtgcaaggtgctgatgctggaccagcagtatgacaccttccacaacggctcctgggtgcacctgaccatcaatgccccacccaccttcacagagaccccaccccagtacatcgaggccaaggagggcggcagcatcaccatgacctgcacagccttcggcaaccccaagcccatcgtgacctggctgaaggagggcaccctgctgggcgccagcggcaagtaccaggtgtctgatggcagcctgactgtgacctctgtgtccagagaagatagaggagcctacacctgccgggcctacagcatccagggcgaggccgtgcacaccacccacctgctggtgcagggcccccccttcatcgtgagccccccagagaacatcaccgtgaacatcagccaggatgccctgctgacctgcagagctgaggcctacccaggcaacctgacctacacctggtactggcaggatgaaaatgtgtacttccagaatgacctgaagctgcgggtgcgcatcctgattgatggcaccctcatcatcttccgggtgaagccagaggacagcggcaagtacacctgtgtgcccagcaacagcctgggccgcagccccagcgccagcgcctacctgactgtgcagtacccagcccgggtgctgaacatgcctcctgtgatctacgtgcctgtgggcatccacggctacatccgctgccctgtggatgctgagcccccagccaccgtggtgaagtggaacaaggatggccggcccctgcaggtggagaagaacctgggctggaccctgatggaggatggcagcatccgcatcgaggaggccacagaggaggccctgggcacctacacctgtgtgccctacaacaccctgggcaccatgggccagagcgccccagcccggctggtgctgaaggaccccccctacttcaccgtgctgcccggctgggagtaccggcaggaggccggccgggagctgctgatcccctgtgccgctgctggggaccccttccctgtgatcacctggaggaaggtgggcaagcccagccgcagcaagcacagcgccctgcccagcggcagcctgcagttccgggccctgagcaaagaagatcatggagagtgggagtgtgtggccaccaacgtggtgaccagcatcacagccagcacccacctgaccgtcatcggcaccagcccccacgcccctggctctgtgcgggtgcaggtgtccatgaccacagccaacgtgtcctgggagcccggctatgatggcggctatgagcagaccttctctgtgtggatgaagagggcccagtttggcccccatgactggctgagcctgcctgtgcccccaggccccagctggctgctggtggacaccctggagcctgagacagcctaccagttctctgtgctggcccagaacaagctgggcaccagcgccttcagcgaggtggtgacagtgaacaccctggccttccccatcaccaccccagagcccctggtgctggtgaccccaccccgctgcctgattgccaacagaacccagcagggcgtgctgctgtcctggctgcccccagccaaccacagcttccccatcgaccgctacatcatggagttccgggtggccgagcgctgggagctgctggatgatggcatccctggaacagaaggagagttctttgccaaggacctgagccaggacacctggtatgagttccgggtgctggccgtgatgcaggacctgatcagcgagcccagcaacattgctggggtgagcagcacagacatcttcccccagcctgacctgacagaagatggcctggcccggcctgtgctggccggcatcgtggccaccatctgcttcctggccgccgccatcctcttcagcaccctggccgcctgctttgtgaacaagcagaggaagaggaagctgaagaggaagaaggacccccccctgagcatcacccactgcaggaagagcctggagagccccctgagcagcggcaaggtgtccccagagagcatccgcaccctgcgggcccccagcgagagcagtgatgaccagggccagcctgctgccaagaggatgctgagccccacccgggagaaggagctgagcctgtacaagaagaccaagagggccatcagcagcaagaagtacagcgtggccaaggccgaggccgaggccgaggccaccacccccatcgagctgatcagccggggcccagatggccgctttgtgatggaccctgctgagatggagcccagcctgaagagccgccgcatcgagggcttcccctttgctgaggagacagacatgtacccagagttccggcagagtgatgaagaaaatgaagaccccctggtgcccacctctgtggccgccctgaagagccagctgacccccctgagcagcagccaggagagctacctgcccccaccagcctacagcccccgcttccagccccggggcctggagggccctgggggcctggagggccgcctgcaggccaccggccaggcccggcccccagccccccggcccttccaccacggccagtactacggctacctgagcagcagcagccctggagaggtggagcccccacccttctacgtgcctgaggtgggcagccccctgagctctgtgatgagcagcccccccctgcccacagagggccccttcggccaccccaccatcccagaagaaaatggagaaaatgccagcaacagcaccctgcccctgacccagacccccaccggcggccgcagccctgagccctggggccggcctgagttcccctttggaggcctggagaccccagccatgatgttcccccaccagctgcccccctgtgatgtgcctgagagcctgcagcccaaggccggcctgccccggggcctgccccccaccagcctgcaggtgcctgctgcctacccaggcatcctgagcctggaggcccccaagggctgggccggcaagagccctggccggggccctgtgcctgcccccccagctgccaagtggcaggaccggcccatgcagcccctggtgtcccagggccagctgcggcacaccagccagggcatgggcatccctgtgctgccctacccagagcctgctgagcccggggcccacggcggccccagcaccttcggcctggacacccgctggtatgagccccagccccggccccggcccagcccccggcaggccaggagagctgagcccagcctgcaccaggtggtgctgcagcccagccggctgagccccctgacccagagccccctgagcagcaggacaggcagccctgagctggccgcccgggcccggccccggcccggcctgctgcagcaggccgagatgtctgagatcaccctgcagcccccagctgctgtgtccttcagcaggaagagcacccccagcacaggcagccccagccagagcagccgcagcggcagccccagctacagacctgccatgggcttcaccaccctggccaccggctaccccagccccccacctggccctgccccagctggccctggggacagcctggatgtgtttggccagacccccagccccaggagaactggagaggagctgctgcggcctgagaccccaccacccaccctgcccaccagcggcaagctgcagagggacaggcctgccccagccaccagccccccagagcgggccctgagcaagctgtag

SEQ ID NO: 155878 - DNA, 1509 bp, synthetic construct
  misc_feature 1..1509: note = Description of Artificial Sequence: Synthetic coding sequence
  source 1..1509: mol_type = other DNA
atggcctggcccaagctgcctgccccctggctgctgctgtgcacctggctgcctgctggctgcctgagcctgctggtgacagtgcagcacacagagcgctacgtgaccctgtttgccagcatcatcctgaagtgtgactacaccaccagcgcccagctgcaggatgtggtggtgacctggaggttcaagagcttctgcaaggaccccatctttgactactacagcgccagctaccaggccgccctgagcctgggccaggaccccagcaatgactgcaatgacaaccagcgggaggtgagaattgtggcccagaggcggggccagaatgaacctgtgctgggcgtggactaccggcagaggaagatcaccatccagaacagagctgacctggtgatcaatgaggtgatgtggtgggaccacggcgtgtactactgcaccatcgaggcccctggggacaccagcggggaccctgacaaggaggtgaagctgattgtgctgcactggctgaccgtcatcttcatcatcctgggcgccctgctgctgctgctgctgattggagtgtgctggtgccagtgctgcccccagtactgctgctgctacatccgctgcccctgctgcccagcccactgctgctgcccagaggaggacctgagcctgcccagcagcctgccccagatgcccatgacccagaccaccaaccagccccccatcgccaatggagtgctggagtacctggagaaggagctgaggaacctgaacctggcccagcccctgcccccagacctgaagggccgcttcggccacccctgcagcatgctgagcagcctgggcagcgaggtggtggagcggcgcatcatccacctgcccccactcatccgggacctgagcagcagcaggaggaccagtgacagcctgcaccagcagtggctgacccccatccccagccggccctgggacctgcgggagggccgcagccaccaccactacccagacttccaccaggagctgcaggaccggggccccaagtcctgggccctggagcggcgggagctggaccccagctggagcggccgccacaggagcagccggctgaatggcagccccatccactggagcgaccgggacagcctgagtgatgtgcccagcagcagcgaggcccgctggaggcccagccacccccccttccgcagccgctgccaggagcggccccggcggcccagcccccgggagagcacccagagacatggaagaagaagaagacacaggagctacagcccccccctgcccagcggcctgagctcctggagcagcgaggaggacaaggagcggcagccccagagctggagggcccaccggcggggcagccacagcccccactggccagaggagaagcccccatcctaccgcagcctggacatcaccccaggcaagaacagcaggaagaagggctctgtggagaggagaagtgagaaggacagcagccacagcggccgctctgtggtgatctag

SEQ ID NO: 155879 - DNA, 1641 bp, synthetic construct
  misc_feature 1..1641: note = Description of Artificial Sequence: Synthetic coding sequence
  source 1..1641: mol_type = other DNA
atggcctggcccaagctgcctgccccctggctgctgctgtgcacctggctgcctgctggctgcctgagcctgctggtgacagtgcagcacacagagcgctacgtgaccctgtttgccagcatcatcctgaagtgtgactacaccaccagcgcccagctgcaggatgtggtggtgacctggaggttcaagagcttctgcaaggaccccatctttgactactacagcgccagctaccaggccgccctgagcctgggccaggaccccagcaatgactgcaatgacaaccagcgggaggtgagaattgtggcccagaggcggggccagaatgaacctgtgctgggcgtggactaccggcagaggaagatcaccatccagaacagagctgacctggtgatcaatgaggtgatgtggtgggaccacggcgtgtactactgcaccatcgaggcccctggggacaccagcggggaccctgacaaggaggtgaagctgattgtgctgcactggctgaccgtcatcttcatcatcctgggcgccctgctgctgctgctgctgattggagtgtgctggtgccagtgctgcccccagtactgctgctgctacatccgctgcccctgctgcccagcccactgctgctgcccagaggaggccctggcccggcaccgctacatgaagcaggcccaggccctgggcccccagatgatgggcaagcccctgtactggggcgctgacaggagcagccaggtgagcagctaccccatgcaccccctgctgcagagggacctgagcctgcccagcagcctgccccagatgcccatgacccagaccaccaaccagccccccatcgccaatggagtgctggagtacctggagaaggagctgaggaacctgaacctggcccagcccctgcccccagacctgaagggccgcttcggccacccctgcagcatgctgagcagcctgggcagcgaggtggtggagcggcgcatcatccacctgcccccactcatccgggacctgagcagcagcaggaggaccagtgacagcctgcaccagcagtggctgacccccatccccagccggccctgggacctgcgggagggccgcagccaccaccactacccagacttccaccaggagctgcaggaccggggccccaagtcctgggccctggagcggcgggagctggaccccagctggagcggccgccacaggagcagccggctgaatggcagccccatccactggagcgaccgggacagcctgagtgatgtgcccagcagcagcgaggcccgctggaggcccagccacccccccttccgcagccgctgccaggagcggccccggcggcccagcccccgggagagcacccagagacatggaagaagaagaagacacaggagctacagcccccccctgcccagcggcctgagctcctggagcagcgaggaggacaaggagcggcagccccagagctggagggcccaccggcggggcagccacagcccccactggccagaggagaagcccccatcctaccgcagcctggacatcaccccaggcaagaacagcaggaagaagggctctgtggagaggagaagtgagaaggacagcagccacagcggccgctctgtggtgatctag

SEQ ID NO: 155880 - DNA, 639 bp, synthetic construct
  misc_feature 1..639: note = Description of Artificial Sequence: Synthetic coding sequence
  source 1..639: mol_type = other DNA
atggcctggcccaagctgcctgccccctggctgctgctgtgcacctggctgcctgctggctgcctgagcctgctggtgacagtgcagcacacagagcgctacgtgaccctgtttgccagcatcatcctgaagtgtgactacaccaccagcgcccagctgcaggatgtggtggtgacctggaggttcaagagcttctgcaaggaccccatctttgactactacagcgccagctaccaggccgccctgagcctgggccaggaccccagcaatgactgctgctgctgcccagaggaggccctggcccggcaccgctacatgaagcaggcccaggccctgggcccccagatgatgggcaagcccctgtactggggcgctgacaggagcagccaggtgtcctcctaccccatgcaccccctgctgcagagggacctgagcctgcccagcagcctgccccagatgcccatgacccagaccaccaaccagccccccatcgccaacggggtgctggagtacctggagaaggagctgaggaacctgaacctggcccagcccctgcccccagacctgaagggccgcttcggccacccctgcagcatgctgagcagcctgggcagcgagaaccagatcgaggagttctag

SEQ ID NO: 155881 - DNA, 1374 bp, synthetic construct
  misc_feature 1..1374: note = Description of Artificial Sequence: Synthetic coding sequence
  source 1..1374: mol_type = other DNA
atggcctggcccaagctgcctgccccctggctgctgctgtgcacctggctgcctgctggctgcctgagcctgctggtgacagtgcagcacacagagcgctacgtgaccctgtttgccagcatcatcctgaagtgtgactacaccaccagcgcccagctgcaggatgtggtggtgacctggaggttcaagagcttctgcaaggaccccatctttgactactacagcgccagctaccaggccgccctgagcctgggccaggaccccagcaatgactgcaatgacaaccagcgggaggtgagaattgtggcccagaggcggggccagaatgaacctgtgctgggcgtggactaccggcagaggaagatcaccatccagaaccccctggcccggcaccgctacatgaagcaggcccaggccctgggcccccagatgatgggcaagcccctgtactggggcgctgacaggagcagccaggtgtcctcctaccccatgcaccccctgctgcagagggacctgagcctgcccagcagcctgccccagatgcccatgacccagaccaccaaccagccccccatcgccaacggggtgctggagtacctggagaaggagctgaggaacctgaacctggcccagcccctgcccccagacctgaagggccgcttcggccacccctgcagcatgctgagcagcctgggcagcgaggtggtggagcggcgcatcatccacctgcccccactcatccgggacctgagcagcagcaggaggaccagtgacagcctgcaccagcagtggctgacccccatccccagccggccctgggacctgcgggagggccgcagccaccaccactacccagacttccaccaggagctgcaggaccggggccccaagtcctgggccctggagcggcgggagctggaccccagctggagcggccgccacaggagcagccggctgaatggcagccccatccactggagcgaccgggacagcctgagtgatgtgcccagcagcagcgaggcccgctggaggcccagccacccccccttccgcagccgctgccaggagcggccccggcggcccagcccccgggagagcacccagagacatggaagaagaagaagacacaggagctacagcccccccctgcccagcggcctgagctcctggagcagcgaggaggacaaggagcggcagccccagagctggagggcccacagaagaggcagccacagcccccactggccagaggagaagccacccagctaccgcagcctggacatcacccctgggaagaacagcaggaagaagggctctgtggagcggcgctctgagaaggacagcagccacagcggccgctctgtggtgatctag

SEQ ID NO: 155882 - DNA, 1545 bp, synthetic construct
  misc_feature 1..1545: note = Description of Artificial Sequence: Synthetic coding sequence
  source 1..1545: mol_type = other DNA
atggccggcaacatcttctgcccctttgccctcttcttcctgcccatgagccgggtgggccacctgcagcacttcctgctgctgctggccctgggctgcctgagcctgctggtgacagtgcagcacacagagcgctacgtgaccctgtttgccagcatcatcctgaagtgtgactacaccaccagcgcccagctgcaggatgtggtggtgacctggaggttcaagagcttctgcaaggaccccatctttgactactacagcgccagctaccaggccgccctgagcctgggccaggaccccagcaatgactgcaatgacaaccagcgggaggtgagaattgtggcccagaggcggggccagaatgaacctgtgctgggcgtggactaccggcagaggaagatcaccatccagaacagagctgacctggtgatcaatgaggtgatgtggtgggaccacggcgtgtactactgcaccatcgaggcccctggggacaccagcggggaccctgacaaggaggtgaagctgattgtgctgcactggctgaccgtcatcttcatcatcctgggcgccctgctgctgctgctgctgattggagtgtgctggtgccagtgctgcccccagtactgctgctgctacatccgctgcccctgctgcccagcccactgctgctgcccagaggaggacctgagcctgcccagcagcctgccccagatgcccatgacccagaccaccaaccagccccccatcgccaatggagtgctggagtacctggagaaggagctgaggaacctgaacctggcccagcccctgcccccagacctgaagggccgcttcggccacccctgcagcatgctgagcagcctgggcagcgaggtggtggagcggcgcatcatccacctgcccccactcatccgggacctgagcagcagcaggaggaccagtgacagcctgcaccagcagtggctgacccccatccccagccggccctgggacctgcgggagggccgcagccaccaccactacccagacttccaccaggagctgcaggaccggggccccaagtcctgggccctggagcggcgggagctggaccccagctggagcggccgccacaggagcagccggctgaatggcagccccatccactggagcgaccgggacagcctgagtgatgtgcccagcagcagcgaggcccgctggaggcccagccacccccccttccgcagccgctgccaggagcggccccggcggcccagcccccgggagagcacccagagacatggaagaagaagaagacacaggagctacagcccccccctgcccagcggcctgagctcctggagcagcgaggaggacaaggagcggcagccccagagctggagggcccaccggcggggcagccacagcccccactggccagaggagaagcccccatcctaccgcagcctggacatcaccccaggcaagaacagcaggaagaagggctctgtggagaggagaagtgagaaggacagcagccacagcggccgctctgtggtgatctag

SEQ ID NO: 155883 - DNA, 1800 bp, synthetic construct
  misc_feature 1..1800: note = Description of Artificial Sequence: Synthetic coding sequence
  source 1..1800: mol_type = other DNA
atggagggccccctgaccccaccacccctgcagggcggcggcgctgctgctgtgcctgagcccggggcccggcagcaccctggccatgaaacagctgcccagcgctacagcgcccggctgctgcaggccggctatgagcctgagagcccccggctggacctggccacccaccccaccacccccaggtctgagctgagctctgtggtgctgctggccggcgtgggcgtgcagatggaccggctgcggcgggcctccatggctgactacctgatcagcggcggcaccggctacgtgcctgaagatggcctgacagcccagcagctgtttgccagcgcagatggcctgacctacaatgacttcctgatcctgcccggcttcatcgacttcatcgcagatgaggtggacctgaccagcgccctgaccaggaagatcaccctgaagacccccctcatcagcagccccatggacacagtgacagaagctgacatggccatcgccatggccctgatgggcggcatcggcttcatccaccacaactgcaccccagagttccaggccaatgaggtgaggaaggtgaagaagtttgagcagggcttcatcacagatcctgtggtgctgagccccagccacacagtgggagatgtgctggaggccaagatgagacatggcttcagcggcatccccatcacagagaccggcaccatgggcagcaagctggtgggcatcgtgaccagccgggacatcgacttcctggccgagaaggaccacaccaccctgctgtctgaggtgatgaccccccgcatcgagctggtggtggccccagctggggtgaccctgaaggaggccaatgagatcctgcagaggagcaagaagggcaagctgcccatcgtgaatgactgtgatgagctggtggccatcatcgccaggacagacctgaagaagaacagagactaccccctggccagcaaggacagccagaagcagctgctgtgtggggctgctgtgggcaccagagaagatgacaagtaccgcctggacctgctgacccaggccggcgtggatgtgattgtgctggacagcagccagggcaacagcgtgtaccagatcgccatggtgcactacatcaagcagaagtacccccacctgcaggtgattggaggaaatgtggtgacagctgcccaggccaagaacctgattgatgctggggtggatggcctgcgggtgggcatgggctgcggcagcatctgcatcacccaggaggtgatggcctgtggccggccccagggcacagctgtgtacaaggtggccgagtatgcccggcgcttcggcgtgcccatcatcgcagatggcggcatccagacagtgggccacgtggtgaaggccctggccctgggcgccagcacagtgatgatgggcagcctgctggccgccaccacagaggcccctggagagtacttcttcagtgatggagtgcggctgaagaagtaccggggcatgggcagcctggatgccatggagaagagcagcagcagccagaagcgctacttcagcgagggggacaaggtgaagatcgcccagggcgtgtctggcagcatccaggacaagggcagcatccagaagtttgtgccctacctgattgctggcatccagcacggctgccaggacatcggggcccggagcctgtctgtgctgcgctccatgatgtacagcggggagctgaagtttgagaagaggaccatgtctgcccagatcgagggcggcgtgcacggcctgcacagctatgagaagaggctgtactag

SEQ ID NO: 155884 - DNA, 1470 bp, synthetic construct
  misc_feature 1..1470: note = Description of Artificial Sequence: Synthetic coding sequence
  source 1..1470: mol_type = other DNA
atggctgactacctgatcagcggcggcaccggctacgtgcctgaagatggcctgacagcccagcagctgtttgccagcgcagatggcctgacctacaatgacttcctgatcctgcccggcttcatcgacttcatcgcagatgaggtggacctgaccagcgccctgaccaggaagatcaccctgaagacccccctcatcagcagccccatggacacagtgacagaggccgacatggccatcgccatggccaagtttgagcagggcttcatcacagatcctgtggtgctgagccccagccacacagtgggagatgtgctggaggccaagatgagacatggcttcagcggcatccccatcacagagaccggcaccatgggcagcaagctggtgggcatcgtgaccagccgggacatcgacttcctggccgagaaggaccacaccaccctgctgtctgaggtgatgaccccccgcatcgagctggtggtggccccagctggggtgaccctgaaggaggccaatgagatcctgcagaggagcaagaagggcaagctgcccatcgtgaatgactgtgatgagctggtggccatcatcgccaggacagacctgaagaagaacagagactaccccctggccagcaaggacagccagaagcagctgctgtgtggggctgctgtgggcaccagagaagatgacaagtaccgcctggacctgctgacccaggccggcgtggatgtgattgtgctggacagcagccagggcaacagcgtgtaccagatcgccatggtgcactacatcaagcagaagtacccccacctgcaggtgattggaggaaatgtggtgacagctgcccaggccaagaacctgattgatgctggggtggatggcctgcgggtgggcatgggctgcggcagcatctgcatcacccaggaggtgatggcctgtggccggccccagggcacagctgtgtacaaggtggccgagtatgcccggcgcttcggcgtgcccatcatcgcagatggcggcatccagacagtgggccacgtggtgaaggccctggccctgggcgccagcacagtgatgatgggcagcctgctggccgccaccacagaggcccctggagagtacttcttcagtgatggagtgcggctgaagaagtaccggggcatgggcagcctggatgccatggagaagagcagcagcagccagaagcgctacttcagcgagggggacaaggtgaagatcgcccagggcgtgtctggcagcatccaggacaagggcagcatccagaagtttgtgccctacctgattgctggcatccagcacggctgccaggacatcggggcccggagcctgtctgtgctgcgctccatgatgtacagcggggagctgaagtttgagaagaggaccatgtctgcccagatcgagggcggcgtgcacggcctgcacagctatgagaagaggctgtactag

SEQ ID NO: 155885 - DNA, 1692 bp, synthetic construct
  misc_feature 1..1692: note = Description of Artificial Sequence: Synthetic coding sequence
  source 1..1692: mol_type = other DNA
atggagggccccctgaccccaccacccctgcagggcggcggcgctgctgctgtgcctgagcccggggcccggcagcaccctggccatgaaacagctgcccagcgctacagcgcccggctgctgcaggccggctatgagcctgagagcatggctgactacctgatcagcggcggcaccggctacgtgcctgaagatggcctgacagcccagcagctgtttgccagcgcagatggcctgacctacaatgacttcctgatcctgcccggcttcatcgacttcatcgcagatgaggtggacctgaccagcgccctgaccaggaagatcaccctgaagacccccctcatcagcagccccatggacacagtgacagaagctgacatggccatcgccatggccctgatgggcggcatcggcttcatccaccacaactgcaccccagagttccaggccaatgaggtgaggaaggtgaagaagtttgagcagggcttcatcacagatcctgtggtgctgagccccagccacacagtgggagatgtgctggaggccaagatgagacatggcttcagcggcatccccatcacagagaccggcaccatgggcagcaagctggtgggcatcgtgaccagccgggacatcgacttcctggccgagaaggaccacaccaccctgctgtctgaggtgatgaccccccgcatcgagctggtggtggccccagctggggtgaccctgaaggaggccaatgagatcctgcagaggagcaagaagggcaagctgcccatcgtgaatgactgtgatgagctggtggccatcatcgccaggacagacctgaagaagaacagagactaccccctggccagcaaggacagccagaagcagctgctgtgtggggctgctgtgggcaccagagaagatgacaagtaccgcctggacctgctgacccaggccggcgtggatgtgattgtgctggacagcagccagggcaacagcgtgtaccagatcgccatggtgcactacatcaagcagaagtacccccacctgcaggtgattggaggaaatgtggtgacagctgcccaggccaagaacctgattgatgctggggtggatggcctgcgggtgggcatgggctgcggcagcatctgcatcacccaggaggtgatggcctgtggccggccccagggcacagctgtgtacaaggtggccgagtatgcccggcgcttcggcgtgcccatcatcgcagatggcggcatccagacagtgggccacgtggtgaaggccctggccctgggcgccagcacagtgatgatgggcagcctgctggccgccaccacagaggcccctggagagtacttcttcagtgatggagtgcggctgaagaagtaccggggcatgggcagcctggatgccatggagaagagcagcagcagccagaagcgctacttcagcgagggggacaaggtgaagatcgcccagggcgtgtctggcagcatccaggacaagggcagcatccagaagtttgtgccctacctgattgctggcatccagcacggctgccaggacatcggggcccggagcctgtctgtgctgcgctccatgatgtacagcggggagctgaagtttgagaagaggaccatgtctgcccagatcgagggcggcgtgcacggcctgcacagctatgagaagaggctgtactag

SEQ ID NO: 155886 - DNA, 1770 bp, synthetic construct
  misc_feature 1..1770: note = Description of Artificial Sequence: Synthetic coding sequence
  source 1..1770: mol_type = other DNA
atggagggccccctgaccccaccacccctgcagggcggcggcgctgctgctgtgcctgagcccggggcccggcagcaccctggccatgaaacagctgcccagcgctacagcgcccggctgctgcaggccggctatgagcctgagagctgcttcctgctggagctgagctctgtggtgctgctggccggcgtgggcgtgcagatggaccggctgcggcgggcctccatggctgactacctgatcagcggcggcaccggctacgtgcctgaagatggcctgacagcccagcagctgtttgccagcgcagatggcctgacctacaatgacttcctgatcctgcccggcttcatcgacttcatcgcagatgaggtggacctgaccagcgccctgaccaggaagatcaccctgaagacccccctcatcagcagccccatggacacagtgacagaagctgacatggccatcgccatggccctgatgggcggcatcggcttcatccaccacaactgcaccccagagttccaggccaatgaggtgaggaaggtgaagaagtttgagcagggcttcatcacagatcctgtggtgctgagccccagccacacagtgggagatgtgctggaggccaagatgagacatggcttcagcggcatccccatcacagagaccggcaccatgggcagcaagctggtgggcatcgtgaccagccgggacatcgacttcctggccgagaaggaccacaccaccctgctgtctgaggtgatgaccccccgcatcgagctggtggtggccccagctggggtgaccctgaaggaggccaatgagatcctgcagaggagcaagaagggcaagctgcccatcgtgaatgactgtgatgagctggtggccatcatcgccaggacagacctgaagaagaacagagactaccccctggccagcaaggacagccagaagcagctgctgtgtggggctgctgtgggcaccagagaagatgacaagtaccgcctggacctgctgacccaggccggcgtggatgtgattgtgctggacagcagccagggcaacagcgtgtaccagatcgccatggtgcactacatcaagcagaagtacccccacctgcaggtgattggaggaaatgtggtgacagctgcccaggccaagaacctgattgatgctggggtggatggcctgcgggtgggcatgggctgcggcagcatctgcatcacccaggaggtgatggcctgtggccggccccagggcacagctgtgtacaaggtggccgagtatgcccggcgcttcggcgtgcccatcatcgcagatggcggcatccagacagtgggccacgtggtgaaggccctggccctgggcgccagcacagtgatgatgggcagcctgctggccgccaccacagaggcccctggagagtacttcttcagtgatggagtgcggctgaagaagtaccggggcatgggcagcctggatgccatggagaagagcagcagcagccagaagcgctacttcagcgagggggacaaggtgaagatcgcccagggcgtgtctggcagcatccaggacaagggcagcatccagaagtttgtgccctacctgattgctggcatccagcacggctgccaggacatcggggcccggagcctgtctgtgctgcgctccatgatgtacagcggggagctgaagtttgagaagaggaccatgtctgcccagatcgagggcggcgtgcacggcctgcacagctatgagaagaggctgtactag

SEQ ID NO: 155887 - DNA, 1593 bp, synthetic construct
  misc_feature 1..1593: note = Description of Artificial Sequence: Synthetic coding sequence
  source 1..1593: mol_type = other DNA
atggagggccccctgaccccaccacccctgcagggcggcggcgctgctgctgtgcctgagcccggggcccggcagcaccctggccatgaaacagctgcccagcgctacagcgcccggctgctgcaggccggctatgagcctgagagtgacttcctgatcctgcccggcttcatcgacttcatcgcagatgaggtggacctgaccagcgccctgaccaggaagatcaccctgaagacccccctcatcagcagccccatggacacagtgacagaggccgacatggccatcgccatggccctgatgggcggcatcggcttcatccaccacaactgcaccccagagttccaggccaatgaggtgaggaaggtgaagaagtttgagcagggcttcatcacagatcctgtggtgctgagccccagccacacagtgggagatgtgctggaggccaagatgagacatggcttcagcggcatccccatcacagaaacaggcaccatgggcagcaagctggtgggcatcgtgaccagccgggacatcgacttcctggccgagaaggaccacaccaccctgctgtctgaggtgatgaccccaagaattgagctggtggtggccccagctggggtgaccctgaaggaggccaatgagatcctgcagaggagcaagaagggcaagctgcccatcgtgaatgactgtgatgagctggtggccatcatcgccaggacagacctgaagaagaacagagactaccccctggccagcaaggacagccagaagcagctgctgtgtggggctgctgtgggcacccgggaggatgacaagtaccgcctggacctgctgacccaggccggcgtggatgtgattgtgctggacagcagccagggcaacagcgtgtaccagatcgccatggtgcactacatcaagcagaagtacccccacctgcaggtgattggaggaaatgtggtgacagctgcccaggccaagaacctgattgatgctggggtggatggcctgcgggtgggcatgggctgcggcagcatctgcatcacccaggaggtgatggcctgtggccggccccagggcacagctgtgtacaaggtggccgagtatgccaggagatttggagtgcccatcatcgcagatggcggcatccagacagtgggccacgtggtgaaggccctggccctgggcgccagcacagtgatgatgggcagcctgctggccgccaccacagaggcccctggagagtacttcttcagtgatggagtgcggctgaagaagtaccggggcatgggcagcctggatgccatggagaagagcagcagcagccagaagcgctacttcagcgagggggacaaggtgaagatcgcccagggcgtgtctggcagcatccaggacaagggcagcatccagaagtttgtgccctacctgattgctggcatccagcacggctgccaggacattggagcccggagcctgtctgtgctgcgctccatgatgtacagcggggagctgaagtttgagaagaggaccatgtctgcccagattgaaggaggagtgcacggcctgcacagctatgagaagaggctgtactag

SEQ ID NO: 155888 - DNA, 1701 bp, synthetic construct
  misc_feature 1..1701: note = Description of Artificial Sequence: Synthetic coding sequence
  source 1..1701: mol_type = other DNA
atggagggccccctgaccccaccacccctgcagggcggcggcgctgctgctgtgcctgagcccggggcccggcagcaccctggccatgaaacagctgcccagcgctacagcgcccggctgctgcaggccggctatgagcctgagagcccccggctggacctggccacccaccccaccacccccaggtctgagctgagctctgtggtgctgctggccggcgtgggcgtgcagatggaccggctgcggcgggccagtgacttcctgatcctgcccggcttcatcgacttcatcgcagatgaggtggacctgaccagcgccctgaccaggaagatcaccctgaagacccccctcatcagcagccccatggacacagtgacagaggccgacatggccatcgccatggccctgatgggcggcatcggcttcatccaccacaactgcaccccagagttccaggccaatgaggtgaggaaggtgaagaagtttgagcagggcttcatcacagatcctgtggtgctgagccccagccacacagtgggagatgtgctggaggccaagatgagacatggcttcagcggcatccccatcacagaaacaggcaccatgggcagcaagctggtgggcatcgtgaccagccgggacatcgacttcctggccgagaaggaccacaccaccctgctgtctgaggtgatgaccccaagaattgagctggtggtggccccagctggggtgaccctgaaggaggccaatgagatcctgcagaggagcaagaagggcaagctgcccatcgtgaatgactgtgatgagctggtggccatcatcgccaggacagacctgaagaagaacagagactaccccctggccagcaaggacagccagaagcagctgctgtgtggggctgctgtgggcacccgggaggatgacaagtaccgcctggacctgctgacccaggccggcgtggatgtgattgtgctggacagcagccagggcaacagcgtgtaccagatcgccatggtgcactacatcaagcagaagtacccccacctgcaggtgattggaggaaatgtggtgacagctgcccaggccaagaacctgattgatgctggggtggatggcctgcgggtgggcatgggctgcggcagcatctgcatcacccaggaggtgatggcctgtggccggccccagggcacagctgtgtacaaggtggccgagtatgccaggagatttggagtgcccatcatcgcagatggcggcatccagacagtgggccacgtggtgaaggccctggccctgggcgccagcacagtgatgatgggcagcctgctggccgccaccacagaggcccctggagagtacttcttcagtgatggagtgcggctgaagaagtaccggggcatgggcagcctggatgccatggagaagagcagcagcagccagaagcgctacttcagcgagggggacaaggtgaagatcgcccagggcgtgtctggcagcatccaggacaagggcagcatccagaagtttgtgccctacctgattgctggcatccagcacggctgccaggacattggagcccggagcctgtctgtgctgcgctccatgatgtacagcggggagctgaagtttgagaagaggaccatgtctgcccagattgaaggaggagtgcacggcctgcacagctatgagaagaggctgtactag

SEQ ID NO: 155889 - DNA, 1530 bp, synthetic construct
  misc_feature 1..1530: note = Description of Artificial Sequence: Synthetic coding sequence
  source 1..1530: mol_type = other DNA
atggctgactacctgatcagcggcggcaccggctacgtgcctgaagatggcctgacagcccagcagctgtttgccagcgcagatggcctgacctacaatgacttcctgatcctgcccggcttcatcgacttcatcgcagatgaggtggacctgaccagcgccctgaccaggaagatcaccctgaagacccccctcatcagcagccccatggacacagtgacagaggccgacatggccatcgccatggccctgatgggcggcatcggcttcatccaccacaactgcaccccagagttccaggccaatgagaagtttgagcagggcttcatcacagatcctgtggtgctgagccccagccacacagtgggagatgtgctggaggccaagatgagacatggcttcagcggcatccccatcacagagaccggcaccatgggcagcaagctggtgggcatcgtgaccagccgggacatcgacttcctggccgagaaggaccacaccaccctgctgtctgaggtgatgaccccccgcatcgagctggtggtggccccagctggggtgaccctgaaggaggccaatgagatcctgcagaggagcaagaagggcaagctgcccatcgtgaatgactgtgatgagctggtggccatcatcgccaggacagacctgaagaagaacagagactaccccctggccagcaaggacagccagaagcagctgctgtgtggggctgctgtgggcaccagagaagatgacaagtaccgcctggacctgctgacccaggccggcgtggatgtgattgtgctggacagcagccagggcaacagcgtgtaccagatcgccatggtgcactacatcaagcagaagtacccccacctgcaggtgattggaggaaatgtggtgacagctgcccaggccaagaacctgattgatgctggggtggatggcctgcgggtgggcatgggctgcggcagcatctgcatcacccaggaggtgatggcctgtggccggccccagggcacagctgtgtacaaggtggccgagtatgcccggcgcttcggcgtgcccatcatcgcagatggcggcatccagacagtgggccacgtggtgaaggccctggccctgggcgccagcacagtgatgatgggcagcctgctggccgccaccacagaggcccctggagagtacttcttcagtgatggagtgcggctgaagaagtaccggggcatgggcagcctggatgccatggagaagagcagcagcagccagaagcgctacttcagcgagggggacaaggtgaagatcgcccagggcgtgtctggcagcatccaggacaagggcagcatccagaagtttgtgccctacctgattgctggcatccagcacggctgccaggacatcggggcccggagcctgtctgtgctgcgctccatgatgtacagcggggagctgaagtttgagaagaggaccatgtctgcccagatcgagggcggcgtgcacggcctgcacagctatgagaagaggctgtactag

SEQ ID NO: 155890 - DNA, 1470 bp, synthetic construct; identical to SEQ ID NO: 155884
  misc_feature 1..1470: note = Description of Artificial Sequence: Synthetic coding sequence
  source 1..1470: mol_type = other DNA

SEQ ID NO: 155891 - DNA, 1545 bp, synthetic construct
  misc_feature 1..1545: note = Description of Artificial Sequence: Synthetic coding sequence
  source 1..1545: mol_type = other DNA
atggctgactacctgatcagcggcggcaccagctatgtgcctgatgatggcctgacagcccagcagctgttcaactgtggagatggcctgacctacaatgacttcctgatcctgcccggctacatcgacttcaccgctgaccaggtggacctgaccagcgccctgaccaagaagatcaccctgaagacccccctggtgagcagccccatggacacagtgacagaggccggcatggccatcgccatggccctgactggaggcatcggcttcatccaccacaactgcaccccagagttccaggccaatgaggtgaggaaggtgaagaagtatgagcagggcttcatcacagatcctgtggtgctgagccccaaggacagagtgagagatgtgtttgaggccaaggcccggcacggcttctgtggcatccccatcacagacaccggccgcatgggcagccggctggtgggcatcatcagcagccgggacatcgacttcctgaaggaggaggagcatgactgcttcctggaggagatcatgaccaagcgggaggacctggtggtggccccagctggcatcaccctgaaggaggccaatgagatcctgcagaggagcaagaagggcaagctgcccatcgtgaatgaagatgatgagctggtggccatcatcgccaggacagacctgaagaagaacagagactaccccctggccagcaaggatgccaagaagcagctgctgtgtggggccgccatcggcacccatgaagatgacaagtaccgcctggacctgctggcccaggccggcgtggatgtggtggtgctggacagcagccagggcaacagcatcttccagatcaacatgatcaagtacatcaaggacaagtaccccaacctgcaggtgattggaggaaatgtggtgacagctgcccaggccaagaacctgattgatgctggggtggatgccctgcgggtgggcatgggcagcggcagcatctgcatcacccaggaggtgctggcctgtggccggccccaggccacagctgtgtacaaggtgtctgaatatgccaggagatttggagtgcctgtgattgctgatggcggcatccagaatgtgggccacatcgccaaggccctggccctgggcgccagcacagtgatgatgggcagcctgctggccgccaccacagaggcccctggagagtacttcttcagtgatggcatccggctgaagaagtaccggggcatgggcagcctggatgccatggacaagcacctgagcagccagaaccgctacttcagcgaggccgacaagatcaaggtggcccagggcgtgtctggagctgtgcaggacaagggcagcatccacaagtttgtgccctacctgattgctggcatccagcacagctgccaggacattggagccaagagcctgacccaggtgcgggccatgatgtacagcggggagctgaagtttgagaagaggaccagcagcgcccaggtggagggcggcgtgcacagcctgcacagctatgagaagaggctcttctag

SEQ ID NO: 155892 - DNA, 1074 bp, synthetic construct
  misc_feature 1..1074: note = Description of Artificial Sequence: Synthetic coding sequence
  source 1..1074: mol_type = other DNA
atggctgactacctgatcagcggcggcaccagctatgtgcctgatgatggcctgacagcccagcagctgttcaactgtggagatggcctgacctacaatgacttcctgatcctgcccggctacatcgacttcaccgctgaccaggtggacctgaccagcgccctgaccaagaagatcaccctgaagacccccctggtgagcagccccatggacacagtgacagaggccggcatggccatcgccatggccctgactggaggcatcggcttcatccaccacaactgcaccccagagttccaggccaatgaggtgaggaaggtgaagaagtatgagcagggcttcatcacagatcctgtggtgctgagccccaaggacagagtgagagatgtgtttgaggccaaggcccggcacggcttctgtggcatccccatcacagacaccggccgcatgggcagccggctggtgggcatcatcagcagccgggacatcgacttcctgaaggaggaggagcatgactgcttcctggaggagatcatgaccaagcgggaggacctggtggtggccccagctggcatcaccctgaaggaggccaatgagatcctgcagaggagcaagaagggcaagctgcccatcgtgaatgaagatgatgagctggtggccatcatcgccaggacagacctgaagaagaacagagactaccccctggccagcaaggatgccaagaagcagctgctgtgtggggccgccatcggcacccatgaagatgacaagtaccgcctggacctgctggcccaggccggcgtggatgtggtggtgctggacagcagccagggcaacagcatcttccagatcaacatgatcaagtacatcaaggacaagtaccccaacctgcaggtgattggaggaaatgtggtgacagctgcccaggccaagaacctgattgatgctggggtggatgccctgcgggtgggcatgggcagcggcagcatctgcatcacccaggaggtgctggcctgtggccggccccaggccacagctgtgtgcacccagaagcagcacccccacttccagtag

SEQ ID NO: 155893 - DNA, 501 bp, synthetic construct
  misc_feature 1..501: note = Description of Artificial Sequence: Synthetic coding sequence
  source 1..501: mol_type = other DNA
atgctgcggggcgtgctgggcaagaccttccggctggtgggctacaccatccagtatggctgcatcgcccactgtgcctttgaatatgtgggcggcgtggtgatgtgcagcggccccagcatggagcccaccatccagaacagcgacatcgtgtttgctgagaacctgagccgccacttctacggcatccagagaggagacatcgtcatcgccaagagccccagcgaccccaagagcaacatctgcaagagggtcatcggcctggagggggacaagatcctgaccaccagccccagcgacttcttcaagagccacagctatgtgcccatgggccacgtgtggctggagggggacaacctgcagaacagcacagacagccgctgctacggccccatcccctacggcctcatccggggccgcatcttcttcaagatctggcccctgagtgactttggcttcctgcgggccagccccaacggccaccgcttcagtgatgactag

SEQ ID NO: 155894 - DNA, 324 bp, synthetic construct
  misc_feature 1..324: note = Description of Artificial Sequence: Synthetic coding sequence
  source 1..324: mol_type = other DNA
atgctgcggggcgtgctgggcaagaccttccggctggtgggctacaccatccagtatggctgcatcgcccactgtgcctttgaatatgtgggcggcgtggtgatgtgcagcggccccagcatggagcccaccatccagaacagcgacatcgtgtttgctgagaacctgagccgccacttctacggcatccagagaggagacatcgtcatcgccaagagccccagcgaccccaagagcaacatctgcaagagggtcatcggcctggagggggacaagatcctgaccaccagccccagcgacttcttcaagagccacagctactag

SEQ ID NO: 155895 - DNA, 291 bp, synthetic construct
  misc_feature 1..291: note = Description of Artificial Sequence: Synthetic coding sequence
  source 1..291: mol_type = other DNA
atgctgcggggcgtgctgggcaagaccttccggctggtgggctacaccatccagtatggctgcatcgcccactgtgcctttgaatatgtgggcggcgtggtgatgtgcagcggccccagcatggagcccaccatccagaacagcgacatcgtgtttgctgagaacctgagccgccacttctacggcatccagagaggagacatcgtcatcgccaagagccccagcgaccccaagagcaacatctgcaagagggtcatcggcctggagggggacaagatcctgaccacctag

SEQ ID NO: 155896 - DNA, 501 bp, synthetic construct; identical to SEQ ID NO: 155893
  misc_feature 1..501: note = Description of Artificial Sequence: Synthetic coding sequence
  source 1..501: mol_type = other DNA

SEQ ID NO: 155897 - DNA, 528 bp, synthetic construct
  misc_feature 1..528: note = Description of Artificial Sequence: Synthetic coding sequence
  source 1..528: mol_type = other DNA
atggcccagagccagggctgggtgaagcgctacatcaaggccttctgcaagggcttctttgtggccgtgcctgtggccgtgaccttcctggacagagtggcctgtgtggcccgggtggagggcgcctccatgcagcccagcctgaaccctgggggcagccagagcagtgatgtggtgctgctgaaccactggaaggtgaggaactttgaggtgcacagaggagacatcgtgtccctggtgagccccaagaaccctgagcagaagatcatcaagagggtcatcgccctggagggggacatcgtgaggaccatcggccacaagaaccgctacgtgaaggtgccccggggccacatctgggtggagggggaccaccacggccacagctttgacagcaacagctttggacctgtgtccctgggcctgctgcacgcccacgccacccacatcctgtggcccccagagcgctggcagaagctggagagcgtgctgcccccagagcggctgcctgtgcagcgggaggaggagtag

SEQ ID NO: 155898 - DNA, 528 bp, synthetic construct; identical to SEQ ID NO: 155897
  misc_feature 1..528: note = Description of Artificial Sequence: Synthetic coding sequence
  source 1..528: mol_type = other DNA

SEQ ID NO: 155899 - DNA, 528 bp, synthetic construct; identical to SEQ ID NO: 155897
  misc_feature 1..528: note = Description of Artificial Sequence: Synthetic coding sequence
  source 1..528: mol_type = other DNA

SEQ ID NO: 155900 - DNA, 333 bp, synthetic construct
  misc_feature 1..333: note = Description of Artificial Sequence: Synthetic coding sequence
  source 1..333: mol_type = other DNA
atggcccagagccagggctgggtgaagcgctacatcaaggccttctgcaagggcttctttgtggccgtgcctgtggccgtgaccttcctggacagagtggcctgtgtggcccgggtggagggcgcctccatgcagcccagcctgaaccctgggggcagccagagcagtgatgtggtgctgctgaaccactggaaggtgaggaactttgaggtgcacagaggagacatcgtgtccctggtgagccccaagaaccctgagcagaagatcatcaagagggtcatcgccctggagggggacatcgtgagagatggcaggaagctgaagaggatctag

SEQ ID NO: 155901 - DNA, 240 bp, synthetic construct
  misc_feature 1..240: note = Description of Artificial Sequence: Synthetic coding sequence
  source 1..240: mol_type = other DNA
atggcccagagccagggctgggtgaagcgctacatcaaggccttctgcaagggcttctttgtggccgtgcctgtggccgtgaccttcctggacagagtggcctgtgtggcccgggtggagggcgcctccatgcagcccagcctgaaccctgggggcagccagagcagtgatgtggtgctgctgaaccactggaaggtgaggaactttgaggtgcacagaggagacatcgtgtccctgtag

SEQ ID NO: 155902 - DNA, 528 bp, synthetic construct; identical to SEQ ID NO: 155897
  misc_feature 1..528: note = Description of Artificial Sequence: Synthetic coding sequence
  source 1..528: mol_type = other DNA

SEQ ID NO: 155903 - DNA, 555 bp, synthetic construct
  misc_feature 1..555: note = Description of Artificial Sequence: Synthetic coding sequence
  source 1..555: mol_type = other DNA
atggtgaggaagctgaagttccacgagcagaagctgctgaagcaggtggacttcctgaactgggaggtgacagaccacaacctgcacgagctgcgggtgctgcggcgctaccgcctgcagaggcgggaggactacacccgctacaaccagctgagcagagctgtgcgggagctggcccggcggctgcgggacctgcctgagcgggaccagttccgggtgcgggccagcgctgccctgctggacaagctgtatgccctgggcctggtgcccacccggggcagcctggagctgtgtgactttgtgacagccagcagcttctgcagaagaaggctgcccaccgtgctgctgaagctgaggatggcccagcacctgcaggccgctgtggcctttgtggagcagggccacgtgcgggtgggcccagatgtggtgacagatcctgccttcctggtgaccaggtccatggaggactttgtgacctgggtggacagcagcaagatcaagagacatgtgctggagtacaatgaggagagagatgactttgacctggaggcctag

SEQ ID NO: 155904 - DNA, 555 bp, synthetic construct; identical to SEQ ID NO: 155903
  misc_feature 1..555: note = Description of Artificial Sequence: Synthetic coding sequence
  source 1..555: mol_type = other DNA

SEQ ID NO: 155905 - DNA, 96 bp, synthetic construct
  misc_feature 1..96: note = Description of Artificial Sequence: Synthetic coding sequence
  source 1..96: mol_type = other DNA
atggaggactttgtgacctgggtggacagcagcaagatcaagagacatgtgctggagtacaatgaggagagagatgactttgacctggaggcctag

SEQ ID NO: 155906 - DNA, 876 bp, synthetic construct
  misc_feature 1..876: note = Description of Artificial Sequence: Synthetic coding sequence
  source 1..876: mol_type = other DNA
atgctgcggcgggaggcccggctgcggcgggagtacctgtacaggaaggcccgggaggaggcccagaggtctgcccaggagaggaaggagcggctgcggcgggccctggaggagaacagactcatccccacagagctgcggcgggaggccctggccctgcagggcagcctggagtttgatgatgctggaggagagggcgtgaccagccacgtggatgatgagtaccgctgggccggcgtggaggaccccaaggtgatgatcaccaccagccgggaccccagcagccggctgaagatgtttgccaaggagctgaagctggtgtttcctggggcccagaggatgaacagaggaagacatgaggtgggcgccctggtgcgggcctgcaaggccaatggagtgacagacctgctggtggtgcatgagcaccggggcacccctgtgggcctcatcgtgagccacctgcccttcggccccacagcctacttcaccctgtgcaatgtggtgatgagacatgacatcccagacctgggcaccatgtctgaggccaagccccacctgatcacccacggcttcagcagccggctgggcaagagggtgtctgacatcctgcgctacctgtttcctgtgcccaaggatgacagccacagggtcatcacctttgccaaccaggatgactacatctccttccgccaccacgtgtacaagaagacagaccacagaaatgtggagctgacagaggtgggccccaggtttgagctgaagctgtacatgatccggctgggcaccctggagcaggaggccacagcagatgtggagtggcgctggcacccctacaccaacacagccaggaagagggtcttcctgagcacagaatag

SEQ ID NO: 155907 - DNA, 2928 bp, synthetic construct
  misc_feature 1..2928: note = Description of Artificial Sequence: Synthetic coding sequence
  source 1..2928: mol_type = other DNA
atggacctgaacagcgccagcacagtggtgctgcaggtgctgacccaggccaccagccaggacacagctgtgctgaagccagctgaggagcagctgaagcagtgggagacccagcccggcttctacagcgtgctgctgaacatcttcaccaaccacaccctggacatcaacgtgcgctggctggccgtgctgtacttcaagcacggcatcgaccgctactggaggagagtggccccccacgccctgtctgaggaggagaagaccaccctgcgggccggcctcatcaccaacttcaatgagcccatcaaccagatcgccacccagattgctgtgctgattgccaaggtggcccggctggactgcccccggcagtggccagagctgatccccaccctgattgaatctgtgaaggtgcaggatgacctgcggcagcaccgggccctgctgaccttctaccacgtgaccaagaccctggccagcaagaggctggccgctgacaggaagctgttctatgacctggccagcggcatctacaactttgcctgcagcctgtggaaccaccacacagacaccttcctgcaggaggtgtcctctggaaatgaggccgccatcctgagcagcctggagaggaccctgctgagcctgaaggtgctgaggaagctgactgtgaatggatttgtggagccccacaagaacatggaggtgatgggcttcctgcacggcatctttgagcggctgaagcagttcctggagtgcagccgcagcatcggcacagacaacgtgtgccgggaccggctggagaagaccatcatcctcttcaccaaggtgctgctggacttcctggaccagcaccccttctccttcacccccctcatccagaggagcctggagttctctgtgtcctatgtgttcacagaggtgggggagggcgtgacctttgagcgcttcatcgtgcagtgcatgaacctgatcaagatgattgtgaagaactatgcctacaagcccagcaagaactttgaggacagcagccctgagaccctggaggcccacaagatcaagatggccttcttcacctaccccaccctgacagagatctgccggcggctggtgagccactacttcctgctgacagaggaggagctgaccatgtgggaggaggaccctgagggcttcaccgtggaggagaccggcggggacagctggaagtacagcctgcggccctgcacagaggtgctcttcatcgacatcttccacgagtacaaccagaccctgacccctgtgctgctggagatgatgcagaccctgcagggccccaccaacgtggaggacatgaatgccctgctgatcaaggatgctgtgtacaatgctgtgggcctggccgcctatgagctgtttgattctgtggactttgaccagtggttcaagaaccagctgctgcctgagctgcaggtgatccacaaccgctacaagcccctgcggcggcgggtcatctggctgattggccagtggatctctgtgaagttcaagagtgacctgcggcccatgctgtatgaggccatctgcaacctgctgcaggaccaggacctggtggtgagaattgaaacagccaccaccctgaagctgactgtggatgactttgagttcagaacagaccagttcctgccctacctggagaccatgttcaccctgctcttccagctgctgcagcaggtgacagaatgtgacaccaagatgcacgtgctgcacgtgctgagctgtgtgattgaaagagtgaacatgcagatccggccctacgtgggctgcctggtgcagtacctgcccctgctgtggaagcagagcgaggagcacaacatgctgcgctgtgccatcctgaccaccctcatccacctggtgcagggcctgggcgctgacagcaagaacctgtaccccttcctgctgcctgtgatccagctgagcacagatgtgtcccagcccccccacgtgtacctgctggaggatggcctggagctgtggctggtgaccctggagaacagcccctgcatcaccccagagctgctgcgcatcttccagaacatgagccccctgctggagctgagcagcgagaacctgcggacctgcttcaagatcatcaatggctacatcttcctgagcagcacagagttcctgcagacctatgctgtgggcctgtgccagagcttctgtgagctgctgaaggagatcaccacagagggccaggtgcaggtgctgaaggtggtggagaatgccctgaaggtgaaccccatcctgggcccccagatgttccagcccatcctgccctacgtgttcaagggcatcattgaaggagagcgctaccctgtggtgatgagcacctacctgggcgtgatgggccgggtgctgctgcagaacaccagcttcttcagcagcctgctgaatgagatggcccacaagttcaaccaggagatggaccagctgctgggcaacatgattgagatgtgggtggacaggatggacaacatcacccagcctgagaggaggaagctgagcgccctggccctgctgagcctgctgcccagcgacaacagcgtcatccaggacaagttctgtggcatcatcaacatctctgtggagggcctgcatgatgtgatgacagaggaccctgagaccggcacctacaaggactgcatgctgatgagccacctggaggagcccaaggtgacagaagatgaggagcccccaacagagcaggacaagaggaagaagatgctggccctgaaggaccctgtgcacacagtgtccctgcagcagttcatctatgagaagctgaaggcccagcaggagatgctgggggagcagggcttccagagcctgatggagaccgtggacacagagatcgtgacccagctgcaggagttcctgcagggcttctag

SEQ ID NO: 155908 - DNA, 3048 bp, synthetic construct
  misc_feature 1..3048: note = Description of Artificial Sequence: Synthetic coding sequence
  source 1..3048: mol_type = other DNA
atggtgcagcccatcatccacctgggctacgtggtgtacagcctgctgtacctgggctacaagcctgtgcagcacgtgacagccctgaacacagtgagcagctgccacaagatggtgtccatggacctgaacagcgccagcacagtggtgctgcaggtgctgacccaggccaccagccaggacacagctgtgctgaagccagctgaggagcagctgaagcagtgggagacccagcccggcttctacagcgtgctgctgaacatcttcaccaaccacaccctggacatcaacgtgcgctggctggccgtgctgtacttcaagcacggcatcgaccgctactggaggagagtggccccccacgccctgtctgaggaggagaagaccaccctgcgggccggcctcatcaccaacttcaatgagcccatcaaccagatcgccacccagattgctgtgctgattgccaaggtggcccggctggactgcccccggcagtggccagagctgatccccaccctgattgaatctgtgaaggtgcaggatgacctgcggcagcaccgggccctgctgaccttctaccacgtgaccaagaccctggccagcaagaggctggccgctgacaggaagctgttctatgacctggccagcggcatctacaactttgcctgcagcctgtggaaccaccacacagacaccttcctgcaggaggtgtcctctggaaatgaggccgccatcctgagcagcctggagaggaccctgctgagcctgaaggtgctgaggaagctgactgtgaatggatttgtggagccccacaagaacatggaggtgatgggcttcctgcacggcatctttgagcggctgaagcagttcctggagtgcagccgcagcatcggcacagacaacgtgtgccgggaccggctggagaagaccatcatcctcttcaccaaggtgctgctggacttcctggaccagcaccccttctccttcacccccctcatccagaggagcctggagttctctgtgtcctatgtgttcacagaggtgggggagggcgtgacctttgagcgcttcatcgtgcagtgcatgaacctgatcaagatgattgtgaagaactatgcctacaagcccagcaagaactttgaggacagcagccctgagaccctggaggcccacaagatcaagatggccttcttcacctaccccaccctgacagagatctgccggcggctggtgagccactacttcctgctgacagaggaggagctgaccatgtgggaggaggaccctgagggcttcaccgtggaggagaccggcggggacagctggaagtacagcctgcggccctgcacagaggtgctcttcatcgacatcttccacgagtacaaccagaccctgacccctgtgctgctggagatgatgcagaccctgcagggccccaccaacgtggaggacatgaatgccctgctgatcaaggatgctgtgtacaatgctgtgggcctggccgcctatgagctgtttgattctgtggactttgaccagtggttcaagaaccagctgctgcctgagctgcaggtgatccacaaccgctacaagcccctgcggcggcgggtcatctggctgattggccagtggatctctgtgaagttcaagagtgacctgcggcccatgctgtatgaggccatctgcaacctgctgcaggaccaggacctggtggtgagaattgaaacagccaccaccctgaagctgactgtggatgactttgagttcagaacagaccagttcctgccctacctggagaccatgttcaccctgctcttccagctgctgcagcaggtgacagaatgtgacaccaagatgcacgtgctgcacgtgctgagctgtgtgattgaaagagtgaacatgcagatccggccctacgtgggctgcctggtgcagtacctgcccctgctgtggaagcagagcgaggagcacaacatgctgcgctgtgccatcctgaccaccctcatccacctggtgcagggcctgggcgctgacagcaagaacctgtaccccttcctgctgcctgtgatccagctgagcacagatgtgtcccagcccccccacgtgtacctgctggaggatggcctggagctgtggctggtgaccctggagaacagcccctgcatcaccccagagctgctgcgcatcttccagaacatgagccccctgctggagctgagcagcgagaacctgcggacctgcttcaagatcatcaatggctacatcttcctgagcagcacagagttcctgcagacctatgctgtgggcctgtgccagagcttctgtgagctgctgaaggagatcaccacagagggccaggtgcaggtgctgaaggtggtggagaatgccctgaaggtgaaccccatcctgggcccccagatgttccagcccatcctgccctacgtgttcaagggcatcattgaaggagagcgctaccctgtggtgatgagcacctacctgggcgtgatgggccgggtgctgctgcagaacaccagcttcttcagcagcctgctgaatgagatggcccacaagttcaaccaggagatggaccagctgctgggcaacatgattgagatgtgggtggacaggatggacaacatcacccagcctgagaggaggaagctgagcgccctggccctgctgagcctgctgcccagcgacaacagcgtcatccaggacaagttctgtggcatcatcaacatctctgtggagggcctgcatgatgtgatgacagaggaccctgagaccggcacctacaaggactgcatgctgatgagccacctggaggagcccaaggtgacagaagatgaggagcccccaacagagcaggacaagaggaagaagatgctggccctgaaggaccctgtgcacacagtgtccctgcagcagttcatctatgagaagctgaaggcccagcaggagatgctgggggagcagggcttccagagcctgatggagaccgtggacacagagatcgtgacccagctgcaggagttcctgcagggcttctag

SEQ ID NO: 155909 - DNA, 195 bp, synthetic construct
  misc_feature 1..195: note = Description of Artificial Sequence: Synthetic coding sequence
  source 1..195: mol_type = other DNA
atggacctgaacagcgccagcacagtggtgctgcaggtgctgacccaggccaccagccaggacacagctgtgctgaagccagctgaggagcagctgaagcagtgggagacccagcccggcttctacagcgtgctgctgaacatcttcaccaaccacaccctggacatcaacgtgcgctggctggccgtgctgtag

SEQ ID NO: 155910 - DNA, 489 bp, synthetic construct
  misc_feature 1..489: note = Description of Artificial Sequence: Synthetic coding sequence
  source 1..489: mol_type = other DNA
atggacctgaacagcgccagcacagtggtgctgcaggtgctgacccaggccaccagccaggacacagctgtgctgaagccagctgaggagcagctgaagcagtgggagacccagcccggcttctacagcgtgctgctgaacatcttcaccaaccacaccctggacatcaacgtgcgctggctggccgtgctgtacttcaagcacggcatcgaccgctactggaggagagtggccccccacgccctgtctgaggaggagaagaccaccctgcgggccggcctcatcaccaacttcaatgagcccatcaaccagatcgccacccagattgctgtgctgattgccaaggtggcccggctggactgcccccggcagtggccagagctgatccccaccctgattgaatctgtgaaggtgcaggatgacctgcggcagcaccgggccctgctgaccttctaccacgtgaccaagaccctggccagcaagaggtag

SEQ ID NO: 155911 - DNA, 450 bp, synthetic construct
  misc_feature 1..450: note = Description of Artificial Sequence: Synthetic coding sequence
  source 1..450: mol_type = other DNA
atggacctgaacagcgccagcacagtggtgctgcaggtgctgacccaggccaccagccaggacacagctgtgctgaagccagctgaggagcagctgaagcagtgggagacccagcccggcttctacagcgtgctgctgaacatcttcaccaaccacaccctggacatcaacgtgcgctggctggccgtgctgtacttcaagcacggcatcgaccgctactggaggagagtggccccccacgccctgtctgaggaggagaagaccaccctgcgggccggcctcatcaccaacttcaatgagcccatcaaccagatcgccacccagattgctgtgctgattgccaaggtggcccggctggactgcccccggcagtggccagagctgatccccaccctgattgaatctgtgaaggtgcaggatgacctgcggcagcaccgggccctgctgtag

SEQ ID NO: 155912 - DNA, 1425 bp, synthetic construct
  misc_feature 1..1425: note = Description of Artificial Sequence: Synthetic coding sequence
  source 1..1425: mol_type = other DNA
atgatgcagaccctgcagggccccaccaacgtggaggacatgaatgccctgctgatcaaggatgctgtgtacaatgctgtgggcctggccgcctatgagctgtttgattctgtggactttgaccagtggttcaagaaccagctgctgcctgagctgcaggtgatccacaaccgctacaagcccctgcggcggcgggtcatctggctgattggccagtggatctctgtgaagttcaagagtgacctgcggcccatgctgtatgaggccatctgcaacctgctgcaggaccaggacctggtggtgagaattgaaacagccaccaccctgaagctgactgtggatgactttgagttcagaacagaccagttcctgccctacctggagaccatgttcaccctgctcttccagctgctgcagcaggtgacagaatgtgacaccaagatgcacgtgctgcacgtgctgagctgtgtgattgaaagagtgaacatgcagatccggccctacgtgggctgcctggtgcagtacctgcccctgctgtggaagcagagcgaggagcacaacatgctgcgctgtgccatcctgaccaccctcatccacctggtgcagggcctgggcgctgacagcaagaacctgtaccccttcctgctgcctgtgatccagctgagcacagatgtgtcccagcccccccacgtgtacctgctggaggatggcctggagctgtggctggtgaccctggagaacagcccctgcatcaccccagagctgctgcgcatcttccagaacatgagccccctgctggagctgagcagcgagaacctgcggacctgcttcaagatcatcaatggctacatcttcctgagcagcacagagttcctgcagacctatgctgtgggcctgtgccagagcttctgtgagctgctgaaggagatcaccacagagggccaggtgcaggtgctgaaggtggtggagaatgccctgaaggtgaaccccatcctgggcccccagatgttccagcccatcctgccctacgtgttcaagggcatcattgaaggagagcgctaccctgtggtgatgagcacctacctgggcgtgatgggccgggtgctgctgcagaacaccagcttcttcagcagcctgctgaatgagatggcccacaagttcaaccaggagatggaccagctgctgggcaacatgattgagatgtgggtggacaggatggacaacatcacccagcctgagaggaggaagctgagcgccctggccctgctgagcctgctgcccagcgacaacagcgtcatccaggacaagttctgtggcatcatcaacatctctgtggagggcctgcatgatgtgatgacagaggaccctgagaccggcacctacaaggactgcatgctgatgagccacctggaggagcccaagtag

SEQ ID NO: 155913 - DNA, 3117 bp, synthetic construct
  misc_feature 1..3117: note = Description of Artificial Sequence: Synthetic coding sequence
  source 1..3117: mol_type = other DNA
atggaccccaacaccatcatcgaggccctgcggggcaccatggaccctgccctgcgggaggccgctgagcggcagctgaatgaggcccacaagagcctgaactttgtgtccaccctgctgcagatcaccatgtctgagcagctggacctgcctgtgcggcaggccggggtcatctacctgaagaacatgatcacccagtactggccagaccgggagacagcccctggggacatcagcccctacaccatccctgaggaggacagacactgcatcagagaaaatattgtggaggccatcatccacagccctgagctgatccgggtgcagctgaccacctgcatccaccacatcatcaagcatgactaccccagccgctggacagccatcgtggacaagattggcttctacctgcagagcgacaacagcgcctgctggctgggcatcctgctgtgcctgtaccagctggtgaagaactatgagtacaagaagccagaggagaggagccccctggtggccgccatgcagcacttcctgcctgtgctgaaggaccgcttcatccagctgctgagtgaccagagcgaccagagcgtgctgatccagaagcagatcttcaagatcttctacgccctggtgcagtacaccctgcccctggagctgatcaaccagcagaacctgacagagtggattgagatcctgaagacagtggtgaacagagatgtgcccaatgagaccctgcaggtggaggaggatgacaggcctgagctgccctggtggaagtgcaagaagtgggccctgcacatcctggcccggctgtttgaaagatatggcagccctggaaatgtgtccaaggagtacaatgaatttgctgaggtgttcctgaaggcctttgctgtgggcgtgcagcaggtgctgctgaaggtgctgtaccagtacaaggagaagcagtacatggccccccgggtgctgcagcagaccctgaactacatcaaccagggcgtgtcccatgccctgacctggaagaacctgaagccccacatccagggcatcatccaggacgtcatcttccccctgatgtgctacacagatgctgatgaggagctgtggcaggaggacccctatgagtacatccgcatgaagtttgatgtgtttgaggacttcatcagccccaccacagctgcccagaccctgctcttcaccgcctgcagcaagaggaaggaggtgctgcagaagaccatgggcttctgctaccagatcctgacagagcccaatgctgaccccaggaagaaggatggagccctgcacatgattggcagcctggccgagatcctgctgaagaagaagatctacaaggaccagatggagtacatgctgcagaaccacgtgttccccctcttcagcagcgagctgggctacatgagggcccgggcctgctgggtgctgcactacttctgtgaggtgaagttcaagagtgaccagaacctgcagacagccctggagctgacccggcgctgcctgattgatgaccgggagatgcctgtgaaggtggaggccgccatcgccctgcaggtgctgatcagcaaccaggagaaggccaaggagtacatcacccccttcatccggcctgtgatgcaggccctgctgcacatcatccgggagacagaaaatgatgacctgaccaacgtcatccagaagatgatctgtgagtacagcgaggaggtgacccccatcgctgtggagatgacccagcacctggccatgaccttcaaccaggtgatccagacaggcccagatgaggagggcagtgatgacaaggctgtgacagccatgggcatcctgaacaccatcgacaccctgctgtctgtggtggaggaccacaaggagatcacccagcagctggagggcatctgcctgcaggtgattggcaccgtgctgcagcagcacgtgctggagttctatgaggagatcttcagcctggcccacagcctgacctgccagcaggtgagcccccagatgtggcagctgctgcccctggtgtttgaggtgttccagcaggacggctttgactacttcacagacatgatgcccctgctgcacaactacgtgacagtggacacagacaccctgctgagtgacaccaagtacctggagatgatctacagcatgtgcaagaaggtgctgactggagtggccggggaggatgctgaatgtcatgctgccaagctgctggaggtgatcatcctgcagtgcaagggccggggcatcgaccagtgcatccccctgtttgtggaggccgccctggagcggctgacccgggaggtgaagaccagcgagctgcggaccatgtgcctgcaggtggccatcgccgccctgtactacaacccccacctgctgctgaacaccctggagaacctgcgcttccccaacaacgtggagcctgtgaccaaccacttcatcacccagtggctgaatgatgtggactgcttcctgggcctgcatgacaggaagatgtgtgtgctgggcctgtgtgccctgattgacatggagcagatcccccaggtgctgaaccaggtgtctggccagatcctgcctgccttcatcctgctcttcaacggcctgaagagggcctatgcctgccacgccgagcatgaaaatgacagtgatgatgatgatgaagcagaagatgatgatgaaacagaggagctgggcagtgatgaagatgacattgatgaagatggccaggagtacctggagatcctggccaagcaggccggagaagatggagatgatgaggactgggaggaggatgatgctgaggagacagccctggagggctacagcaccatcattgatgatgaggacaaccctgtggatgagtaccagatcttcaaggccatcttccagaccatccagaacagaaatcctgtgtggtaccaggccctgacccacggcctgaatgaggagcagaggaagcagctgcaggacatcgccaccctggccgaccagaggcgggccgcccacgagagcaagatgattgagaagcacggcggctacaagttcagcgcccctgtggtgcccagcagcttcaactttggaggccctgcccctggcatgaactag

SEQ ID NO: 155914 - DNA, 3114 bp, synthetic construct
  misc_feature 1..3114: note = Description of Artificial Sequence: Synthetic coding sequence
  source 1..3114: mol_type = other DNA
atggacctgaaccgcatcatccaggccctgaagggcaccatcgaccccaagctgagaattgctgctgaaaatgagctgaaccagagctacaagatcatcaactttgcccccagcctgctgcgcatcatcgtgtctgaccacgtggagttccctgtgcggcaggccgccgccatctacctgaagaacatggtgacccagtactggccagaccgggagcccccacctggagaggccatcttccccttcaacatccatgaaaatgaccggcagcagatccgggacaacatcgtggagggcatcatccgcagcccagacctggtgcgggtgcagctgaccatgtgcctgcgggccatcatcaagcatgacttccctggccactggccaggagtggtggacaagattgactactacctgcagagccagagcagcgcctcctggctgggcagcctgctgtgcctgtaccagctggtgaagacctatgagtacaagaaggccgaggagcgggagcccctcatcatcgccatgcagatcttcctgccccgcatccagcagcagatcgtgcagctgctgcctgacagcagctactacagcgtgctgctgcagaagcagatcctgaagatcttctacgccctggtgcagtatgccctgcccctgcagctggtgaacaaccagaccatgaccacctggatggagatcttccgcaccatcatcgacagaacagtgcccccagagaccctgcacattgatgaagatgacaggcctgagctggtgtggtggaagtgcaagaagtgggccctgcacatcgtggcccggctgtttgaaagatatggcagccctggaaatgtgaccaaggagtactttgagttcagcgagttcttcctgaagacctatgctgtgggcatccagcaggtgctgctgaagatcctggaccagtaccggcagaaggagtatgtggccccccgggtgctgcagcaggccttcaactacctgaaccagggcgtggtgcacagcatcacctggaagcagatgaagccccacatccagaacatcagtgaagatgtgatcttctctgtgatgtgctacaaggatgaagatgaggagctgtggcaggaggacccctatgagtacatccgcatgaagtttgacatctttgaagattatgccagccccaccacagctgcccagaccctgctgtacacagctgccaagaagaggaaggaggtgctgcccaagatgatggccttctgctaccagatcctgacagaccccaactttgaccccaggaagaaggatggagccctgcacgtgattggcagcctggccgagatcctgctgaagaagagcctcttcaaggaccagatggagctgttcctgcagaaccacgtgttccccctgctgctgagcaacctgggctacctgcgggcccggagctgctgggtgctgcacgccttcagcagcctgaagttccacaatgagctgaacctgagaaatgctgtggagctggccaagaagagcctgattgaggacaaggagatgcctgtgaaggtggaggccgccctggccctgcagagcctcatcagcaaccagatccaggccaaggagtacatgaagccccacgtgcggcccatcatgcaggagctgctgcacatcgtgcgggagacagaaaatgatgatgtgaccaacgtcatccagaagatgatctgtgagtacagccaggaggtggccagcattgctgtggacatgacccagcacctggccgagatctttgggaaggtgctgcagagtgatgaatatgaggaggtggaggacaagacagtgatggccatgggcatcctgcacaccatcgacaccatcctgactgtggtggaggaccacaaggagatcacccagcagctggagaacatctgcctgcgcatcatcgacctggtgctgcagaagcacgtgattgagttctatgaggagatcctgagcctggcctacagcctgacctgccacagcatcagcccccagatgtggcagctgctgggcatcctgtatgaggtgttccagcaggactgctttgagtacttcacagacatgatgcccctgctgcacaactacgtgaccatcgacacagacaccctgctgagcaatgccaagcacctggagatcctcttcaccatgtgcaggaaggtgctgtgtggagatgctggggaggatgctgaatgtcatgctgccaagctgctggaggtgatcatcctgcagtgcaagggccggggcatcgaccagtgcatccccctgtttgtgcagctggtgctggagcggctgacccggggcgtgaagaccagcgagctgcggaccatgtgcctgcaggtggccatcgccgccctgtactacaacccagacctgctgctgcacaccctggagcgcatccagctgccccacaaccctggccccatcaccgtgcagttcatcaaccagtggatgaatgacacagactgcttcctgggccaccacgacaggaagatgtgcatcatcggcctgagcatcctgctggagctgcagaacagacctcctgctgtggatgctgtggtgggccagatcgtgcccagcatcctcttcctgttcctgggcctgaagcaggtgtgtgccacccggcagctggtgaacagagaagatagaagcaaggccgagaaggctgacatggaggagaatgaggagatcagcagtgatgaggaggagaccaacgtgacagcccaggccatgcagagcaacaacggcagaggagaagatgaggaggaggaggatgatgactgggatgaggaggtgctggaggagacagccctggagggcttcagcacccccctggacctggacaacagcgtggatgagtaccagttcttcacccaggccctgatcaccgtgcagagcagagatgctgcctggtaccagctgctgatggcccccctgtctgaggaccagaggacagccctgcaggaggtgtacaccctggccgagcacagaagaacagtggccgaggccaagaagaagattgagcagcagggcggcttcacctttgagaacaagggcgtgctgagcgccttcaactttggcaccgtgcccagcaacaactag

SEQ ID NO: 155915 - DNA, 2499 bp, synthetic construct
  misc_feature 1..2499: note = Description of Artificial Sequence: Synthetic coding sequence
  source 1..2499: mol_type = other DNA
atggagagcctgaccctgaagggctacgccctgcccctgcagctggtgaacaaccagaccatgaccacctggatggagatcttccgcaccatcatcgacagaacagtgcccccagagaccctgcacattgatgaagatgacaggcctgagctggtgtggtggaagtgcaagaagtgggccctgcacatcgtggcccggctgtttgaaagatatggcagccctggaaatgtgaccaaggagtactttgagttcagcgagttcttcctgaagacctatgctgtgggcatccagcaggtgctgctgaagatcctggaccagtaccggcagaaggagtatgtggccccccgggtgctgcagcaggccttcaactacctgaaccagggcgtggtgcacagcatcacctggaagcagatgaagccccacatccagaacatcagtgaagatgtgatcttctctgtgatgtgctacaaggatgaagatgaggagctgtggcaggaggacccctatgagtacatccgcatgaagtttgacatctttgaggactatgccagccccaccacagctgcccagaccctgctgtacacagctgccaagaagaggaaggaggtgctgcccaagatgatggccttctgctaccagatcctgacagaccccaactttgaccccaggaagaaggatggagccctgcacgtgattggcagcctggccgagatcctgctgaagaagagcctcttcaaggaccagatggagctgttcctgcagaaccacgtgttccccctgctgctgagcaacctgggctacctgcgggcccggagctgctgggtgctgcacgccttcagcagcctgaagttccacaatgagctgaacctgagaaatgctgtggagctggccaagaagagcctgattgaggacaaggagatgcctgtgaaggtggaggccgccctggccctgcagagcctcatcagcaaccagatccaggccaaggagtacatgaagccccacgtgcggcccatcatgcaggagctgctgcacatcgtgcgggagacagaaaatgatgatgtgaccaacgtcatccagaagatgatctgtgagtacagccaggaggtggccagcattgctgtggacatgacccagcacctggccgagatctttgggaaggtgctgcagagtgatgaatatgaggaggtggaggacaagacagtgatggccatgggcatcctgcacaccatcgacaccatcctgactgtggtggaggaccacaaggagatcacccagcagctggagaacatctgcctgcgcatcatcgacctggtgctgcagaagcacgtgattgagttctatgaggagatcctgagcctggcctacagcctgacctgccacagcatcagcccccagatgtggcagctgctgggcatcctgtatgaggtgttccagcaggactgctttgagtacttcacagacatgatgcccctgctgcacaactacgtgaccatcgacacagacaccctgctgagcaatgccaagcacctggagatcctcttcaccatgtgcaggaaggtgctgtgtggagatgctggagaagatgctgagtgccacgccgccaagctgctggaggtgatcatcctgcagtgcaagggccggggcatcgaccagtgcatccccctgtttgtgcagctggtgctggagcggctgacccggggcgtgaagaccagcgagctgcggaccatgtgcctgcaggtggccatcgccgccctgtactacaacccagacctgctgctgcacaccctggagcgcatccagctgccccacaaccctggccccatcaccgtgcagttcatcaaccagtggatgaatgacacagactgcttcctgggccaccacgacaggaagatgtgcatcatcggcctgagcatcctgctggagctgcagaaccggcccccagctgtggatgctgtggtgggccagatcgtgcccagcatcctcttcctgttcctgggcctgaagcaggtgtgtgccacccggcagctggtgaaccgggaggacaggagcaaggccgagaaggctgacatggaggagaatgaggagatcagcagtgatgaggaggagaccaacgtgacagcccaggccatgcagagcaacaacggccgcggggaggatgaggaggaggaggatgatgactgggatgaggaggtgctggaggagacagccctggagggcttcagcacccccctggacctggacaacagcgtggatgagtaccagttcttcacccaggccctgatcaccgtgcagagcagagatgctgcctggtaccagctgctgatggcccccctgtctgaggaccagaggacagccctgcaggaggtgtacaccctggccgagcacagaagaacagtggccgaggccaagaagaagattgagcagcagggcggcttcacctttgaaaataaaggagtgctgagcgccttcaactttggaacagtgcccagcaacaactag

SEQ ID NO: 155916 - DNA, 1542 bp, synthetic construct
  misc_feature 1..1542: note = Description of Artificial Sequence: Synthetic coding sequence
  source 1..1542: mol_type = other DNA
ctgagcagcggccacgagctggccaaggagtacatgaagccccacgtgcggcccatcatgcaggagctgctgcacatcgtgcgggagacagaaaatgatgatgtgaccaacgtcatccagaagatgatctgtgagtacagccaggaggtggccagcattgctgtggacatgacccagcacctggccgagatctttgggaaggtgctgcagagtgatgaatatgaggaggtggaggacaagacagtgatggccatgggcatcctgcacaccatcgacaccatcctgactgtggtggaggaccacaaggagatcacccagcagctggagaacatctgcctgcgcatcatcgacctggtgctgcagaagcacgtgattgagttctatgaggagatcctgagcctggcctacagcctgacctgccacagcatcagcccccagatgtggcagctgctgggcatcctgtatgaggtgttccagcaggactgctttgagtacttcacagacatgatgcccctgctgcacaactacgtgaccatcgacacagacaccctgctgagcaatgccaagcacctggagatcctcttcaccatgtgcaggaaggtgctgtgtggagatgctggggaggatgctgaatgtcatgctgccaagctgctggaggtgatcatcctgcagtgcaagggccggggcatcgaccagtgcatccccctgtttgtgcagctggtgctggagcggctgacccggggcgtgaagaccagcgagctgcggaccatgtgcctgcaggtggccatcgccgccctgtactacaacccagacctgctgctgcacaccctggagcgcatccagctgccccacaaccctggccccatcaccgtgcagttcatcaaccagtggatgaatgacacagactgcttcctgggccaccacgacaggaagatgtgcatcatcggcctgagcatcctgctggagctgcagaacagacctcctgctgtggatgctgtggtgggccagatcgtgcccagcatcctcttcctgttcctgggcctgaagcaggtgtgtgccacccggcagctggtgaacagagaagatagaagcaaggccgagaaggctgacatggaggagaatgaggagatcagcagtgatgaggaggagaccaacgtgacagcccaggccatgcagagcaacaacggcagaggagaagatgaggaggaggaggatgatgactgggatgaggaggtgctggaggagacagccctggagggcttcagcacccccctggacctggacaacagcgtggatgagtaccagttcttcacccaggccctgatcaccgtgcagagcagagatgctgcctggtaccagctgctgatggcccccctgtctgaggaccagaggacagccctgcaggaggtgtacaccctggccgagcacagaagaacagtggccgaggccaagaagaagattgagcagcagggcggcttcacctttgagaacaagggcgtgctgagcgccttcaactttggcaccgtgcccagcaacaactag

SEQ ID NO: 155917 - DNA, 3546 bp, synthetic construct
  misc_feature 1..3546: note = Description of Artificial Sequence: Synthetic coding sequence
  source 1..3546: mol_type = other DNA
atgccagaaaatcctgccacagacaagctgcaggtgctgcaggtgctggaccggctgaagatgaagctgcaggagaagggggacaccagccagaatgagaagctgtccatgttttatgagaccctgaagagccccctcttcaaccagatcctgaccctgcagcagagcatcaagcagctgaagggccagctgaaccacatccccagcgactgcagcgccaactttgacttcagcaggaagggcctgctggtgttcacagatggcagcatcaccaatggaaatgtgcaccggcccagcaacaacagcacagtgtctggcctcttcccctggacccccaagctgggcaatgaagacttcaacagcgtcatccagcagatggcccagggccggcagatcgagtacattgatattgagcggcccagcactggaggcctgggcttctctgtggtggccctgcggagccagaacctgggcaaggtggacatctttgtgaaggatgtgcagcccggctctgtggccgaccgggaccagaggctgaaggaaaatgaccagatcctggccatcaaccacacccccctggaccagaacatcagccaccagcaggccatcgccctgctgcagcagaccaccggcagcctgcggctcatcgtggcccgggagcctgtgcacaccaagagcagcaccagcagcagcctgaatgacaccaccctgcctgagaccgtgtgctggggccacgtggaggaggtggagctgatcaatgatggcagcggcctgggcttcggcatcgtgggcggcaagaccagcggcgtggtggtgaggaccatcgtgcctgggggcctggccgacagagatggccgcctgcagacaggagaccacatcctgaagattggaggcaccaacgtgcagggcatgaccagcgagcaggtggcccaggtgctgaggaactgtggcaacagcgtgaggatgctggtggcccgggaccctgctggggacatctctgtgaccccaccagccccagctgccctgcctgtggccctgcccaccgtggccagcaagggccctggcagtgacagcagcctgtttgagacctacaacgtggagctggtgaggaaggatggccagagcctgggcatccgcatcgtgggctacgtgggcaccagccacactggagaggccagcggcatctacgtgaagagcatcatccctggcagcgctgcctaccacaacggccacatccaggtgaatgacaagatcgtggccgtggatggagtgaacatccagggctttgccaaccatgatgtggtggaggtgctgagaaatgccggccaggtggtgcacctgaccctggtgcggaggaagaccagcagcagcaccagccccctggagcccccaagtgaccggggcaccgtggtggagcccctgaagcccccagccctcttcctgaccggggctgtggagacagagaccaacgtggatggagaagatgaggagatcaaggagagaattgacaccctgaagaatgacaacatccaggccctggagaagctggagaaggtgcctgacagcccagaaaatgagctgaagagccgctgggagaacctgctgggccctgactatgaggtgatggtggccaccctggacacccagattgctgatgatgctgagctgcagaagtacagcaagctgctgcccatccacaccctgcggctgggcgtggaggtggacagctttgatggccaccactacatcagcagcatcgtgtctgggggccctgtggacaccctgggcctgctgcagccagaagatgagctgctggaggtgaatggcatgcagctgtatggcaagagcagaagagaggccgtgtccttcctgaaggaggtgcccccacccttcaccctggtgtgctgcagaagactctttgatgatgaggcctctgtggatgagcccaggagaacagagaccagcctgcctgagacagaggtggaccacaacatggatgtgaacacagaagaagatgatgatggagagctggccctgtggagccctgaggtgaagatcgtggagctggtgaaggactgcaagggcctgggcttcagcatcctggactaccaggaccccctggaccccaccaggagcgtcatcgtcatccgcagcctggtggctgatggagtggccgagaggtctgggggcctgctgcccggggaccggctggtgtctgtgaatgagtactgcctggacaacaccagcctggccgaggccgtggagatcctgaaggctgtgcccccaggcctggtgcacctgggcatctgcaagcccctggtggaggacaatgaggaggagagctgctacatcctgcacagcagcagcaatgaagacaagacagagttcagcggcaccatccatgacatcaacagcagcctcatcctggaggcccccaagggcttcagagatgagccctacttcaaggaggagctggtggatgagcccttcctggacctgggcaagagcttccacagccagcagaaggagattgagcagagcaaggaggcctgggagatgcatgagttcctgaccccccggctgcaggagatggatgaggagcgggagatcctggtggatgaggagtatgagctgtaccaggaccccagccccagcatggagctgtaccccctgagccacatccaggaggccacccctgtgcccagcgtgaatgagctgcacttcggcacccagtggctgcatgacaatgagcccagcgagagccaggaggccaggacaggccgcacagtgtacagccaggaggcccagccctacggctactgcccagaaaatgtgatgaaggagaactttgtgatggagagcctgcccagcgtgcccagcacagagggcaacagccagcagggccgctttgatgacctggagaacctgaacagcctggccaagaccagcctggacctgggcatgatccccaatgatgtgcagggccccagcctgctgattgacctgcctgtggtggcccagaggcgggagcaggaggacctgcccctgtaccagcaccaggccaccagggtcatcagcaaggccagcgcctacacaggcatgctgagcagccgctatgccacagacacctgtgagctgcctgagcgggaggagggggagggggaggagacccccaacttcagccactggggccccccacgcatcgtggagatcttccgggagcccaacgtgtccctgggcatcagcatcgtgggcggccagaccgtcatcaagaggctgaagaatggagaggagctgaagggcatcttcatcaagcaggtgctggaggacagccctgctgggaagaccaatgccctgaagacaggagacaagatcctggaggtgtctggagtggacctgcagaatgccagccacagcgaggccgtggaggccatcaagaatgccggcaaccctgtggtgttcatcgtgcagagcctgagcagcaccccagcctgggtgacagagcaggacagcgtgtccaagaagaagaagaaccacgagggctag

SEQ ID NO: 155918 - DNA, 600 bp, synthetic construct
  misc_feature 1..600: note = Description of Artificial Sequence: Synthetic coding sequence
  source 1..600: mol_type = other DNA
atggtgcagggcggcttccctgagaagatccggcagagatatgctgacctgcccggggagctgcacatcatcgagctggagaaggacaagaatggcctgggcctgagcctggccggcaacaaggacaggagcaggatgagcatctttgtggtgggcatcaaccctgagggccctgctgctgctgatggccgcatgagaattggagatgagctgctggagatcaacaaccagatcctgtatggccgcagccaccagaatgccagcgccatcatcaagacagcccccagcaaggtgaagctggtgttcatcagaaatgaagatgctgtgaaccagatggctgtgacccccttccctgtgcccagcagcagccccagcagcattgaggaccagagcggcacagagcccatcagcagcgaggaggatggctctgtggaggtgggcatcaagcagctgcctgagagcgagagcttcaagctggccgtgtcccagatgaagcagcagaagtaccccaccaaggtgtccttcagcagccaggagatccccctggccccagccagcagctaccacagcacagatgctgacttcaccggctacggctag

SEQ ID NO: 155919 - DNA, 4746 bp, synthetic construct
  misc_feature 1..4746: note = Description of Artificial Sequence: Synthetic coding sequence
  source 1..4746: mol_type = other DNA
atgccagaaaatcctgccacagacaagctgcaggtgctgcaggtgctggaccggctgaagatgaagctgcaggagaagggggacaccagccagaatgagaagctgtccatgttttatgagaccctgaagagccccctcttcaaccagatcctgaccctgcagcagagcatcaagcagctgaagggccagctgaaccacatccccagcgactgcagcgccaactttgacttcagcaggaagggcctgctggtgttcacagatggcagcatcaccaatggaaatgtgcaccggcccagcaacaacagcacagtgtctggcctcttcccctggacccccaagctgggcaatgaagacttcaacagcgtcatccagcagatggcccagggccggcagatcgagtacattgatattgagcggcccagcactggaggcctgggcttctctgtggtggccctgcggagccagaacctgggcaaggtggacatctttgtgaaggatgtgcagcccggctctgtggccgaccgggaccagaggctgaaggaaaatgaccagatcctggccatcaaccacacccccctggaccagaacatcagccaccagcaggccatcgccctgctgcagcagaccaccggcagcctgcggctcatcgtggcccgggagcctgtgcacaccaagagcagcaccagcagcagcctgaatgacaccaccctgcctgagaccgtgtgctggggccacgtggaggaggtggagctgatcaatgatggcagcggcctgggcttcggcatcgtgggcggcaagaccagcggcgtggtggtgaggaccatcgtgcctgggggcctggccgacagagatggccgcctgcagacaggagaccacatcctgaagattggaggcaccaacgtgcagggcatgaccagcgagcaggtggcccaggtgctgaggaactgtggcaacagcgtgaggatgctggtggcccgggaccctgctggggacatctctgtgaccccaccagccccagctgccctgcctgtggccctgcccaccgtggccagcaagggccctggcagtgacagcagcctgtttgagacctacaacgtggagctggtgaggaaggatggccagagcctgggcatccgcatcgtgggctacgtgggcaccagccacactggagaggccagcggcatctacgtgaagagcatcatccctggcagcgctgcctaccacaacggccacatccaggtgaatgacaagatcgtggccgtggatggagtgaacatccagggctttgccaaccatgatgtggtggaggtgctgagaaatgccggccaggtggtgcacctgaccctggtgcggaggaagaccagcagcagcaccagccccctggagcccccaagtgaccggggcaccgtggtggagcccctgaagcccccagccctcttcctgaccggggctgtggagacagagaccaacgtggatggagaagatgaggagatcaaggagagaattgacaccctgaagaatgacaacatccaggccctggagaagctggagaaggtgcctgacagcccagaaaatgagctgaagagccgctgggagaacctgctgggccctgactatgaggtgatggtggccaccctggacacccagattgctgatgatgctgagctgcagaagtacagcaagctgctgcccatccacaccctgcggctgggcgtggaggtggacagctttgatggccaccactacatcagcagcatcgtgtctgggggccctgtggacaccctgggcctgctgcagccagaagatgagctgctggaggtgaatggcatgcagctgtatggcaagagcagaagagaggccgtgtccttcctgaaggaggtgcccccacccttcaccctggtgtgctgcagaagactctttgatgatgaggcctctgtggatgagcccaggagaacagagaccagcctgcctgagacagaggtggaccacaacatggatgtgaacacagaagaagatgatgatggagagctggccctgtggagccctgaggtgaagatcgtggagctggtgaaggactgcaagggcctgggcttcagcatcctggactaccaggaccccctggaccccaccaggagcgtcatcgtcatccgcagcctggtggctgatggagtggccgagaggtctgggggcctgctgcccggggaccggctggtgtctgtgaatgagtactgcctggacaacaccagcctggccgaggccgtggagatcctgaaggctgtgcccccaggcctggtgcacctgggcatctgcaagcccctggtggaggacaatgaggaggagagctgctacatcctgcacagcagcagcaatgaagacaagacagagttcagcggcaccatccatgacatcaacagcagcctcatcctggaggcccccaagggcttcagagatgagccctacttcaaggaggagctggtggatgagcccttcctggacctgggcaagagcttccacagccagcagaaggagattgagcagagcaaggaggcctgggagatgcatgagttcctgaccccccggctgcaggagatggatgaggagcgggagatcctggtggatgaggagtatgagctgtaccaggaccccagccccagcatggagctgtaccccctgagccacatccaggaggccacccctgtgcccagcgtgaatgagctgcacttcggcacccagtggctgcatgacaatgagcccagcgagagccaggaggccaggacaggccgcacagtgtacagccaggaggcccagccctacggctactgcccagaaaatgtgatgaaggagaactttgtgatggagagcctgcccagcgtgcccagcacagagggcaacagccagcagggccgctttgatgacctggagaacctgaacagcctggccaagaccagcctggacctgggcatgatccccaatgatgtgcagggccccagcctgctgattgacctgcctgtggtggcccagaggcgggagcaggaggacctgcccctgtaccagcaccaggccaccagggtcatcagcaaggccagcgcctacacaggcatgctgagcagccgctatgccacagacacctgtgagctgcctgagcgggaggagggggagggggaggagacccccaacttcagccactggggccccccacgcatcgtggagatcttccgggagcccaacgtgtccctgggcatcagcatcgtgggcggccagaccgtcatcaagaggctgaagaatggagaggagctgaagggcatcttcatcaagcaggtgctggaggacagccctgctgggaagaccaatgccctgaagacaggagacaagatcctggaggtgtctggagtggacctgcagaatgccagccacagcgaggccgtggaggccatcaagaatgccggcaaccctgtggtgttcatcgtgcagagcctgagcagcacccccagggtcatccccaacgtgcacaacaaggccaacaagatcactggaaaccagaaccaggacacccaggagaagaaggagaagaggcagggcacagcccccccacccatgaagctgcccccaccctacaaggccctgacagatgacagtgatgaaaatgaggaggaggatgccttcacagaccagaagatccggcagagatatgctgacctgcccggggagctgcacatcatcgagctggagaaggacaagaatggcctgggcctgagcctggccggcaacaaggacaggagcaggatgagcatctttgtggtgggcatcaaccctgagggccctgctgctgctgatggccgcatgagaattggagatgagctgctggagatcaacaaccagatcctgtatggccgcagccaccagaatgccagcgccatcatcaagacagcccccagcaaggtgaagctggtgttcatcagaaatgaagatgctgtgaaccagatggctgtgacccccttccctgtgcccagcagcagccccagcagcattgaggaccagagcggcacagagcccatcagcagcgaggaggatggctctgtggaggtgggcatcaagcagctgcctgagagcgagagcttcaagctggccgtgtcccagatgaagcagcagaagtaccccaccaaggtgtccttcagcagccaggagatccccctggccccagccagcagctaccacagcacagatgctgacttcaccggctacggcggcttccaggcccccctgtctgtggaccctgccacctgccccatcgtgcccggccaggagatgatcatcgagatcagcaagggccgcagcggcctgggcctgagcatcgtgggcggcaaggacacccccctcttctggaggctgggcagcccccgggcctggagccagcacctggtgcgggccttcatgctgcaccaccctgtgacagaggtggagggccagaatgccatcgtcatccacgaggtgtatgaggagggcgctgctgccagagatggccgcctgtgggccggggaccagatcctggaggtgaatggagtggacctgaggaacagcagccatgaggaggccatcacagccctgcggcagaccccccagaaggtgcggctggtggtgtacagagatgaggcccactacagagatgaggagaacctggagatcttccctgtggacctgcagaagaaggccggccggggcctgggcctgagcatcgtgggcaagtag

SEQ ID NO: 155920 - DNA, 5406 bp, synthetic construct
  misc_feature 1..5406: note = Description of Artificial Sequence: Synthetic coding sequence
  source 1..5406: mol_type = other DNA
atgccagaaaatcctgccacagacaagctgcaggtgctgcaggtgctggaccggctgaagatgaagctgcaggagaagggggacaccagccagaatgagaagctgtccatgttttatgagaccctgaagagccccctcttcaaccagatcctgaccctgcagcagagcatcaagcagctgaagggccagctgaaccacatccccagcgactgcagcgccaactttgacttcagcaggaagggcctgctggtgttcacagatggcagcatcaccaatggaaatgtgcaccggcccagcaacaacagcacagtgtctggcctcttcccctggacccccaagctgggcaatgaagacttcaacagcgtcatccagcagatggcccagggccggcagatcgagtacattgatattgagcggcccagcactggaggcctgggcttctctgtggtggccctgcggagccagaacctgggcaaggtggacatctttgtgaaggatgtgcagcccggctctgtggccgaccgggaccagaggctgaaggaaaatgaccagatcctggccatcaaccacacccccctggaccagaacatcagccaccagcaggccatcgccctgctgcagcagaccaccggcagcctgcggctcatcgtggcccgggagcctgtgcacaccaagagcagcaccagcagcagcctgaatgacaccaccctgcctgagaccgtgtgctggggccacgtggaggaggtggagctgatcaatgatggcagcggcctgggcttcggcatcgtgggcggcaagaccagcggcgtggtggtgaggaccatcgtgcctgggggcctggccgacagagatggccgcctgcagacaggagaccacatcctgaagattggaggcaccaacgtgcagggcatgaccagcgagcaggtggcccaggtgctgaggaactgtggcaacagcgtgaggatgctggtggcccgggaccctgctggggacatctctgtgaccccaccagccccagctgccctgcctgtggccctgcccaccgtggccagcaagggccctggcagtgacagcagcctgtttgagacctacaacgtggagctggtgaggaaggatggccagagcctgggcatccgcatcgtgggctacgtgggcaccagccacactggagaggccagcggcatctacgtgaagagcatcatccctggcagcgctgcctaccacaacggccacatccaggtgaatgacaagatcgtggccgtggatggagtgaacatccagggctttgccaaccatgatgtggtggaggtgctgagaaatgccggccaggtggtgcacctgaccctggtgcggaggaagaccagcagcagcaccagccccctggagcccccaagtgaccggggcaccgtggtggagcccctgaagcccccagccctcttcctgaccggggctgtggagacagagaccaacgtggatggagaagatgaggagatcaaggagagaattgacaccctgaagaatgacaacatccaggccctggagaagctggagaaggtgcctgacagcccagaaaatgagctgaagagccgctgggagaacctgctgggccctgactatgaggtgatggtggccaccctggacacccagattgctgatgatgctgagctgcagaagtacagcaagctgctgcccatccacaccctgcggctgggcgtggaggtggacagctttgatggccaccactacatcagcagcatcgtgtctgggggccctgtggacaccctgggcctgctgcagccagaagatgagctgctggaggtgaatggcatgcagctgtatggcaagagcagaagagaggccgtgtccttcctgaaggaggtgcccccacccttcaccctggtgtgctgcagaagactctttgatgatgaggcctctgtggatgagcccaggagaacagagaccagcctgcctgagacagaggtggaccacaacatggatgtgaacacagaagaagatgatgatggagagctggccctgtggagccctgaggtgaagatcgtggagctggtgaaggactgcaagggcctgggcttcagcatcctggactaccaggaccccctggaccccaccaggagcgtcatcgtcatccgcagcctggtggctgatggagtggccgagaggtctgggggcctgctgcccggggaccggctggtgtctgtgaatgagtactgcctggacaacaccagcctggccgaggccgtggagatcctgaaggctgtgcccccaggcctggtgcacctgggcatctgcaagcccctggtggaggacaatgaggaggagagctgctacatcctgcacagcagcagcaatgaagacaagacagagttcagcggcaccatccatgacatcaacagcagcctcatcctggaggcccccaagggcttcagagatgagccctacttcaaggaggagctggtggatgagcccttcctggacctgggcaagagcttccacagccagcagaaggagattgagcagagcaaggaggcctgggagatgcatgagttcctgaccccccggctgcaggagatggatgaggagcgggagatcctggtggatgaggagtatgagctgtaccaggaccccagccccagcatggagctgtaccccctgagccacatccaggaggccacccctgtgcccagcgtgaatgagctgcacttcggcacccagtggctgcatgacaatgagcccagcgagagccaggaggccaggacaggccgcacagtgtacagccaggaggcccagccctacggctactgcccagaaaatgtgatgaaggagaactttgtgatggagagcctgcccagcgtgcccagcacagagggcaacagccagcagggccgctttgatgacctggagaacctgaacagcctggccaagaccagcctggacctgggcatgatccccaatgatgtgcagggccccagcctgctgattgacctgcctgtggtggcccagaggcgggagcaggaggacctgcccctgtaccagcaccaggccaccagggtcatcagcaaggccagcgcctacacaggcatgctgagcagccgctatgccacagacacctgtgagctgcctgagcgggaggagggggagggggaggagacccccaacttcagccactggggccccccacgcatcgtggagatcttccgggagcccaacgtgtccctgggcatcagcatcgtgggcggccagaccgtcatcaagaggctgaagaatggagaggagctgaagggcatcttcatcaagcaggtgctggaggacagccctgctgggaagaccaatgccctgaagacaggagacaagatcctggaggtgtctggagtggacctgcagaatgccagccacagcgaggccgtggaggccatcaagaatgccggcaaccctgtggtgttcatcgtgcagagcctgagcagcacccccagggtcatccccaacgtgcacaacaaggccaacaagatcactggaaaccagaaccaggacacccaggagaagaaggagaagaggcagggcacagcccccccacccatgaagctgcccccaccctacaaggccctgacagatgacagtgatgaaaatgaggaggaggatgccttcacagaccagaagatccggcagagatatgctgacctgcccggggagctgcacatcatcgagctggagaaggacaagaatggcctgggcctgagcctggccggcaacaaggacaggagcaggatgagcatctttgtggtgggcatcaaccctgagggccctgctgctgctgatggccgcatgagaattggagatgagctgctggagatcaacaaccagatcctgtatggccgcagccaccagaatgccagcgccatcatcaagacagcccccagcaaggtgaagctggtgttcatcagaaatgaagatgctgtgaaccagatggctgtgacccccttccctgtgcccagcagcagccccagcagcattgaggaccagagcggcacagagcccatcagcagcgaggaggatggctctgtggaggtgggcatcaagcagctgcctgagagcgagagcttcaagctggccgtgtcccagatgaagcagcagaagtaccccaccaaggtgtccttcagcagccaggagatccccctggccccagccagcagctaccacagcacagatgctgacttcaccggctacggcggcttccaggcccccctgtctgtggaccctgccacctgccccatcgtgcccggccaggagatgatcatcgagatcagcaagggccgcagcggcctgggcctgagcatcgtgggcggcaaggacacccccctgaatgccatcgtcatccacgaggtgtatgaggagggcgctgctgccagagatggccgcctgtgggccggggaccagatcctggaggtgaatggagtggacctgaggaacagcagccatgaggaggccatcacagccctgcggcagaccccccagaaggtgcggctggtggtgtacagagatgaggcccactacagagatgaggagaacctggagatcttccctgtggacctgcagaagaaggccggccggggcctgggcctgagcatcgtgggcaagagaaatggaagtggagtcttcatcagtgacatcgtgaagggcggcgctgctgacctggatggccgcctcatccagggcgaccagatcctgtctgtgaatggagaggacatgagaaatgccagccaggagaccgtggccaccatcctgaagtgtgcccagggcctggtgcagctggagatcggccgcctgcgggccggctcctggaccagcgcccggaccaccagccagaacagccagggcagccagcagagcgcccacagcagctgccaccccagctttgcccctgtgatcaccggcctgcagaacctggtgggcaccaagagggtgtctgaccccagccagaagaacagcggcacagacatggagcccaggacagtggagatcaaccgggagctgagtgatgccctgggcatcagcattgctgggggccggggcagccccctgggggacatccctgtgttcatcgccatgatccaggccagcggcgtggccgcccggacccagaagctgaaggtgggggacagaattgtgtccatcaatggccagcccctggatggcctgagccatgctgatgtggtgaacctgctgaagaatgcctacggccgcatcatcctgcaggtggtggccgacaccaacatcagcgccatcgccgcccagctggagaacatgagcacaggctaccacctgggcagccccacagctgagcaccaccctgaggacacagaggagcagctgcagatgacagctgactag

SEQ ID NO: 155921 - DNA, 4572 bp, synthetic construct
  misc_feature 1..4572: note = Description of Artificial Sequence: Synthetic coding sequence
  source 1..4572: mol_type = other DNA
atgccagaaaatcctgccacagacaagctgcaggtgctgcaggtgctggaccggctgaagatgaagctgcaggagaagggggacaccagccagaatgagaagctgtccatgttttatgagaccctgaagagccccctcttcaaccagatcctgaccctgcagcagagcatcaagcagctgaagggccagctgaaccacatccccagcgactgcagcgccaactttgacttcagcaggaagggcctgctggtgttcacagatggcagcatcaccaatggaaatgtgcaccggcccagcaacaacagcacagtgtctggcctcttcccctggacccccaagctgggcaatgaagacttcaacagcgtcatccagcagatggcccagggccggcagatcgagtacattgatattgagcggcccagcactggaggcctgggcttctctgtggtggccctgcggagccagaacctgggcaaggtggacatctttgtgaaggatgtgcagcccggctctgtggccgaccgggaccagaggctgaaggaaaatgaccagatcctggccatcaaccacacccccctggaccagaacatcagccaccagcaggccatcgccctgctgcagcagaccaccggcagcctgcggctcatcgtggcccgggagcctgtgcacaccaagagcagcaccagcagcagcctgaatgacaccaccctgcctgagaccgtgtgctggggccacgtggaggaggtggagctgatcaatgatggcagcggcctgggcttcggcatcgtgggcggcaagaccagcggcgtggtggtgaggaccatcgtgcctgggggcctggccgacagagatggccgcctgcagacaggagaccacatcctgaagattggaggcaccaacgtgcagggcatgaccagcgagcaggtggcccaggtgctgaggaactgtggcaacagcgtgaggatgctggtggcccgggaccctgctggggacatctctgtgaccccaccagccccagctgccctgcctgtggccctgcccaccgtggccagcaagggccctggcagtgacagcagcctgtttgagacctacaacgtggagctggtgaggaaggatggccagagcctgggcatccgcatcgtgggctacgtgggcaccagccacactggagaggccagcggcatctacgtgaagagcatcatccctggcagcgctgcctaccacaacggccacatccaggtgaatgacaagatcgtggccgtggatggagtgaacatccagggctttgccaaccatgatgtggtggaggtgctgagaaatgccggccaggtggtgcacctgaccctggtgcggaggaagaccagcagcagcaccagccccctggagcccccaagtgaccggggcaccgtggtggagcccctgaagcccccagccctcttcctgaccggggctgtggagacagagaccaacgtggatggagaagatgaggagatcaaggagagaattgacaccctgaagaatgacaacatccaggccctggagaagctggagaaggtgcctgacagcccagaaaatgagctgaagagccgctgggagaacctgctgggccctgactatgaggtgatggtggccaccctggacacccagattgctgatgatgctgagctgcagaagtacagcaagctgctgcccatccacaccctgcggctgggcgtggaggtggacagctttgatggccaccactacatcagcagcatcgtgtctgggggccctgtggacaccctgggcctgctgcagccagaagatgagctgctggaggtgaatggcatgcagctgtatggcaagagcagaagagaggccgtgtccttcctgaaggaggtgcccccacccttcaccctggtgtgctgcagaagactctttgatgatgaggcctctgtggatgagcccaggagaacagagaccagcctgcctgagacagaggtggaccacaacatggatgtgaacacagaagaagatgatgatggagagctggccctgtggagccctgaggtgaagatcgtggagctggtgaaggactgcaagggcctgggcttcagcatcctggactaccaggaccccctggaccccaccaggagcgtcatcgtcatccgcagcctggtggctgatggagtggccgagaggtctgggggcctgctgcccggggaccggctggtgtctgtgaatgagtactgcctggacaacaccagcctggccgaggccgtggagatcctgaaggctgtgcccccaggcctggtgcacctgggcatctgcaagcccctggtggaggacaatgaggaggagagctgctacatcctgcacagcagcagcaatgaagacaagacagagttcagcggcaccatccatgacatcaacagcagcctcatcctggaggcccccaagggcttcagagatgagccctacttcaaggaggagctggtggatgagcccttcctggacctgggcaagagcttccacagccagcagaaggagattgagcagagcaaggaggcctgggagatgcatgagttcctgaccccccggctgcaggagatggatgaggagcgggagatcctggtggatgaggagtatgagctgtaccaggaccccagccccagcatggagctgtaccccctgagccacatccaggaggccacccctgtgcccagcgtgaatgagctgcacttcggcacccagtggctgcatgacaatgagcccagcgagagccaggaggccaggacaggccgcacagtgtacagccaggaggcccagccctacggctactgcccagaaaatgtgatgaaggagaactttgtgatggagagcctgcccagcgtgcccagcacagagggcaacagccagcagggccgctttgatgacctggagaacctgaacagcctggccaagaccagcctggacctgggcatgatccccaatgatgtgcagggccccagcctgctgattgacctgcctgtggtggcccagaggcgggagcaggaggacctgcccctgtaccagcaccaggccaccagggtcatcagcaaggccagcgcctacacaggcatgctgagcagccgctatgccacagacacctgtgagctgcctgagcgggaggagggggagggggaggagacccccaacttcagccactggggccccccacgcatcgtggagatcttccgggagcccaacgtgtccctgggcatcagcatcgtgggcggccagaccgtcatcaagaggctgaagaatggagaggagctgaagggcatcttcatcaagcaggtgctggaggacagccctgctgggaagaccaatgccctgaagacaggagacaagatcctggaggtgtctggagtggacctgcagaatgccagccacagcgaggccgtggaggccatcaagaatgccggcaaccctgtggtgttcatcgtgcagagcctgagcagcacccccagggtcatccccaacgtgcacaacaaggccaacaagatcactggaaaccagaaccaggacacccaggagaagaaggagaagaggcagggcacagcccccccacccatgaagctgcccccaccctacaaggccctgacagatgacagtgatgaaaatgaggaggaggatgccttcacagaccagaagatccggcagagatatgctgacctgcccggggagctgcacatcatcgagctggagaaggacaagaatggcctgggcctgagcctggccggcaacaaggacaggagcaggatgagcatctttgtggtgggcatcaaccctgagggccctgctgctgctgatggccgcatgagaattggagatgagctgctggagatcaacaaccagatcctgtatggccgcagccaccagaatgccagcgccatcatcaagacagcccccagcaaggtgaagctggtgttcatcagaaatgaagatgctgtgaaccagatggctgtgacccccttccctgtgcccagcagcagccccagcagcattgaggaccagagcggcacagagcccatcagcagcgaggaggatggctctgtggaggtgggcatcaagcagctgcctgagagcgagagcttcaagctggccgtgtcccagatgaagcagcagaagtaccccaccaaggtgtccttcagcagccaggagatccccctggccccagccagcagctaccacagcacagatgctgacttcaccggctacggcggcttccaggcccccctgtctgtggaccctgccacctgccccatcgtgcccggccaggagatgatcatcgagatcagcaagggccgcagcggcctgggcctgagcatcgtgggcggcaaggacacccccctggtgaatggagtggacctgaggaacagcagccatgaggaggccatcacagccctgcggcagaccccccagaaggtgcggctggtggtgtacagagatgaggcccactacagagatgaggagaacctggagatcttccctgtggacctgcagaagaaggccggccggggcctgggcctgagcatcgtgggcaagtag

SEQ ID NO: 155922 - DNA, 1359 bp, synthetic construct
  misc_feature 1..1359: note = Description of Artificial Sequence: Synthetic coding sequence
  source 1..1359: mol_type = other DNA
atggtgcagggcggcttccctgagaagatccggcagagatatgctgacctgcccggggagctgcacatcatcgagctggagaaggacaagaatggcctgggcctgagcctggccggcaacaaggacaggagcaggatgagcatctttgtggtgggcatcaaccctgagggccctgctgctgctgatggccgcatgagaattggagatgagctgctggagatcaacaaccagatcctgtatggccgcagccaccagaatgccagcgccatcatcaagacagcccccagcaaggtgaagctggtgttcatcagaaatgaagatgctgtgaaccagatggctgtgacccccttccctgtgcccagcagcagccccagcagcattgaggaccagagcggcacagagcccatcagcagcgaggaggatggctctgtggaggtgggcatcaagcagctgcctgagagcgagagcttcaagctggccgtgtcccagatgaagcagcagaagtaccccaccaaggtgtccttcagcagccaggagatccccctggccccagccagcagctaccacagcacagatgctgacttcaccggctacggcggcttccaggcccccctgtctgtggaccctgccacctgccccatcgtgcccggccaggagatgatcatcgagatcagcaagggccgcagcggcctgggcctgagcatcgtgggcggcaaggacacccccctcttctggaggctgggcagcccccgggcctggagccagcacctggtgcgggccttcatgctgcaccaccctgtgacagaggtggagggccagaatgccatcgtcatccacgaggtgtatgaggagggcgctgctgccagagatggccgcctgtgggccggggaccagatcctggaggtgaatggagtggacctgaggaacagcagccatgaggaggccatcacagccctgcggcagaccccccagaaggtgcggctggtggtgtacagagatgaggcccactacagagatgaggagaacctggagatcttccctgtggacctgcagaagaaggccggccggggcctgggcctgagcatcgtgggcaagagaaatggaagtggagtcttcatcagtgacatcgtgaagggcggcgctgctgacctggatggccgcctcatccagggcgaccagatcctgtctgtgaatggagaggacatgagaaatgccagccaggagaccgtggccaccatcctgaagtgtgcccagggcctggtgcagctggagatcggccgcctgcgggccggctcctggaccagcgcccggaccaccagccagaacagccaggtggtggatggcttcagcagtgactag

SEQ ID NO: 155923 - DNA, 594 bp, synthetic construct
  misc_feature 1..594: note = Description of Artificial Sequence: Synthetic coding sequence
  source 1..594: mol_type = other DNA
atggctgtgacccccttccctgtgcccagcagcagccccagcagcattgaggaccagagcggcacagagcccatcagcagtgaagaagatggctctgtggaggtgggcatcaagcagctgcctgagagcgagagcttcaagctggccgtgtcccagatgaagcagcagaagtaccccaccaaggtgtccttcagcagccaggagatccccctggccccagccagcagctaccacagcacagatgctgacttcaccggctatggaggcttccaggcccccctgtctgtggaccctgccacctgccccatcgtgcccggccaggagatgatcatcgagatcagcaagggccgcagcggcctgggcctgagcatcgtgggcggcaaggacacccccctggtgaatggagtggacctgaggaacagcagccatgaggaggccatcacagccctgcggcagaccccccagaaggtgcggctggtggtgtacagagatgaggcccactacagagatgaggagaacctggagatcttccctgtggacctgcagaagaaggccggccggggcctgggcctgagcatcgtgggcaagaggtag

SEQ ID NO: 155924 - DNA, 1236 bp, synthetic construct
  misc_feature 1..1236: note = Description of Artificial Sequence: Synthetic coding sequence
  source 1..1236: mol_type = other DNA
atgagccctgcccggctgcggccccggctgcacttctgcctggtgctgctgctgctgctggtggtgcctgctgcctggggctgcggccctggccgggtggtgggcagcagaagaagaccacccaggaagctggtgcccctggcctacaagcagttcagccccaacgtgcctgagaagaccctgggcgccagcggccgctatgagggcaagatcgcccggagcagcgagcgcttcaaggagctgacccccaactacaacccagacatcatcttcaaggatgaagaaaatactggagctgaccggctgatgacccagcgctgcaaggaccggctgaacagcctggccatctctgtgatgaaccagtggccaggagtgaagctgcgggtgacagagggctgggatgaagatggccaccacagcgaggagagcctgcactatgagggccgggctgtggacatcaccaccagtgaccgggacaggaacaagtatggcctgctggcccggctggccgtggaggccggctttgactgggtgtactatgagagcaaggcccacgtgcactgcagcgtgaagtctgagcacagcgctgctgccaagacaggaggctgcttccctgctggggcccaggtgcggctggagagcggggcccgggtggccctgtctgctgtgcggcctggggacagagtgctggccatgggagaagatggcagccccaccttcagtgatgtgctgatcttcctggaccgggagccccaccggctgcgggccttccaggtgattgagacccaggaccccccccggcggctggccctgaccccagcccacctgctcttcaccgctgacaaccacacagagcctgctgcccgcttccgggccacctttgccagccacgtgcagcccggccagtatgtgctggtggccggcgtgcccggcctgcagcctgcccgggtggccgctgtgtccacccacgtggccctgggcgcctatgcccccctgaccaagcacggcaccctggtggtggaggatgtggtggccagctgctttgctgctgtggccgaccaccacctggcccagctggccttctggcccctgcggctcttccacagcctggcctggggctcctggaccccaggagagggcgtgcactggtacccccagctgctgtaccgcctgggccgcctgctgctggaggagggcagcttccaccccctgggcatgtctggagctggcagctag

SEQ ID NO: 155925 - DNA, 1212 bp, synthetic construct
  misc_feature 1..1212: note = Description of Artificial Sequence: Synthetic coding sequence
  source 1..1212: mol_type = other DNA
atggcccacgccatggagaacagctggaccatcagcaaggagtaccacattgatgaggaggtgggctttgccctgcccaacccccaggagaacctgcctgacttctacaatgactggatgttcatcgccaagcacctgcctgacctgattgagagcggccagctgcgggagcgggtggagaagctgaacatgctgagcattgaccacctgacagaccacaagagccagaggctggcccggctggtgctgggctgcatcaccatggcctacgtgtggggcaagggccatggagatgtgaggaaggtgctgcccagaaatattgctgtgccctactgccagctgagcaagaagctggagctgccccccatcctggtgtatgctgactgtgtgctggccaactggaagaagaaggaccccaacaagcccctgacctatgagaacatggatgtgctcttctccttcagagatggagactgcagcaagggcttcttcctggtgtccctgctggtggagattgctgctgccagcgccatcaaggtgatccccaccgtcttcaaggccatgcagatgcaggagcgggacaccctgctgaaggccctgctggagatcgccagctgcctggagaaggccctgcaggtgttccaccagatccatgaccacgtgaaccccaaggccttcttctctgtgctgcgcatctacctgagcggctggaagggcaacccccagctgagtgatggcctggtgtatgagggcttctgggaggaccccaaggagtttgctgggggcagcgctggccagagcagcgtcttccagtgctttgatgtgctgctgggcatccagcagacagctgggggcggccacgccgcccagttcctgcaggacatgaggcgctacatgcccccagcccacaggaacttcctgtgcagcctggagagcaaccccagcgtgcgggagtttgtgctgagcaaaggagatgctggcctgcgggaggcctatgatgcctgtgtgaaggccctggtgtccctgcggagctaccacctgcagatcgtgaccaagtacatcctgatcccagccagccagcagcccaaggagaacaagaccagcgaggaccccagcaagctggaggccaagggcactggaggaacagacctgatgaacttcctgaagacagtgcgcagcaccacagagaagagcctgctgaaggagggctag

SEQ ID NO: 155926 - DNA, 237 bp, synthetic construct
  misc_feature 1..237: note = Description of Artificial Sequence: Synthetic coding sequence
  source 1..237: mol_type = other DNA
atggcccacgccatggagaacagctggaccatcagcaaggagtaccacattgatgaggaggtgggctttgccctgcccaacccccaggagaacctgcctgacttctacaatgactggatgttcatcgccaagcacctgcctgacctgattgagagcggccagctgcgggagcgggtggagaagctgaacatgctgagcattgaccacctgacagaccacaagagccagaggctgtag

SEQ ID NO: 155927 - DNA, 543 bp, synthetic construct
  misc_feature 1..543: note = Description of Artificial Sequence: Synthetic coding sequence
  source 1..543: mol_type = other DNA
atggcccacgccatggagaacagctggaccatcagcaaggagtaccacattgatgaggaggtgggctttgccctgcccaacccccaggagaacctgcctgacttctacaatgactggatgttcatcgccaagcacctgcctgacctgattgagagcggccagctgcgggagcgggtggagaagctgaacatgctgagcattgaccacctgacagaccacaagagccagaggctggcccggctggtgctgggctgcatcaccatggcctacgtgtggggcaagggccatggagatgtgaggaaggtgctgcccagaaatattgctgtgccctactgccagctgagcaagaagctggagctgccccccatcctggtgtatgctgactgtgtgctggccaactggaagaagaaggaccccaacaagcccctgacctatgagaacatggatgtgctcttctccttcagagatggagactgcagcaagggcttcttcctggtgtccctgctggtggagattgctgctgccagcgccatcaaggtgtag

SEQ ID NO: 155928 - DNA, 1212 bp, synthetic construct; identical to SEQ ID NO: 155925
  misc_feature 1..1212: note = Description of Artificial Sequence: Synthetic coding sequence
  source 1..1212: mol_type = other DNA

SEQ ID NO: 155929 - DNA, 144 bp, synthetic construct
  misc_feature 1..144: note = Description of Artificial Sequence: Synthetic coding sequence
  source 1..144: mol_type = other DNA
atggcccacgccatggagaacagctggaccatcagcaaggagtaccacattgatgaggaggtgggctttgccctgcccaacccccaggagaacctgcctgacttctacaatgactggatgttcatcgccaagcacctgccctag

SEQ ID NO: 155930 - DNA, 1224 bp, synthetic construct
  misc_feature 1..1224: note = Description of Artificial Sequence: Synthetic coding sequence
  source 1..1224: mol_type = other DNA
atggagccccaccggcccaacgtgaagacagctgtgcccctgagcctggagagctaccacatcagcgaggagtatggcttcctgctgcctgacagcctgaaggagctgcctgaccactaccggccctggatggagatcgccaacaagctgccccagctgattgatgcccaccagctgcaggcccacgtggacaagatgcccctgctgagctgccagttcctgaagggccaccgggagcagaggctggcccacctggtgctgtccttcctgaccatgggctacgtgtggcaggagggggaggcccagcctgctgaggtgctgcccaggaacctggccctgccctttgtggaggtgtccaggaacctgggcctgccccccatcctggtgcacagcgacctggtgctgaccaactggaccaagaaggaccctgatggcttcctggagatcggcaacctggagaccatcatctccttccctggaggagagagcctgcacggcttcatcctggtgacagccctggtggagaaggaggccgtgcccggcatcaaggccctggtgcaggccaccaatgccatcctgcagcccaaccaggaggccctgctgcaggccctgcagaggctgcggctgagcatccaggacatcaccaagaccctgggccagatgcatgactatgtggaccctgacatcttctacgccggcatccgcatcttcctgagcggctggaaggacaacccagccatgcctgctggcctgatgtatgaaggagtgtcccaggagcccctgaagtacagcggcggcagcgctgcccagagcacagtgctgcacgcctttgatgagttcctgggcatccgccacagcaaggagagcggggacttcctgtacaggatgagggactacatgccacccagccacaaggccttcatcgaggacatccacagcgcccccagcctgcgggactacatcctgagcagcggccaggaccacctgctgacagcctacaaccagtgtgtgcaggccctggccgagctgcggagctaccacatcaccatggtgaccaagtacctgatcacagctgctgccaaggccaagcacggcaagcccaaccacctgcccggccccccccaggccctgaaggaccggggcaccggcggcacagctgtgatgtccttcctgaagtctgtgcgggacaagaccctggagagcatcctgcacccccggggctag

SEQ ID NO: 155931 - DNA, 1263 bp, synthetic construct
  misc_feature 1..1263: note = Description of Artificial Sequence: Synthetic coding sequence
  source 1..1263: mol_type = other DNA
atgctgcacttccactactatgacaccagcaacaagatcatggagccccaccggcccaacgtgaagacagctgtgcccctgagcctggagagctaccacatcagcgaggagtatggcttcctgctgcctgacagcctgaaggagctgcctgaccactaccggccctggatggagatcgccaacaagctgccccagctgattgatgcccaccagctgcaggcccacgtggacaagatgcccctgctgagctgccagttcctgaagggccaccgggagcagaggctggcccacctggtgctgtccttcctgaccatgggctacgtgtggcaggagggggaggcccagcctgctgaggtgctgcccaggaacctggccctgccctttgtggaggtgtccaggaacctgggcctgccccccatcctggtgcacagcgacctggtgctgaccaactggaccaagaaggaccctgatggcttcctggagatcggcaacctggagaccatcatctccttccctggaggagagagcctgcacggcttcatcctggtgacagccctggtggagaaggaggccgtgcccggcatcaaggccctggtgcaggccaccaatgccatcctgcagcccaaccaggaggccctgctgcaggccctgcagaggctgcggctgagcatccaggacatcaccaagaccctgggccagatgcatgactatgtggaccctgacatcttctacgccggcatccgcatcttcctgagcggctggaaggacaacccagccatgcctgctggcctgatgtatgagggcgtgtcccaggagcccctgaagtacagcggcggcagcgctgcccagagcacagtgctgcacgcctttgatgagttcctgggcatccgccacagcaaggagagcggggacttcctgtacaggatgagggactacatgccacccagccacaaggccttcatcgaggacatccacagcgcccccagcctgcgggactacatcctgagcagcggccaggaccacctgctgacagcctacaaccagtgtgtgcaggccctggccgagctgcggagctaccacatcaccatggtgaccaagtacctgatcacagctgctgccaaggccaagcacggcaagcccaaccacctgcccggccccccccaggccctgaaggaccggggcactggaggaacagctgtgatgtccttcctgaagtctgtgcgggacaagaccctggagagcatcctgcacccccggggctag

SEQ ID NO: 155932 - DNA, 792 bp, synthetic construct
  misc_feature 1..792: note = Description of Artificial Sequence: Synthetic coding sequence
  source 1..792: mol_type = other DNA
atgaagggcggcttcaccggaggagatgagtaccagaagcacttcctgccccgggactacctggccacctactacagctttgatggcagccccagccctgaggccgagatgctgaagttcaacctggagtgcctgcacaagacctttggacctgggggcctgcagggcgacaccctgattgacatcggcagcggccccaccatctaccaggtgctggccgcctgtgacagcttccaggacatcaccctgagtgacttcacagacaggaaccgggaggagctggagaagtggctgaagaaggagcccggggcctatgactggaccccagctgtgaagtttgcctgtgagctggagggcaacagcggccgctgggaggagaaggaggagaagctgcgggctgctgtgaagagggtgctgaagtgtgatgtgcacctgggcaaccccctggccccagctgtgctgcccctggccgactgtgtgctgaccctgctggccatggagtgtgcctgctgcagcctggatgcctaccgggccgccctgtgcaacctggccagcctgctgaagccaggcggccacctggtgaccaccgtgaccctgcggctgcccagctacatggtgggcaagcgggagttcagctgtgtggccctggagaaggaggaggtggagcaggccgtgctggatgctggctttgacatcgagcagctgctgcacagcccccagagctacagcgtgaccaatgctgccaacaacggggtgtgcttcatcgtggccaggaagaagccaggcccctag

SEQ ID NO: 155933 - DNA, 789 bp, synthetic construct
  misc_feature 1..789: note = Description of Artificial Sequence: Synthetic coding sequence
  source 1..789: mol_type = other DNA
atgaagggcggcttcaccggaggagatgagtaccagaagcacttcctgccccgggactacctggccacctactacagctttgatggcagccccagccctgaggccgagatgctgaagttcaacctggagtgcctgcacaagacctttggacctggcctgcagggcgacaccctgattgatattggcagcggccccaccatctaccaggtgctggccgcctgtgacagcttccaggacatcaccctgagtgacttcacagacaggaaccgggaggagctggagaagtggctgaagaaggagcccggggcctatgactggaccccagctgtgaagtttgcctgtgagctggagggcaacagcggccgctgggaggagaaggaggagaagctgcgggctgctgtgaagagggtgctgaagtgtgatgtgcacctgggcaaccccctggccccagctgtgctgcccctggccgactgtgtgctgaccctgctggccatggagtgtgcctgctgcagcctggatgcctacagagctgccctgtgcaacctggccagcctgctgaagccaggcggccacctggtgaccaccgtgaccctgcggctgcccagctacatggtgggcaagcgggagttcagctgtgtggccctggagaaggaggaggtggagcaggccgtgctggatgctggctttgatattgagcagctgctgcacagcccccagagctacagcgtgaccaatgctgccaacaatggagtgtgcttcatcgtggccaggaagaagccaggcccctag

SEQ ID NO: 155934 - DNA, 600 bp, synthetic construct
  misc_feature 1..600: note = Description of Artificial Sequence: Synthetic coding sequence
  source 1..600: mol_type = other DNA
atgaagagcggcctgtggtacttcttcctgttctgcctgcgcatcaaggtgctgactggagagatcaatggaagtgccaactatgagatgttcatcttccacaatggaggagtgcagatcctgtgcaagtacccagacatcgtgcagcagttcaagatgcagctgctgaagggcggccagatcctgtgtgacctgaccaagaccaagggcagcggcaacacagtgtccatcaagagcctgaagttctgccacagccagctgagcaacaacagcgtgtccttcttcctgtacaacctggaccacagccacgccaactactacttctgcaacctgagcatctttgaccccccacccttcaaggtgaccctgaccggcggctacctgcacatctatgagagccagctgtgctgccagctgaagttctggctgcccatcggctgtgccgcctttgtggtggtgtgcatcctgggctgcatcctgatctgctggctgaccaagaagaagtacagcagctctgtgcatgaccccaatggagagtacatgttcatgagagctgtgaacacagccaagaagagccggctgacagatgtgaccctgtag

SEQ ID NO: 155935 - DNA, 507 bp, synthetic construct
  misc_feature 1..507: note = Description of Artificial Sequence: Synthetic coding sequence
  source 1..507: mol_type = other DNA
atgaagagcggcctgtggtacttcttcctgttctgcctgcgcatcaaggtgctgactggagagatcaatggaagtgccaactatgagatgttcatcttccacaatggaggagtgcagatcctgtgcaagtacccagacatcgtgcagcagttcaagatgcagctgctgaagggcggccagatcctgtgtgacctgaccaagaccaagggcagcggcaacacagtgtccatcaagagcctgaagttctgccacagccagctgagcaacaacagcgtgtccttcttcctgtacaacctggaccacagccacgccaactactacttctgcaacctgagcatctttgaccccccacccttcaaggtgaccctgaccggcggctacctgcacatctatgagagccagctgtgctgccagctgaagttctggctgcccatcggctgtgccgcctttgtggtggtgtgcatcctgggctgcatcctgatctgctggctgaccaagaagatgtag

SEQ ID NO: 155936 - DNA, 930 bp, synthetic construct
  misc_feature 1..930: note = Description of Artificial Sequence: Synthetic coding sequence
  source 1..930: mol_type = other DNA
atgaggctgggcagccctggcctgctcttcctgctcttcagcagcctgcgggctgacacccaggagaaggaggtgcgggccatggtgggcagtgatgtggagctgagctgtgcctgcccagagggcagcagatttgacctgaatgatgtgtatgtgtactggcagaccagcgagagcaagacagtggtgacctaccacatcccccagaacagcagcctggagaatgtggacagccgctacagaaacagagccctgatgagccctgctggcatgctgcggggggacttcagcctgcggctcttcaacgtgaccccccaggatgagcagaagttccactgcctggtgctgagccagagcctgggcttccaggaggtgctgtctgtggaggtgaccctgcacgtggccgccaacttctctgtgcctgtggtgtctgccccccacagccccagccaggatgagctgaccttcacctgcaccagcatcaatggctacccccggcccaacgtgtactggatcaacaagacagacaacagcctgctggaccaggccctgcagaatgacaccgtcttcctgaacatgaggggcctgtatgatgtggtgtctgtgctgagaattgcccggacccccagcgtgaacatcggctgctgcattgaaaatgtgctgctgcagcagaacctgactgtgggcagccagacaggaaatgacatcggggagcgggacaagatcacagagaaccctgtgtccactggagagaagaatgctgccacctggagcatcctggccgtgctgtgcctgctggtggtggtggccgtggccatcggctgggtgtgccgggaccgctgcctgcagcacagctatgctggggcctgggccgtgtccccagagacagagctgacagagagctggaacctgctgctgctgctgtcctag

SEQ ID NO: 155937 - DNA, 558 bp, synthetic construct
  misc_feature 1..558: note = Description of Artificial Sequence: Synthetic coding sequence
  source 1..558: mol_type = other DNA
atgaggctgggcagccctggcctgctcttcctgctcttcagcagcctgcgggccgccaacttctctgtgcctgtggtgtctgccccccacagccccagccaggatgagctgaccttcacctgcaccagcatcaatggctacccccggcccaacgtgtactggatcaacaagacagacaacagcctgctggaccaggccctgcagaatgacacagtgttcctgaacatgaggggcctgtatgatgtggtgtctgtgctgcgcatcgcccggaccccatctgtgaacatcggctgctgcattgaaaatgtgctgctgcagcagaacctgactgtgggcagccagacaggaaatgacattggagagcgggacaagatcacagaaaatcctgtgtccactggagagaagaatgctgccacctggagcatcctggccgtgctgtgcctgctggtggtggtggccgtggccatcggctgggtgtgccgggaccgctgcctgcagcacagctatgctggggcctgggccgtgtccccagagacagagctgaccggccacgtgtag

SEQ ID NO: 155938 - DNA, 909 bp, synthetic construct
  misc_feature 1..909: note = Description of Artificial Sequence: Synthetic coding sequence
  source 1..909: mol_type = other DNA
atgaggctgggcagccctggcctgctcttcctgctcttcagcagcctgcgggctgacacccaggagaaggaggtgcgggccatggtgggcagtgatgtggagctgagctgtgcctgcccagagggcagcagatttgacctgaatgatgtgtatgtgtactggcagaccagcgagagcaagacagtggtgacctaccacatcccccagaacagcagcctggagaatgtggacagccgctacagaaacagagccctgatgagccctgctggcatgctgcggggggacttcagcctgcggctcttcaacgtgaccccccaggatgagcagaagttccactgcctggtgctgagccagagcctgggcttccaggaggtgctgtctgtggaggtgaccctgcacgtggccgccaacttctctgtgcctgtggtgtctgccccccacagccccagccaggatgagctgaccttcacctgcaccagcatcaatggctacccccggcccaacgtgtactggatcaacaagacagacaacagcctgctggaccaggccctgcagaatgacaccgtcttcctgaacatgaggggcctgtatgatgtggtgtctgtgctgagaattgcccggacccccagcgtgaacatcggctgctgcattgaaaatgtgctgctgcagcagaacctgactgtgggcagccagacaggaaatgacatcggggagcgggacaagatcacagagaaccctgtgtccactggagagaagaatgctgccacctggagcatcctggccgtgctgtgcctgctggtggtggtggccgtggccatcggctgggtgtgccgggaccgctgcctgcagcacagctatgctggggcctgggccgtgtccccagagacagagctgactggacatgtgtag

SEQ ID NO: 155939 - DNA, 1101 bp, synthetic construct
  misc_feature 1..1101: note = Description of Artificial Sequence: Synthetic coding sequence
  source 1..1101: mol_type = other DNA
atggtgctgcacctgctgctcttcctgctgctgaccccccagggcggccacagctgccagggcctggagctggcccgggagctggtgctggccaaggtgcgggccctcttcctggatgccctgggccccccagctgtgacccgggagggcggggaccccggggtgcggcggctgcccaggagacatgccctgggcggcttcacccaccggggcagcgagcctgaggaggaggaggatgtgtcccaggccatcctcttccctgccacagatgccagctgtgaggacaagtctgctgcccggggcctggcccaggaggccgaggagggcctcttccgctacatgttccggcccagccagcacaccaggagccggcaggtgaccagcgcccagctgtggttccacacaggcctggaccggcagggcacagctgccagcaacagcagcgagcccctgctgggcctgctggccctgagccctgggggccctgtggccgtgcccatgagcctgggccacgccccaccccactgggccgtgctgcacctggccaccagcgccctgagcctgctgacccaccctgtgctggtgctgctgctgcgctgccccctgtgcacctgcagcgcccggcctgaggccacccccttcctggtggcccacaccaggaccaggcctccttctggaggagagcgggcccggcgcagcacccccctgatgtcctggccctggagccccagcgccctgcggctgctgcagaggcctcctgaggagcctgctgcccacgccaactgccaccgggtggccctgaacatctccttccaggagctgggctgggagcgctggatcgtgtacccacccagcttcatcttccactactgccacggcggctgcggcctgcacatcccccccaacctgagcctgcctgtgcctggggccccacccaccccagcccagccctacagcctgctgcccggggcccagccctgctgtgccgccctgcccggcaccatgaggcccctgcacgtgaggaccaccagtgatggcggctacagcttcaagtatgagaccgtgcccaacctgctgacccagcactgtgcctgcatctag

SEQ ID NO: 155940 - DNA, 1281 bp, synthetic construct
  misc_feature 1..1281: note = Description of Artificial Sequence: Synthetic coding sequence
  source 1..1281: mol_type = other DNA
atgcccctgctgtggctgcggggcttcctgctggccagctgctggatcatcgtgcgcagcagccccaccccaggcagcgagggccacagcgctgccccagactgccccagctgtgccctggccgccctgcccaaggatgtgcccaacagccagcctgagatggtggaggccgtgaagaagcacatcctgaacatgctgcacctgaagaagaggccagatgtgacccagcctgtgcccaaggccgccctgctgaatgccatcaggaagctgcacgtgggcaaggtgggagaaaatggctacgtggagattgaagatgacattggaagaagagctgagatgaatgagctgatggagcagaccagcgagatcatcacctttgctgagagcggcacagccaggaagaccctgcactttgagatcagcaaggagggcagtgacctgtctgtggtggagagagctgaggtgtggctgttcctgaaggtgcccaaggccaacagaaccaggaccaaggtgaccatccgcctcttccagcagcagaagcacccccagggcagcctggacaccggggaggaggccgaggaggtgggcctgaagggggagaggtctgagctgctgctgtctgagaaggtggtggatgccaggaagagcacctggcacgtgtttcctgtgagcagcagcatccagaggctgctggaccagggcaagagcagcctggatgtgcgcatcgcctgtgagcagtgccaggagagcggggccagcctggtgctgctgggcaagaagaagaagaaggaggaggagggggagggcaagaagaagggcggcggggagggcggggccggggctgatgaggagaaggagcagagccaccggcccttcctgatgctgcaggcccggcagagcgaggaccacccccacagaagaagaagaagaggcctggagtgtgatggcaaggtgaacatctgctgcaagaagcagttctttgtgtccttcaaggacatcggctggaatgactggatcatcgcccccagcggctaccacgccaactactgtgaaggagaatgtcccagccacatcgccggcaccagcggcagcagcctgtccttccacagcaccgtcatcaaccactacaggatgaggggccacagcccctttgccaacctgaagagctgctgcgtgcccaccaagctgcggcccatgtccatgctgtactatgatgatggccagaacatcatcaagaaggacatccagaacatgattgtggaggagtgtggctgcagctag

SEQ ID NO: 155941 - DNA, 1281 bp, synthetic construct; identical to SEQ ID NO: 155940
  misc_feature 1..1281: note = Description of Artificial Sequence: Synthetic coding sequence
  source 1..1281: mol_type = other DNA

SEQ ID NO: 155942 - DNA, 1224 bp, synthetic construct
  misc_feature 1..1224: note = Description of Artificial Sequence: Synthetic coding sequence
  source 1..1224: mol_type = other DNA
atggatggcctgcccggccgggccctgggcgccgcctgcctgctgctgctggccgccggctggctgggccctgaggcctggggcagccccaccccaccacccaccccagctgcccctcctcctcctcctcctcctggcagccctgggggcagccaggacacctgcaccagctgtggcggcttccggcggcctgaggagctgggccgggtggatggagacttcctggaggccgtgaagaggcacatcctgagccggctgcagatgaggggccggcccaacatcacccatgctgtgcccaaggccgccatggtgacagccctgaggaagctgcacgccggcaaggtgagagaagatggccgggtggagatcccccacctggatggccacgccagccctggagcagatggccaggagcgggtgtctgagatcatcagctttgctgagacagatggcctggccagcagccgggtgcggctgtacttcttcatcagcaatgaaggcaaccagaacctgtttgtggtgcaggccagcctgtggctgtacctgaagctgctgccctacgtgctggagaagggcagcaggaggaaggtgcgggtgaaggtgtacttccaggagcagggccacggggaccgctggaacatggtggagaagagggtggacctgaagaggagcggctggcacaccttccccctgacagaggccatccaggccctgtttgagcggggggagcggcggctgaacctggatgtgcagtgtgacagctgccaggagctggccgtggtgcctgtgtttgtggaccctggagaggagagccaccggccctttgtggtggtgcaggcccggctgggggacagccgccaccgcatcaggaagaggggcctggagtgtgatggccgcaccaacctgtgctgccggcagcagttcttcatcgacttccggctgattggctggaatgactggatcatcgcccccaccggctactacggcaactactgtgagggcagctgcccagcctacctggccggcgtgcccggcagcgccagcagcttccacacagctgtggtgaaccagtacaggatgaggggcctgaaccctggcaccgtgaacagctgctgcatccccaccaagctgagcaccatgtccatgctgtactttgatgatgagtacaacatcgtgaagagagatgtgcccaacatgattgtggaggagtgtggctgtgcctag

SEQ ID NO: 155943 - DNA, 1059 bp, synthetic construct
  misc_feature 1..1059: note = Description of Artificial Sequence: Synthetic coding sequence
  source 1..1059: mol_type = other DNA
atgaccagcagcctgctgctggccttcctgctgctggcccccaccaccgtggccaccccccgggccggcggccagtgcccagcctgtggcggccccaccctggagctggagagccagcgggagctgctgctggacctggccaagaggagcatcctggacaagctgcacctgacccagaggcccaccctgaacagacctgtgtcccgggccgccctgaggacagccctgcagcacctgcacggcgtgccccagggcgccctgctggaggacaaccgggagcaggagtgtgagatcatcagctttgctgagaccggcctgagcaccatcaaccagacccggctggacttccacttcagcagtgacagaacagctggggaccgggaggtgcagcaggccagcctgatgttctttgtgcagctgcccagcaacaccacctggaccctgaaggtgcgggtgctggtgctgggcccccacaacaccaacctgaccctggccacccagtacctgctggaggtggatgccagcggctggcaccagctgcccctgggccctgaggcccaggccgcctgcagccagggccacctgaccctggagctggtgctggagggccaggtggcccagagcagcgtcatcctgggcggggccgcccaccggccctttgtggccgcccgggtgcgggtgggcggcaagcaccagatccacagaagaggcatcgactgccagggcggcagcaggatgtgctgccggcaggagttctttgtggacttccgggagatcggctggcatgactggatcatccagcctgagggctacgccatgaacttctgcatcggccagtgccccctgcacatcgccggcatgcctggcattgctgccagcttccacacagctgtgctgaacctgctgaaggccaacacagctgctggcaccactggaggcggcagctgctgcgtgcccacagcccggcggcccctgagcctgctgtactatgaccgggacagcaacatcgtgaagacagacatcccagacatggtggtggaggcctgtggctgcagctag

SEQ ID NO: 155944 - DNA, 1053 bp, synthetic construct
  misc_feature 1..1053: note = Description of Artificial Sequence: Synthetic coding sequence
  source 1..1053: mol_type = other DNA
atgaggctgcctgatgtgcagctgtggctggtgctgctgtgggccctggtgcgggcccagggcaccggctctgtgtgccccagctgtggcggcagcaagctggccccccaggccgagcgggccctggtgctggagctggccaagcagcagatcctggatggcctgcacctgaccagccggccccgcatcacccaccccccaccccaggccgccctgacccgggccctgcggcggctgcagcccggctctgtggcccctggaaatggagaggaggtgatcagctttgccaccgtgacagacagcaccagcgcctacagcagcctgctgaccttccacctgagcacccccaggagccaccacctgtaccacgcccggctgtggctgcacgtgctgcccaccctgcccggcaccctgtgcctgcgcatcttccgctggggccccaggagaagacggcagggcagcaggaccctgctggccgagcaccacatcaccaacctgggctggcacaccctgaccctgcccagcagcggcctgcggggggagaagtctggagtgctgaagctgcagctggactgccggcccctggagggcaacagcacagtgacaggccagccccggcggctgctggacacagctggccaccagcagcccttcctggagctgaagatccgggccaatgagcccggggccggccgggcccggcggaggacccccacctgtgagcccgccacccccctgtgctgcagaagagaccactacgtggacttccaggagctgggctggagggactggatcctgcagcctgagggctaccagctgaactactgcagcggccagtgccccccccacctggccggcagccctggcattgctgccagcttccacagcgctgtgttcagcctgctgaaggccaacaacccctggccagccagcaccagctgctgcgtgcccacagcccggcggcccctgagcctgctgtacctggaccacaatggaaatgtggtgaagacagatgtgcctgacatggtggtggaggcctgtggctgcagctag

SEQ ID NO: 155945 - DNA, 4062 bp, synthetic construct
  misc_feature 1..4062: note = Description of Artificial Sequence: Synthetic coding sequence
  source 1..4062: mol_type = other DNA
atgagcagccccatgccagactgcaccagcaaatgtcgcagcctgaagcacgccctggatgtgctgtctgtggtgaccaagggcagcgagaaccagatcaaggccttcctgagcagccactgctacaatgctgccaccatcaaggatgtgtttggaagaaatgccctgcacctggtgagcagctgtgggaagaagggcgtgctggactggctgatccagaagggcgtggacctgctggtgaaggacaaggagagcggctggacagccctgcacaggagcatcttctacggccacatcgactgtgtgtggagcctgctgaagcacggcgtgtccctgtacatccaggacaaggagggcctgagcgccctggacctggtgatgaaggaccggcccacccacgtggtgttcaagaacacagaccccacagatgtgtacacctggggagacaacaccaacttcaccctgggccacggcagccagaacagcaagcaccaccctgagctggtggacctcttcagccgcagcggcatctacatcaagcaggtggtgctgtgcaagttccacagcgtcttcctgagccagaagggccaggtgtacacctgtggccacggccctgggggccgcctgggccatggagatgagcagacctgcctggtgccccggctggtggagggcctgaatggccacaactgcagccaggtggccgccgccaaggaccacacagtggtgctgacagaagatggctgtgtgtacaccttcggcctgaacatcttccaccagctgggcatcatccccccacccagcagctgcaatgtgccccggcagatccaggccaagtacctgaagggccgcaccatcattggagtggccgccggccgcttccacacagtgctgtggacccgggaggccgtgtacaccatgggcctgaatggaggccagctgggctgcctgctggaccccaatggagagaagtgtgtgacagccccccggcaggtgtctgccctgcaccacaaggacatcgccctgagcctggtggccgccagtgatggagccaccgtgtgtgtgaccaccaggggggacatctacctgctggccgactaccagtgcaagaagatggccagcaagcagctgaacctgaagaaggtgctggtgtctgggggccacatggagtacaaggtggaccctgagcacctgaaggaaaatggaggccagaagatctgcatcctggccatggatggagctggccgggtcttctgctggaggtctgtgaacagcagcctgaagcagtgccgctgggcctacccccggcaggtgttcatcagtgacatcgccctgaacagaaatgagatcctgtttgtgacccaggatggagagggcttccggggccgctggtttgaggagaagaggaagagcagcgagaagaaggagatcctgagcaacctgcacaacagcagcagtgatgtgtcctatgtgtctgacatcaacagcgtgtatgaaagaatccggctggagaagctgacctttgcccacagagctgtgtctgtgtccacagaccccagcggctgcaactttgccatcctgcagagcgaccccaagaccagcctgtatgagatcccagctgtgagcagcagcagcttctttgaggagtttgggaagctgctgcgggaggctgatgagatggacagcatccatgatgtgaccttccaggtgggcaacagactcttccctgcccacaagtacatcctggccgtgcacagcgacttcttccagaagctgttcctgagtgatggcaacaccagcgagttcacagacatctaccagaaggatgaggacagcgctggctgccacctgtttgtggtggagaaggtgcacccagacatgtttgagtacctgctgcagttcatctacacagacacctgtgacttcctgacccacggcttcaagccccgcatccacctgaacaagaaccctgaggagtaccagggcaccctgaacagccacctgaacaaggtgaacttccatgaagatgacaaccagaagagcgcctttgaggtgtacaagagcaaccaggcccagacagtgtctgagcggcagaagagcaagcccaagagctgcaagaagggcaagaacatcagagaagatgatcctgtgaggatgctgcagacagtggccaagaagtttgacttcagcaacctgagcagccggctggatggagtgcgctttgaaaatgagaagatcaacgtgattgccaagaacacaggcaacaagctgaagctgagccagaagaagtgcagcttcctgtgtgatgtgaccatgaagtctgtggatggcaaggagttcccctgccacaagtgtgtgctgtgtgcccggctggagtacttccacagcatgctgagcagctcctggattgaggccagcagctgtgccgccctggagatgcccatccacagcgacatcctgaaggtgatcctggactacctgtacacagatgaggccgtggtgatcaaggagagccagaatgtggacttcatctgcagcgtgctggtggtggccgaccagctgctgatcacccggctgaaggagatctgtgaggtggccctgacagagaagctgaccctgaagaatgctgccatgctgctggagtttgctgccatgtacagcgccaagcagctgaagctgagctgcctgcagttcatcggcctgaacatggccgccctgctggaggcccggagcctggatgtgctgagtgatggagtgctgaaggacctgtctgagttctacaggaagatgatcccagccatggaccggcgggtcatcaccccctaccaggacggccctgacatctcctacctggaggtggaggatggagacatcttcctgaaggaggagatcaacatggagcagaaccacagcgagaccatgttcaagaaggccaagaccaaggccaagaagaagcccaggaagagaagtgacagcagcggcggctacaacctgagtgacatcatccagagccccagcagcacaggcctgctgaagagcggcaagaccaacagcgtggagagcctgcctgagctgctgaccagtgacagcgagggcagctatgccggcgtgggcagcccccgggacctgcagagcccagacttcaccaccggcttccacagcgacaagattgaggccaaggtgaagccctacgtgaatggcaccagccctgtgtacagccgggaggacctgaagccctgggagaagagccccatcctgaagatcagcgccccccagcccatccccagcaacagaattgacaccaccagcagcgcctcctgggtggccggcagcttcagccctgtgtccccacctgtggtggacctgcggaccatcatggagattgaggagagccggcagaagtgtggggccacccccaagagccacctgggcaagacagtgtcccatggagtgaagctgagccagaagcagaggaagatgattgccctgaccaccaaggagaacaacagcggcatgaacagcatggagaccgtgctcttcacccccagcaaggcccccaagcctgtgaatgcctgggccagcagcctgcacagcgtgagcagcaagagcttccgggacttcctgctggaggagaagaagtctgtgaccagccacagcagcggggaccacgtgaagaaggtgtccttcaagggcatcgagaacagccaggcccccaagatcgtgcgctgcagcacccacggcaccccaggccctgagggcaaccacatcagtgacctgcccctgctggacagccccaacccctggctgagcagctctgtgacagcccccagcatggtggcccctgtgacctttgccagcatcgtggaggaggagctgcagcaggaggccgccctgatccgcagccgggagaagcccctggccctgatccagatcgaggagcacgccatccaggacctgctggtgttctatgaggccttcggcaaccctgaggagtttgtgattgtggagaggaccccccagggccccctggccgtgcccatgtggaacaagcacggctgctag

SEQ ID NO: 155946 - DNA, 1386 bp, synthetic construct
  misc_feature 1..1386: note = Description of Artificial Sequence: Synthetic coding sequence
  source 1..1386: mol_type = other DNA
atgtggcagctgaccagcctgctgctgtttgtggccacctggggcatcagcggcaccccagcccccctggacagcgtcttcagcagcagcgagcgggcccaccaggtgctgcgcatcaggaagagggccaacagcttcctggaggagctgcggcacagcagcctggagcgggagtgcatcgaggagatctgtgactttgaggaggccaaggagatcttccagaatgtggatgacaccctggccttctggagcaagcacgtggatggagaccagtgcctggtgctgcccctggagcacccctgtgccagcctgtgctgcggccacggcacctgcattgatggcatcggcagcttcagctgtgactgccgcagcggctgggagggccgcttctgccagcgggaggtgtccttcctgaactgcagcctggacaatggaggctgcacccactactgcctggaggaggtgggctggaggcgctgcagctgtgcccctggctacaagctgggagatgacctgctgcagtgccaccctgctgtgaagttcccctgtggccggccctggaagaggatggagaagaagaggagccacctgaagagggacacagaggaccaggaggaccaggtggacccccggctgattgatggcaagatgaccaggagaggagacagcccctggcaggtggtgctgctggacagcaagaagaagctggcctgtggggctgtgctgatccaccccagctgggtgctgacagctgcccactgcatggatgagagcaagaagctgctggtgcggctgggggagtatgacctgcggcgctgggagaagtgggagctggacctggacatcaaggaggtgtttgtgcaccccaactacagcaagagcaccacagacaatgacatcgccctgctgcacctggcccagcctgccaccctgagccagaccatcgtgcccatctgcctgcctgattctggcctggccgagcgggagctgaaccaggccggccaggagaccctggtgacaggctggggctaccacagcagccgggagaaggaggccaagaggaacagaacatttgtgctgaacttcatcaagatccctgtggtgccccacaatgaatgttctgaggtgatgagcaacatggtgtctgagaacatgctgtgtgccggcatcctgggggaccggcaggatgcctgtgagggggacagcggcggccccatggtggccagcttccacggcacctggttcctggtgggcctggtgtcctggggcgagggctgcggcctgctgcacaactacggcgtgtacaccaaggtgagccgctacctggactggatccacggccacatccgggacaaggaggccccccagaagtcctgggccccctag

SEQ ID NO: 155947 - DNA, 405 bp, synthetic construct
  misc_feature 1..405: note = Description of Artificial Sequence: Synthetic coding sequence
  source 1..405: mol_type = other DNA
atgaaggccttcagccctgtgcgctctgtgaggaagaacagcctgagtgaccacagcctgggcatcagccgcagcaagacccctgtggatgaccccatgagcctgctgtacaacatgaatgactgctacagcaagctgaaggagctggtgcccagcatcccccagaacaagaaggtgtccaagatggagatcctgcagcacgtgattgactacatcctggacctgcagatcgccctggacagccaccccaccatcgtgtccctgcaccaccagaggcctggccagaaccaggccagcaggacccccctgaccaccctgaacacagacatcagcatcctgagcctgcaggccagcgagttccccagcgagctgatgagcaatgacagcaaggccctgtgtggctag

SEQ ID NO: 155948 - DNA, 405 bp, synthetic construct; identical to SEQ ID NO: 155947
  misc_feature 1..405: note = Description of Artificial Sequence: Synthetic coding sequence
  source 1..405: mol_type = other DNA

SEQ ID NO: 155949 - DNA, 360 bp, synthetic construct
  misc_feature 1..360: note = Description of Artificial Sequence: Synthetic coding sequence
  source 1..360: mol_type = other DNA
atgaaggccctgagccctgtgcggggctgctatgaagctgtgtgctgcctgtctgagaggagcctggccatcgcccggggccggggcaagggccctgctgctgaggagcccctgagcctgctggatgacatgaaccactgctacagccggctgcgggagctggtgcctggggtgccccggggcacccagctgagccaggtggagatcctgcagagggtcatcgactacatcctggacctgcaggtggtgctggccgagcccgcccctggccccccagatggcccccacctgcccatccagacagctgagctgaccccagagctggtgatcagcaatgacaagaggagcttctgccactag

SEQ ID NO: 155950 - DNA, 486 bp, synthetic construct
  misc_feature 1..486: note = Description of Artificial Sequence: Synthetic coding sequence
  source 1..486: mol_type = other DNA
atgaaggctgtgtcccctgtgcggcccagcggcaggaaggcccccagcggctgcggcggcggggagctggccctgcgctgcctggccgagcacggccacagcctgggcggcagcgctgctgctgctgctgctgctgctgctgcccgctgcaaggctgctgaggccgctgctgatgagcccgccctgtgcctgcagtgtgacatgaatgactgctacagccggctgcggcggctggtgcccaccatcccccccaacaagaaggtgtccaaggtggagatcctgcagcacgtgattgactacatcctggacctgcagctggccctggagacccacccagccctgctgcggcagcccccacctccagccccaccccaccaccctgctggcacctgcccagctgccccacccaggacccccctgacagccctgaacacagatcctgctggagctgtgaacaagcagggcgacagcatcctgtgcaggtag

SEQ ID NO: 155951 - DNA, 843 bp, synthetic construct
  misc_feature 1..843: note = Description of Artificial Sequence: Synthetic coding sequence
  source 1..843: mol_type = other DNA
atgctgggccagcagcagcagcagctgtacagcagcgctgccctgctgactggagagaggagccggctgctgacctgctacgtgcaggactacctggagtgtgtggagagcctgccccatgacatgcagagaaatgtgtctgtgctgcgggagctggacaacaagtaccaggagaccctgaaggagattgatgatgtgtatgagaagtacaagaaggaggatgacctgaaccagaagaagaggctgcagcagctgctgcagagggccctgatcaacagccaggagctgggagatgagaagatccagatcgtgacccagatgctggagctggtggagaacagagcccggcagatggagctgcacagccagtgcttccaggaccctgctgagagcgagcgggccagtgacaaggccaagatggacagcagccagcctgagaggagcagccggcggccccggcggcagaggaccagcgagagccgggacctgtgccacatggccaacggcatcgaggactgtgatgaccagccccccaaggagaagaagagcaagagcgccaagaagaagaagaggagcaaggccaagcaggagcgggaggccagccctgtggagtttgccatcgaccccaatgagcccacctactgcctgtgcaaccaggtgtcctatggagagatgattggctgtgacaatgagcagtgccccatcgagtggttccacttcagctgtgtgtccctgacctacaagcccaagggcaagtggtactgccccaagtgccgcggggacaatgagaagaccatggacaagagcacagagaagaccaagaaggacagaagaagcaggtag

SEQ ID NO: 155952 - DNA, 723 bp, synthetic construct
  misc_feature 1..723: note = Description of Artificial Sequence: Synthetic coding sequence
  source 1..723: mol_type = other DNA
atggaccaggatggagaccagcagctgggccccagccgcatcctggccccccagaccctgaaggagattgatgatgtgtatgagaagtacaagaaggaggatgacctgaaccagaagaagaggctgcagcagctgctgcagagggccctgatcaacagccaggagctgggagatgagaagatccagatcgtgacccagatgctggagctggtggagaacagagcccggcagatggagctgcacagccagtgcttccaggaccctgctgagagcgagcgggccagtgacaaggccaagatggacagcagccagcctgagaggagcagccggcggccccggcggcagaggaccagcgagagccgggacctgtgccacatggccaacggcatcgaggactgtgatgaccagccccccaaggagaagaagagcaagagcgccaagaagaagaagaggagcaaggccaagcaggagcgggaggccagccctgtggagtttgccatcgaccccaatgagcccacctactgcctgtgcaaccaggtgtcctatggagagatgattggctgtgacaatgagcagtgccccatcgagtggttccacttcagctgtgtgtccctgacctacaagcccaagggcaagtggtactgccccaagtgccgcggggacaatgagaagaccatggacaagagcacagagaagaccaagaaggacagaagaagcaggtag

SEQ ID NO: 155953 - DNA, 1257 bp, synthetic construct
  misc_feature 1..1257: note = Description of Artificial Sequence: Synthetic coding sequence
  source 1..1257: mol_type = other DNA
atgctgtacctggaggactacctggagatgattgagcagctgcccatggacctgcgggaccgcttcacagagatgagggagatggacctgcaggtgcagaatgccatggaccagctggagcagagggtgtctgagttcttcatgaatgccaagaagaacaagccagagtggagggaggagcagatggccagcatcaagaaggactactacaaggccctggaggatgctgatgagaaggtgcagctggccaaccagatctatgacctggtggacagacacctgaggaagctggaccaggagctggccaagttcaagatggagctggaggccgacaatgccggcatcacagagatcctggagaggaggagcctggagctggacacccccagccagcctgtgaacaaccaccacgcccacagccacacccctgtggagaagaggaagtacaaccccaccagccaccacaccaccacagaccacatccctgagaagaagttcaagtctgaggccctgctgagcaccctgaccagtgatgccagcaaggagaacaccctgggctgcaggaacaacaacagcacagccagcagcaacaatgcctacaacgtgaacagcagccagcccctgggcagctacaacatcggcagcctgagcagcggcaccggggccggggccatcaccatggctgctgcccaggccgtgcaggccacagcccagatgaaggagggccgccgcaccagcagcctgaaggccagctatgaggccttcaagaacaatgacttccagctgggcaaggagttctccatggcccgggagaccgtgggctacagcagcagcagcgccctgatgaccaccctgacccagaatgccagcagcagcgctgctgacagccgcagcggcaggaagagcaagaacaacaacaagagcagcagccagcagagcagcagcagcagcagcagcagcagcctgagcagctgcagcagcagcagcacagtggtgcaggagatcagccagcagaccaccgtggtgcctgagagtgacagcaacagccaggtggactggacctatgaccccaatgagccccgctactgcatctgcaaccaggtgtcctatggagagatggtgggctgtgacaaccaggactgccccatcgagtggttccactacggctgtgtgggcctgacagaggcccccaagggcaagtggtactgcccccagtgcacagctgccatgaagaggcggggcagccgccacaagtag

SEQ ID NO: 155954 - DNA, 279 bp, synthetic construct
  misc_feature 1..279: note = Description of Artificial Sequence: Synthetic coding sequence
  source 1..279: mol_type = other DNA
atgctgtacctggaggactacctggagatgattgagcagctgcccatggacctgcgggaccgcttcacagagatgagggagatggacctgcaggtgcagaatgccatggaccagctggagcagagggtgtctgagttcttcatgaatgccaagaagaacaagccagagtggagggaggagcagatggccagcatcaagaaggactactacaaggccctggaggatgctgatgagaaggtgcagctggccaaccagatctatgacctgcagcacttctag

SEQ ID NO: 155955 - DNA, 723 bp, synthetic construct
  misc_feature 1..723: note = Description of Artificial Sequence: Synthetic coding sequence
  source 1..723: mol_type = other DNA
atggccacagccatgtacctggagcactacctggacagcattgagaacctgccctgtgagctgcagaggaacttccagctgatgagggagctggaccagaggacagaggacaagaaggccgagattgacatcctggccgctgagtacatcagcacagtgaagaccctgagcccagaccagagggtggagcggctgcagaagatccagaatgcctacagcaagtgcaaggagtacagtgatgacaaggtgcagctggccatgcagacctatgagatggtggacaagcacatccggcggctggatgctgacctggccaggtttgaagctgacctgaaggacaagatggagggcagtgactttgagagcagcggcggccggggcctgaagaagggccggggccagaaggagaagaggggcagccggggccggggccgccgcaccagcgaggaggacacccccaagaagaagaagcacaagggcggcagcgagttcacagacaccatcctgtctgtgcaccccagtgatgtgctggacatgcctgtggaccccaatgagcccacctactgcctgtgccaccaggtgtcctatggagagatgattggctgtgacaacccagactgccccatcgagtggttccactttgcctgtgtggacctgaccaccaagcccaagggcaagtggttctgcccccgctgtgtgcaggagaagaggaagaagaagtag

SEQ ID NO: 155956 - DNA, 681 bp, synthetic construct
  misc_feature 1..681: note = Description of Artificial Sequence: Synthetic coding sequence
  source 1..681: mol_type = other DNA
atggccacagccatgtacctggagcactacctggacagcattgagaacctgccctgtgagctgcagaggaacttccagctgatgagggagctggaccagaggacagaggacaagaaggccgagattgacatcctggccgctgagtacatcagcacagtgaagaccctgagcccagaccagagggtggagcggctgcagaagatccagaatgcctacagcaagtgcaaggagtacagtgatgacaaggtgcagctggccatgcagacctatgagatggtggacaagcacatccggcggctggatgctgacctggccaggtttgaagctgacctgaaggacaagatggagggcagtgactttgagagcagcggcggccggggcctgaagaagggccggggccagaaggagaagaggggcagccggggccggggccgccgcaccagcgaggaggacacccccaagaagaagaagcacaagggcggcagcgagttcacagacaccatcctgtctgtgcaccccagtgatgtgctggacatgcctgtggaccccaatgagcccacctactgcctgtgccaccaggtgtcctatggagagatgattggctgtgacaacccagactgccccatcgagtggttccactttgcctgtgtggacctgaccaccaagcccaagggcaagtag

SEQ ID NO: 155957 - DNA, 2265 bp, synthetic construct
  misc_feature 1..2265: note = Description of Artificial Sequence: Synthetic coding sequence
  source 1..2265: mol_type = other DNA
atgttttctgggggctgccacagccctggcttcggccggcccagccctgccttccctgcccctggcagccccccaccagccccccggccctgccggcaggagactggagagcagatcgccatcaagcagtgccggcaggagctgagccccaggaaccgggagcgctggtgcctggagatccagatcatgaggcggctgacccaccccaacgtggtggccgccagagatgtgcctgagggcatgcagaacctggccccaaatgacctgcccctgctggccatggagtactgccagggcggggacctgaggaagtacctgaaccagtttgagaactgctgcggcctgcgggagggcgccatcctgaccctgctgagtgacatcgccagcgccctgcgctacctgcacgagaaccgcatcatccaccgggacctgaagccagaaaatattgtgctgcagcagggcgagcagaggctcatccacaagatcatcgacctgggctacgccaaggagctggaccagggcagcctgtgcaccagctttgtgggcaccctgcagtacctggcccctgagctgctggagcagcagaagtacacagtgacagtggactactggagctttggcaccctggcctttgagtgcatcaccggcttccggcccttcctgcccaactggcagcctgtgcagtggcacagcaaggtgcggcagaagtctgaggtggacatcgtggtgtctgaggacctgaatggcaccgtgaagttcagcagcagcctgccctaccccaacaacctgaacagcgtgctggccgagcggctggagaagtggctgcagctgatgctgatgtggcacccccggcagaggggcacagaccccacctacggccccaacggctgcttcaaggccctggatgacatcctgaacctgaagctggtgcacatcctgaacatggtgacaggcaccatccacacctaccctgtgacagaagatgagagcctgcagagcctgaaggcccgcatccagcaggacaccggcatccctgaggaggaccaggagctgctgcaggaggccggcctggccctgatcccagacaagccagccacccagtgcatcagtgatggcaagctgaatgaaggccacaccctggacatggacctggtgttcctgtttgacaacagcaagatcacctatgagacccagatcagcccccggccccagcctgagagcgtgtcctgcatcctgcaggagcccaagaggaacctggccttcttccagctgaggaaggtgtggggccaggtgtggcacagcatccagaccctgaaggaggactgcaaccggctgcagcagggccagagagctgccatgatgaacctgctgaggaacaacagctgcctgagcaagatgaagaacagcatggcctccatgagccagcagctgaaggccaagctggacttcttcaagaccagcatccagattgacctggagaagtacagcgagcagacagaatttggcatcaccagtgacaagctgctgctggcctggagggagatggagcaggccgtggagctgtgtggcagagaaaatgaggtgaagctgctggtggagaggatgatggccctgcagacagacatcgtggacctgcagaggagccccatgggcaggaagcagggcggcaccctggatgacctggaggagcaggcccgggagctgtaccgccgcctgcgggagaagccccgggaccagaggacagaaggagacagccaggagatggtgcggctgctgctgcaggccatccagagctttgagaagaaggtgcgggtcatctacacccagctgagcaagacagtggtgtgcaagcagaaggccctggagctgctgcccaaggtggaggaggtggtgtccctgatgaatgaagatgagaagacagtggtgcggctgcaggagaagaggcagaaggagctgtggaacctgctgaagatcgcctgcagcaaggtgcggggccctgtgtctggcagcccagacagcatgaatgccagccggctgagccagcccggccagctgatgagccagcccagcacagccagcaacagcctgcctgagcccgccaagaagtctgaggagctggtggccgaggcccacaacctgtgcaccctgctggagaatgccatccaggacacagtgcgggagcaggaccagagcttcaccgccctggactggagctggctgcagacagaggaggaggagcacagctgcctggagcaggccagctag

SEQ ID NO: 155958 - DNA, 963 bp, synthetic construct
  misc_feature 1..963: note = Description of Artificial Sequence: Synthetic coding sequence
  source 1..963: mol_type = other DNA
atgaacagacacctgtggaagagccagctgtgtgagatggtgcagcccagcggcggccctgctgctgaccaggatgtgctgggggaggagagccccctgggcaagccagccatgctgcacctgcccagcgagcagggcgcccctgagaccctgcagcgctgcctggaggagaaccaggagctgagagatgccatccggcagagcaaccagatcctgcgggagcgctgtgaggagctgctgcacttccaggccagccagcgggaggagaaggagttcctgatgtgcaagttccaggaggccaggaagctggtggagcggctgggcctggagaagctggacctgaagaggcagaaggagcaggccctgcgggaggtggagcacctgaagcgctgccagcagcagatggccgaggacaaggcctctgtgaaggcccaggtgaccagcctgctgggggagctgcaggagagccagagccggctggaggccgccaccaaggagtgccaggccctggagggccgcaggaagctggcccagctgcaggtggcctaccaccagctgttccaggagtatgacaaccacatcaagagctctgtggtgggcagcgagaggaagagagctgacatctacaaggctgacttccaggccgagcggcaggcccgggagaagctggccgagaagaaggagctgctgcaggagcagctggagcagctgcagcgggagtacagcaagctgaaggccagctgccaggagagcgccagaattgaggacatgaggaagagacatgtggaggtgtcccaggcccccctgcccccagccccagcctacctgagcagccccctggccctgcccagccagaggaggagccccccagaggagcccccagacttctgctgccccaagtgccagtaccaggccccagacatggacaccctgcagatccacgtgatggagtgcattgaatag

SEQ ID NO: 155959 - DNA, 1602 bp, synthetic construct
  misc_feature 1..1602: note = Description of Artificial Sequence: Synthetic coding sequence
  source 1..1602: mol_type = other DNA
atgagcagtgatggcaccatccgccacagcaaggtgcggcagaagtctgaggtggacatcgtggtgtctgaggacctgaatggaacagtgaagttcagcagcagcctgccctaccccaacaacctgaacagcgtgctggccgagcggctggagaagtggctgcagctgatgctgatgtggcacccccggcagaggggcacagaccccacctacggccccaacggctgcttcaaggccctggatgacatcctgaacctgaagctggtgcacatcctgaacatggtgacaggcaccatccacacctaccctgtgacagaagatgagagcctgcagagcctgaaggcccgcatccagcaggacaccggcatccctgaggaggaccaggagctgctgcaggaggccggcctggccctgatcccagacaagccagccacccagtgcatcagtgatggcaagctgaatgaaggccacaccctggacatggacctggtgttcctgtttgacaacagcaagatcacctatgagacccagatcagcccccggccccagcctgagagcgtgtcctgcatcctgcaggagcccaagaggaacctggccttcttccagctgaggaaggtgtggggccaggtgtggcacagcatccagaccctgaaggaggactgcaaccggctgcagcagggccagagagctgccatgatgaacctgctgaggaacaacagctgcctgagcaagatgaagaacagcatggcctccatgagccagcagctgaaggccaagctggacttcttcaagaccagcatccagattgacctggagaagtacagcgagcagacagaatttggcatcaccagtgacaagctgctgctggcctggagggagatggagcaggccgtggagctgtgtggccgggagaatgaggtgaagctgctggtggagaggatgatggccctgcagacagacatcgtggacctgcagaggagccccatgggcaggaagcagggcggcaccctggatgacctggaggagcaggcccgggagctgtacagaaggctgcgggagaagccccgggaccagaggacagaaggagacagccaggagatggtgcggctgctgctgcaggccatccagagctttgagaagaaggtgcgggtcatctacacccagctgagcaagacagtggtgtgcaagcagaaggccctggagctgctgcccaaggtggaggaggtggtgtccctgatgaatgaagatgagaagacagtggtgcggctgcaggagaagaggcagaaggagctgtggaacctgctgaagatcgcctgcagcaaggtgcggggccctgtgtctggcagcccagacagcatgaatgccagccggctgagccagcccggccagctgatgagccagcccagcacagccagcaacagcctgcctgagcccgccaagaagtctgaggagctggtggccgaggcccacaacctgtgcaccctgctggagaatgccatccaggacacagtgcgggagcaggaccagagcttcaccgccctggactggagctggctgcagacagaggaggaggagcacagctgcctggagcaggccagctag

SEQ ID NO: 155960 - DNA, 2094 bp, synthetic construct
  misc_feature 1..2094: note = Description of Artificial Sequence: Synthetic coding sequence
  source 1..2094: mol_type = other DNA
atgagcagtgatggcaccatccggctgacccaccccaacgtggtggccgccagagatgtgcctgagggcatgcagaacctggccccaaatgacctgcccctgctggccatggagtactgccagggcggggacctgaggaagtacctgaaccagtttgagaactgctgcggcctgcgggagggcgccatcctgaccctgctgagtgacatcgccagcgccctgcgctacctgcatgaaaatcgcatcatccaccgggacctgaagccagagaacatcgtgctgcagcagggcgagcagaggctcatccacaagatcatcgacctgggctacgccaaggagctggaccagggcagcctgtgcaccagctttgtgggcaccctgcagtacctggcccctgagctgctggagcagcagaagtacacagtgacagtggactactggagctttggcaccctggcctttgagtgcatcaccggcttccggcccttcctgcccaactggcagcctgtgcagtggcacagcaaggtgcggcagaagtctgaggtggacatcgtggtgtctgaggacctgaatggaacagtgaagttcagcagcagcctgccctaccccaacaacctgaacagcgtgctggccgagcggctggagaagtggctgcagctgatgctgatgtggcacccccggcagaggggcacagaccccacctacggccccaacggctgcttcaaggccctggatgacatcctgaacctgaagctggtgcacatcctgaacatggtgacaggcaccatccacacctaccctgtgacagaagatgagagcctgcagagcctgaaggcccgcatccagcaggacaccggcatccctgaggaggaccaggagctgctgcaggaggccggcctggccctgatcccagacaagccagccacccagtgcatcagtgatggcaagctgaatgaaggccacaccctggacatggacctggtgttcctgtttgacaacagcaagatcacctatgagacccagatcagcccccggccccagcctgagagcgtgtcctgcatcctgcaggagcccaagaggaacctggccttcttccagctgaggaaggtgtggggccaggtgtggcacagcatccagaccctgaaggaggactgcaaccggctgcagcagggccagagagctgccatgatgaacctgctgaggaacaacagctgcctgagcaagatgaagaacagcatggcctccatgagccagcagctgaaggccaagctggacttcttcaagaccagcatccagattgacctggagaagtacagcgagcagacagaatttggcatcaccagtgacaagctgctgctggcctggagggagatggagcaggccgtggagctgtgtggccgggagaatgaggtgaagctgctggtggagaggatgatggccctgcagacagacatcgtggacctgcagaggagccccatgggcaggaagcagggcggcaccctggatgacctggaggagcaggcccgggagctgtacagaaggctgcgggagaagccccgggaccagaggacagaaggagacagccaggagatggtgcggctgctgctgcaggccatccagagctttgagaagaaggtgcgggtcatctacacccagctgagcaagacagtggtgtgcaagcagaaggccctggagctgctgcccaaggtggaggaggtggtgtccctgatgaatgaagatgagaagacagtggtgcggctgcaggagaagaggcagaaggagctgtggaacctgctgaagatcgcctgcagcaaggtgcggggccctgtgtctggcagcccagacagcatgaatgccagccggctgagccagcccggccagctgatgagccagcccagcacagccagcaacagcctgcctgagcccgccaagaagtctgaggagctggtggccgaggcccacaacctgtgcaccctgctggagaatgccatccaggacacagtgcgggagcaggaccagagcttcaccgccctggactggagctggctgcagacagaggaggaggagcacagctgcctggagcaggccagctag

SEQ ID NO: 155961 - DNA, 2271 bp, synthetic construct
  misc_feature 1..2271: note = Description of Artificial Sequence: Synthetic coding sequence
  source 1..2271: mol_type = other DNA
atgtcctggagccccagcctgaccacccagacctgtggggcctgggagatgaaggagcggctgggcactggaggctttggaaatgtcatccgctggcacaaccaggagactggagagcagatcgccatcaagcagtgccggcaggagctgagccccaggaaccgggagcgctggtgcctggagatccagatcatgaggcggctgacccaccccaacgtggtggccgccagagatgtgcctgagggcatgcagaacctggccccaaatgacctgcccctgctggccatggagtactgccagggcggggacctgaggaagtacctgaaccagtttgagaactgctgcggcctgcgggagggcgccatcctgaccctgctgagtgacatcgccagcgccctgcgctacctgcacgagaaccgcatcatccaccgggacctgaagccagaaaatattgtgctgcagcagggcgagcagaggctcatccacaagatcatcgacctgggctacgccaaggagctggaccagggcagcctgtgcaccagctttgtgggcaccctgcagtacctggcccctgagctgctggagcagcagaagtacacagtgacagtggactactggagctttggcaccctggcctttgagtgcatcaccggcttccggcccttcctgcccaactggcagcctgtgcagtggcacagcaaggtgcggcagaagtctgaggtggacatcgtggtgtctgaggacctgaatggcaccgtgaagttcagcagcagcctgccctaccccaacaacctgaacagcgtgctggccgagcggctggagaagtggctgcagctgatgctgatgtggcacccccggcagaggggcacagaccccacctacggccccaacggctgcttcaaggccctggatgacatcctgaacctgaagctggtgcacatcctgaacatggtgacaggcaccatccacacctaccctgtgacagaagatgagagcctgcagagcctgaaggcccgcatccagcaggacaccggcatccctgaggaggaccaggagctgctgcaggaggccggcctggccctgatcccagacaagccagccacccagtgcatcagtgatggcaagctgaatgaaggccacaccctggacatggacctggtgttcctgtttgacaacagcaagatcacctatgagacccagatcagcccccggccccagcctgagagcgtgtcctgcatcctgcaggagcccaagaggaacctggccttcttccagctgaggaaggtgtggggccaggtgtggcacagcatccagaccctgaaggaggactgcaaccggctgcagcagggccagagagctgccatgatgaacctgctgaggaacaacagctgcctgagcaagatgaagaacagcatggcctccatgagccagcagctgaaggccaagctggacttcttcaagaccagcatccagattgacctggagaagtacagcgagcagacagaatttggcatcaccagtgacaagctgctgctggcctggagggagatggagcaggccgtggagctgtgtggcagagaaaatgaggtgaagctgctggtggagaggatgatggccctgcagacagacatcgtggacctgcagaggagccccatgggcaggaagcagggcggcaccctggatgacctggaggagcaggcccgggagctgtaccgccgcctgcgggagaagccccgggaccagaggacagaaggagacagccaggagatggtgcggctgctgctgcaggccatccagagctttgagaagaaggtgcgggtcatctacacccagctgagcaagacagtggtgtgcaagcagaaggccctggagctgctgcccaaggtggaggaggtggtgtccctgatgaatgaagatgagaagacagtggtgcggctgcaggagaagaggcagaaggagctgtggaacctgctgaagatcgcctgcagcaaggtgcggggccctgtgtctggcagcccagacagcatgaatgccagccggctgagccagcccggccagctgatgagccagcccagcacagccagcaacagcctgcctgagcccgccaagaagtctgaggagctggtggccgaggcccacaacctgtgcaccctgctggagaatgccatccaggacacagtgcgggagcaggaccagagcttcaccgccctggactggagctggctgcagacagaggaggaggagcacagctgcctggagcaggccagctag

SEQ ID NO: 155962 - DNA, 3999 bp, synthetic construct
  misc_feature 1..3999: note = Description of Artificial Sequence: Synthetic coding sequence
  source 1..3999: mol_type = other DNA
atgaggaacctgaagctgttccgcaccctggagttccgggacatccagggccctggcaacccccagtgcttcagcctgaggacagagcagggcaccgtgctgattggcagcgagcacggcctcatcgaggtggaccctgtgtcccgggaggtgaagaatgaggtgtccctggtggccgagggcttcctgcctgaagatggcagcggcagaattgtgggcgtgcaggacctgctggaccaggagagcgtgtgtgtggccacagccagcggagatgtgatcctgtgcagcctgagcacccagcagctggagtgtgtgggctctgtggccagcggcatctctgtgatgtcctggagcccagaccaggagctggtgctgctggccaccggccagcagaccctcatcatgatgaccaaggactttgagcccatcctggagcagcagatccaccaggatgactttggagagagcaagttcatcaccgtgggctggggcaggaaggagacccagttccacggcagcgagggccggcaggccgccttccagatgcagatgcatgaaagtgccctgccctgggatgaccaccggccccaggtgacctggagaggagatggccagttctttgctgtgtctgtggtgtgcccagagaccggggccaggaaggtgcgggtgtggaaccgggagtttgccctgcagagcaccagcgagcctgtggccggcctgggccctgccctggcctggaagcccagcggcagcctgattgccagcacccaggacaagcccaaccagcaggacatcgtgttctttgagaagaatggcctgctgcacggccacttcaccctgcccttcctgaaggatgaggtgaaggtgaatgacctgctgtggaatgctgacagctctgtgctggccgtgtggctggaggacctgcagcgggaggagagcagcatccccaagacctgtgtgcagctgtggacagtgggcaactaccactggtacctgaagcagagcctgtccttcagcacctgtgggaagagcaagatcgtgtccctgatgtgggaccctgtgaccccctaccgcctgcacgtgctgtgccagggctggcactacctggcctatgactggcactggaccacagacagatctgtgggggacaacagcagtgacctgagcaatgtggccgtgattgatggcaacagagtgctggtgaccgtcttccggcagacagtggtgcccccacccatgtgcacctaccagctgctcttcccccaccctgtgaaccaggtgaccttcctggcccacccccagaagagcaatgacctggccgtgctggatgccagcaaccagatctctgtgtacaagtgtggggactgccccagcgctgaccccaccgtgaagctgggcgctgtgggcggcagcggcttcaaggtgtgcctgcggaccccccacctggagaagcgctacaagatccagtttgaaaataatgaagaccaggatgtgaaccccctgaagctgggcctgctgacctggattgaagaagatgtgttcctggccgtgagccacagcgagttcagccccaggagcgtcatccaccacctgacagctgccagcagcgagatggatgaggagcacggccagctgaatgtgagcagcagcgctgctgtggatggagtcatcatcagcctgtgctgcaacagcaagaccaagtctgtggtgctgcagctggctgatggccagatcttcaagtacctgtgggagagccccagcctggccatcaagccctggaagaacagcggcggcttccctgtgcgcttcccctacccctgcacccagacagagctggccatgattggagaggaggagtgtgtgctgggcctgacagaccgctgccgcttcttcatcaatgacatcgaggtggccagcaacatcaccagctttgctgtgtatgatgagttcctgctgctgaccacccacagccacacctgccagtgcttctgcctgagagatgccagcttcaagaccctgcaggccggcctgagcagcaaccacgtgagccacggggaggtgctgaggaaggtggagcggggcagcagaattgtgacagtggtgccccaggacaccaagctggtgctgcagatgccccggggcaacctggaggtggtgcaccaccgggccctggtgctggcccagatcaggaagtggctggacaagctgatgttcaaggaggcctttgagtgcatgaggaagctgcgcatcaacctgaacctgatctatgaccacaaccccaaggtgttcctgggcaatgtggagaccttcatcaagcagattgacagcgtgaaccacatcaacctcttcttcacagagctgaaggaggaggatgtgaccaagaccatgtacccagcccctgtgaccagctctgtgtacctgagccgggaccctgatggcaacaagattgacctggtgtgtgatgccatgagagctgtgatggagagcatcaacccccacaagtactgcctgagcatcctgaccagccacgtgaagaagaccaccccagagctggagatcgtgctgcagaaggtgcatgagctgcagggcaatgcccccagcgaccctgatgctgtgtctgctgaggaggccctgaagtacctgctgcacctggtggatgtgaatgagctgtatgaccacagcctgggcacctatgactttgacctggtgctgatggtggccgagaagagccagaaggaccccaaggagtacctgcccttcctgaacaccctgaagaagatggagaccaactaccagcgcttcaccatcgacaagtacctgaagagatatgagaaggccatcggccacctgagcaaatgtggccctgagtacttccctgagtgcctgaacctgatcaaggacaagaacctgtacaatgaggccctgaagctgtacagccccagcagccagcagtaccaggacatcagcatcgcctacggggagcacctgatgcaggagcacatgtatgagcctgctggcctgatgtttgcccgctgtggggcccacgagaaggccctgagcgccttcctgacctgtggcaactggaagcaggccctgtgtgtggccgcccagctgaacttcaccaaggaccagctggtgggcctgggccgcaccctggccggcaagctggtggagcagaggaagcacattgatgctgccatggtgctggaggagtgtgcccaggactatgaggaggccgtgctgctgctgctggagggcgccgcctgggaggaggccctgcggctggtgtacaagtacaaccggctggacatcatcgagaccaacgtgaagcccagcatcctggaggcccagaagaactacatggccttcctggacagccagacagccaccttcagccgccacaagaagaggctgctggtggtgcgggagctgaaggagcaggcccagcaggccggcctggatgatgaggtgccccacggccaggagagtgacctcttcagcgagaccagctctgtggtgtctggcagcgagatgtctgggaagtacagccacagcaacagccgcatcagcgcccggagcagcaagaacagaaggaaggccgagaggaagaagcacagcctgaaggagggcagccccctggaggacctggccctgctggaggccctgtctgaggtggtgcagaacacagagaacctgaaggatgaggtgtaccacatcctgaaggtgctcttcctgtttgaatttgatgagcagggccgggagctgcagaaggcctttgaggacaccctgcagctgatggagaggagcctgcctgagatctggaccctgacctaccagcagaacagcgccacccctgtgctgggccccaacagcacagccaacagcatcatggccagctaccagcagcagaagacctctgtgcctgtgctggatgctgagctgttcatcccccccaagatcaacagaaggacccagtggaagctgagcctgctggactag

SEQ ID NO: 155963 - DNA, 2952 bp, synthetic construct
  misc_feature 1..2952: note = Description of Artificial Sequence: Synthetic coding sequence
  source 1..2952: mol_type = other DNA
atgtgggaccctgtgaccccctaccgcctgcacgtgctgtgccagggctggcactacctggcctatgactggcactggaccacagacagatctgtgggggacaacagcagtgacctgagcaatgtggccgtgattgatggcaacagagtgctggtgacagtgttccggcagacagtggtgcccccacccatgtgcacctaccagctgctcttcccccaccctgtgaaccaggtgaccttcctggcccacccccagaagagcaatgacctggccgtgctggatgccagcaaccagatctctgtgtacaagtgtggggactgccccagcgctgaccccaccgtgaagctgggcgctgtgggcggcagcggcttcaaggtgtgcctgcggaccccccacctggagaagcgctacaagatccagtttgagaacaatgaagaccaggatgtgaaccccctgaagctgggcctgctgacctggattgaggaggatgtgttcctggccgtgagccacagcgagttcagccccaggagcgtcatccaccacctgacagctgccagcagcgagatggatgaggagcacggccagctgaatgtgagcagcagcgctgctgtggatggagtcatcatcagcctgtgctgcaacagcaagaccaagtctgtggtgctgcagctggctgatggccagatcttcaagtacctgtgggagagccccagcctggccatcaagccctggaagaacagcggcggcttccctgtgcgcttcccctacccctgcacccagacagagctggccatgattggagaggaggagtgtgtgctgggcctgacagaccgctgccgcttcttcatcaatgacatcgaggtggccagcaacatcaccagctttgctgtgtatgatgagttcctgctgctgaccacccacagccacacctgccagtgcttctgcctgagagatgccagcttcaagaccctgcaggccggcctgagcagcaaccacgtgtcccatggagaggtgctgaggaaggtggagcggggcagccgcatcgtgacagtggtgccccaggacaccaagctggtgctgcagatgccccggggcaacctggaggtggtgcaccaccgggccctggtgctggcccagatcaggaagtggctggacaagctgatgttcaaggaggcctttgagtgcatgaggaagctgcgcatcaacctgaacctgatctatgaccacaaccccaaggtgttcctgggcaatgtggagaccttcatcaagcagattgattctgtgaaccacatcaacctcttcttcacagagctgaaggaggaggatgtgaccaagaccatgtacccagcccctgtgaccagctctgtgtacctgagccgggaccctgatggcaacaagattgacctggtgtgtgatgccatgagagctgtgatggagagcatcaacccccacaagtactgcctgagcatcctgaccagccacgtgaagaagaccaccccagagctggagatcgtgctgcagaaggtgcatgagctgcagggcaatgcccccagcgaccctgatgctgtgtctgctgaggaggccctgaagtacctgctgcacctggtggatgtgaatgagctgtatgaccacagcctgggcacctatgactttgacctggtgctgatggtggccgagaagagccagaaggaccccaaggagtacctgcccttcctgaacaccctgaagaagatggagaccaactaccagcgcttcaccatcgacaagtacctgaagagatatgagaaggccatcggccacctgagcaaatgtggccctgagtacttcccagaatgtctgaacctgatcaaggacaagaacctgtacaatgaggccctgaagctgtacagccccagcagccagcagtaccaggacatcagcatcgcctatggagagcacctgatgcaggagcacatgtatgagcccgccggcctgatgtttgcccgctgtggggcccacgagaaggccctgagcgccttcctgacctgtggcaactggaagcaggccctgtgtgtggccgcccagctgaacttcaccaaggaccagctggtgggcctgggccgcaccctggccggcaagctggtggagcagaggaagcacattgatgctgccatggtgctggaggagtgtgcccaggactatgaggaggccgtgctgctgctgctggagggcgccgcctgggaggaggccctgcggctggtgtacaagtacaaccggctggacatcatcgagaccaacgtgaagcccagcatcctggaggcccagaagaactacatggccttcctggacagccagacagccaccttcagccgccacaagaagaggctgctggtggtgcgggagctgaaggagcaggcccagcaggccggcctggatgatgaggtgccccacggccaggagagtgacctcttcagcgagaccagctctgtggtgtctggcagcgagatgtctgggaagtacagccacagcaacagccgcatcagcgcccggagcagcaagaacagaaggaaggccgagaggaagaagcacagcctgaaggagggcagccccctggaggacctggccctgctggaggccctgtctgaggtggtgcagaacacagagaacctgaaggatgaggtgtaccacatcctgaaggtgctcttcctgtttgaatttgatgagcagggccgggagctgcagaaggcctttgaggacaccctgcagctgatggagaggagcctgcctgagatctggaccctgacctaccagcagaacagcgccacccctgtgctgggccccaacagcacagccaacagcatcatggccagctaccagcagcagaagacctctgtgcctgtgctggatgctgagctgttcatcccccccaagatcaacagaaggacccagtggaagctgagcctgctggactag

SEQ ID NO: 155964 - DNA, 2151 bp, synthetic construct
  misc_feature 1..2151: note = Description of Artificial Sequence: Synthetic coding sequence
  source 1..2151: mol_type = other DNA
atgcagagcacagccaactacctgtggcacacagatgacctgctgggccagggcgccacagcctctgtgtacaaggccaggaacaagaagtctggagagctggtggccgtgaaggtgttcaacaccaccagctacctgcggccccgggaggtgcaggtgcgggagtttgaggtgctgaggaagctgaaccaccagaacatcgtgaagctgtttgctgtggaggagaccggcggcagccggcagaaggtgctggtgatggagtactgcagcagcggcagcctgctgtctgtgctggagagcccagaaaatgccttcggcctgcctgaagatgagttcctggtggtgctgcgctgtgtggtggccggcatgaaccacctgcgggagaatggaattgtgcaccgggacatcaagccaggcaacatcatgaggctggtgggggaggagggccagagcatctacaagctgacagactttggagctgcccgggagctggatgatgatgagaagtttgtgtctgtgtatggaacagaggagtacctgcacccagacatgtatgaaagagctgtgctgaggaagccccagcagaaggccttcggcgtgacagtggacctgtggagcattggagtgaccctgtaccacgccgccaccggcagcctgcccttcatcccctttggaggccccaggaggaacaaggagatcatgtaccgcatcaccacagagaagccagctggggccatcgccggggcccagaggagagaaaatggccccctggagtggagctacaccctgcccatcacctgccagctgagcctgggcctgcagagccagctggtgcccatcctggccaacatcctggaggtggagcaggccaagtgctggggctttgaccagttctttgctgagaccagtgacatcctgcagagggtggtggtgcacgtgttcagcctgagccaggccgtgctgcaccacatctacatccacgcccacaacaccatcgccatcttccaggaggccgtgcacaagcagacctctgtggcccccaggcaccaggagtacctgtttgagggccacctgtgtgtgctggagcccagcgtgtctgcccagcacatcgcccacaccacagccagcagccccctgaccctcttcagcacagccatccccaagggcctggccttccgggaccctgccctggatgtgcccaagtttgtgcccaaggtggacctgcaggccgactacaacacagccaagggcgtgctgggcgccggctaccaggccctgcggctggcccgggccctgctggatggccaggagctgatgttccggggcctgcactgggtgatggaggtgctgcaggccacctgcaggaggaccctggaggtggcccggaccagcctgctgtacctgagcagcagcctgggcacagagcgcttcagctctgtggccggcaccccagagatccaggagctgaaggctgctgctgagctgcggagccggctgcggaccctggccgaggtgctgagccgctgcagccagaacatcacagagacccaggagagcctgagcagcctgaaccgggagctggtgaagagccgggaccaggtgcatgaggacaggagcatccagcagatccagtgctgcctggacaagatgaacttcatctacaagcagttcaagaagagcaggatgaggcctggcctgggctacaatgaggagcagatccacaagctggacaaggtgaacttcagccacctggccaagaggctgctgcaggtgttccaggaggagtgtgtgcagaagtaccaggccagcctggtgacccacggcaagaggatgagggtggtgcatgagaccaggaaccacctgcggctggtgggctgcagcgtggccgcctgcaacacagaggcccagggcgtgcaggagagcctgagcaagctgctggaggagctgagccaccagctgctgcaggaccgggccaagggggcccaggccagccccccacccatcgccccctaccccagccccaccaggaaggacctgctgctgcacatgcaggagctgtgtgagggcatgaagctgctggccagtgacctgctggacaacaaccgcatcatcgagcggctgaacagagtgcctgcccccccagatgtgtag

SEQ ID NO: 155965 - DNA, 1896 bp, synthetic construct
  misc_feature 1..1896: note = Description of Artificial Sequence: Synthetic coding sequence
  source 1..1896: mol_type = other DNA
atggagtactgcagcagcggcagcctgctgtctgtgctggagagcccagaaaatgccttcggcctgcctgaagatgagttcctggtggtgctgcgctgtgtggtggccggcatgaaccacctgagagaaaatggcatcgtgcaccgggacatcaagccaggcaacatcatgaggctggtgggggaggagggccagagcatctacaagctgacagactttggagctgcccgggagctggatgatgatgagaagtttgtgtctgtgtatggaacagaggagtacctgcacccagacatgtatgaaagagctgtgctgaggaagccccagcagaaggcctttggagtgacagtggacctgtggagcattggagtgaccctgtaccacgccgccaccggcagcctgcccttcatcccctttggaggccccaggaggaacaaggagatcatgtaccgcatcaccacagagaagccagctggggccatcgccggggcccagaggcgggagaatggccccctggagtggagctacaccctgcccatcacctgccagctgagcctgggcctgcagagccagctggtgcccatcctggccaacatcctggaggtggagcaggccaagtgctggggctttgaccagttctttgctgagaccagtgacatcctgcagagggtggtggtgcacgtgttcagcctgagccaggccgtgctgcaccacatctacatccacgcccacaacaccatcgccatcttccaggaggccgtgcacaagcagacctctgtggcccccaggcaccaggagtacctgtttgagggccacctgtgtgtgctggagcccagcgtgtctgcccagcacatcgcccacaccacagccagcagccccctgaccctcttcagcacagccatccccaagggcctggccttccgggaccctgccctggatgtgcccaagtttgtgcccaaggtggacctgcaggccgactacaacacagccaagggcgtgctgggcgccggctaccaggccctgcggctggcccgggccctgctggatggccaggagctgatgttccggggcctgcactgggtgatggaggtgctgcaggccacctgcaggaggaccctggaggtggcccggaccagcctgctgtacctgagcagcagcctgggcacagagcgcttcagctctgtggccggcaccccagagatccaggagctgaaggctgctgctgagctgcggagccggctgcggaccctggccgaggtgctgagccgctgcagccagaacatcacagagacccaggagagcctgagcagcctgaaccgggagctggtgaagagccgggaccaggtgcatgaagatagaagcatccagcagatccagtgctgcctggacaagatgaacttcatctacaagcagttcaagaagagcaggatgaggcctggcctgggctacaatgaggagcagatccacaagctggacaaggtgaacttcagccacctggccaagaggctgctgcaggtgttccaggaggagtgtgtgcagaagtaccaggccagcctggtgacccacggcaagaggatgagggtggtgcatgagaccaggaaccacctgcggctggtgggctgcagcgtggccgcctgcaacacagaggcccagggcgtgcaggagagcctgagcaagctgctggaggagctgagccaccagctgctgcaggaccgggccaagggggcccaggccagccccccacccatcgccccctaccccagccccaccaggaaggacctgctgctgcacatgcaggagctgtgtgagggcatgaagctgctggccagtgacctgctggacaacaaccgcatcatcgagcggctgaacagagtgcctgcccccccagatgtgtag

SEQ ID NO: 155966 - DNA, 1107 bp, synthetic construct
  misc_feature 1..1107: note = Description of Artificial Sequence: Synthetic coding sequence
  source 1..1107: mol_type = other DNA
atgaacagacacctgtggaagagccagctgtgtgagatggtgcagcccagcggcggccctgctgctgaccaggatgtgctgggggaggagagccccctgggcaagccagccatgctgcacctgcccagcgagcagggcgcccctgagaccctgcagcgctgcctggaggagaaccaggagctgagagatgccatccggcagagcaaccagatcctgcgggagcgctgtgaggagctgctgcacttccaggccagccagcgggaggagaaggagttcctgatgtgcaagttccaggaggccaggaagctggtggagcggctgggcctggagaagctggacctgaagaggcagaaggagcaggccctgcgggaggtggagcacctgaagcgctgccagcagcagatggccgaggacaaggcctctgtgaaggcccaggtgaccagcctgctgggggagctgcaggagagccagagccggctggaggccgccaccaaggagtgccaggccctggagggccgcaggaagctggcccagctgcaggtggcctaccaccagctgttccaggagtatgacaaccacatcaagagctctgtggtgggcagcgagaggaagaggggcatgcagctggaggacctgaagcagcagctgcagcaggccgaggaggccctggtggccaagcaggaggtgattgacaagctgaaggaggaggccgagcagcacaagatcgtgatggagaccgtgcctgtgctgaaggcccaggccgacatctacaaggctgacttccaggccgagcggcaggcccgggagaagctggccgagaagaaggagctgctgcaggagcagctggagcagctgcagcgggagtacagcaagctgaaggccagctgccaggagagcgccagaattgaggacatgaggaagagacatgtggaggtgtcccaggcccccctgcccccagccccagcctacctgagcagccccctggccctgcccagccagaggaggagccccccagaggagcccccagacttctgctgccccaagtgccagtaccaggccccagacatggacaccctgcagatccacgtgatggagtgcattgaatag

SEQ ID NO: 155967 - DNA, 1260 bp, synthetic construct
  misc_feature 1..1260: note = Description of Artificial Sequence: Synthetic coding sequence
  source 1..1260: mol_type = other DNA
atgaacagacacctgtggaagagccagctgtgtgagatggtgcagcccagcggcggccctgctgctgaccaggatgtgctgggggaggagagccccctgggcaagccagccatgctgcacctgcccagcgagcagggcgcccctgagaccctgcagcgctgcctggaggagaaccaggagctgagagatgccatccggcagagcaaccagatcctgcgggagcgctgtgaggagctgctgcacttccaggccagccagcgggaggagaaggagttcctgatgtgcaagttccaggaggccaggaagctggtggagcggctgggcctggagaagctggacctgaagaggcagaaggagcaggccctgcgggaggtggagcacctgaagcgctgccagcagcagatggccgaggacaaggcctctgtgaaggcccaggtgaccagcctgctgggggagctgcaggagagccagagccggctggaggccgccaccaaggagtgccaggccctggagggccgggcccgggccgccagcgagcaggcccggcagctggagagcgagcgggaggccctgcagcagcagcacagcgtgcaggtggaccagctgaggatgcagggccagagcgtggaggccgccctgaggatggagcggcaggccgccagcgaggagaagaggaagctggcccagctgcaggtggcctaccaccagctgttccaggagtatgacaaccacatcaagagctctgtggtgggcagcgagaggaagaggggcatgcagctggaggacctgaagcagcagctgcagcaggccgaggaggccctggtggccaagcaggaggtgattgacaagctgaaggaggaggccgagcagcacaagatcgtgatggagaccgtgcctgtgctgaaggcccaggccgacatctacaaggctgacttccaggccgagcggcaggcccgggagaagctggccgagaagaaggagctgctgcaggagcagctggagcagctgcagcgggagtacagcaagctgaaggccagctgccaggagagcgccagaattgaggacatgaggaagagacatgtggaggtgtcccaggcccccctgcccccagccccagcctacctgagcagccccctggccctgcccagccagaggaggagccccccagaggagcccccagacttctgctgccccaagtgccagtaccaggccccagacatggacaccctgcagatccacgtgatggagtgcatcgagtag

SEQ ID NO: 155968 - DNA, 1260 bp, synthetic construct; identical to SEQ ID NO: 155967
  misc_feature 1..1260: note = Description of Artificial Sequence: Synthetic coding sequence
  source 1..1260: mol_type = other DNA

SEQ ID NO: 155969 - DNA, 1260 bp, synthetic construct; identical to SEQ ID NO: 155967
  misc_feature 1..1260: note = Description of Artificial Sequence: Synthetic coding sequence
  source 1..1260: mol_type = other DNA

SEQ ID NO: 155970 - DNA, 1464 bp, synthetic construct
  misc_feature 1..1464: note = Description of Artificial Sequence: Synthetic coding sequence
  source 1..1464: mol_type = other DNA
atggccctggtgatccaggtgggcaagctgcggccccgggaggtgaggaccccccagaccatcaaccccagcctcttccccagcctgcctgtgaagctgagcagcatcatcgaggtgcccagcggcggggagcgctgctgcagcaggaggaccctggtgtacaaggcccgggccttctggaagggggcccccctgccctgctggatgaacagacacctgtggaagagccagctgtgtgagatggtgcagcccagcggcggccctgctgctgaccaggatgtgctgggggaggagagccccctgggcaagccagccatgctgcacctgcccagcgagcagggcgcccctgagaccctgcagcgctgcctggaggagaaccaggagctgagagatgccatccggcagagcaaccagatcctgcgggagcgctgtgaggagctgctgcacttccaggccagccagcgggaggagaaggagttcctgatgtgcaagttccaggaggccaggaagctggtggagcggctgggcctggagaagctggacctgaagaggcagaaggagcaggccctgcgggaggtggagcacctgaagcgctgccagcagcagatggccgaggacaaggcctctgtgaaggcccaggtgaccagcctgctgggggagctgcaggagagccagagccggctggaggccgccaccaaggagtgccaggccctggagggccgggcccgggccgccagcgagcaggcccggcagctggagagcgagcgggaggccctgcagcagcagcacagcgtgcaggtggaccagctgaggatgcagggccagagcgtggaggccgccctgaggatggagcggcaggccgccagcgaggagaagaggaagctggcccagctgcaggtggcctaccaccagctgttccaggagtatgacaaccacatcaagagctctgtggtgggcagcgagaggaagaggggcatgcagctggaggacctgaagcagcagctgcagcaggccgaggaggccctggtggccaagcaggaggtgattgacaagctgaaggaggaggccgagcagcacaagatcgtgatggagaccgtgcctgtgctgaaggcccaggccgacatctacaaggctgacttccaggccgagcggcaggcccgggagaagctggccgagaagaaggagctgctgcaggagcagctggagcagctgcagcgggagtacagcaagctgaaggccagctgccaggagagcgccagaattgaggacatgaggaagagacatgtggaggtgtcccaggcccccctgcccccagccccagcctacctgagcagccccctggccctgcccagccagaggaggagccccccagaggagcccccagacttctgctgccccaagtgccagtaccaggccccagacatggacaccctgcagatccacgtgatggagtgcatcgagtag

SEQ ID NO: 155971 - DNA, 621 bp, synthetic construct
  misc_feature 1..621: note = Description of Artificial Sequence: Synthetic coding sequence
  source 1..621: mol_type = other DNA
atgaacagacacctgtggaagagccagctgtgtgagatggtgcagcccagcggcggccctgctgctgaccaggatgtgctgggggaggagagccccctgggcaagccagccatgctgcacctgcccagcgagcagggcgcccctgagaccctgcagcgctgcctggaggagaaccaggagctgagagatgccatccggcagagcaaccagatcctgcgggagcgctgtgaggagctgctgcacttccaggccagccagcgggaggagaaggagttcctgatgtgcaagttccaggaggccaggaagctggtggagcggctgggcctggagaagctggacctgaagaggcagaaggagcaggccctgcgggaggtggagcacctgaagcgctgccagcagcagatggccgaggacaaggcctctgtgaaggcccaggtgaccagcctgctgggggagctgcaggagagccagagccggctggaggccgccaccaaggagtgccaggccctggagggccgggcccgggccgccagcgagcaggcccggcagctggagagcgagcgggaggccctgcagcagcagcacagcgtgcaggtggaccagctgaggatgcagggctag

SEQ ID NO: 155972 - DNA, 756 bp, synthetic construct
  misc_feature 1..756: note = Description of Artificial Sequence: Synthetic coding sequence
  source 1..756: mol_type = other DNA
atgaacagacacctgtggaagagccagctgtgtgagatggtgcagcccagcggcggccctgctgctgaccaggatgtgctgggggaggagagccccctgggcaagccagccatgctgcacctgcccagcgagcagggcgcccctgagaccctgcagcgctgcctggaggagaaccaggagctgagagatgccatccggcagagcaaccagatcctgcgggagcgctgtgaggagctgctgcacttccaggccagccagcgggaggagaaggagttcctgatgtgcaagttccaggaggccaggaagctggtggagcggctgggcctggagaagctggacctgaagaggcagaaggagcaggccctgcgggaggtggagcacctgaagcgctgccagcagcagatggccgaggacaaggcctctgtgaaggcccaggtgaccagcctgctgggggagctgcaggagagccagagccggctggaggccgccaccaaggagtgccaggccctggagggccgggcccgggccgccagcgagcaggcccggcagctggagagcgagcgggaggccctgcagcagcagcacagcgtgcaggtggaccagctgaggatgcagggccagagcgtggaggccgccctgaggatggagcggcaggccgccagcgaggagaagaggaagctggcccagctgcaggtggcctaccaccagctgttccaggagtatgacaaccacatcaagagctctgtggtgggctag

SEQ ID NO: 155973 - DNA, 417 bp, synthetic construct
  misc_feature 1..417: note = Description of Artificial Sequence: Synthetic coding sequence
  source 1..417: mol_type = other DNA
atgaacagacacctgtggaagagccagctgtgtgagatggtgcagcccagcggcggccctgctgctgaccaggatgtgctgggggaggagagccccctgggcaagccagccatgctgcacctgcccagcgagcagggcgcccctgagaccctgcagcgctgcctggaggagaaccaggagctgagagatgccatccggcagagcaaccagatcctgcgggagcgctgtgaggagctgctgcacttccaggccagccagcgggaggagaaggagttcctgatgtgcaagttccaggaggccaggaagctggtggagcggctgggcctggagaagctggacctgaagaggcagaaggagcaggccctgcgggaggtggagcacctgaagcgctgccagcagcagatggctgaagattag

SEQ ID NO: 155974 - DNA, 1257 bp, synthetic construct
  misc_feature 1..1257: note = Description of Artificial Sequence: Synthetic coding sequence
  source 1..1257: mol_type = other DNA
atgaacagacacctgtggaagagccagctgtgtgagatggtgcagcccagcggcggccctgctgctgaccaggatgtgctgggggaggagagccccctgggcaagccagccatgctgcacctgcccagcgagcagggcgcccctgagaccctgcagcgctgcctggaggagaaccaggagctgagagatgccatccggcagagcaaccagatcctgcgggagcgctgtgaggagctgctgcacttccaggccagccagcgggaggagaaggagttcctgatgtgcaagttccaggaggccaggaagctggtggagcggctgggcctggagaagctggacctgaagaggcagaaggagcaggccctgcgggaggtggagcacctgaagcgctgccagcagatggccgaggacaaggcctctgtgaaggcccaggtgaccagcctgctgggggagctgcaggagagccagagccggctggaggccgccaccaaggagtgccaggccctggagggccgggcccgggccgccagcgagcaggcccggcagctggagagcgagcgggaggccctgcagcagcagcacagcgtgcaggtggaccagctgaggatgcagggccagagcgtggaggccgccctgaggatggagcggcaggccgccagcgaggagaagaggaagctggcccagctgcaggtggcctaccaccagctgttccaggagtatgacaaccacatcaagagctctgtggtgggcagcgagaggaagaggggcatgcagctggaggacctgaagcagcagctgcagcaggccgaggaggccctggtggccaagcaggaggtgattgacaagctgaaggaggaggccgagcagcacaagatcgtgatggagaccgtgcctgtgctgaaggcccaggccgacatctacaaggctgacttccaggccgagcggcaggcccgggagaagctggccgagaagaaggagctgctgcaggagcagctggagcagctgcagcgggagtacagcaagctgaaggccagctgccaggagagcgccagaattgaggacatgaggaagagacatgtggaggtgtcccaggcccccctgcccccagccccagcctacctgagcagccccctggccctgcccagccagaggaggagccccccagaggagcccccagacttctgctgccccaagtgccagtaccaggccccagacatggacaccctgcagatccacgtgatggagtgcattgaatag

SEQ ID NO: 155975 - DNA, 2181 bp, synthetic construct
  misc_feature 1..2181: note = Description of Artificial Sequence: Synthetic coding sequence
  source 1..2181: mol_type = other DNA
atgctgcgggcctgccagctgagcggcgtgacagctgctgcccagagctgcctgtgtgggaagtttgtgctgcggcccctgcggccctgccgccgctacagcaccagcggcagcagcggcctgaccaccgggaagattgctggagctggcctgctgtttgtgggcggcggcatcggcggcaccatcctgtatgccaagtgggacagccacttccgggagagcgtggagaagaccatcccctacagcgacaagctgtttgagatggtgctgggccctgctgcctacaacgtgcccctgcccaagaagagcatccagagcggccccctgaagatcagctctgtgtctgaggtgatgaaggagagcaagcagcctgccagccagctgcagaagcagaagggggacaccccagccagcgccacagcccccacagaagctgcccagatcatctctgctgctggggacaccctgtctgtgcctgccccagctgtgcagcctgaggagagcctgaagacagaccaccctgagatcggggagggcaagcccaccccagccctgagcgccctggccaagagcctggaggatgccctgcggcagacagcctctgtgaccctgcaggccatcgccgcccagaatgctgctgtgcaggccgtgaatgcccacagcaacatcctgaaggccgccatggacaacagcgagattgctggggagaagaagagcgcccagtggaggacagtggagggcgccctgaaggagaggaggaaggctgtggatgaagctgctgatgccctgctgaaggccaaggaggagctggagaagatgaagtctgtgattgaaaatgccaagaagaaggaggtggccggggccaagccccacatcacagctgctgagggcaagctgcacaacatgattgtggacctggacaacgtggtgaagaaggtgcaggccgcccagagcgaggccaaggtggtgtcccagtaccacgagctggtggtgcaggccagagatgacttcaagcgggagctggacagcatcaccccagaggtgctgcccggctggaagggcatgtctgagtacaacctggccgacaagctgagcacagatgacctgaacagcctgattgcccacgcccacagaagaattgaccagctgaaccgggagctggccgagcagaaggccacagagaagcagcacatcaccctggccctggagaagcagaagctggaggagaagagggcctttgattctgctgtggccaaggccctggagcaccacaggtctgagatccaggccgagcaggacaggaagattgaggaggtgagagatgccatggagaatgagatgaggacccagctgcggcggcaggccgccgcccacacagaccacctgagagatgtgctgcgggtgcaggagcaggagctgaagtcagaatttgagcagaacctgtctgagaagctgtctgagcaggagctgcagttccggcggctgagccaggagcaggtggacaacttcaccctggacatcaacacagcctatgcccggctgcggggcatcgagcaggccgtgcagagccatgctgtggccgaggaggaggccaggaaggcccaccagctgtggctgtctgtggaggccctgaagtacagcatgaagaccagcagcgctgagacccccaccatccccctgggcagcgctgtggaggccatcaaggccaactgcagcgacaatgagttcacccaggccctgacagctgccatccccccagagagcctgacccggggcgtgtacagcgaggagaccctgcgggcccgcttctatgctgtgcagaagctggccaggagagtggccatgattgatgagaccaggaacagcctgtaccagtacttcctgagctacctgcagagcctgctgctcttccccccccagcagctgaagcccccacctgagctgtgcccagaggacatcaacaccttcaagctgctgtcctatgccagctactgcatcgagcacggggacctggagctggccgccaagtttgtgaaccagctgaagggggagagccggcgggtggcccaggactggctgaaggaggccaggatgaccctggagaccaagcagatcgtggagatcctgacagcctatgccagcgctgtgggcatcggcaccacccaggtgcagcctgagtag

SEQ ID NO: 155976 - DNA, 1119 bp, synthetic construct
  misc_feature 1..1119: note = Description of Artificial Sequence: Synthetic coding sequence
  source 1..1119: mol_type = other DNA
atgctgcgggcctgccagctgagcggcgtgacagctgctgcccagagctgcctgtgtgggaagtttgtgctgcggcccctgcggccctgccgccgctacagcaccagcggcagcagcggcctgaccaccgggaagattgctggagctggcctgctgtttgtgggcggcggcatcggcggcaccatcctgtatgccaagtgggacagccacttccgggagagcgtggagaagaccatcccctacagcgacaagctgtttgagatggtgctgggccctgctgcctacaacgtgcccctgcccaagaagagcatccagagcggccccctgaagatcagctctgtgtctgaggtgatgaaggagagcaagcagcctgccagccagctgcagaagcagaagggggacaccccagccagcgccacagctggggacaccctgtctgtgcctgccccagctgtgcagcctgaggagagcctgaagacagaccaccctgagattggagagggcaagcccaccccagccctgtctgaggccagcagcagcagcatccgggagcggcccccagaggaggtggccgcccggctggcccagcaggagaagcaggagcaggtgaagattgagagcctggccaagagcctggaggatgccctgcggcagacagcctctgtgaccctgcaggccatcgccgccatccccccagagagcctgacccggggcgtgtacagcgaggagaccctgcgggcccgcttctatgctgtgcagaagctggccaggagagtggccatgattgatgagaccaggaacagcctgtaccagtacttcctgagctacctgcagagcctgctgctcttccccccccagcagctgaagcccccacctgagctgtgcccagaggacatcaacaccttcaagctgctgtcctatgccagctactgcatcgagcacggggacctggagctggccgccaagtttgtgaaccagctgaagggggagagccggcgggtggcccaggactggctgaaggaggccaggatgaccctggagaccaagcagatcgtggagatcctgacagcctatgccagcgctgtgggcatcggcaccacccaggtgcagcctgagtag

SEQ ID NO: 155977 - DNA, 1980 bp, synthetic construct
  misc_feature 1..1980: note = Description of Artificial Sequence: Synthetic coding sequence
  source 1..1980: mol_type = other DNA
atgctgcgggcctgccagctgagcggcgtgacagctgctgcccagagctgcctgtgtgggaagtttgtgctgcggcccctgcggccctgccgccgctacagcaccagcggcagcagcggcctgaccaccgggaagattgctggagctggcctgctgtttgtgggcggcggcatcggcggcaccatcctgtatgccaagtgggacagccacttccgggagagcgtggagaagaccatcccctacagcgacaagctgtttgagatggtgctgggccctgctgcctacaacgtgcccctgcccaagaagagcatccagagcggccccctgaagatcagctctgtgtctgaggtgatgaaggagagcaagcagcctgccagccagctgcagaagcagaagggggacaccccagccagcgccacagccctggccaagagcctggaggatgccctgcggcagacagcctctgtgaccctgcaggccatcgccgcccagaatgctgctgtgcaggccgtgaatgcccacagcaacatcctgaaggccgccatggacaacagcgagattgctggggagaagaagagcgcccagtggaggacagtggagggcgccctgaaggagaggaggaaggctgtggatgaagctgctgatgccctgctgaaggccaaggaggagctggagaagatgaagtctgtgattgaaaatgccaagaagaaggaggtggccggggccaagccccacatcacagctgctgagggcaagctgcacaacatgattgtggacctggacaacgtggtgcaggccagagatgacttcaagcgggagctggacagcatcaccccagaggtgctgcccggctggaagggcatgtctgtgtctgacctggccgacaagctgagcacagatgacctgaacagcctcatcgcccacgcccacagaagaattgaccagctgaaccgggagctggccgagcagaaggccacagagaagcagcacatcaccctggccctggagaagcagaagctggaggagaagagggcctttgacagcgctgtggccaaggccctggagcaccacaggtctgagatccaggccgagcaggacaggaagattgaggaggtgagagatgccatggagaatgagatgaggacccagctgcggcggcaggccgccgcccacacagaccacctgagagatgtgctgcgggtgcaggagcaggagctgaagtcagaatttgagcagaacctgtctgagaagctgtctgagcaggagctgcagttccggcggctgagccaggagcaggtggacaacttcaccctggacatcaacacagcctatgcccggctgcggggcatcgagcaggccgtgcagagccatgctgtggccgaggaggaggccaggaaggcccaccagctgtggctgtctgtggaggccctgaagtacagcatgaagaccagcagcgctgagacccccaccatccccctgggcagcgctgtggaggccatcaaggccaactgcagcgacaatgagttcacccaggccctgacagctgccatccccccagagagcctgacccggggcgtgtacagcgaggagaccctgcgggcccgcttctatgctgtgcagaagctggcccggcgggtggccatgattgatgagaccaggaacagcctgtaccagtacttcctgagctacctgcagagcctgctgctcttccccccccagcagctgaagcccccacctgagctgtgcccagaggacatcaacaccttcaagctgctgtcctatgccagctactgcattgaacatggagacctggagctggccgccaagtttgtgaaccagctgaagggggagagcagaagagtggcccaggactggctgaaggaggccaggatgaccctggagaccaagcagatcgtggagatcctgacagcctatgccagcgctgtgggcatcggcaccacccaggtgcagcctgagtag

SEQ ID NO: 155978 - DNA, 2277 bp, synthetic construct
  misc_feature 1..2277: note = Description of Artificial Sequence: Synthetic coding sequence
  source 1..2277: mol_type = other DNA
atgctgcgggcctgccagctgagcggcgtgacagctgctgcccagagctgcctgtgtgggaagtttgtgctgcggcccctgcggccctgccgccgctacagcaccagcggcagcagcggcctgaccaccgggaagattgctggagctggcctgctgtttgtgggcggcggcatcggcggcaccatcctgtatgccaagtgggacagccacttccgggagagcgtggagaagaccatcccctacagcgacaagctgtttgagatggtgctgggccctgctgcctacaacgtgcccctgcccaagaagagcatccagagcggccccctgaagatcagctctgtgtctgaggtgatgaaggagagcaagcagcctgccagccagctgcagaagcagaagggggacaccccagccagcgccacagcccccacagaagctgcccagatcatctctgctgctggggacaccctgtctgtgcctgccccagctgtgcagcctgaggagagcctgaagacagaccaccctgagatcggggagggcaagcccaccccagccctgtctgaggaggccagcagcagcagcatccgggagcggcccccagaggaggtggccgcccggctggcccagcaggagaagcaggagcaggtgaagattgagagcctggccaagagcctggaggatgccctgcggcagacagcctctgtgaccctgcaggccatcgccgcccagaatgctgctgtgcaggccgtgaatgcccacagcaacatcctgaaggccgccatggacaacagcgagattgctggggagaagaagagcgcccagtggaggacagtggagggcgccctgaaggagaggaggaaggctgtggatgaagctgctgatgccctgctgaaggccaaggaggagctggagaagatgaagtctgtgattgaaaatgccaagaagaaggaggtggccggggccaagccccacatcacagctgctgagggcaagctgcacaacatgattgtggacctggacaacgtggtgaagaaggtgcaggccgcccagagcgaggccaaggtggtgtcccagtaccacgagctggtggtgcaggccagagatgacttcaagcgggagctggacagcatcaccccagaggtgctgcccggctggaagggcatgtctgtgtctgacctggccgacaagctgagcacagatgacctgaacagcctgattgcccacgcccacagaagaattgaccagctgaaccgggagctggccgagcagaaggccacagagaagcagcacatcaccctggccctggagaagcagaagctggaggagaagagggcctttgattctgctgtggccaaggccctggagcaccacaggtctgagatccaggccgagcaggacaggaagattgaggaggtgagagatgccatggagaatgagatgaggacccagctgcggcggcaggccgccgcccacacagaccacctgagagatgtgctgcgggtgcaggagcaggagctgaagtcagaatttgagcagaacctgtctgagaagctgtctgagcaggagctgcagttccggcggctgagccaggagcaggtggacaacttcaccctggacatcaacacagcctatgcccggctgcggggcatcgagcaggccgtgcagagccatgctgtggccgaggaggaggccaggaaggcccaccagctgtggctgtctgtggaggccctgaagtacagcatgaagaccagcagcgctgagacccccaccatccccctgggcagcgctgtggaggccatcaaggccaactgcagcgacaatgagttcacccaggccctgacagctgccatccccccagagagcctgacccggggcgtgtacagcgaggagaccctgcgggcccgcttctatgctgtgcagaagctggccaggagagtggccatgattgatgagaccaggaacagcctgtaccagtacttcctgagctacctgcagagcctgctgctcttccccccccagcagctgaagcccccacctgagctgtgcccagaggacatcaacaccttcaagctgctgtcctatgccagctactgcatcgagcacggggacctggagctggccgccaagtttgtgaaccagctgaagggggagagccggcgggtggcccaggactggctgaaggaggccaggatgaccctggagaccaagcagatcgtggagatcctgacagcctatgccagcgctgtgggcatcggcaccacccaggtgcagcctgagtag

SEQ ID NO: 155979 - DNA, 2274 bp, synthetic construct
  misc_feature 1..2274: note = Description of Artificial Sequence: Synthetic coding sequence
  source 1..2274: mol_type = other DNA
atgctgcgggcctgccagctgagcggcgtgacagctgctgcccagagctgcctgtgtgggaagtttgtgctgcggcccctgcggccctgccgccgctacagcaccagcggcagcagcggcctgaccaccgggaagattgctggagctggcctgctgtttgtgggcggcggcatcggcggcaccatcctgtatgccaagtgggacagccacttccgggagagcgtggagaagaccatcccctacagcgacaagctgtttgagatggtgctgggccctgctgcctacaacgtgcccctgcccaagaagagcatccagagcggccccctgaagatcagctctgtgtctgaggtgatgaaggagagcaagcagcctgccagccagctgcagaagcagaagggggacaccccagccagcgccacagcccccacagaagctgcccagatcatctctgctgctggggacaccctgtctgtgcctgccccagctgtgcagcctgaggagagcctgaagacagaccaccctgagatcggggagggcaagcccaccccagccctgtctgaggccagcagcagcagcatccgggagaggcctcctgaggaggtggccgcccggctggcccagcaggagaagcaggagcaggtgaagattgagagcctggccaagagcctggaggatgccctgcggcagacagcctctgtgaccctgcaggccatcgccgcccagaatgctgctgtgcaggccgtgaatgcccacagcaacatcctgaaggccgccatggacaacagcgagattgctggggagaagaagagcgcccagtggaggacagtggagggcgccctgaaggagaggaggaaggctgtggatgaggccgcagatgccctgctgaaggccaaggaggagctggagaagatgaagtctgtgattgaaaatgccaagaagaaggaggtggccggggccaagccccacatcacagctgctgagggcaagctgcacaacatgattgtggacctggacaacgtggtgaagaaggtgcaggccgcccagagcgaggccaaggtggtgtcccagtaccacgagctggtggtgcaggccagagatgacttcaagcgggagctggacagcatcaccccagaggtgctgcccggctggaagggcatgtctgtgtctgacctggccgacaagctgagcacagatgacctgaacagcctcatcgcccacgcccacagaagaattgaccagctgaaccgggagctggccgagcagaaggccacagagaagcagcacatcaccctggccctggagaagcagaagctggaggagaagagggcctttgacagcgctgtggccaaggccctggagcaccacaggtctgagatccaggccgagcaggacaggaagattgaggaggtgagagatgccatggagaatgagatgaggacccagctgcggcggcaggccgccgcccacacagaccacctgagagatgtgctgcgggtgcaggagcaggagctgaagtcagaatttgagcagaacctgtctgagaagctgtctgagcaggagctgcagttccggcggctgagccaggagcaggtggacaacttcaccctggacatcaacacagcctatgcccggctgcggggcatcgagcaggccgtgcagagccatgctgtggccgaggaggaggccaggaaggcccaccagctgtggctgtctgtggaggccctgaagtacagcatgaagaccagcagcgctgagacccccaccatccccctgggcagcgctgtggaggccatcaaggccaactgcagcgacaatgagttcacccaggccctgacagctgccatccccccagagagcctgacccggggcgtgtacagcgaggagaccctgcgggcccgcttctatgctgtgcagaagctggcccggcgggtggccatgattgatgagaccaggaacagcctgtaccagtacttcctgagctacctgcagagcctgctgctcttccccccccagcagctgaagcccccacctgagctgtgcccagaggacatcaacaccttcaagctgctgtcctatgccagctactgcattgaacatggagacctggagctggccgccaagtttgtgaaccagctgaagggggagagcagaagagtggcccaggactggctgaaggaggccaggatgaccctggagaccaagcagatcgtggagatcctgacagcctatgccagcgctgtgggcatcggcaccacccaggtgcagcctgagtag

SEQ ID NO: 155980 - DNA, 2244 bp, synthetic construct
  misc_feature 1..2244: note = Description of Artificial Sequence: Synthetic coding sequence
  source 1..2244: mol_type = other DNA
atgctgcgggcctgccagctgagcggcgtgacagctgctgcccagagctgcctgtgtgggaagtttgtgctgcggcccctgcggccctgccgccgctacagcaccagcggcagcagcggcctgaccaccgggaagattgctggagctggcctgctgtttgtgggcggcggcatcggcggcaccatcctgtatgccaagtgggacagccacttccgggagagcgtggagaagaccatcccctacagcgacaagctgtttgagatggtgctgggccctgctgcctacaacgtgcccctgcccaagaagagcatccagagcggccccctgaagatcagctctgtgtctgaggtgatgaaggagagcaagcagcctgccagccagctgcagaagcagaagggggacaccccagccagcgccacagctggggacaccctgtctgtgcctgccccagctgtgcagcctgaggagagcctgaagacagaccaccctgagattggagagggcaagcccaccccagccctgtctgaggaggccagcagcagcagcatccgggagaggcctcctgaggaggtggccgcccggctggcccagcaggagaagcaggagcaggtgaagattgagagcctggccaagagcctggaggatgccctgcggcagacagcctctgtgaccctgcaggccatcgccgcccagaatgctgctgtgcaggccgtgaatgcccacagcaacatcctgaaggccgccatggacaacagcgagattgctggggagaagaagagcgcccagtggaggacagtggagggcgccctgaaggagaggaggaaggctgtggatgaggccgcagatgccctgctgaaggccaaggaggagctggagaagatgaagtctgtgattgaaaatgccaagaagaaggaggtggccggggccaagccccacatcacagctgctgagggcaagctgcacaacatgattgtggacctggacaacgtggtgaagaaggtgcaggccgcccagagcgaggccaaggtggtgtcccagtaccacgagctggtggtgcaggccagagatgacttcaagcgggagctggacagcatcaccccagaggtgctgcccggctggaagggcatgtctgtgtctgacctggccgacaagctgagcacagatgacctgaacagcctcatcgcccacgcccacagaagaattgaccagctgaaccgggagctggccgagcagaaggccacagagaagcagcacatcaccctggccctggagaagcagaagctggaggagaagagggcctttgacagcgctgtggccaaggccctggagcaccacaggtctgagatccaggccgagcaggacaggaagattgaggaggtgagagatgccatggagaatgagatgaggacccagctgcggcggcaggccgccgcccacacagaccacctgagagatgtgctgcgggtgcaggagcaggagctgaagtcagaatttgagcagaacctgtctgagaagctgtctgagcaggagctgcagttccggcggctgagccaggagcaggtggacaacttcaccctggacatcaacacagcctatgcccggctgcggggcatcgagcaggccgtgcagagccatgctgtggccgaggaggaggccaggaaggcccaccagctgtggctgtctgtggaggccctgaagtacagcatgaagaccagcagcgctgagacccccaccatccccctgggcagcgctgtggaggccatcaaggccaactgcagcgacaatgagttcacccaggccctgacagctgccatccccccagagagcctgacccggggcgtgtacagcgaggagaccctgcgggcccgcttctatgctgtgcagaagctggcccggcgggtggccatgattgatgagaccaggaacagcctgtaccagtacttcctgagctacctgcagagcctgctgctcttccccccccagcagctgaagcccccacctgagctgtgcccagaggacatcaacaccttcaagctgctgtcctatgccagctactgcattgaacatggagacctggagctggccgccaagtttgtgaaccagctgaagggggagagcagaagagtggcccaggactggctgaaggaggccaggatgaccctggagaccaagcagatcgtggagatcctgacagcctatgccagcgctgtgggcatcggcaccacccaggtgcagcctgagtag

SEQ ID NO: 155981 - DNA, 2244 bp, synthetic construct
  misc_feature 1..2244: note = Description of Artificial Sequence: Synthetic coding sequence
  source 1..2244: mol_type = other DNA
atgctgcgggcctgccagctgagcggcgtgacagctgctgcccagagctgcctgtgtgggaagtttgtgctgcggcccctgcggccctgccgccgctacagcaccagcggcagcagcggcctgaccaccgggaagattgctggagctggcctgctgtttgtgggcggcggcatcggcggcaccatcctgtatgccaagtgggacagccacttccgggagagcgtggagaagaccatcccctacagcgacaagctgtttgagatggtgctgggccctgctgcctacaacgtgcccctgcccaagaagagcatccagagcggccccctgaagatcagctctgtgtctgaggtgatgaaggagagcaagcagcctgccagccagctgcagaagcagaagggggacaccccagccagcgccacagctggggacaccctgtctgtgcctgccccagctgtgcagcctgaggagagcctgaagacagaccaccctgagattggagagggcaagcccaccccagccctgtctgaggaggccagcagcagcagcatccgggagaggcctcctgaggaggtggccgcccggctggcccagcaggagaagcaggagcaggtgaagattgagagcctggccaagagcctggaggatgccctgcggcagacagcctctgtgaccctgcaggccatcgccgcccagaatgctgctgtgcaggccgtgaatgcccacagcaacatcctgaaggccgccatggacaacagcgagattgctggggagaagaagagcgcccagtggaggacagtggagggcgccctgaaggagaggaggaaggctgtggatgaggccgcagatgccctgctgaaggccaaggaggagctggagaagatgaagtctgtgattgaaaatgccaagaagaaggaggtggccggggccaagccccacatcacagctgctgagggcaagctgcacaacatgattgtggacctggacaacgtggtgaagaaggtgcaggccgcccagagcgaggccaaggtggtgtcccagtaccacgagctggtggtgcaggccagagatgacttcaagcgggagctggacagcatcaccccagaggtgctgcccggctggaagggcatgtctgagtacaacctggccgacaagctgagcacagatgacctgaacagcctcatcgcccacgcccacagaagaattgaccagctgaaccgggagctggccgagcagaaggccacagagaagcagcacatcaccctggccctggagaagcagaagctggaggagaagagggcctttgacagcgctgtggccaaggccctggagcaccacaggtctgagatccaggccgagcaggacaggaagattgaggaggtgagagatgccatggagaatgagatgaggacccagctgcggcggcaggccgccgcccacacagaccacctgagagatgtgctgcgggtgcaggagcaggagctgaagtcagaatttgagcagaacctgtctgagaagctgtctgagcaggagctgcagttccggcggctgagccaggagcaggtggacaacttcaccctggacatcaacacagcctatgcccggctgcggggcatcgagcaggccgtgcagagccatgctgtggccgaggaggaggccaggaaggcccaccagctgtggctgtctgtggaggccctgaagtacagcatgaagaccagcagcgctgagacccccaccatccccctgggcagcgctgtggaggccatcaaggccaactgcagcgacaatgagttcacccaggccctgacagctgccatccccccagagagcctgacccggggcgtgtacagcgaggagaccctgcgggcccgcttctatgctgtgcagaagctggcccggcgggtggccatgattgatgagaccaggaacagcctgtaccagtacttcctgagctacctgcagagcctgctgctcttccccccccagcagctgaagcccccacctgagctgtgcccagaggacatcaacaccttcaagctgctgtcctatgccagctactgcattgaacatggagacctggagctggccgccaagtttgtgaaccagctgaagggggagagcagaagagtggcccaggactggctgaaggaggccaggatgaccctggagaccaagcagatcgtggagatcctgacagcctatgccagcgctgtgggcatcggcaccacccaggtgcagcctgagtag

SEQ ID NO: 155982 - DNA, 579 bp, synthetic construct
  misc_feature 1..579: note = Description of Artificial Sequence: Synthetic coding sequence
  source 1..579: mol_type = other DNA
atggaccgggcccaccggctgggccagaccaagcaggtgacagtgtaccgcctcatctgcaagggcaccatcgaggagcgcatcctgcagagggccaaggagaagtctgagatccagaggatggtgatcagcggcggcaacttcaagccagacaccctgaagcccaaggaggtggtgtccctgctgctggatgatgaggagctggagaagaagctgcggctgcggcaggaggagaagaggcagcaggaggagaccaacagagtgaaggagaggaagaggaagcgggagaagtatgcagagaagaagaagaaggaggatgagctggatggcaagaggaggaaggagggcgtgaacctggtgatcccctttgtgcccagcgctgacaacagcaacctgtctgcagatggagatgacagcttcatctctgtggacagcgccatgcccagccccttcagcgagatcagcatcagcagcgagctgcacacaggcagcatccccctggatgagagcagcagcctggccccagacagcctggtgaggaagcagggcaagggcaccaaccccagcggcggccgctag

SEQ ID NO: 155983 - DNA, 4671 bp, synthetic construct
  misc_feature 1..4671: note = Description of Artificial Sequence: Synthetic coding sequence
  source 1..4671: mol_type = other DNA
atggccagcgagctgggcgccagagatgatggcggctgcacagagctggccaagcccctgtacctgcagtacctggagcgggccctgcggctggaccacttcctgcggcagaccagcgccatcttcaacagaaacatcagcagtgatgattctgaagatggcctggatgacagcaaccccctgctgccccagagcggggaccccctcatccaggtgaaggaggagccccccaacagcctgctgggggagaccagcggggccggcagcagcggcatgctgaacacctacagcctgaatggagtgctgcagagcgagagcaaatgtgacaagggcaacctgtacaacttcagcaagctgaagaagagcaggaagtggctgaagagcatcctgctgagtgatgagagcagcgaggccgacagccagagtgaagatgatgatgaggaggagctgaacctgagccgggaggagctgcacaacatgctgcggctgcacaagtacaagaagctgcaccagaacaagtacagcaaggacaaggagctgcagcagtaccagtactacagcgctggcctgctgagcacctatgaccccttctatgagcagcagaggcacctgctgggccccaagaagaagaagttcaaggaggagaagaagctgaaggccaagctgaagaaggtgaagaagaagagaagaagagatgaggagctgagcagcgaggagagcccccggcggcaccaccaccagaccaaggtgtttgccaagttcagccatgatgcccctcctcctggcaccaagaagaagcacctgagcattgagcagctgaatgcccggcggaggaaggtgtggctgagcatcgtgaagaaggagctgcccaaggccaacaagcagaaggccagcgccaggaacctcttcctgaccaacagcaggaagctggcccaccagtgcatgaaggaggtgagaagagctgccctgcaggcccagaagaactgcaaggagaccctgccccgggcccggcggctgaccaaggagatgctgctgtactggaagaagtatgagaaggtggagaaggagcacaggaagagagctgagaaggaggccctggagcagaggaagctggatgaggagatgagggaggccaagaggcagcagaggaagctgaacttcctgatcacccagacagagctgtatgcccacttcatgagcaggaagagggacatgggccatgatggcatccaggaggagatcctgaggaagctggaggacagcagcacccagaggcagattgatattggaggcggcgtggtggtgaacatcacccaggaggactatgacagcaaccacttcaaggcccaggccctgaagaatgcagaaaatgcctaccacatccaccaggcccggaccaggagctttgatgaagatgccaaggagagcagagctgctgccctgcgggccgccaacaagtctggaactggatttggagagagctacagcctggccaaccccagcatccgggccggggaggacatcccccagcccaccatcttcaacgggaagctgaagggctaccagctgaagggcatgaactggctggccaacctgtatgagcagggcatcaatggcatcctggctgatgagatgggcctgggcaagacagtgcagagcatcgccctgctggcccacctggccgagcgggagaacatctggggccccttcctgatcatcagccctgccagcaccctgaacaactggcaccaggagttcaccaggtttgtgcccaagttcaaggtgctgccctactggggcaacccccatgacaggaaggtgatccgccgcttctggagccagaagaccctgtacacccaggatgcccccttccacgtggtgatcaccagctaccagctggtggtgcaggatgtgaagtacttccagagggtgaagtggcagtacatggtgctggatgaggcccaggccctgaagagcagcagctctgtgcgctggaagatcctgctgcagttccagtgcaggaaccggctgctgctgaccggcacccccatccagaacaccatggccgagctgtgggccctgctgcacttcatcatgcccaccctgtttgacagccatgaggagttcaatgagtggttcagcaaggacatcgagagccatgctgagaacaagagcgccattgatgagaaccagctgagccggctgcacatgatcctgaagcccttcatgctgcggcgcatcaagaaggatgtggagaatgagctgagtgacaagattgagatcctgatgtactgccagctgaccagccggcagaagctgctgtaccaggccctgaagaacaagatcagcattgaggacctgctgcagagctccatgggcagcacccagcaggcccagaacaccaccagcagcctgatgaacctggtgatgcagttcaggaaggtgtgcaaccaccctgagctgtttgagcggcaggagacctggagccccttccacatcagcctgaagccctaccacatcagcaagttcatctacagacatggccagatccgggtcttcaaccacagccgggaccgctggctgcgggtgctgagcccctttgccccagactacatccagaggagcctcttccacaggaagggcatcaatgaggagagctgcttctccttcctgcgcttcatcgacatcagccctgctgagatggccaacctgatgctgcagggcctgctggcccgctggctggccctcttcctgagcctgaaggccagctaccgcctgcaccagctgcgctcctggggcgcccctgagggggagagccaccagcgctacctgaggaacaaggacttcctgctgggcgtgaacttccccctgtccttccccaacctgtgcagctgccccctgctgaagagcctggtgttcagcagccactgcaaggctgtgtctggctacagcgaccaggtggtgcaccagaggagaagtgccaccagcagcctgcggcgctgcctgctgacagagctgcccagcttcctgtgtgtggccagcccccgggtgacagctgtgcccctggacagctactgcaatgacagatctgcagaatatgaaagaagagtgctgaaggagggcggcagcctggccgccaagcagtgcctgctgaatggagcccctgagctggccgctgactggctgaacagaagaagccagttcttccctgagcctgctgggggcctgtggagcatccggccccagaatggctggagcttcatccgcatccctgggaaggagagcctcatcacagacagcggcaagctgtatgccctggatgtgctgctgacccggctgaagagccagggccaccgggtgctgatctacagccagatgaccaggatgattgacctgctggaggagtacatggtgtacaggaagcacacctacatgaggctggatggcagcagcaagatcagcgagcggcgggacatggtggccgacttccagaacagaaatgacatctttgtgttcctgctgagcacccgggccggcggcctgggcatcaacctgacagctgctgacaccgtcatcttctatgacagcgactggaaccccaccgtggaccagcaggccatggaccgggcccaccggctgggccagaccaagcaggtgacagtgtaccgcctcatctgcaagggcaccatcgaggagcgcatcctgcagagggccaaggagaagtctgagatccagaggatggtgatcagcggcggcaacttcaagccagacaccctgaagcccaaggaggtggtgtccctgctgctggatgatgaggagctggagaagaagctgcggctgcggcaggaggagaagaggcagcaggaggagaccaacagagtgaaggagaggaagaggaagcgggagaagtatgcagagaagaagaagaaggaggatgagctggatggcaagaggaggaaggagggcgtgaacctggtgatcccctttgtgcccagcgctgacaacagcaacctgtctgcagatggagatgacagcttcatctctgtggacagcgccatgcccagccccttcagcgagatcagcatcagcagcgagctgcacacaggcagcatccccctggatgagagcagcagtgacatgctggtgattgtggatgatcctgccagcagcgccccccagagccgggccaccaacagccctgccagcatcaccggctctgtgtctgacacagtgaatggcatcagcatccaggagatgcctgctgctggccggggccacagcgcccggagccggggccggcccaagggcagcggcagcacagccaagggggccggcaagggccgcagcaggaagagcacagctggcagcgctgctgccatggccggggccaaggccggggctgctgctgccagcgctgctgcctatgctgcctacggctacaacgtgtccaagggcatcagcgccagcagccccctgcagaccagcctggtgcggcctgctggcctggccgactttggccccagcagcgccagcagccccctgagcagccccctgagcaagggcaacaacgtgcccggcaaccccaagaacctgcacatgaccagcagcctggccccagacagcctggtgaggaagcagggcaagggcaccaaccccagcggcggccgctag

SEQ ID NO: 155984 - DNA, 4671 bp, synthetic construct; identical to SEQ ID NO: 155983
  misc_feature 1..4671: note = Description of Artificial Sequence: Synthetic coding sequence
  source 1..4671: mol_type = other DNA

SEQ ID NO: 155985 - DNA, 585 bp, synthetic construct
  misc_feature 1..585: note = Description of Artificial Sequence: Synthetic coding sequence
  source 1..585: mol_type = other DNA
atggccgccagcctggtgggcaagaagatcgtgtttgtgactggaaatgccaagaagctggaggaggtggtgcagatcctgggggacaagttcccctgcaccctggtggcccagaagattgacctgcctgagtaccagggcgagccagatgagatcagcatccagaagtgccaggaggccgtgcggcaggtgcagggccctgtgctggtggaggacacctgcctgtgcttcaatgccctgggcggcctgcccggcccctacatcaagtggttcctggagaagctgaagccagagggcctgcaccagctgctggccggctttgaggacaagagcgcctatgccctgtgcacctttgccctgagcactggagaccccagccagcctgtgcggctcttccggggccgcaccagcggccgcatcgtggccccccggggctgccaggactttggctgggacccctgcttccagccagatggctatgagcagacctatgcagagatgcccaaggccgagaagaatgctgtgagccaccgcttccgggccctgctggagctgcaggagtacttcggcagcctggccgcctag

SEQ ID NO: 155986 - DNA, 462 bp, synthetic construct
  misc_feature 1..462: note = Description of Artificial Sequence: Synthetic coding sequence
  source 1..462: mol_type = other DNA
atggccgccagcctggtgggcaagaagatcgtgtttgtgactggaaatgccaagaagctggaggaggtgcagggccctgtgctggtggaggacacctgcctgtgcttcaatgccctgggcggcctgcccggcccctacatcaagtggttcctggagaagctgaagccagagggcctgcaccagctgctggccggctttgaggacaagagcgcctatgccctgtgcacctttgccctgagcactggagaccccagccagcctgtgcggctcttccggggccgcaccagcggcagaattgtggccccccggggctgccaggactttggctgggacccctgcttccagccagatggctatgagcagacctacgccgagatgcccaaggccgagaagaatgctgtgagccaccgcttccgggccctgctggagctgcaggagtacttcggcagcctggccgcctag

SEQ ID NO: 155987 - DNA, 534 bp, synthetic construct
  misc_feature 1..534: note = Description of Artificial Sequence: Synthetic coding sequence
  source 1..534: mol_type = other DNA
atggccgccagcctggtggtgcagatcctgggggacaagttcccctgcaccctggtggcccagaagattgacctgcctgagtaccagggcgagccagatgagatcagcatccagaagtgccaggaggccgtgcggcaggtgcagggccctgtgctggtggaggacacctgcctgtgcttcaatgccctgggcggcctgcccggcccctacatcaagtggttcctggagaagctgaagccagagggcctgcaccagctgctggccggctttgaggacaagagcgcctatgccctgtgcacctttgccctgagcactggagaccccagccagcctgtgcggctcttccggggccgcaccagcggcagaattgtggccccccggggctgccaggactttggctgggacccctgcttccagccagatggctatgagcagacctacgccgagatgcccaaggccgagaagaatgctgtgagccaccgcttccgggccctgctggagctgcaggagtacttcggcagcctggccgcctag

SEQ ID NO: 155988 - DNA, 8232 bp, synthetic construct
  misc_feature 1..8232: note = Description of Artificial Sequence: Synthetic coding sequence
  source 1..8232: mol_type = other DNA
atgtctgacaagatgagcagcttcctgcacatcggggacatctgcagcctgtatgcagagggcagcaccaacggcttcatcagcaccctgggcctggtggatgacagatgtgtggtgcagcctgagactggagacctgaacaacccccccaagaagttccgggactgcctcttcaagctgtgccccatgaaccgctacagcgcccagaagcagttctggaaggccgccaagccaggggccaacagcaccacagatgctgtgctgctgaacaagctgcaccacgccgctgacctggagaagaagcagaatgaaacagagaacaggaagctgctgggcaccgtcatccagtatggaaatgtcatccagctgctgcacctgaagagcaacaagtacctgactgtgaacaagaggctgcctgccctgctggagaagaatgccatgagggtgaccctggatgaggccggaaatgaaggctcctggttctacatccagcccttctacaagctgcggagcatcggggacagcgtggtgattggagacaaggtggtgctgaaccctgtgaatgccggccagcccctgcacgccagcagccaccagctggtggacaaccctggctgcaatgaggtgaacagcgtgaactgcaacacctcctggaagatcgtgctcttcatgaagtggagcgacaacaaggatgacatcctgaagggaggagatgtggtgcggctcttccacgccgagcaggagaagttcctgacctgtgatgagcacaggaagaagcagcacgtgttcctgcggaccaccggccggcagagcgccaccagcgccaccagcagcaaggccctgtgggaggtggaggtggtgcagcacgacccctgccggggcggggccggctactggaacagcctcttccgcttcaagcacctggccaccggccactacctggccgctgaggtggaccctgaccaggatgccagccgcagccggctgagaaatgcccaggagaagatggtgtacagcctggtgtctgtgcctgagggcaatgacatcagcagcatctttgagctggaccccaccaccctgcggggcggggacagcctggtgcccagaaattcctatgtgcggctgcggcacctgtgcaccaacacctgggtgcacagcaccaacatccccatcgacaaggaggaggagaagcctgtgatgctgaagattggcaccagccctgtgaaggaggacaaggaggcctttgccatcgtgcctgtgtccccagctgaggtgcgggacctggactttgccaatgatgccagcaaggtgctgggcagcattgctgggaagctggagaagggcaccatcacccagaatgaaagaagatctgtgaccaagctgctggaggacctggtgtactttgtgactggaggcaccaacagcggccaggatgtgctggaggtggtgttcagcaagcccaaccgggagcggcagaagctgatgagggagcagaacatcctgaagcagatcttcaagctgctgcaggcccccttcacagactgtggagatggccccatgctgcggctggaggagctgggggaccagagacatgcccccttccgccacatctgccgcctgtgctacagagtgctgcggcacagccagcaggactacaggaagaaccaggagtacatcgccaagcagtttggcttcatgcagaagcagatcggctatgatgtgctggccgaggacaccatcacagccctgctgcacaacaacaggaagctgctggagaagcacatcacagctgctgagattgacacctttgtgtccctggtgaggaagaaccgggagccccgcttcctggactacctgagtgacctgtgtgtgtccatgaacaagagcatccctgtgacccaggagctgatctgcaaggctgtgctgaaccccaccaatgctgacatcctgattgagaccaagctggtgctgagcagatttgaatttgagggcgtgagcagcactggagaaaatgccctggaggccggagaagatgaggaggaggtgtggctgttctggagggacagcaacaaggagatccgcagcaagtctgtgcgggagctggcccaggatgccaaggagggccagaaggaggacagagatgtgctgagctactaccgctaccagctgaacctgtttgccaggatgtgcctggaccggcagtacctggccatcaatgagatcagcggccagctggatgtggacctgatcctgcgctgcatgtctgatgagaacctgccctatgacctgcgggccagcttctgccgcctgatgctgcacatgcacgtggaccgggacccccaggagcaggtgacccctgtgaagtatgcccggctgtggagcgagatccccagcgagatcgccattgatgattatgacagcagcggggccagcaaggatgagatcaaggagagatttgcccagaccatggagtttgtggaggagtacctgagagatgtggtgtgccagcgcttccccttcagtgacaaggagaagaacaagctgacctttgaggtggtgaacctggccaggaacctgatctacttcggcttctacaacttcagtgacctgctgcggctgaccaagatcctgctggccatcctggactgtgtgcacgtgaccaccatcttccccatcagcaagatggccaagggggaggagaacaagggcaacaatgatgtggagaagctgaagagcagcaatgtgatgaggagcatccacggcgtgggggagctgatgacccaggtggtgctgcggggcggcggcttcctgcccatgacccccatggccgccgcccctgagggcaatgtgaagcaggccgagcctgagaaggaggacatcatggtgatggacaccaagctgaagatcatcgagatcctgcagttcatcctgaatgtgcggctggactaccgcatcagctgcctgctgtgcatcttcaagcgggagtttgatgagagcaacagccagaccagcgagaccagcagcggcaacagcagccaggagggccccagcaatgtgcctggggccctggactttgagcacatcgaggagcaggccgagggcatctttggaggcagcgaggagaacacccccctggacctggatgaccacggcggccgcaccttcctgcgggtgctgctgcacctgaccatgcatgactacccacccctggtgtctggggccctgcagctgctcttccgccacttcagccagaggcaggaggtgctgcaggccttcaagcaggtgcagctgctggtgaccagccaggatgtggacaactacaagcagatcaagcaggacctggaccagctgcggagcatcgtggagaagtctgagctgtgggtgtacaagggccagggcccagatgagaccatggatggagccagcggggagaatgagcacaagaagacagaggagggcaacaacaagccccagaagcatgagagcaccagcagctacaactacagagtggtgaaggagatcctgatccggctgagcaagctgtgtgtgcaggagagcgcctctgtgaggaagagcaggaagcagcagcagaggctgctgaggaacatgggcgcccatgctgtggtgctggagctgctgcagatcccctatgagaaggccgaggacaccaagatgcaggagatcatgaggctggcccacgagttcctgcagaacttctgtgccggcaaccagcagaaccaggccctgctgcacaagcacatcaacctcttcctgaaccctggcatcctggaggccgtgaccatgcagcacatcttcatgaacaacttccagctgtgcagcgagatcaatgaaagagtggtgcagcactttgtgcactgcatcgagacccatggaagaaatgtgcagtacatcaagttcctgcagaccatcgtgaaggccgagggcaagttcatcaagaagtgccaggacatggtgatggccgagctggtgaacagcggggaggatgtgctggtgttctacaatgaccgggccagcttccagaccctcatccagatgatgaggtctgagcgggacaggatggatgagaacagccccctgatgtaccacatccacctggtggagctgctggccgtgtgcacagagggcaagaatgtgtacacagagatcaagtgcaacagcctgctgcccctggatgacatcgtgcgggtggtgacccatgaggactgcatccctgaggtgaagatcgcctacatcaacttcctgaaccactgctacgtggacacagaggtggagatgaaggagatctacaccagcaaccacatgtggaagctgtttgagaacttcctggtggacatctgccgggcctgcaacaacaccagtgacaggaagcatgctgacagcatcctggagaagtatgtgacagagatcgtgatgagcatcgtgaccaccttcttcagcagccccttcagtgaccagagcaccaccctgcagacccggcagcctgtgtttgtgcagctgctgcagggcgtcttccgggtgtaccactgcaactggctgatgcccagccagaaggcctctgtggagagctgcatccgggtgctgagtgatgtggccaagagccgggccatcgccatccctgtggacctggacagccaggtgaacaacctcttcctgaagagccacagcatcgtgcagaagacagccatgaactggaggctgagcgccagaaatgctgcccggcgggacagcgtgctggccgccagccgggactacagaaacatcatcgagcggctgcaggacatcgtgtctgccctggaggaccggctgcggcccctggtgcaggccgagctgtctgtgctggtggatgtgctgcacaggcctgagctgctcttcccagaaaatacagatgcccggaggaaatgtgagagcggcggcttcatctgcaagctgatcaagcacaccaagcagctgctggaggagaatgaggagaagctgtgcatcaaggtgctgcagaccctgcgggagatgatgaccaaggaccggggctatggagagaagctgatcagcattgatgagctggacaatgctgagctgcccccagccccagacagtgaaaatgccacagaggagctggagcccagcccccccctgcggcagctggaggaccacaagagaggagaggccctgcggcaggtgctggtgaaccgctactatggaaatgtgcggcccagcggccggcgggagagcctgaccagctttggaaatggccccctgtctgctgggggccctgggaagccaggcggcggcggcggcggcagcggcagcagctccatgagcagaggagagatgagcctggccgaggtgcagtgccacctggacaaggagggcgccagcaacctggtgattgacctgatcatgaatgccagcagtgacagagtcttccacgagagcatcctgctggccatcgccctgctggagggcggcaacaccaccatccagcacagcttcttctgccgcctgacagaggacaagaagtctgagaagttcttcaaggtgttctatgacaggatgaaggtggcccagcaggagatcaaggccaccgtgacagtgaacaccagtgacctgggcaacaagaagaaggatgatgaggtggacagagatgcccccagcaggaagaaggccaaggagcccaccacccagatcacagaggaggtgcgggaccagctgctggaggccagcgctgccaccaggaaggccttcaccaccttccggcgggaggccgaccctgatgaccactaccagcctggagagggcacccaggccacagctgacaaggccaaggatgacctggagatgtctgctgtgatcaccatcatgcagcccatcctgcgcttcctgcagctgctgtgtgagaaccacaacagagacctgcagaacttcctgcgctgccagaacaacaagaccaactacaacctggtgtgtgagaccctgcagttcctggactgcatctgtggcagcaccaccggcggcctgggcctgctgggcctgtacatcaatgagaagaatgtggccctgatcaaccagaccctggagagcctgacagagtactgccagggcccctgccacgagaaccagaactgcatcgccacccatgagagcaatggcatcgacatcatcacagccctgatcctgaatgacatcaaccccctgggcaagaagaggatggacctggtgctggagctgaagaacaatgccagcaagctgctgctggccatcatggagagcagacatgattctgaaaatgctgagcgcatcctgtacaacatgaggcccaaggagctggtggaggtgatcaagaaggcctacatgcagggcgaggtggagtttgaagatggagaaaatggagaagatggagctgccagccccagaaatgtgggccacaacatctacatcctggcccaccagctggcccggcacaacaaggagctgcagagcatgctgaagccaggcggccaggtggatggagatgaggccctggagttctacgccaagcacacagcccagattgaaattgtgcggctggacaggaccatggagcagatcgtgtttcctgtgcccagcatctgtgagttcctgaccaaggagagcaagctgcgcatctactacaccacagaaagagatgagcagggcagcaagatcaatgacttcttcctgcggagtgaagatctcttcaatgagatgaactggcagaagaagctgcgggcccagcctgtgctgtactggtgtgccaggaacatgtccttctggagcagcatctccttcaacctggccgtgctgatgaacctgctggtggccttcttctaccccttcaagggcgtgcggggcggcaccctggagccccactggagcggcctgctgtggacagccatgctgatcagcctggccatcgtcatcgccctgcccaagccccacggcatccgggccctgattgccagcaccatcctgcggctcatcttctctgtgggcctgcagcccaccctcttcctgctgggcgccttcaacgtgtgcaacaagatcatcttcctgatgagctttgtgggcaactgtggcaccttcacccggggctaccgggccatggtgctggatgtggagttcctgtaccacctgctgtacctggtgatctgtgccatgggcctgtttgtgcatgagttcttctacagcctgctgctgtttgacctggtgtaccgggaggagaccctgctgaatgtcatcaagtctgtgaccagaaatggccgcagcatcatcctgacagctgtgctggccctgatcctggtgtacctgttcagcatcgtgggctacctgttcttcaaggatgacttcatcctggaggtggaccggctgcccaatgaaacagctgtgcctgagaccggggagagcctggccagcgagttcctgttcagtgatgtgtgccgggtggagagcggggagaactgcagcagccctgccccccgggaggagctggtgcctgctgaggagacagagcaggacaaggagcacacctgtgagaccctgctgatgtgcatcgtgacagtgctgagccacggcctgcggagcggcggcggcgtgggagatgtgctgaggaagcccagcaaggaggagcccctgtttgctgcccgggtcatctatgacctgctcttcttcttcatggtgatcatcatcgtgctgaacctgatctttggagtcatcatcgacacctttgctgacctgcggtctgagaagcagaagaaggaggagatcctgaagaccacctgcttcatctgtggcctggagcgggacaagtttgacaacaagacagtgacctttgaggagcacatcaaggaggagcacaacatgtggcactacctgtgcttcatcgtgctggtgaaggtgaaggacagcacagagtacacaggccctgagagctatgtggccgagatgatcaaggagaggaacctggactggttccccaggatgagggccatgagcctggtgtccagtgacagcgagggggagcagaatgagctgaggaacctgcaggagaagctggagagcaccatgaagctggtgaccaacctgagcggccagctgtctgagctgaaggaccagatgacagagcagaggaagcagaagcagagaattggcctgctgggccaccccccccacatgaatgtgaacccccagcagcctgcctag

SEQ ID NO: 155989 - DNA, 8232 bp, synthetic construct
  misc_feature 1..8232: note = Description of Artificial Sequence: Synthetic coding sequence
  source 1..8232: mol_type = other DNA
atgtctgacaagatgagcagcttcctgcacatcggggacatctgcagcctgtatgcagagggcagcaccaacggcttcatcagcaccctgggcctggtggatgacagatgtgtggtgcagcctgagactggagacctgaacaacccccccaagaagttccgggactgcctcttcaagctgtgccccatgaaccgctacagcgcccagaagcagttctggaaggccgccaagccaggggccaacagcaccacagatgctgtgctgctgaacaagctgcaccacgccgctgacctggagaagaagcagaatgaaacagagaacaggaagctgctgggcaccgtcatccagtatggaaatgtcatccagctgctgcacctgaagagcaacaagtacctgactgtgaacaagaggctgcctgccctgctggagaagaatgccatgagggtgaccctggatgaggccggaaatgaaggctcctggttctacatccagcccttctacaagctgcggagcatcggggacagcgtggtgattggagacaaggtggtgctgaaccctgtgaatgccggccagcccctgcacgccagcagccaccagctggtggacaaccctggctgcaatgaggtgaacagcgtgaactgcaacacctcctggaagatcgtgctcttcatgaagtggagcgacaacaaggatgacatcctgaagggaggagatgtggtgcggctcttccacgccgagcaggagaagttcctgacctgtgatgagcacaggaagaagcagcacgtgttcctgcggaccaccggccggcagagcgccaccagcgccaccagcagcaaggccctgtgggaggtggaggtggtgcagcacgacccctgccggggcggggccggctactggaacagcctcttccgcttcaagcacctggccaccggccactacctggccgctgaggtggaccctgactttgaggaggagtgcctggagttccagcccagcgtggaccctgaccaggatgccagccgcagccggctgagaaatgcccaggagaagatggtgtacagcctggtgtctgtgcctgagggcaatgacatcagcagcatctttgagctggaccccaccaccctgcggggcggggacagcctggtgcccaggaacagctatgtgcggctgcggcacctgtgcaccaacacctgggtgcacagcaccaacatccccatcgacaaggaggaggagaagcctgtgatgctgaagattggcaccagccctgtgaaggaggacaaggaggcctttgccatcgtgcctgtgtccccagctgaggtgcgggacctggactttgccaatgatgccagcaaggtgctgggcagcattgctgggaagctggagaagggcaccatcacccagaatgaaagaagatctgtgaccaagctgctggaggacctggtgtactttgtgactggaggcaccaacagcggccaggatgtgctggaggtggtgttcagcaagcccaaccgggagcggcagaagctgatgagggagcagaacatcctgaagcagatcttcaagctgctgcaggcccccttcacagactgtggagatggccccatgctgcggctggaggagctgggggaccagagacatgcccccttccgccacatctgccgcctgtgctacagagtgctgcggcacagccagcaggactacaggaagaaccaggagtacatcgccaagcagtttggcttcatgcagaagcagatcggctatgatgtgctggccgaggacaccatcacagccctgctgcacaacaacaggaagctgctggagaagcacatcacagctgctgagattgacacctttgtgtccctggtgaggaagaaccgggagccccgcttcctggactacctgagtgacctgtgtgtgtccatgaacaagagcatccctgtgacccaggagctgatctgcaaggctgtgctgaaccccaccaatgctgacatcctgattgagaccaagctggtgctgagcagatttgaatttgaaggagtgagcagcactggagaaaatgccctggaggccggggaggatgaggaggaggtgtggctgttctggagggacagcaacaaggagatccgcagcaagtctgtgcgggagctggcccaggatgccaaggagggccagaaggaggacagagatgtgctgagctactaccgctaccagctgaacctgtttgccaggatgtgcctggaccggcagtacctggccatcaatgagatcagcggccagctggatgtggacctgatcctgcgctgcatgtctgatgagaacctgccctatgacctgcgggccagcttctgccgcctgatgctgcacatgcacgtggaccgggacccccaggagcaggtgacccctgtgaagtatgcccggctgtggagcgagatccccagcgagatcgccattgatgattatgacagcagcggggccagcaaggatgagatcaaggagagatttgcccagaccatggagtttgtggaggagtacctgagagatgtggtgtgccagcgcttccccttcagtgacaaggagaagaacaagctgacctttgaggtggtgaacctggccaggaacctgatctacttcggcttctacaacttcagtgacctgctgcggctgaccaagatcctgctggccatcctggactgtgtgcacgtgaccaccatcttccccatcagcaagatggccaagggggaggagaacaagggcaacaatgatgtggagaagctgaagagcagcaatgtgatgaggagcatccatggagtgggggagctgatgacccaggtggtgctgcggggcggcggcttcctgcccatgacccccatggctgctgcccctgagggcaatgtgaagcaggccgagcctgagaaggaggacatcatggtgatggacaccaagctgaagatcatcgagatcctgcagttcatcctgaatgtgcggctggactaccgcatcagctgcctgctgtgcatcttcaagcgggagtttgatgagagcaacagccagaccagcgagaccagcagcggcaacagcagccaggagggccccagcaatgtgcctggggccctggactttgagcacatcgaggagcaggccgagggcatctttggaggcagcgaggagaacacccccctggacctggatgaccatggaggccgcaccttcctgcgggtgctgctgcacctgaccatgcatgactacccacccctggtgtctggggccctgcagctgctcttccgccacttcagccagaggcaggaggtgctgcaggccttcaagcaggtgcagctgctggtgaccagccaggatgtggacaactacaagcagatcaagcaggacctggaccagctgcggagcatcgtggagaagtctgagctgtgggtgtacaagggccagggcccagatgagaccatggatggagccagcggagaaaatgagcacaagaagacagaggagggcaacaacaagccccagaagcatgagagcaccagcagctacaactacagagtggtgaaggagatcctgatccggctgagcaagctgtgtgtgcaggagagcgcctctgtgaggaagagcaggaagcagcagcagaggctgctgaggaacatgggcgcccatgctgtggtgctggagctgctgcagatcccctatgagaaggccgaggacaccaagatgcaggagatcatgaggctggcccacgagttcctgcagaacttctgtgccggcaaccagcagaaccaggccctgctgcacaagcacatcaacctcttcctgaaccctggcatcctggaggccgtgaccatgcagcacatcttcatgaacaacttccagctgtgcagcgagatcaatgaaagagtggtgcagcactttgtgcactgcatcgagacccacggcagaaatgtgcagtacatcaagttcctgcagaccatcgtgaaggccgagggcaagttcatcaagaagtgccaggacatggtgatggccgagctggtgaacagcggagaagatgtgctggtgttctacaatgaccgggccagcttccagaccctcatccagatgatgaggtctgagcgggacaggatggatgagaacagccccctgatgtaccacatccacctggtggagctgctggccgtgtgcacagagggcaagaatgtgtacacagagatcaagtgcaacagcctgctgcccctggatgacatcgtgcgggtggtgacccatgaggactgcatccctgaggtgaagatcgcctacatcaacttcctgaaccactgctacgtggacacagaggtggagatgaaggagatctacaccagcaaccacatgtggaagctgtttgagaacttcctggtggacatctgccgggcctgcaacaacaccagtgacaggaagcacgccgacagcatcctggagaagtatgtgacagaaattgtgatgagcatcgtgaccaccttcttcagcagccccttcagtgaccagagcaccaccctgcagacccggcagcctgtgtttgtgcagctgctgcagggcgtcttccgggtgtaccactgcaactggctgatgcccagccagaaggcctctgtggagagctgcatccgggtgctgagtgatgtggccaagagccgggccatcgccatccctgtggacctggacagccaggtgaacaacctcttcctgaagagccacagcatcgtgcagaagacagccatgaactggaggctgagcgccagaaatgctgcccggcgggacagcgtgctggccgccagccgggactacagaaacatcatcgagcggctgcaggacatcgtgtctgccctggaggaccggctgcggcccctggtgcaggccgagctgtctgtgctggtggatgtgctgcacaggcctgagctgctcttccctgagaacacagatgcccggaggaaatgtgagagcggcggcttcatctgcaagctgatcaagcacaccaagcagctgctggaggagaatgaggagaagctgtgcatcaaggtgctgcagaccctgcgggagatgatgaccaaggaccggggctacggggagaagctgatcagcattgatgagctggacaatgctgagctgcccccagccccagattctgaaaatgccacagagaagggggaggccctgcggcaggtgctggtgaaccgctactatggaaatgtgcggcccagcggccggcgggagagcctgaccagctttggaaatggccccctgtctgctgggggccctgggaagccaggcggcggcggcggcggcagcggcagcagctccatgagcagaggagagatgagcctggccgaggtgcagtgccacctggacaaggagggcgccagcaacctggtgattgacctgatcatgaatgccagcagtgacagagtcttccacgagagcatcctgctggccatcgccctgctggagggcggcaacaccaccatccagcacagcttcttctgccgcctgacagaggacaagaagtctgagaagttcttcaaggtgttctatgacaggatgaaggtggcccagcaggagatcaaggccaccgtgacagtgaacaccagtgacctgggcaacaagaagaaggatgatgaggtggacagagatgcccccagcaggaagaaggccaaggagcccaccacccagatcacagaggaggtgcgggaccagctgctggaggccagcgctgccaccaggaaggccttcaccaccttccggcgggaggccgaccctgatgaccactaccagcctggagagggcacccaggccacagctgacaaggccaaggatgacctggagatgtctgctgtgatcaccatcatgcagcccatcctgcgcttcctgcagctgctgtgtgagaaccacaacagagacctgcagaacttcctgcgctgccagaacaacaagaccaactacaacctggtgtgtgagaccctgcagttcctggactgcatctgtggcagcaccaccggcggcctgggcctgctgggcctgtacatcaatgagaagaatgtggccctgatcaaccagaccctggagagcctgacagagtactgccagggcccctgccacgagaaccagaactgcatcgccacccatgagagcaatggcatcgacatcatcacagccctgatcctgaatgacatcaaccccctgggcaagaagaggatggacctggtgctggagctgaagaacaatgccagcaagctgctgctggccatcatggagagcagacatgattctgaaaatgctgagcgcatcctgtacaacatgaggcccaaggagctggtggaggtgatcaagaaggcctacatgcagggcgaggtggagtttgaagatggagaaaatggagaagatggagctgccagccccagaaatgtgggccacaacatctacatcctggcccaccagctggcccggcacaacaaggagctgcagagcatgctgaagccaggcggccaggtggatggagatgaggccctggagttctacgccaagcacacagcccagattgaaattgtgcggctggacaggaccatggagcagatcgtgtttcctgtgcccagcatctgtgagttcctgaccaaggagagcaagctgcgcatctactacaccacagaaagagatgagcagggcagcaagatcaatgacttcttcctgcggagtgaagatctcttcaatgagatgaactggcagaagaagctgcgggcccagcctgtgctgtactggtgtgccaggaacatgtccttctggagcagcatctccttcaacctggccgtgctgatgaacctgctggtggccttcttctaccccttcaagggcgtgcggggcggcaccctggagccccactggagcggcctgctgtggacagccatgctgatcagcctggccatcgtcatcgccctgcccaagccccacggcatccgggccctgattgccagcaccatcctgcggctcatcttctctgtgggcctgcagcccaccctcttcctgctgggcgccttcaacgtgtgcaacaagatcatcttcctgatgagctttgtgggcaactgtggcaccttcacccggggctaccgggccatggtgctggatgtggagttcctgtaccacctgctgtacctggtgatctgtgccatgggcctgtttgtgcatgagttcttctacagcctgctgctgtttgacctggtgtaccgggaggagaccctgctgaatgtcatcaagtctgtgaccagaaatggccgcagcatcatcctgacagctgtgctggccctgatcctggtgtacctgttcagcatcgtgggctacctgttcttcaaggatgacttcatcctggaggtggaccggctgcccaatgaaacagctgtgcctgagaccggggagagcctggccagcgagttcctgttcagtgatgtgtgccgggtggagagcggggagaactgcagcagccctgccccccgggaggagctggtgcctgctgaggagacagagcaggacaaggagcacacctgtgagaccctgctgatgtgcatcgtgacagtgctgagccacggcctgcggagcggcggcggcgtgggagatgtgctgaggaagcccagcaaggaggagcccctgtttgctgcccgggtcatctatgacctgctcttcttcttcatggtgatcatcatcgtgctgaacctgatctttggagtcatcatcgacacctttgctgacctgcggtctgagaagcagaagaaggaggagatcctgaagaccacctgcttcatctgtggcctggagcgggacaagtttgacaacaagacagtgacctttgaggagcacatcaaggaggagcacaacatgtggcactacctgtgcttcatcgtgctggtgaaggtgaaggacagcacagagtacacaggccctgagagctatgtggccgagatgatcaaggagaggaacctggactggttccccaggatgagggccatgagcctggtgtccagtgacagcgagggggagcagaatgagctgaggaacctgcaggagaagctggagagcaccatgaagctggtgaccaacctgagcggccagctgtctgagctgaaggaccagatgacagagcagaggaagcagaagcagagaattggcctgctgggccaccccccccacatgaatgtgaacccccagcagcctgcctag

SEQ ID NO: 155990 - DNA, 8277 bp, synthetic construct
  misc_feature 1..8277: note = Description of Artificial Sequence: Synthetic coding sequence
  source 1..8277: mol_type = other DNA
atgtctgacaagatgagcagcttcctgcacatcggggacatctgcagcctgtatgcagagggcagcaccaacggcttcatcagcaccctgggcctggtggatgacagatgtgtggtgcagcctgagactggagacctgaacaacccccccaagaagttccgggactgcctcttcaagctgtgccccatgaaccgctacagcgcccagaagcagttctggaaggccgccaagccaggggccaacagcaccacagatgctgtgctgctgaacaagctgcaccacgccgctgacctggagaagaagcagaatgaaacagagaacaggaagctgctgggcaccgtcatccagtatggaaatgtcatccagctgctgcacctgaagagcaacaagtacctgactgtgaacaagaggctgcctgccctgctggagaagaatgccatgagggtgaccctggatgaggccggaaatgaaggctcctggttctacatccagcccttctacaagctgcggagcatcggggacagcgtggtgattggagacaaggtggtgctgaaccctgtgaatgccggccagcccctgcacgccagcagccaccagctggtggacaaccctggctgcaatgaggtgaacagcgtgaactgcaacacctcctggaagatcgtgctcttcatgaagtggagcgacaacaaggatgacatcctgaagggaggagatgtggtgcggctcttccacgccgagcaggagaagttcctgacctgtgatgagcacaggaagaagcagcacgtgttcctgcggaccaccggccggcagagcgccaccagcgccaccagcagcaaggccctgtgggaggtggaggtggtgcagcacgacccctgccggggcggggccggctactggaacagcctcttccgcttcaagcacctggccaccggccactacctggccgctgaggtggaccctgactttgaggaggagtgcctggagttccagcccagcgtggaccctgaccaggatgccagccgcagccggctgagaaatgcccaggagaagatggtgtacagcctggtgtctgtgcctgagggcaatgacatcagcagcatctttgagctggaccccaccaccctgcggggcggggacagcctggtgcccaggaacagctatgtgcggctgcggcacctgtgcaccaacacctgggtgcacagcaccaacatccccatcgacaaggaggaggagaagcctgtgatgctgaagattggcaccagccctgtgaaggaggacaaggaggcctttgccatcgtgcctgtgtccccagctgaggtgcgggacctggactttgccaatgatgccagcaaggtgctgggcagcattgctgggaagctggagaagggcaccatcacccagaatgaaagaagatctgtgaccaagctgctggaggacctggtgtactttgtgactggaggcaccaacagcggccaggatgtgctggaggtggtgttcagcaagcccaaccgggagcggcagaagctgatgagggagcagaacatcctgaagcagatcttcaagctgctgcaggcccccttcacagactgtggagatggccccatgctgcggctggaggagctgggggaccagagacatgcccccttccgccacatctgccgcctgtgctacagagtgctgcggcacagccagcaggactacaggaagaaccaggagtacatcgccaagcagtttggcttcatgcagaagcagatcggctatgatgtgctggccgaggacaccatcacagccctgctgcacaacaacaggaagctgctggagaagcacatcacagctgctgagattgacacctttgtgtccctggtgaggaagaaccgggagccccgcttcctggactacctgagtgacctgtgtgtgtccatgaacaagagcatccctgtgacccaggagctgatctgcaaggctgtgctgaaccccaccaatgctgacatcctgattgagaccaagctggtgctgagcagatttgaatttgaaggagtgagcagcactggagaaaatgccctggaggccggggaggatgaggaggaggtgtggctgttctggagggacagcaacaaggagatccgcagcaagtctgtgcgggagctggcccaggatgccaaggagggccagaaggaggacagagatgtgctgagctactaccgctaccagctgaacctgtttgccaggatgtgcctggaccggcagtacctggccatcaatgagatcagcggccagctggatgtggacctgatcctgcgctgcatgtctgatgagaacctgccctatgacctgcgggccagcttctgccgcctgatgctgcacatgcacgtggaccgggacccccaggagcaggtgacccctgtgaagtatgcccggctgtggagcgagatccccagcgagatcgccattgatgattatgacagcagcggggccagcaaggatgagatcaaggagagatttgcccagaccatggagtttgtggaggagtacctgagagatgtggtgtgccagcgcttccccttcagtgacaaggagaagaacaagctgacctttgaggtggtgaacctggccaggaacctgatctacttcggcttctacaacttcagtgacctgctgcggctgaccaagatcctgctggccatcctggactgtgtgcacgtgaccaccatcttccccatcagcaagatggccaagggggaggagaacaagggcaacaatgatgtggagaagctgaagagcagcaatgtgatgaggagcatccatggagtgggggagctgatgacccaggtggtgctgcggggcggcggcttcctgcccatgacccccatggctgctgcccctgagggcaatgtgaagcaggccgagcctgagaaggaggacatcatggtgatggacaccaagctgaagatcatcgagatcctgcagttcatcctgaatgtgcggctggactaccgcatcagctgcctgctgtgcatcttcaagcgggagtttgatgagagcaacagccagaccagcgagaccagcagcggcaacagcagccaggagggccccagcaatgtgcctggggccctggactttgagcacatcgaggagcaggccgagggcatctttggaggcagcgaggagaacacccccctggacctggatgaccatggaggccgcaccttcctgcgggtgctgctgcacctgaccatgcatgactacccacccctggtgtctggggccctgcagctgctcttccgccacttcagccagaggcaggaggtgctgcaggccttcaagcaggtgcagctgctggtgaccagccaggatgtggacaactacaagcagatcaagcaggacctggaccagctgcggagcatcgtggagaagtctgagctgtgggtgtacaagggccagggcccagatgagaccatggatggagccagcggagaaaatgagcacaagaagacagaggagggcaacaacaagccccagaagcatgagagcaccagcagctacaactacagagtggtgaaggagatcctgatccggctgagcaagctgtgtgtgcaggagagcgcctctgtgaggaagagcaggaagcagcagcagaggctgctgaggaacatgggcgcccatgctgtggtgctggagctgctgcagatcccctatgagaaggccgaggacaccaagatgcaggagatcatgaggctggcccacgagttcctgcagaacttctgtgccggcaaccagcagaaccaggccctgctgcacaagcacatcaacctcttcctgaaccctggcatcctggaggccgtgaccatgcagcacatcttcatgaacaacttccagctgtgcagcgagatcaatgaaagagtggtgcagcactttgtgcactgcatcgagacccacggcagaaatgtgcagtacatcaagttcctgcagaccatcgtgaaggccgagggcaagttcatcaagaagtgccaggacatggtgatggccgagctggtgaacagcggagaagatgtgctggtgttctacaatgaccgggccagcttccagaccctcatccagatgatgaggtctgagcgggacaggatggatgagaacagccccctgatgtaccacatccacctggtggagctgctggccgtgtgcacagagggcaagaatgtgtacacagagatcaagtgcaacagcctgctgcccctggatgacatcgtgcgggtggtgacccatgaggactgcatccctgaggtgaagatcgcctacatcaacttcctgaaccactgctacgtggacacagaggtggagatgaaggagatctacaccagcaaccacatgtggaagctgtttgagaacttcctggtggacatctgccgggcctgcaacaacaccagtgacaggaagcacgccgacagcatcctggagaagtatgtgacagaaattgtgatgagcatcgtgaccaccttcttcagcagccccttcagtgaccagagcaccaccctgcagacccggcagcctgtgtttgtgcagctgctgcagggcgtcttccgggtgtaccactgcaactggctgatgcccagccagaaggcctctgtggagagctgcatccgggtgctgagtgatgtggccaagagccgggccatcgccatccctgtggacctggacagccaggtgaacaacctcttcctgaagagccacagcatcgtgcagaagacagccatgaactggaggctgagcgccagaaatgctgcccggcgggacagcgtgctggccgccagccgggactacagaaacatcatcgagcggctgcaggacatcgtgtctgccctggaggaccggctgcggcccctggtgcaggccgagctgtctgtgctggtggatgtgctgcacaggcctgagctgctcttccctgagaacacagatgcccggaggaaatgtgagagcggcggcttcatctgcaagctgatcaagcacaccaagcagctgctggaggagaatgaggagaagctgtgcatcaaggtgctgcagaccctgcgggagatgatgaccaaggaccggggctacggggagaagctgatcagcattgatgagctggacaatgctgagctgcccccagccccagattctgaaaatgccacagaggagctggagcccagcccccccctgcggcagctggaggaccacaagagaggagaggccctgcggcaggtgctggtgaaccgctactatggaaatgtgcggcccagcggcagaagagagagcctgaccagctttggaaatggccccctgtctgctgggggccctgggaagccaggcggcggcggcggcggcagcggcagcagctccatgagcagaggagagatgagcctggccgaggtgcagtgccacctggacaaggagggcgccagcaacctggtgattgacctgatcatgaatgccagcagtgacagagtcttccacgagagcatcctgctggccatcgccctgctggagggcggcaacaccaccatccagcacagcttcttctgccgcctgacagaggacaagaagtctgagaagttcttcaaggtgttctatgacaggatgaaggtggcccagcaggagatcaaggccaccgtgacagtgaacaccagtgacctgggcaacaagaagaaggatgatgaggtggacagagatgcccccagcaggaagaaggccaaggagcccaccacccagatcacagaggaggtgcgggaccagctgctggaggccagcgctgccaccaggaaggccttcaccaccttcagaagagaggccgaccctgatgaccactaccagcccggggagggcacccaggccacagctgacaaggccaaggatgacctggagatgtctgctgtgatcaccatcatgcagcccatcctgcgcttcctgcagctgctgtgtgagaaccacaacagagacctgcagaacttcctgcgctgccagaacaacaagaccaactacaacctggtgtgtgagaccctgcagttcctggactgcatctgtggcagcaccactggaggcctgggcctgctgggcctgtacatcaatgagaagaatgtggccctgatcaaccagaccctggagagcctgacagagtactgccagggcccctgccacgagaaccagaactgcatcgccacccatgagagcaatggaattgacatcatcacagccctgatcctgaatgacatcaaccccctgggcaagaagaggatggacctggtgctggagctgaagaacaatgccagcaagctgctgctggccatcatggagagcagacatgacagtgaaaatgctgagcgcatcctgtacaacatgaggcccaaggagctggtggaggtgatcaagaaggcctacatgcagggcgaggtggagtttgaagatggagaaaatggagaagatggagctgccagccccagaaatgtgggccacaacatctacatcctggcccaccagctggcccggcacaacaaggagctgcagagcatgctgaagccaggcggccaggtggatggagatgaggccctggagttctacgccaagcacacagcccagatcgagatcgtgcggctggacaggaccatggagcagatcgtgtttcctgtgcccagcatctgtgagttcctgaccaaggagagcaagctgcgcatctactacaccacagaaagagatgagcagggcagcaagatcaatgacttcttcctgcggtctgaggacctcttcaatgagatgaactggcagaagaagctgcgggcccagcctgtgctgtactggtgtgccaggaacatgtccttctggagcagcatctccttcaacctggccgtgctgatgaacctgctggtggccttcttctaccccttcaagggcgtgcggggcggcaccctggagccccactggagcggcctgctgtggacagccatgctgatcagcctggccatcgtgattgccctgcccaagccccacggcatccgggccctgattgccagcaccatcctgcggctcatcttctctgtgggcctgcagcccaccctcttcctgctgggcgccttcaacgtgtgcaacaagatcatcttcctgatgagctttgtgggcaactgtggcaccttcacccggggctaccgggccatggtgctggatgtggagttcctgtaccacctgctgtacctggtgatctgtgccatgggcctgtttgtgcatgagttcttctacagcctgctgctgtttgacctggtgtaccgggaggagaccctgctgaatgtcatcaagtctgtgaccagaaatggccgcagcatcatcctgacagctgtgctggccctgatcctggtgtacctgttcagcatcgtgggctacctgttcttcaaggatgacttcatcctggaggtggaccggctgcccaatgaaacagctgtgcctgagactggagagagcctggccagcgagttcctgttcagtgatgtgtgccgggtggagagcggggagaactgcagcagccctgccccccgggaggagctggtgcctgctgaggagacagagcaggacaaggagcacacctgtgagaccctgctgatgtgcatcgtgacagtgctgagccacggcctgcggagcggcggcggcgtgggagatgtgctgaggaagcccagcaaggaggagcccctgtttgctgcccgggtcatctatgacctgctcttcttcttcatggtgatcatcatcgtgctgaacctgatctttggagtcatcatcgacacctttgctgacctgcggtctgagaagcagaagaaggaggagatcctgaagaccacctgcttcatctgtggcctggagcgggacaagtttgacaacaagacagtgacctttgaggagcacatcaaggaggagcacaacatgtggcactacctgtgcttcatcgtgctggtgaaggtgaaggacagcacagagtacacaggccctgagagctatgtggccgagatgatcaaggagaggaacctggactggttccccaggatgagggccatgagcctggtgtccagtgacagcgagggggagcagaatgagctgaggaacctgcaggagaagctggagagcaccatgaagctggtgaccaacctgagcggccagctgtctgagctgaaggaccagatgacagagcagaggaagcagaagcagagaattggcctgctgggccaccccccccacatgaatgtgaacccccagcagcctgcctag

SEQ ID NO: 155991 - DNA, 8133 bp, synthetic construct
  misc_feature 1..8133: note = Description of Artificial Sequence: Synthetic coding sequence
  source 1..8133: mol_type = other DNA
atgtctgacaagatgagcagcttcctgcacatcggggacatctgcagcctgtatgcagagggcagcaccaacggcttcatcagcaccctgggcctggtggatgacagatgtgtggtgcagcctgagactggagacctgaacaacccccccaagaagttccgggactgcctcttcaagctgtgccccatgaaccgctacagcgcccagaagcagttctggaaggccgccaagccaggggccaacagcaccacagatgctgtgctgctgaacaagctgcaccacgccgctgacctggagaagaagcagaatgaaacagagaacaggaagctgctgggcaccgtcatccagtatggaaatgtcatccagctgctgcacctgaagagcaacaagtacctgactgtgaacaagaggctgcctgccctgctggagaagaatgccatgagggtgaccctggatgaggccggaaatgaaggctcctggttctacatccagcccttctacaagctgcggagcatcggggacagcgtggtgattggagacaaggtggtgctgaaccctgtgaatgccggccagcccctgcacgccagcagccaccagctggtggacaaccctggctgcaatgaggtgaacagcgtgaactgcaacacctcctggaagatcgtgctcttcatgaagtggagcgacaacaaggatgacatcctgaagggaggagatgtggtgcggctcttccacgccgagcaggagaagttcctgacctgtgatgagcacaggaagaagcagcacgtgttcctgcggaccaccggccggcagagcgccaccagcgccaccagcagcaaggccctgtgggaggtggaggtggtgcagcacgacccctgccggggcggggccggctactggaacagcctcttccgcttcaagcacctggccaccggccactacctggccgctgaggtggaccctgactttgaggaggagtgcctggagttccagcccagcgtggaccctgaccaggatgccagccgcagccggctgagaaatgcccaggagaagatggtgtacagcctggtgtctgtgcctgagggcaatgacatcagcagcatctttgagctggaccccaccaccctgcggggcggggacagcctggtgcccaggaacagctatgtgcggctgcggcacctgtgcaccaacacctgggtgcacagcaccaacatccccatcgacaaggaggaggagaagcctgtgatgctgaagattggcaccagccctgtgaaggaggacaaggaggcctttgccatcgtgcctgtgtccccagctgaggtgcgggacctggactttgccaatgatgccagcaaggtgctgggcagcattgctgggaagctggagaagggcaccatcacccagaatgaaagaagatctgtgaccaagctgctggaggacctggtgtactttgtgactggaggcaccaacagcggccaggatgtgctggaggtggtgttcagcaagcccaaccgggagcggcagaagctgatgagggagcagaacatcctgaagcagatcttcaagctgctgcaggcccccttcacagactgtggagatggccccatgctgcggctggaggagctgggggaccagagacatgcccccttccgccacatctgccgcctgtgctacagagtgctgcggcacagccagcaggactacaggaagaaccaggagtacatcgccaagcagtttggcttcatgcagaagcagatcggctatgatgtgctggccgaggacaccatcacagccctgctgcacaacaacaggaagctgctggagaagcacatcacagctgctgagattgacacctttgtgtccctggtgaggaagaaccgggagccccgcttcctggactacctgagtgacctgtgtgtgtccatgaacaagagcatccctgtgacccaggagctgatctgcaaggctgtgctgaaccccaccaatgctgacatcctgattgagaccaagctggtgctgagcagatttgaatttgaaggagtgagcagcactggagaaaatgccctggaggccggggaggatgaggaggaggtgtggctgttctggagggacagcaacaaggagatccgcagcaagtctgtgcgggagctggcccaggatgccaaggagggccagaaggaggacagagatgtgctgagctactaccgctaccagctgaacctgtttgccaggatgtgcctggaccggcagtacctggccatcaatgagatcagcggccagctggatgtggacctgatcctgcgctgcatgtctgatgagaacctgccctatgacctgcgggccagcttctgccgcctgatgctgcacatgcacgtggaccgggacccccaggagcaggtgacccctgtgaagtatgcccggctgtggagcgagatccccagcgagatcgccattgatgattatgacagcagcggggccagcaaggatgagatcaaggagagatttgcccagaccatggagtttgtggaggagtacctgagagatgtggtgtgccagcgcttccccttcagtgacaaggagaagaacaagctgacctttgaggtggtgaacctggccaggaacctgatctacttcggcttctacaacttcagtgacctgctgcggctgaccaagatcctgctggccatcctggactgtgtgcacgtgaccaccatcttccccatcagcaagatggccaagggggaggagaacaagggcagcaatgtgatgaggagcatccacggcgtgggggagctgatgacccaggtggtgctgcggggcggcggcttcctgcccatgacccccatggccgccgcccctgagggcaatgtgaagcaggccgagcctgagaaggaggacatcatggtgatggacaccaagctgaagatcatcgagatcctgcagttcatcctgaatgtgcggctggactaccgcatcagctgcctgctgtgcatcttcaagcgggagtttgatgagagcaacagccagaccagcgagaccagcagcggcaacagcagccaggagggccccagcaatgtgcctggggccctggactttgagcacatcgaggagcaggccgagggcatctttggaggcagcgaggagaacacccccctggacctggatgaccacggcggccgcaccttcctgcgggtgctgctgcacctgaccatgcatgactacccacccctggtgtctggggccctgcagctgctcttccgccacttcagccagaggcaggaggtgctgcaggccttcaagcaggtgcagctgctggtgaccagccaggatgtggacaactacaagcagatcaagcaggacctggaccagctgcggagcatcgtggagaagtctgagctgtgggtgtacaagggccagggcccagatgagaccatggatggagccagcggggagaatgagcacaagaagacagaggagggcaacaacaagccccagaagcatgagagcaccagcagctacaactacagagtggtgaaggagatcctgatccggctgagcaagctgtgtgtgcaggagagcgcctctgtgaggaagagcaggaagcagcagcagaggctgctgaggaacatgggcgcccatgctgtggtgctggagctgctgcagatcccctatgagaaggccgaggacaccaagatgcaggagatcatgaggctggcccacgagttcctgcagaacttctgtgccggcaaccagcagaaccaggccctgctgcacaagcacatcaacctcttcctgaaccctggcatcctggaggccgtgaccatgcagcacatcttcatgaacaacttccagctgtgcagcgagatcaatgaaagagtggtgcagcactttgtgcactgcatcgagacccatggaagaaatgtgcagtacatcaagttcctgcagaccatcgtgaaggccgagggcaagttcatcaagaagtgccaggacatggtgatggccgagctggtgaacagcggggaggatgtgctggtgttctacaatgaccgggccagcttccagaccctcatccagatgatgaggtctgagcgggacaggatggatgagaacagccccctgatgtaccacatccacctggtggagctgctggccgtgtgcacagagggcaagaatgtgtacacagagatcaagtgcaacagcctgctgcccctggatgacatcgtgcgggtggtgacccatgaggactgcatccctgaggtgaagatcgcctacatcaacttcctgaaccactgctacgtggacacagaggtggagatgaaggagatctacaccagcaaccacatgtggaagctgtttgagaacttcctggtggacatctgccgggcctgcaacaacaccagtgacaggaagcatgctgacagcatcctggagaagtatgtgacagagatcgtgatgagcatcgtgaccaccttcttcagcagccccttcagtgaccagagcaccaccctgcagacccggcagcctgtgtttgtgcagctgctgcagggcgtcttccgggtgtaccactgcaactggctgatgcccagccagaaggcctctgtggagagctgcatccgggtgctgagtgatgtggccaagagccgggccatcgccatccctgtggacctggacagccaggtgaacaacctcttcctgaagagccacagcatcgtgcagaagacagccatgaactggaggctgagcgccagaaatgctgcccggcgggacagcgtgctggccgccagccgggactacagaaacatcatcgagcggctgcaggacatcgtgtctgccctggaggaccggctgcggcccctggtgcaggccgagctgtctgtgctggtggatgtgctgcacaggcctgagctgctcttcccagaaaatacagatgcccggaggaaatgtgagagcggcggcttcatctgcaagctgatcaagcacaccaagcagctgctggaggagaatgaggagaagctgtgcatcaaggtgctgcagaccctgcgggagatgatgaccaaggaccggggctatggagagaagggggaggccctgcggcaggtgctggtgaaccgctactatggaaatgtgcggcccagcggcagaagagagagcctgaccagctttggaaatggccccctgtctgctgggggccctgggaagccaggcggcggcggcggcggcagcggcagcagctccatgagcagaggagagatgagcctggccgaggtgcagtgccacctggacaaggagggcgccagcaacctggtgattgacctgatcatgaatgccagcagtgacagagtcttccacgagagcatcctgctggccatcgccctgctggagggcggcaacaccaccatccagcacagcttcttctgccgcctgacagaggacaagaagtctgagaagttcttcaaggtgttctatgacaggatgaaggtggcccagcaggagatcaaggccaccgtgacagtgaacaccagtgacctgggcaacaagaagaaggatgatgaggtggacagagatgcccccagcaggaagaaggccaaggagcccaccacccagatcacagaggaggtgcgggaccagctgctggaggccagcgctgccaccaggaaggccttcaccaccttcagaagagaggccgaccctgatgaccactaccagcccggggagggcacccaggccacagctgacaaggccaaggatgacctggagatgtctgctgtgatcaccatcatgcagcccatcctgcgcttcctgcagctgctgtgtgagaaccacaacagagacctgcagaacttcctgcgctgccagaacaacaagaccaactacaacctggtgtgtgagaccctgcagttcctggactgcatctgtggcagcaccactggaggcctgggcctgctgggcctgtacatcaatgagaagaatgtggccctgatcaaccagaccctggagagcctgacagagtactgccagggcccctgccacgagaaccagaactgcatcgccacccatgagagcaatggaattgacatcatcacagccctgatcctgaatgacatcaaccccctgggcaagaagaggatggacctggtgctggagctgaagaacaatgccagcaagctgctgctggccatcatggagagcagacatgacagtgaaaatgctgagcgcatcctgtacaacatgaggcccaaggagctggtggaggtgatcaagaaggcctacatgcagggcgaggtggagtttgaagatggagaaaatggagaagatggagctgccagccccagaaatgtgggccacaacatctacatcctggcccaccagctggcccggcacaacaaggagctgcagagcatgctgaagccaggcggccaggtggatggagatgaggccctggagttctacgccaagcacacagcccagatcgagatcgtgcggctggacaggaccatggagcagatcgtgtttcctgtgcccagcatctgtgagttcctgaccaaggagagcaagctgcgcatctactacaccacagaaagagatgagcagggcagcaagatcaatgacttcttcctgcggtctgaggacctcttcaatgagatgaactggcagaagaagctgcgggcccagcctgtgctgtactggtgtgccaggaacatgtccttctggagcagcatctccttcaacctggccgtgctgatgaacctgctggtggccttcttctaccccttcaagggcgtgcggggcggcaccctggagccccactggagcggcctgctgtggacagccatgctgatcagcctggccatcgtgattgccctgcccaagccccacggcatccgggccctgattgccagcaccatcctgcggctcatcttctctgtgggcctgcagcccaccctcttcctgctgggcgccttcaacgtgtgcaacaagatcatcttcctgatgagctttgtgggcaactgtggcaccttcacccggggctaccgggccatggtgctggatgtggagttcctgtaccacctgctgtacctggtgatctgtgccatgggcctgtttgtgcatgagttcttctacagcctgctgctgtttgacctggtgtaccgggaggagaccctgctgaatgtcatcaagtctgtgaccagaaatggccgcagcatcatcctgacagctgtgctggccctgatcctggtgtacctgttcagcatcgtgggctacctgttcttcaaggatgacttcatcctggaggtggaccggctgcccaatgaaacagctgtgcctgagactggagagagcctggccagcgagttcctgttcagtgatgtgtgccgggtggagagcggggagaactgcagcagccctgccccccgggaggagctggtgcctgctgaggagacagagcaggacaaggagcacacctgtgagaccctgctgatgtgcatcgtgacagtgctgagccacggcctgcggagcggcggcggcgtgggagatgtgctgaggaagcccagcaaggaggagcccctgtttgctgcccgggtcatctatgacctgctcttcttcttcatggtgatcatcatcgtgctgaacctgatctttggagtcatcatcgacacctttgctgacctgcggtctgagaagcagaagaaggaggagatcctgaagaccacctgcttcatctgtggcctggagcgggacaagtttgacaacaagacagtgacctttgaggagcacatcaaggaggagcacaacatgtggcactacctgtgcttcatcgtgctggtgaaggtgaaggacagcacagagtacacaggccctgagagctatgtggccgagatgatcaaggagaggaacctggactggttccccaggatgagggccatgagcctggtgtccagtgacagcgagggggagcagaatgagctgaggaacctgcaggagaagctggagagcaccatgaagctggtgaccaacctgagcggccagctgtctgagctgaaggaccagatgacagagcagaggaagcagaagcagagaattggcctgctgggccaccccccccacatgaatgtgaacccccagcagcctgcctag

SEQ ID NO: 155992 - DNA, 8133 bp, synthetic construct
  misc_feature 1..8133: note = Description of Artificial Sequence: Synthetic coding sequence
  source 1..8133: mol_type = other DNA
atgtctgacaagatgagcagcttcctgcacatcggggacatctgcagcctgtatgcagagggcagcaccaacggcttcatcagcaccctgggcctggtggatgacagatgtgtggtgcagcctgagactggagacctgaacaacccccccaagaagttccgggactgcctcttcaagctgtgccccatgaaccgctacagcgcccagaagcagttctggaaggccgccaagccaggggccaacagcaccacagatgctgtgctgctgaacaagctgcaccacgccgctgacctggagaagaagcagaatgaaacagagaacaggaagctgctgggcaccgtcatccagtatggaaatgtcatccagctgctgcacctgaagagcaacaagtacctgactgtgaacaagaggctgcctgccctgctggagaagaatgccatgagggtgaccctggatgaggccggaaatgaaggctcctggttctacatccagcccttctacaagctgcggagcatcggggacagcgtggtgattggagacaaggtggtgctgaaccctgtgaatgccggccagcccctgcacgccagcagccaccagctggtggacaaccctggctgcaatgaggtgaacagcgtgaactgcaacacctcctggaagatcgtgctcttcatgaagtggagcgacaacaaggatgacatcctgaagggaggagatgtggtgcggctcttccacgccgagcaggagaagttcctgacctgtgatgagcacaggaagaagcagcacgtgttcctgcggaccaccggccggcagagcgccaccagcgccaccagcagcaaggccctgtgggaggtggaggtggtgcagcacgacccctgccggggcggggccggctactggaacagcctcttccgcttcaagcacctggccaccggccactacctggccgctgaggtggaccctgactttgaggaggagtgcctggagttccagcccagcgtggaccctgaccaggatgccagccgcagccggctgagaaatgcccaggagaagatggtgtacagcctggtgtctgtgcctgagggcaatgacatcagcagcatctttgagctggaccccaccaccctgcggggcggggacagcctggtgcccaggaacagctatgtgcggctgcggcacctgtgcaccaacacctgggtgcacagcaccaacatccccatcgacaaggaggaggagaagcctgtgatgctgaagattggcaccagccctgtgaaggaggacaaggaggcctttgccatcgtgcctgtgtccccagctgaggtgcgggacctggactttgccaatgatgccagcaaggtgctgggcagcattgctgggaagctggagaagggcaccatcacccagaatgaaagaagatctgtgaccaagctgctggaggacctggtgtactttgtgactggaggcaccaacagcggccaggatgtgctggaggtggtgttcagcaagcccaaccgggagcggcagaagctgatgagggagcagaacatcctgaagcagatcttcaagctgctgcaggcccccttcacagactgtggagatggccccatgctgcggctggaggagctgggggaccagagacatgcccccttccgccacatctgccgcctgtgctacagagtgctgcggcacagccagcaggactacaggaagaaccaggagtacatcgccaagcagtttggcttcatgcagaagcagatcggctatgatgtgctggccgaggacaccatcacagccctgctgcacaacaacaggaagctgctggagaagcacatcacagctgctgagattgacacctttgtgtccctggtgaggaagaaccgggagccccgcttcctggactacctgagtgacctgtgtgtgtccatgaacaagagcatccctgtgacccaggagctgatctgcaaggctgtgctgaaccccaccaatgctgacatcctgattgagaccaagctggtgctgagcagatttgaatttgaaggagtgagcagcactggagaaaatgccctggaggccggggaggatgaggaggaggtgtggctgttctggagggacagcaacaaggagatccgcagcaagtctgtgcgggagctggcccaggatgccaaggagggccagaaggaggacagagatgtgctgagctactaccgctaccagctgaacctgtttgccaggatgtgcctggaccggcagtacctggccatcaatgagatcagcggccagctggatgtggacctgatcctgcgctgcatgtctgatgagaacctgccctatgacctgcgggccagcttctgccgcctgatgctgcacatgcacgtggaccgggacccccaggagcaggtgacccctgtgaagtatgcccggctgtggagcgagatccccagcgagatcgccattgatgattatgacagcagcggggccagcaaggatgagatcaaggagagatttgcccagaccatggagtttgtggaggagtacctgagagatgtggtgtgccagcgcttccccttcagtgacaaggagaagaacaagctgacctttgaggtggtgaacctggccaggaacctgatctacttcggcttctacaacttcagtgacctgctgcggctgaccaagatcctgctggccatcctggactgtgtgcacgtgaccaccatcttccccatcagcaagatggccaagggggaggagaacaagggcagcaatgtgatgaggagcatccacggcgtgggggagctgatgacccaggtggtgctgcggggcggcggcttcctgcccatgacccccatggccgccgcccctgagggcaatgtgaagcaggccgagcctgagaaggaggacatcatggtgatggacaccaagctgaagatcatcgagatcctgcagttcatcctgaatgtgcggctggactaccgcatcagctgcctgctgtgcatcttcaagcgggagtttgatgagagcaacagccagaccagcgagaccagcagcggcaacagcagccaggagggccccagcaatgtgcctggggccctggactttgagcacatcgaggagcaggccgagggcatctttggaggcaggaaagaaaacacccccctggacctggatgaccacggcggccgcaccttcctgcgggtgctgctgcacctgaccatgcatgactacccacccctggtgtctggggccctgcagctgctcttccgccacttcagccagaggcaggaggtgctgcaggccttcaagcaggtgcagctgctggtgaccagccaggatgtggacaactacaagcagatcaagcaggacctggaccagctgcggagcatcgtggagaagtctgagctgtgggtgtacaagggccagggcccagatgagaccatggatggagccagcggggagaatgagcacaagaagacagaggagggcaacaacaagccccagaagcatgagagcaccagcagctacaactacagagtggtgaaggagatcctgatccggctgagcaagctgtgtgtgcaggagagcgcctctgtgaggaagagcaggaagcagcagcagaggctgctgaggaacatgggcgcccatgctgtggtgctggagctgctgcagatcccctatgagaaggccgaggacaccaagatgcaggagatcatgaggctggcccacgagttcctgcagaacttctgtgccggcaaccagcagaaccaggccctgctgcacaagcacatcaacctcttcctgaaccctggcatcctggaggccgtgaccatgcagcacatcttcatgaacaacttccagctgtgcagcgagatcaatgaaagagtggtgcagcactttgtgcactgcatcgagacccatggaagaaatgtgcagtacatcaagttcctgcagaccatcgtgaaggccgagggcaagttcatcaagaagtgccaggacatggtgatggccgagctggtgaacagcggggaggatgtgctggtgttctacaatgaccgggccagcttccagaccctcatccagatgatgaggtctgagcgggacaggatggatgagaacagccccctgatgtaccacatccacctggtggagctgctggccgtgtgcacagagggcaagaatgtgtacacagagatcaagtgcaacagcctgctgcccctggatgacatcgtgcgggtggtgacccatgaggactgcatccctgaggtgaagatcgcctacatcaacttcctgaaccactgctacgtggacacagaggtggagatgaaggagatctacaccagcaaccacatgtggaagctgtttgagaacttcctggtggacatctgccgggcctgcaacaacaccagtgacaggaagcatgctgacagcatcctggagaagtatgtgacagagatcgtgatgagcatcgtgaccaccttcttcagcagccccttcagtgaccagagcaccaccctgcagacccggcagcctgtgtttgtgcagctgctgcagggcgtcttccgggtgtaccactgcaactggctgatgcccagccagaaggcctctgtggagagctgcatccgggtgctgagtgatgtggccaagagccgggccatcgccatccctgtggacctggacagccaggtgaacaacctcttcctgaagagccacagcatcgtgcagaagacagccatgaactggaggctgagcgccagaaatgctgcccggcgggacagcgtgctggccgccagccgggactacagaaacatcatcgagcggctgcaggacatcgtgtctgccctggaggaccggctgcggcccctggtgcaggccgagctgtctgtgctggtggatgtgctgcacaggcctgagctgctcttcccagaaaatacagatgcccggaggaaatgtgagagcggcggcttcatctgcaagctgatcaagcacaccaagcagctgctggaggagaatgaggagaagctgtgcatcaaggtgctgcagaccctgcgggagatgatgaccaaggaccggggctatggagagaagggggaggccctgcggcaggtgctggtgaaccgctactatggaaatgtgcggcccagcggcagaagagagagcctgaccagctttggaaatggccccctgtctgctgggggccctgggaagccaggcggcggcggcggcggcagcggcagcagctccatgagcagaggagagatgagcctggccgaggtgcagtgccacctggacaaggagggcgccagcaacctggtgattgacctgatcatgaatgccagcagtgacagagtcttccacgagagcatcctgctggccatcgccctgctggagggcggcaacaccaccatccagcacagcttcttctgccgcctgacagaggacaagaagtctgagaagttcttcaaggtgttctatgacaggatgaaggtggcccagcaggagatcaaggccaccgtgacagtgaacaccagtgacctgggcaacaagaagaaggatgatgaggtggacagagatgcccccagcaggaagaaggccaaggagcccaccacccagatcacagaggaggtgcgggaccagctgctggaggccagcgctgccaccaggaaggccttcaccaccttcagaagagaggccgaccctgatgaccactaccagcccggggagggcacccaggccacagctgacaaggccaaggatgacctggagatgtctgctgtgatcaccatcatgcagcccatcctgcgcttcctgcagctgctgtgtgagaaccacaacagagacctgcagaacttcctgcgctgccagaacaacaagaccaactacaacctggtgtgtgagaccctgcagttcctggactgcatctgtggcagcaccactggaggcctgggcctgctgggcctgtacatcaatgagaagaatgtggccctgatcaaccagaccctggagagcctgacagagtactgccagggcccctgccacgagaaccagaactgcatcgccacccatgagagcaatggaattgacatcatcacagccctgatcctgaatgacatcaaccccctgggcaagaagaggatggacctggtgctggagctgaagaacaatgccagcaagctgctgctggccatcatggagagcagacatgacagtgaaaatgctgagcgcatcctgtacaacatgaggcccaaggagctggtggaggtgatcaagaaggcctacatgcagggcgaggtggagtttgaagatggagaaaatggagaagatggagctgccagccccagaaatgtgggccacaacatctacatcctggcccaccagctggcccggcacaacaaggagctgcagagcatgctgaagccaggcggccaggtggatggagatgaggccctggagttctacgccaagcacacagcccagatcgagatcgtgcggctggacaggaccatggagcagatcgtgtttcctgtgcccagcatctgtgagttcctgaccaaggagagcaagctgcgcatctactacaccacagaaagagatgagcagggcagcaagatcaatgacttcttcctgcggtctgaggacctcttcaatgagatgaactggcagaagaagctgcgggcccagcctgtgctgtactggtgtgccaggaacatgtccttctggagcagcatctccttcaacctggccgtgctgatgaacctgctggtggccttcttctaccccttcaagggcgtgcggggcggcaccctggagccccactggagcggcctgctgtggacagccatgctgatcagcctggccatcgtgattgccctgcccaagccccacggcatccgggccctgattgccagcaccatcctgcggctcatcttctctgtgggcctgcagcccaccctcttcctgctgggcgccttcaacgtgtgcaacaagatcatcttcctgatgagctttgtgggcaactgtggcaccttcacccggggctaccgggccatggtgctggatgtggagttcctgtaccacctgctgtacctggtgatctgtgccatgggcctgtttgtgcatgagttcttctacagcctgctgctgtttgacctggtgtaccgggaggagaccctgctgaatgtcatcaagtctgtgaccagaaatggccgcagcatcatcctgacagctgtgctggccctgatcctggtgtacctgttcagcatcgtgggctacctgttcttcaaggatgacttcatcctggaggtggaccggctgcccaatgaaacagctgtgcctgagactggagagagcctggccagcgagttcctgttcagtgatgtgtgccgggtggagagcggggagaactgcagcagccctgccccccgggaggagctggtgcctgctgaggagacagagcaggacaaggagcacacctgtgagaccctgctgatgtgcatcgtgacagtgctgagccacggcctgcggagcggcggcggcgtgggagatgtgctgaggaagcccagcaaggaggagcccctgtttgctgcccgggtcatctatgacctgctcttcttcttcatggtgatcatcatcgtgctgaacctgatctttggagtcatcatcgacacctttgctgacctgcggtctgagaagcagaagaaggaggagatcctgaagaccacctgcttcatctgtggcctggagcgggacaagtttgacaacaagacagtgacctttgaggagcacatcaaggaggagcacaacatgtggcactacctgtgcttcatcgtgctggtgaaggtgaaggacagcacagagtacacaggccctgagagctatgtggccgagatgatcaaggagaggaacctggactggttccccaggatgagggccatgagcctggtgtccagtgacagcgagggggagcagaatgagctgaggaacctgcaggagaagctggagagcaccatgaagctggtgaccaacctgagcggccagctgtctgagctgaaggaccagatgacagagcagaggaagcagaagcagagaattggcctgctgggccaccccccccacatgaatgtgaacccccagcagcctgcctag

SEQ ID NO: 155993 - DNA, 3615 bp, synthetic construct
  misc_feature 1..3615: note = Description of Artificial Sequence: Synthetic coding sequence
  source 1..3615: mol_type = other DNA
caggagcccggccactgccacagccggggccctggccagcccagccagcagcccctgagccaggtgccccagcactgtgccgaggccatgaactggaggctgagcgccagaaatgctgcccggcgggacagcgtgctggccgccagccgggactacagaaacatcatcgagcggctgcaggacatcgtgtctgccctggaggaccggctgcggcccctggtgcaggccgagctgtctgtgctggtggatgtgctgcacaggcctgagctgctcttccctgagaacacagatgcccggaggaaatgtgagagcggcggcttcatctgcaagctgatcaagcacaccaagcagctgctggaggagaatgaggagaagctgtgcatcaaggtgctgcagaccctgcgggagatgatgaccaaggaccggggctacggggagaagctgatcagcattgatgagctggacaatgctgagctgcccccagccccagattctgaaaatgccacagaggagctggagcccagcccccccctgcggcagctggaggaccacaagagaggagaggccctgcggcaggtgctggtgaaccgctactatggaaatgtgcggcccagcggcagaagagagagcctgaccagctttggaaatggccccctgtctgctgggggccctgggaagccaggcggcggcggcggcggcagcggcagcagctccatgagcagaggagagatgagcctggccgaggtgcagtgccacctggacaaggagggcgccagcaacctggtgattgacctgatcatgaatgccagcagtgacagagtcttccacgagagcatcctgctggccatcgccctgctggagggcggcaacaccaccatccagcacagcttcttctgccgcctgacagaggacaagaagtctgagaagttcttcaaggtgttctatgacaggatgaaggtggcccagcaggagatcaaggccaccgtgacagtgaacaccagtgacctgggcaacaagaagaaggatgatgaggtggacagagatgcccccagcaggaagaaggccaaggagcccaccacccagatcacagaggaggtgcgggaccagctgctggaggccagcgctgccaccaggaaggccttcaccaccttcagaagagaggccgaccctgatgaccactaccagcccggggagggcacccaggccacagctgacaaggccaaggatgacctggagatgtctgctgtgatcaccatcatgcagcccatcctgcgcttcctgcagctgctgtgtgagaaccacaacagagacctgcagaacttcctgcgctgccagaacaacaagaccaactacaacctggtgtgtgagaccctgcagttcctggactgcatctgtggcagcaccactggaggcctgggcctgctgggcctgtacatcaatgagaagaatgtggccctgatcaaccagaccctggagagcctgacagagtactgccagggcccctgccacgagaaccagaactgcatcgccacccatgagagcaatggaattgacatcatcacagccctgatcctgaatgacatcaaccccctgggcaagaagaggatggacctggtgctggagctgaagaacaatgccagcaagctgctgctggccatcatggagagcagacatgacagtgaaaatgctgagcgcatcctgtacaacatgaggcccaaggagctggtggaggtgatcaagaaggcctacatgcagggcgaggtggagtttgaagatggagaaaatggagaagatggagctgccagccccagaaatgtgggccacaacatctacatcctggcccaccagctggcccggcacaacaaggagctgcagagcatgctgaagccaggcggccaggtggatggagatgaggccctggagttctacgccaagcacacagcccagatcgagatcgtgcggctggacaggaccatggagcagatcgtgtttcctgtgcccagcatctgtgagttcctgaccaaggagagcaagctgcgcatctactacaccacagaaagagatgagcagggcagcaagatcaatgacttcttcctgcggtctgaggacctcttcaatgagatgaactggcagaagaagctgcgggcccagcctgtgctgtactggtgtgccaggaacatgtccttctggagcagcatctccttcaacctggccgtgctgatgaacctgctggtggccttcttctaccccttcaagggcgtgcggggcggcaccctggagccccactggagcggcctgctgtggacagccatgctgatcagcctggccatcgtgattgccctgcccaagccccacggcatccgggccctgattgccagcaccatcctgcggctcatcttctctgtgggcctgcagcccaccctcttcctgctgggcgccttcaacgtgtgcaacaagatcatcttcctgatgagctttgtgggcaactgtggcaccttcacccggggctaccgggccatggtgctggatgtggagttcctgtaccacctgctgtacctggtgatctgtgccatgggcctgtttgtgcatgagttcttctacagcctgctgctgtttgacctggtgtaccgggaggagaccctgctgaatgtcatcaagtctgtgaccagaaatggccgcagcatcatcctgacagctgtgctggccctgatcctggtgtacctgttcagcatcgtgggctacctgttcttcaaggatgacttcatcctggaggtggaccggctgcccaatgaaacagctgtgcctgagactggagagagcctggccagcgagttcctgttcagtgatgtgtgccgggtggagagcggggagaactgcagcagccctgccccccgggaggagctggtgcctgctgaggagacagagcaggacaaggagcacacctgtgagaccctgctgatgtgcatcgtgacagtgctgagccacggcctgcggagcggcggcggcgtgggagatgtgctgaggaagcccagcaaggaggagcccctgtttgctgcccgggtcatctatgacctgctcttcttcttcatggtgatcatcatcgtgctgaacctgatctttggagtcatcatcgacacctttgctgacctgcggtctgagaagcagaagaaggaggagatcctgaagaccacctgcttcatctgtggcctggagcgggacaagtttgacaacaagacagtgacctttgaggagcacatcaaggaggagcacaacatgtggcactacctgtgcttcatcgtgctggtgaaggtgaaggacagcacagagtacacaggccctgagagctatgtggccgagatgatcaaggagaggaacctggactggttccccaggatgagggccatgagcctggtgtccagtgacagcgagggggagcagaatgagctgaggaacctgcaggagaagctggagagcaccatgaagctggtgaccaacctgagcggccagctgtctgagctgaaggaccagatgacagagcagaggaagcagaagcagagaattggcctgctgggccaccccccccacatgaatgtgaacccccagcagcctgcctag

SEQ ID NO: 155994 - DNA, 8232 bp, synthetic construct; identical to SEQ ID NO: 155988
  misc_feature 1..8232: note = Description of Artificial Sequence: Synthetic coding sequence
  source 1..8232: mol_type = other DNA

SEQ ID NO: 155995 - DNA, 8088 bp, synthetic construct
  misc_feature 1..8088: note = Description of Artificial Sequence: Synthetic coding sequence
  source 1..8088: mol_type = other DNA
atgtctgacaagatgagcagcttcctgcacatcggggacatctgcagcctgtatgcagagggcagcaccaacggcttcatcagcaccctgggcctggtggatgacagatgtgtggtgcagcctgagactggagacctgaacaacccccccaagaagttccgggactgcctcttcaagctgtgccccatgaaccgctacagcgcccagaagcagttctggaaggccgccaagccaggggccaacagcaccacagatgctgtgctgctgaacaagctgcaccacgccgctgacctggagaagaagcagaatgaaacagagaacaggaagctgctgggcaccgtcatccagtatggaaatgtcatccagctgctgcacctgaagagcaacaagtacctgactgtgaacaagaggctgcctgccctgctggagaagaatgccatgagggtgaccctggatgaggccggaaatgaaggctcctggttctacatccagcccttctacaagctgcggagcatcggggacagcgtggtgattggagacaaggtggtgctgaaccctgtgaatgccggccagcccctgcacgccagcagccaccagctggtggacaaccctggctgcaatgaggtgaacagcgtgaactgcaacacctcctggaagatcgtgctcttcatgaagtggagcgacaacaaggatgacatcctgaagggaggagatgtggtgcggctcttccacgccgagcaggagaagttcctgacctgtgatgagcacaggaagaagcagcacgtgttcctgcggaccaccggccggcagagcgccaccagcgccaccagcagcaaggccctgtgggaggtggaggtggtgcagcacgacccctgccggggcggggccggctactggaacagcctcttccgcttcaagcacctggccaccggccactacctggccgctgaggtggaccctgaccaggatgccagccgcagccggctgagaaatgcccaggagaagatggtgtacagcctggtgtctgtgcctgagggcaatgacatcagcagcatctttgagctggaccccaccaccctgcggggcggggacagcctggtgcccagaaattcctatgtgcggctgcggcacctgtgcaccaacacctgggtgcacagcaccaacatccccatcgacaaggaggaggagaagcctgtgatgctgaagattggcaccagccctgtgaaggaggacaaggaggcctttgccatcgtgcctgtgtccccagctgaggtgcgggacctggactttgccaatgatgccagcaaggtgctgggcagcattgctgggaagctggagaagggcaccatcacccagaatgaaagaagatctgtgaccaagctgctggaggacctggtgtactttgtgactggaggcaccaacagcggccaggatgtgctggaggtggtgttcagcaagcccaaccgggagcggcagaagctgatgagggagcagaacatcctgaagcagatcttcaagctgctgcaggcccccttcacagactgtggagatggccccatgctgcggctggaggagctgggggaccagagacatgcccccttccgccacatctgccgcctgtgctacagagtgctgcggcacagccagcaggactacaggaagaaccaggagtacatcgccaagcagtttggcttcatgcagaagcagatcggctatgatgtgctggccgaggacaccatcacagccctgctgcacaacaacaggaagctgctggagaagcacatcacagctgctgagattgacacctttgtgtccctggtgaggaagaaccgggagccccgcttcctggactacctgagtgacctgtgtgtgtccatgaacaagagcatccctgtgacccaggagctgatctgcaaggctgtgctgaaccccaccaatgctgacatcctgattgagaccaagctggtgctgagcagatttgaatttgagggcgtgagcagcactggagaaaatgccctggaggccggagaagatgaggaggaggtgtggctgttctggagggacagcaacaaggagatccgcagcaagtctgtgcgggagctggcccaggatgccaaggagggccagaaggaggacagagatgtgctgagctactaccgctaccagctgaacctgtttgccaggatgtgcctggaccggcagtacctggccatcaatgagatcagcggccagctggatgtggacctgatcctgcgctgcatgtctgatgagaacctgccctatgacctgcgggccagcttctgccgcctgatgctgcacatgcacgtggaccgggacccccaggagcaggtgacccctgtgaagtatgcccggctgtggagcgagatccccagcgagatcgccattgatgattatgacagcagcggggccagcaaggatgagatcaaggagagatttgcccagaccatggagtttgtggaggagtacctgagagatgtggtgtgccagcgcttccccttcagtgacaaggagaagaacaagctgacctttgaggtggtgaacctggccaggaacctgatctacttcggcttctacaacttcagtgacctgctgcggctgaccaagatcctgctggccatcctggactgtgtgcacgtgaccaccatcttccccatcagcaagatggccaagggggaggagaacaagggcagcaatgtgatgaggagcatccatggagtgggggagctgatgacccaggtggtgctgcggggcggcggcttcctgcccatgacccccatggctgctgcccctgagggcaatgtgaagcaggccgagcctgagaaggaggacatcatggtgatggacaccaagctgaagatcatcgagatcctgcagttcatcctgaatgtgcggctggactaccgcatcagctgcctgctgtgcatcttcaagcgggagtttgatgagagcaacagccagaccagcgagaccagcagcggcaacagcagccaggagggccccagcaatgtgcctggggccctggactttgagcacatcgaggagcaggccgagggcatctttggaggcagcgaggagaacacccccctggacctggatgaccatggaggccgcaccttcctgcgggtgctgctgcacctgaccatgcatgactacccacccctggtgtctggggccctgcagctgctcttccgccacttcagccagaggcaggaggtgctgcaggccttcaagcaggtgcagctgctggtgaccagccaggatgtggacaactacaagcagatcaagcaggacctggaccagctgcggagcatcgtggagaagtctgagctgtgggtgtacaagggccagggcccagatgagaccatggatggagccagcggagaaaatgagcacaagaagacagaggagggcaacaacaagccccagaagcatgagagcaccagcagctacaactacagagtggtgaaggagatcctgatccggctgagcaagctgtgtgtgcaggagagcgcctctgtgaggaagagcaggaagcagcagcagaggctgctgaggaacatgggcgcccatgctgtggtgctggagctgctgcagatcccctatgagaaggccgaggacaccaagatgcaggagatcatgaggctggcccacgagttcctgcagaacttctgtgccggcaaccagcagaaccaggccctgctgcacaagcacatcaacctcttcctgaaccctggcatcctggaggccgtgaccatgcagcacatcttcatgaacaacttccagctgtgcagcgagatcaatgaaagagtggtgcagcactttgtgcactgcatcgagacccacggcagaaatgtgcagtacatcaagttcctgcagaccatcgtgaaggccgagggcaagttcatcaagaagtgccaggacatggtgatggccgagctggtgaacagcggagaagatgtgctggtgttctacaatgaccgggccagcttccagaccctcatccagatgatgaggtctgagcgggacaggatggatgagaacagccccctgatgtaccacatccacctggtggagctgctggccgtgtgcacagagggcaagaatgtgtacacagagatcaagtgcaacagcctgctgcccctggatgacatcgtgcgggtggtgacccatgaggactgcatccctgaggtgaagatcgcctacatcaacttcctgaaccactgctacgtggacacagaggtggagatgaaggagatctacaccagcaaccacatgtggaagctgtttgagaacttcctggtggacatctgccgggcctgcaacaacaccagtgacaggaagcacgccgacagcatcctggagaagtatgtgacagaaattgtgatgagcatcgtgaccaccttcttcagcagccccttcagtgaccagagcaccaccctgcagacccggcagcctgtgtttgtgcagctgctgcagggcgtcttccgggtgtaccactgcaactggctgatgcccagccagaaggcctctgtggagagctgcatccgggtgctgagtgatgtggccaagagccgggccatcgccatccctgtggacctggacagccaggtgaacaacctcttcctgaagagccacagcatcgtgcagaagacagccatgaactggaggctgagcgccagaaatgctgcccggcgggacagcgtgctggccgccagccgggactacagaaacatcatcgagcggctgcaggacatcgtgtctgccctggaggaccggctgcggcccctggtgcaggccgagctgtctgtgctggtggatgtgctgcacaggcctgagctgctcttccctgagaacacagatgcccggaggaaatgtgagagcggcggcttcatctgcaagctgatcaagcacaccaagcagctgctggaggagaatgaggagaagctgtgcatcaaggtgctgcagaccctgcgggagatgatgaccaaggaccggggctacggggagaagggggaggccctgcggcaggtgctggtgaaccgctactatggaaatgtgcggcccagcggccggcgggagagcctgaccagctttggaaatggccccctgtctgctgggggccctgggaagccaggcggcggcggcggcggcagcggcagcagctccatgagcagaggagagatgagcctggccgaggtgcagtgccacctggacaaggagggcgccagcaacctggtgattgacctgatcatgaatgccagcagtgacagagtcttccacgagagcatcctgctggccatcgccctgctggagggcggcaacaccaccatccagcacagcttcttctgccgcctgacagaggacaagaagtctgagaagttcttcaaggtgttctatgacaggatgaaggtggcccagcaggagatcaaggccaccgtgacagtgaacaccagtgacctgggcaacaagaagaaggatgatgaggtggacagagatgcccccagcaggaagaaggccaaggagcccaccacccagatcacagaggaggtgcgggaccagctgctggaggccagcgctgccaccaggaaggccttcaccaccttccggcgggaggccgaccctgatgaccactaccagcctggagagggcacccaggccacagctgacaaggccaaggatgacctggagatgtctgctgtgatcaccatcatgcagcccatcctgcgcttcctgcagctgctgtgtgagaaccacaacagagacctgcagaacttcctgcgctgccagaacaacaagaccaactacaacctggtgtgtgagaccctgcagttcctggactgcatctgtggcagcaccaccggcggcctgggcctgctgggcctgtacatcaatgagaagaatgtggccctgatcaaccagaccctggagagcctgacagagtactgccagggcccctgccacgagaaccagaactgcatcgccacccatgagagcaatggcatcgacatcatcacagccctgatcctgaatgacatcaaccccctgggcaagaagaggatggacctggtgctggagctgaagaacaatgccagcaagctgctgctggccatcatggagagcagacatgattctgaaaatgctgagcgcatcctgtacaacatgaggcccaaggagctggtggaggtgatcaagaaggcctacatgcagggcgaggtggagtttgaagatggagaaaatggagaagatggagctgccagccccagaaatgtgggccacaacatctacatcctggcccaccagctggcccggcacaacaaggagctgcagagcatgctgaagccaggcggccaggtggatggagatgaggccctggagttctacgccaagcacacagcccagattgaaattgtgcggctggacaggaccatggagcagatcgtgtttcctgtgcccagcatctgtgagttcctgaccaaggagagcaagctgcgcatctactacaccacagaaagagatgagcagggcagcaagatcaatgacttcttcctgcggagtgaagatctcttcaatgagatgaactggcagaagaagctgcgggcccagcctgtgctgtactggtgtgccaggaacatgtccttctggagcagcatctccttcaacctggccgtgctgatgaacctgctggtggccttcttctaccccttcaagggcgtgcggggcggcaccctggagccccactggagcggcctgctgtggacagccatgctgatcagcctggccatcgtcatcgccctgcccaagccccacggcatccgggccctgattgccagcaccatcctgcggctcatcttctctgtgggcctgcagcccaccctcttcctgctgggcgccttcaacgtgtgcaacaagatcatcttcctgatgagctttgtgggcaactgtggcaccttcacccggggctaccgggccatggtgctggatgtggagttcctgtaccacctgctgtacctggtgatctgtgccatgggcctgtttgtgcatgagttcttctacagcctgctgctgtttgacctggtgtaccgggaggagaccctgctgaatgtcatcaagtctgtgaccagaaatggccgcagcatcatcctgacagctgtgctggccctgatcctggtgtacctgttcagcatcgtgggctacctgttcttcaaggatgacttcatcctggaggtggaccggctgcccaatgaaacagctgtgcctgagaccggggagagcctggccagcgagttcctgttcagtgatgtgtgccgggtggagagcggggagaactgcagcagccctgccccccgggaggagctggtgcctgctgaggagacagagcaggacaaggagcacacctgtgagaccctgctgatgtgcatcgtgacagtgctgagccacggcctgcggagcggcggcggcgtgggagatgtgctgaggaagcccagcaaggaggagcccctgtttgctgcccgggtcatctatgacctgctcttcttcttcatggtgatcatcatcgtgctgaacctgatctttggagtcatcatcgacacctttgctgacctgcggtctgagaagcagaagaaggaggagatcctgaagaccacctgcttcatctgtggcctggagcgggacaagtttgacaacaagacagtgacctttgaggagcacatcaaggaggagcacaacatgtggcactacctgtgcttcatcgtgctggtgaaggtgaaggacagcacagagtacacaggccctgagagctatgtggccgagatgatcaaggagaggaacctggactggttccccaggatgagggccatgagcctggtgtccagtgacagcgagggggagcagaatgagctgaggaacctgcaggagaagctggagagcaccatgaagctggtgaccaacctgagcggccagctgtctgagctgaaggaccagatgacagagcagaggaagcagaagcagagaattggcctgctgggccaccccccccacatgaatgtgaacccccagcagcctgcctag

SEQ ID NO: 155996 - DNA, 2166 bp, synthetic construct
  misc_feature 1..2166: note = Description of Artificial Sequence: Synthetic coding sequence
  source 1..2166: mol_type = other DNA
atgtctgacaagatgagcagcttcctgcacatcggggacatctgcagcctgtatgcagagggcagcaccaacggcttcatcagcaccctgggcctggtggatgacagatgtgtggtgcagcctgagactggagacctgaacaacccccccaagaagttccgggactgcctcttcaagctgtgccccatgaaccgctacagcgcccagaagcagttctggaaggccgccaagccaggggccaacagcaccacagatgctgtgctgctgaacaagctgcaccacgccgctgacctggagaagaagcagaatgaaacagagaacaggaagctgctgggcaccgtcatccagtatggaaatgtcatccagctgctgcacctgaagagcaacaagtacctgactgtgaacaagaggctgcctgccctgctggagaagaatgccatgagggtgaccctggatgaggccggaaatgaaggctcctggttctacatccagcccttctacaagctgcggagcatcggggacagcgtggtgattggagacaaggtggtgctgaaccctgtgaatgccggccagcccctgcacgccagcagccaccagctggtggacaaccctggctgcaatgaggtgaacagcgtgaactgcaacacctcctggaagatcgtgctcttcatgaagtggagcgacaacaaggatgacatcctgaagggaggagatgtggtgcggctcttccacgccgagcaggagaagttcctgacctgtgatgagcacaggaagaagcagcacgtgttcctgcggaccaccggccggcagagcgccaccagcgccaccagcagcaaggccctgtgggaggtggaggtggtgcagcacgacccctgccggggcggggccggctactggaacagcctcttccgcttcaagcacctggccaccggccactacctggccgctgaggtggaccctgactttgaggaggagtgcctggagttccagcccagcgtgtgcaacaagatcatcttcctgatgagctttgtgggcaactgtggcaccttcacccggggctaccgggccatggtgctggatgtggagttcctgtaccacctgctgtacctggtgatctgtgccatgggcctgtttgtgcatgagttcttctacagcctgctgctgtttgacctggtgtaccgggaggagaccctgctgaatgtcatcaagtctgtgaccagaaatggccgcagcatcatcctgacagctgtgctggccctgatcctggtgtacctgttcagcatcgtgggctacctgttcttcaaggatgacttcatcctggaggtggaccggctgcccaatgaaacagctgtgcctgagaccggggagagcctggccagcgagttcctgttcagtgatgtgtgccgggtggagagcggggagaactgcagcagccctgccccccgggaggagctggtgcctgctgaggagacagagcaggacaaggagcacacctgtgagaccctgctgatgtgcatcgtgacagtgctgagccacggcctgcggagcggcggcggcgtgggagatgtgctgaggaagcccagcaaggaggagcccctgtttgctgcccgggtcatctatgacctgctcttcttcttcatggtgatcatcatcgtgctgaacctgatctttggagtcatcatcgacacctttgctgacctgcggtctgagaagcagaagaaggaggagatcctgaagaccacctgcttcatctgtggcctggagcgggacaagtttgacaacaagacagtgacctttgaggagcacatcaaggaggagcacaacatgtggcactacctgtgcttcatcgtgctggtgaaggtgaaggacagcacagagtacacaggccctgagagctatgtggccgagatgatcaaggagaggaacctggactggttccccaggatgagggccatgagcctggtgtccagtgacagcgagggggagcagaatgagctgaggaacctgcaggagaagctggagagcaccatgaagctggtgaccaacctgagcggccagctgtctgagctgaaggaccagatgacagagcagaggaagcagaagcagagaattggcctgctgggccaccccccccacatgaatgtgaacccccagcagcctgcctag

SEQ ID NO: 155997 - DNA, 546 bp, synthetic construct
  misc_feature 1..546: note = Description of Artificial Sequence: Synthetic coding sequence
  source 1..546: mol_type = other DNA
atgacagagaagatgagcagcttcctgtacatcggggacatcgtgtccctgtatgcagagggctctgtgaatggcttcatcagcaccctgggcctggtggatgacagatgtgtggtgcaccctgaggccggggacctggccaacccccccaagaagttccgggactgcctcttcaaggtgtgccccatgaaccgctacagcgcccagaagcagtactggaaggccaagcaggccaagcagggcaaccacacagaggccgccctgctgaagaagctgcagcacgccgctgagctggagcagaagcagaatgaaagtgagaacaagaagctgctgggggagatcgtgaagtacagcaatgtcatccagctgctgcacatcaagagcaacaagtacctgactgtgaacaagaggctgcctgccctgctggagaagaatgccatgagggtgtccctggatgctgctggaaatgaaggctcctggttctacatccaccccttctggaagctgcggtctgagggggacaatgatgccagcttctggatctag

SEQ ID NO: 155998 - DNA, 8106 bp, synthetic construct
  misc_feature 1..8106: note = Description of Artificial Sequence: Synthetic coding sequence
  source 1..8106: mol_type = other DNA
atgacagagaagatgagcagcttcctgtacatcggggacatcgtgtccctgtatgcagagggctctgtgaatggcttcatcagcaccctgggcctggtggatgacagatgtgtggtgcaccctgaggccggggacctggccaacccccccaagaagttccgggactgcctcttcaaggtgtgccccatgaaccgctacagcgcccagaagcagtactggaaggccaagcaggccaagcagggcaaccacacagaggccgccctgctgaagaagctgcagcacgccgctgagctggagcagaagcagaatgaaagtgagaacaagaagctgctgggggagatcgtgaagtacagcaatgtcatccagctgctgcacatcaagagcaacaagtacctgactgtgaacaagaggctgcctgccctgctggagaagaatgccatgagggtgtccctggatgctgctggaaatgaaggctcctggttctacatccaccccttctggaagctgcggtctgagggggacaacatcgtggtgggggacaaggtggtgctgatgcctgtgaatgccggccagcccctgcacgccagcaacatcgagctgctggacaaccctggctgcaaggaggtgaatgctgtgaactgcaacacctcctggaagatcaccctcttcatgaagtacagcagctacagagaagatgtgctgaagggaggagatgtggtgcggctcttccacgccgagcaggagaagttcctgacctgtgatgaatatgagaagaagcagcacatcttcctgcggaccaccctgcggcagagcgccaccagcgccaccagcagcaaggccctgtgggagattgaggtggtgcaccacgacccctgccggggcggggccggccagtggaacagcctcttccgcttcaagcacctggccaccggcaactacctggccgctgagctgaacccagactacagagatgcccagaatgaaggcaagaatgtgagagatggagtgccccccaccagcaagaagaagaggcaggccggggagaagatcatgtacaccctggtgtctgtgccccatggaaatgacatcgccagcctgtttgagctggatgccaccaccctgcagagagctgactgcctggtgcccagaaattcctatgtgcggctgcggcacctgtgcaccaacacctgggtgaccagcaccagcatccccatcgacacagatgaggagaggcctgtgatgctgaagattggcacctgccagaccaaggaggacaaggaggcctttgccatcgtgtctgtgcccctgtctgaggtgcgggacctggactttgccaatgatgccaacaaggtgctggccaccaccgtgaagaagctggagaatggcaccatcacccagaatgaaagaagatttgtgaccaagctgctggaggacctgatcttctttgtggctgatgtgcccaacaacggccaggaggtgctggatgtggtgatcaccaagcccaaccgggagcggcagaagctgatgagggagcagaacatcctggcccaggtgtttggcatcctgaaggcccccttcaaggagaaggccggggagggctccatgctgcggctggaggacctgggggaccagagatatgccccctacaagtacatgctgcggctgtgctacagagtgctgcggcacagccagcaggactacaggaagaaccaggagtacatcgccaagaacttctgtgtgatgcagagccagatcggctatgacatcctggccgaggacaccatcacagccctgctgcacaacaacaggaagctgctggagaagcacatcacagccaaggagattgagacctttgtgtccctgctgcggaggaaccgggagccccgcttcctggactacctgagtgacctgtgtgtgagcaacaccacagccatccctgtgacccaggagctgatctgcaagttcatgctgagccctggaaatgctgacatcctgatccagaccaaggtggtgtccatgcaggccgacaaccccatggagagcagcatcctgagtgatgacattgatgatgaggaggtgtggctgtactggattgacagcaacaaggagccccacggcaaggccatccgccacctggcccaggaggccaaggagggcaccaaggctgacctggaggtgctgacctactaccgctaccagctgaacctgtttgccaggatgtgcctggaccggcagtacctggccatcaaccagatcagcacccagctgtctgtggacctgatcctgcgctgtgtgtctgatgagagcctgccctttgacctgcgggccagcttctgccgcctgatgctgcacatgcacgtggaccgggacccccaggagagcgtggtgcctgtgcgctatgcccggctgtggacagagatccccaccaagatcaccatccacgagtatgacagcatcacagacagcagcagaaatgacatgaagaggaagtttgccctgaccatggagtttgtggaggagtacctgaaggaggtggtgaaccagcccttcccctttggagacaaggagaagaacaagctgacctttgaggtggtgcacctggccaggaacctgatctacttcggcttctacagcttcagcgagctgctgcggctgaccaggaccctgctggccatcctggacatcgtgcaggcccccatgagcagctactttgagcggctgagcaagttccaggacggcggcaacaacgtgatgaggaccatccacggcgtgggggagatgatgacccagatggtgctgagccggggcagcatcttccccatgtctgtgcctgatgtgcccccatccatccaccccagcaagcagggcagccccacagaacatgaagatgtgacagtgatggacaccaagctgaagatcatcgagatcctgcagttcatcctgtctgtgcggctggactaccgcatctcctacatgctgagcatctacaagaaggagtttggagaggacaatgacaatgctgagaccagcgccagcggcagcccagacaccctgctgcccagcgccatcgtgcctgacattgatgaaattgctgcccaggccgagaccatgtttgctggcaggaaggagaagaaccctgtgcagctggatgatgaaggaggccgcaccttcctgcgggtgctgatccacctgatcatgcatgactacccacccctgctgagcggggccctgcagctgctcttcaagcacttcagccagagagctgaggtgctgcaggccttcaagcaggtgcagctgctggtgagcaaccaggatgtggacaactacaagcagatcaaggctgacctggaccagctgcggctgactgtggagaagtctgagctgtgggtggagaagagcagcaactatgaaaatggagaaattggagagagccaggtgaagggcggggaggagcccatcgaggagagcaacatcctgagccctgtgcaggacggcaccaagaagccccagattgacagcaacaagagcaacaactacagaattgtgaaggagatcctgatccggctgagcaagctgtgtgtgcagaacaagaagtgcaggaaccagcaccagaggctgctgaagaacatgggcgcccacagcgtggtgctggacctgctgcagatcccctatgagaagaatgatgagaagatgaatgaggtgatgaacctggcccacaccttcctgcagaacttctgccggggcaacccccagaaccaggtgctgctgcacaagcacctgaacctcttcctgaccccaggcctgctggaggccgagaccatgaggcacatcttcatgaacaactaccacctgtgcaatgagatcagcgagcgggtggtgcagcactttgtgcactgcatcgagacccacggccgccacgtggagtacctgcgcttcctgcagaccatcgtgaaggcagatggcaagtatgtgaagaagtgccaggacatggtgatgacagagctgatcaatggaggagaagatgtgctgatcttctacaatgaccgggccagcttccccatcctgctgcacatgatgtgcagcgagcgggacagaggagatgaaagtggccccctggcctaccacatcaccctggtggagctgctggccgcctgcacagagggcaagaatgtgtacacagagatcaagtgcaacagcctgctgcccctggatgacatcgtgcgggtggtgacccatgatgactgcatccctgaggtgaagatcgcctacgtgaactttgtgaaccactgctacgtggacacagaggtggagatgaaggagatctacaccagcaaccacatctggaagctgtttgagaacttcctggtggacatggcccgggtgtgcaacaccaccacagacaggaagcatgctgacatcttcctggagaagtgtgtgacagagagcatcatgaacatcgtgtctggcttcttcaacagccccttcagtgacaacagcaccagcctgcagacccaccagcctgtgttcatccagctgctgcagagcgccttccgcatctacaactgcacctggcccaacccagcccagaaggcctctgtggagagctgcatccgcaccctggccgaggtggccaagaacagaggaattgccatccctgtggacctggacagccaggtgaacaccctcttcatgaagagccacagcaacatggtgcagagagctgccatgggctggaggctgagcgcccggagcggcccccgcttcaaggaggccctgggcggccctgcctgggactacagaaacatcatcgagaagctgcaggatgtggtggccagcctggagcaccagttcagccccatgatgcaggccgagttctctgtgctggtggatgtgctgtacagccctgagctgctcttccctgagggcagtgatgcccgcatccgctgtggggccttcatgagcaagctgatcaaccacaccaagaagctgatggagaaggaggagaagctgtgcatcaagatcctgcagaccctgcgggagatgctggagaagaaggacagctttgtggaggagggcaacaccctgaggaagatcctgctgaaccgctacttcaagggggactacagcattggagtgaatggccacctgagcggggcctacagcaagacagcccaggtgggcggcagcttcagcggccaggacagcgacaagatgggcatctccatgtctgacatccagtgcctgctggacaaggagggcgccagcgagctggtgattgatgtgattgtgaacaccaagaatgaccgcatcttcagcgagggcatcttcctgggcatcgccctgctggagggcggcaacacccagacccagtacagcttctaccagcagctgcacgagcagaagaagtctgagaagttcttcaaggtgctgtatgacaggatgaaggccgcccagaaggagatccgcagcacagtgacagtgaacaccatcgacctgggcaacaagaagagagatgatgacaatgagctgatgaccagcggccccaggatgagggtgcgggacagcaccctgcacctgaaggagggcatgaagggccagctgacagaggccagcagcgccaccagcaaggcctactgtgtgtaccgccgggagatggaccctgagattgacatcatgtgcaccggccctgaggccggcaacacagaggagaagtctgctgaggaggtgaccatgagccctgccatcgccatcatgcagcccatcctgcgcttcctgcagctgctgtgtgagaaccacaaccgggagctgcagaacttcctgaggaaccagaacaacaagaccaactacaacctggtgtgtgagaccctgcagttcctggactgcatctgtggcagcaccactggaggcctgggcctgctgggcctgtacatcaatgagaagaatgtggccctggtgaaccagaacctggagagcctgacagagtactgccagggcccctgccacgagaaccagacctgcatcgccacccatgagagcaatggaattgacatcatcatcgccctgatcctgaatgacatcaaccccctgggcaagtacaggatggacctggtgctgcagctgaagaacaatgccagcaagctgctgctggccatcatggagagcagacatgacagtgaaaatgctgagcgcatcctcttcaacatgaggccccgggagctggtggatgtgatgaagaatgcctacaaccagggcctggagtgtgaccatggagatgatgagggcggagatgatggagtgagccccaaggatgtgggccacaacatctacatcctggcccaccagctggcccggcacaacaagctgctgcagcagatgctgaagccaggcagtgaccctgatgaaggagatgaggccctgaagtactatgccaaccacacagcccagattgaaattgtgagacatgacaggaccatggagcagatcgtgtttcctgtgcccaacatctgtgagtacctgacccgggagagcaaatgtagagtcttcaacaccacagaaagagatgagcagggcagcaaggtgaatgacttcttccagcagacagaagatctctacaatgagatgaagtggcagaagaagatccggaacaacccagccctcttctggttcagccgccacatcagcctgtggggcagcatctccttcaacctggccgtgttcatcaacctggccgtggccctcttctacccctttggagatgatggagatgagggcaccctgagccccctcttctctgtgctgctgtggattgctgtggccatctgcacctccatgctgttcttcttcagcaagcctgtgggcatccggcccttcctggtgtccatcatgctgcggagcatctacaccatcggcctgggccccaccctcatcctgctgggcgccgccaacctgtgcaacaagatcgtgttcctggtgtcctttgtgggcaacagaggcaccttcacccggggctacagagctgtgatcctggacatggccttcctgtaccacgtggcctacgtgctggtgtgcatgctgggcctgtttgtgcatgagttcttctacagcttcctgctgtttgacctggtgtaccgggaggagaccctgctgaatgtcatcaagtctgtgaccagaaatggccgcagcatcatcctgacagctgtgctggccctgatcctggtgtacctgttcagcatcatcggcttcctgttcctgaaggatgacttcaccatggaggtggaccggctgaagaacagaacacctgtgacaggcagccaccaggtgcccaccatgaccctgaccaccatgatggaggcctgtgccaaggagaactgcagccccaccatcccagccagcaacacagcagatgaggagtatgaagatggcattgaaagaacctgtgacaccctgctgatgtgcatcgtgacagtgctgaaccagggcctgagaaatggaggaggagtgggagatgtgctgcggcggcccagcaaggatgagcccctgtttgctgcccgggtggtgtatgacctgctcttctacttcatcgtcatcatcatcgtgctgaacctgatctttggagtcatcatcgacacctttgctgacctgcggtctgagaagcagaagaaggaggagatcctgaagaccacctgcttcatctgtggcctggagcgggacaagtttgacaacaagacagtgtcctttgaggagcacatcaagtctgagcacaacatgtggcactacctgtacttcatcgtgctggtgaaggtgaaggaccccacagagtacacaggccctgagagctatgtggcccagatgattgtggagaagaacctggactggttccccaggatgagggccatgagcctggtgtccaatgaaggagacagcgagcagaatgagatccgcagcctgcaggagaagctggagagcaccatgagcctggtgaagcagctgagcggccagctggccgagctgaaggagcagatgacagagcagaggaagaacaagcagaggctgggcttcctgggcagcaacacccctcatgtgaaccaccacatgccaccccactag

SEQ ID NO: 155999 - DNA, 8016 bp, synthetic construct
  misc_feature 1..8016: note = Description of Artificial Sequence: Synthetic coding sequence
  source 1..8016: mol_type = other DNA
atgtctgagatgagcagcttcctgcacatcggggacatcgtgtccctgtatgcagagggctctgtgaatggcttcatcagcaccctgggcctggtggatgacagatgtgtggtggagcctgctgctggggacctggacaacccccccaagaagttccgggactgcctcttcaaggtgtgccccatgaaccgctacagcgcccagaagcagtactggaaggccaagcagaccaagcaggacaaggagaagattgctgatgtggtgctgctgcagaagctgcagcacgccgcccagatggagcagaagcagaatgacacagagaacaagaaggtgcatggagatgtggtgaagtatggcagcgtcatccagctgctgcacatgaagagcaacaagtacctgactgtgaacaagaggctgcctgccctgctggagaagaatgccatgagggtgaccctggatgccactggaaatgaaggctcctggctgttcatccagcccttctggaagctgcggagcaatggagacaacgtggtggtgggggacaaggtgatcctgaaccctgtgaatgccggccagcccctgcacgccagcaactatgagctgagtgacaatgccggctgcaaggaggtgaacagcgtgaactgcaacacctcctggaagatcaacctcttcatgcagttccgggaccacctggaggaggtgctgaagggaggagatgtggtgcggctcttccacgccgagcaggagaagttcctgacctgtgatgagtacaagggcaagctgcaggtgttcctgcggaccaccctgcggcagagcgccaccagcgccaccagcagcaatgccctgtgggaggtggaggtggtgcaccacgacccctgccggggcggggccggccactggaatggcctgtaccgcttcaagcacctggccactggaaactacctggccgctgaggagaaccccagctacaagggagatgccagtgaccccaaggctgctggcatgggcgcccagggccgcactggaagaagaaatgctggggagaagatcaagtactgcctggtggccgtgccccatggaaatgacatcgccagcctgtttgagctggaccccaccaccctgcagaagacagacagctttgtgcccagaaattcctatgtgcggctgcggcacctgtgcaccaacacctggatccagagcaccaacgtgcccattgatattgaggaggagcggcccatccggctgatgctgggcacctgccccaccaaggaggacaaggaggcctttgccatcgtgtctgtgcctgtgtctgagatccgggacctggactttgccaatgatgccagctccatgctggccagcgctgtggagaagctgaatgaaggcttcatcagccagaatgacagaagatttgtgatccagctgctggaggacctggtgttctttgtgtctgatgtgcccaacaacggccagaatgtgctggacatcatggtgaccaagcccaaccgggagcggcagaagctgatgagggagcagaacatcctgaagcaggtgtttggcatcctgaaggcccccttccgggagaagggcggggagggccccctggtgcggctggaggagctgagtgaccagaagaatgccccctaccagcacatgttccggctgtgctacagagtgctgcggcacagccaggaggactacaggaagaaccaggagcacatcgccaagcagtttggcatgatgcagagccagatcggctatgacatcctggccgaggacaccatcacagccctgctgcacaacaacaggaagctgctggagaagcacatcaccaagacagaggtggagacctttgtgtccctggtgaggaagaaccgggagccccgcttcctggactacctgagtgacctgtgtgtgagcaaccacatcgccatccctgtgacccaggagctgatctgcaagtgtgtgctggaccccaagaacagcgacatcctgatcagaacagagctgcggcctgtgaaggagatggcccagagccatgagtacctgagcattgagtacagcgaggaggaggtgtggctgacctggacagacaagaacaatgagcaccacgagaagtctgtgcggcagctggcccaggaggcccgggctggaaatgcccatgatgaaaatgtgctgagctactaccgctaccagctgaagctgtttgccaggatgtgcctggaccggcagtacctggccattgatgagatcagccagcagctgggcgtggacctgatcttcctgtgcatggctgatgagatgctgccctttgacctgcgggccagcttctgccacctgatgctgcacgtgcacgtggaccgggacccccaggagctggtgacccctgtgaagtttgcccggctgtggacagagatccccacagccatcaccatcaaggactatgacagcaacctgaatgccagcagagatgacaagaagaacaagtttgccaacaccatggagtttgtggaggactacctgaacaacgtggtgtctgaggccgtgccctttgccaatgaggagaagaacaagctgacctttgaggtggtgtccctggcccacaacctgatctacttcggcttctacagcttcagcgagctgctgcggctgaccaggaccctgctgggcatcatcgactgtgtgcagggccccccagccatgctgcaggcctatgaggaccccggcggcaagaatgtgcggcgcagcatccagggcgtgggccacatgatgagcaccatggtgctgagcaggaagcagagcgtcttcagcgcccccagcctgtctgctggggccagcgctgctgagcccctggacaggagcaagtttgaggagaatgaagacatcgtggtgatggagaccaagctgaagatcctggagatcctgcagttcatcctgaatgtgcggctggactaccgcatctcctacctgctgagcgtcttcaagaaggagtttgtggaggtgttccccatgcaggacagcggggctgatggaacagccccagcctttgacagcaccacagccaacatgaacctggaccgcatcggggagcaggccgaggccatgtttggagtgggcaagaccagctccatgctggaggtggatgatgaaggaggccgcatgttcctgcgggtgctgatccacctgaccatgcatgactatgcccccctggtgtctggggccctgcagctgctcttcaagcacttcagccagaggcaggaggccatgcacaccttcaagcaggtgcagctgctgatcagcgcccaggatgtggagaactacaaggtgatcaagtctgagctggaccggctgcggaccatggtggagaagtctgagctgtgggtggacaagaagggcagcgggaaaggagaggaggtggaggccggggccgccaaggacaagaaggagcggcccacagatgaggagggcttcctgcaccccccaggagagaagagcagcgagaactaccagatcgtgaagggcatcctggagcggctgaacaagatgtgtggggtgggggagcagatgaggaagaagcagcagaggctgctgaagaacatggatgcccacaaggtgatgctggacctgctgcagatcccctatgacaagggagatgccaagatgatggagatcctgcgctacacccaccagttcctgcagaagttctgtgccggcaaccctggcaaccaggccctgctgcacaagcacctgcacctgttcctgaccccaggcctgctggaggccgagaccatgcagcacatcttcctgaacaactaccagctgtgcagcgagatcagcgagcctgtgctgcagcactttgtgcacctgctggccacccacggccgccacgtgcagtacctggacttcctgcacacagtcatcaaggccgagggcaagtatgtgaagaagtgccaggacatgatcatgacagagctgaccaatgctggagatgatgtggtggtgttctacaatgacaaggccagcctggcccacctgctggacatgatgaaggccgccagagatggagtggaggaccacagccccctgatgtaccacatcagcctggtggacctgctggccgcctgtgccgagggcaagaatgtgtacacagagatcaagtgcaccagcctgctgcccctggaggatgtggtgtctgtggtgacccatgaggactgcatcacagaggtgaagatggcctacgtgaactttgtgaaccactgctacgtggacacagaggtggagatgaaggagatctacaccagcaaccacatctggaccctgtttgagaacttcaccctggacatggcccgggtgtgcagcaagcgggagaagagggtggccgaccccaccctggagaagtatgtgctgtctgtggtgctggacaccatcaatgccttcttcagcagccccttcagcgagaacagcaccagcctgcagacccaccagaccatcgtggtgcagctgctgcagagcaccacccggctgctggagtgcccctggctgcagcagcagcacaagggctctgtggaggcctgcatccgcaccctggccatggtggccaagggccgggccatcctgctgcccatggacctggatgcccacatcagctccatgctgagcagcggggccagctgtgccgctgctgcccagagaaatgccagcagctacaaggccaccacccgggccttcccccgggtgacccccacagccaaccagtgggactacaagaacatcatcgagaagctgcaggacatcatcacagccctggaggagcggctgaagcccctggtgcaggccgagctgtctgtgctggtggatgtgctgcactggccagagctgctcttcctggagggcagcgaggcctaccagagatgtgagagcggcggcttcctgagcaagctgatccagcacaccaaggacctgatggagagcgaggagaagctgtgcatcaaggtgctgcggaccctgcagcagatgctgctgaagaagaccaagtatggagaccggggcaaccagctgaggaagatgctgctgcagaactacctgcagaacaggaagagcaccagcagaggagacctgcctgaccccatcggcaccggcctggaccctgactggagcgccatcgccgccacccagtgccgcctggacaaggagggcgccaccaagctggtgtgtgacctgatcaccagcaccaagaatgagaagatcttccaggagagcatcggcctggccatccacctgctggatggcggcaacacagagatccagaagagcttccacaacctgatgatgtctgacaagaagtctgagcgcttcttcaaggtgctgcatgacaggatgaagagggcccagcaggagaccaagagcacagtggccgtgaacatgaatgacctgggcagccagccccatgaagatcgggagcctgtggaccccaccaccaagggccgggtggccagcttcagcatccctggcagcagcagccgctacagcctgggccccagcctgcggcggggccacgaggtgtctgagcgggtgcagagcagcgagatgggcacctctgtgctgatcatgcagcccatcctgcgcttcctgcagctgctgtgtgagaaccacaacagagacctgcagaacttcctgcgctgccagaacaacaagaccaactacaacctggtgtgtgagaccctgcagttcctggacatcatgtgtggcagcaccactggaggcctgggcctgctgggcctgtacatcaatgaagataatgtgggcctggtgatccagaccctggagaccctgacagagtactgccagggcccctgccacgagaaccagacctgcatcgtgacccatgagagcaatggaattgacatcatcacagccctgatcctgaatgacatcagccccctgtgcaagtacaggatggacctggtgctgcagctgaaggacaatgccagcaagctgctgctggccctgatggagagcagacatgacagtgaaaatgctgagcgcatcctgatcagcctgcggccccaggagctggtggatgtgatcaagaaggcctacctgcaggaggaggagcgggagaacagcgaggtgagcccccgggaggtgggccacaacatctacatcctggccctgcagctgagccgccacaacaagcagctgcagcacctgctgaagcctgtgaagaggatccaggaggaggaggccgagggcatcagctccatgctgagcctgaacaacaagcagctgagccagatgctgaagagcagcgccccagcccaggaggaggaggaggaccccctggcctactatgagaaccacaccagccagatcgagatcgtgcggcaggaccgctccatggagcagatcgtgtttcctgtgcccggcatctgccagttcctgacagaggagaccaagcacaggctcttcaccaccacagagcaggatgagcagggcagcaaggtgtctgacttctttgaccagagcagcttcctgcacaatgagatggagtggcagaggaagctgcgctccatgcccctcatctactggttcagcaggaggatgaccctgtggggcagcatctccttcaacctggccgtgttcatcaacatcatcatcgccttcttctacccctacatggagggcgccagcactggagtgctggacagccccctcatcagcctgctcttctggatcctgatctgcttcagcattgctgccctcttcaccaagcgctacagcatccggcccctgattgtggccctgatcctgcggagcatctactacctgggcatcggccccaccctgaacatcctgggcgccctgaacctgaccaacaagatcgtgtttgtggtgtcctttgtgggcaacagaggcaccttcatccggggctacaaggccatggtgatggacatggagttcctgtaccacgtgggctacatcctgacctctgtgctgggcctgtttgcccacgagctgttctacagcatcctgctgtttgacctgatctaccgggaggagaccctcttcaacgtcatcaagtctgtgaccagaaatggccgcagcatcctgctgacagccctgctggccctgatcctggtgtacctgttcagcatcgtgggcttcctgttcctgaaggatgacttcatcctggaggtggaccggctgcccaacaaccacagcacagccagccccctgggcatgccccacggggctgctgcctttgtggacacctgcagcggggacaagatggactgtgtgtctggcctgtctgtgcctgaggtgctggaggaggaccgggagctggacagcacagagcgggcctgtgacaccctgctgatgtgcatcgtgacagtgatgaaccacggcctgagaaatggaggaggagtgggggacatcctgaggaagcccagcaaggatgagagcctcttccctgcccgggtggtgtatgacctgctcttcttcttcatcgtcatcatcatcgtgctgaacctgatctttggagtcatcatcgacacctttgctgacctgcggtctgagaagcagaagaaggaggagatcctgaagaccacctgcttcatctgtggcctggagcgggacaagtttgacaacaagacagtgtcctttgaggagcacatcaagctggagcacaacatgtggaactacctgtacttcatcgtgctggtgcgggtgaagaacaagacagactacacaggccctgagagctatgtggcccagatgatcaagaacaagaacctggactggttccccaggatgagggccatgagcctggtgtccaatgaaggagagggggagcagaatgagatccgcatcctgcaggacaagctgaacagcaccatgaagctggtgagccacctgacagcccagctgaatgagctgaaggagcagatgacagagcagaggaagaggcggcagaggctgggctttgtggatgtgcagaactgcatcagcaggtag

SEQ ID NO: 156000 - DNA, 1326 bp, synthetic construct
  misc_feature 1..1326: note = Description of Artificial Sequence: Synthetic coding sequence
  source 1..1326: mol_type = other DNA
atgtgtgtgtgccagaccatggaggtgggccagtatggcaagaatgccagcagagctggggacagaggagtgctgctggagcccttcatccaccaggtgggcggccacagctccatgatgagatatgatgaccacacagtgtgcaagcccctcatcagccgggagcagcgcttctatgagagcctgcccccagagatgaaggagttcaccccagagtacaagggcgtggtgtctgtgtgctttgaaggagacagtgatggctacatcaacctggtggcctacccctacgtggagagcgagaccgtggagcaggatgacaccacagagcgggagcagcccaggaggaagcacagcagaagaagcctgcacaggagcggcagcggcagtgaccacaaggaggagaaggccagcctgagcctggagaccagcgagagcagccaggaggccaagagccccaaggtggagctgcacagccacagcgaggtgcccttccagatgctggatggcaacagcggcctgagcagcgagaagatcagccacaacccctggagcctgcgctgccacaagcagcagctgagcaggatgaggtctgagagcaaggacaggaagctgtacaagttcctgctgctggagaatgtggtgcaccacttcaagtacccctgtgtgctggacctgaagatgggcacccggcagcacggagatgatgccagcgctgagaaggccgcccggcagatgaggaaatgtgagcagagcaccagcgccaccctgggcgtgcgggtgtgtggcatgcaggtgtaccagctggacaccggccactacctgtgcaggaacaagtactacggccggggcctgagcattgagggcttcagaaatgccctgtaccagtacctgcacaacggcctggacctgcggcgggacctgtttgagcccatcctgagcaagctgcggggcctgaaggctgtgctggagcggcaggccagctaccgcttctacagcagcagcctgctggtgatctatgatggcaaggaatgtagagctgagagctgcctggaccggcgctctgagatgaggctgaagcacctggacatggtgctgcctgaggtggccagcagctgtggccccagcaccagccccagcaacaccagccctgaggccggccccagcagccagcccaaggtggatgtgaggatgattgactttgcccacagcaccttcaagggcttcagagatgaccccaccgtgcatgatggccctgaccggggctacgtgtttggcctggagaacctgatcagcatcatggagcagatgagagatgagaaccagtag

SEQ ID NO: 156001 - DNA, 831 bp, synthetic construct
  misc_feature 1..831: note = Description of Artificial Sequence: Synthetic coding sequence
  source 1..831: mol_type = other DNA
atgctggatggcaacagcggcctgagcagcgagaagatcagccacaacccctggagcctgcgctgccacaagcagcagctgagcaggatgaggtctgagagcaaggacaggaagctgtacaagttcctgctgctggagaatgtggtgcaccacttcaagtacccctgtgtgctggacctgaagatgggcacccggcagcacggagatgatgccagcgctgagaaggccgcccggcagatgaggaaatgtgagcagagcaccagcgccaccctgggcgtgcgggtgtgtggcatgcaggtgtaccagctggacaccggccactacctgtgcaggaacaagtactacggccggggcctgagcattgagggcttcagaaatgccctgtaccagtacctgcacaacggcctggacctgcggcgggacctgtttgagcccatcctgagcaagctgcggggcctgaaggctgtgctggagcggcaggccagctaccgcttctacagcagcagcctgctggtgatctatgatggcaaggagtgcagagctgagagctgcctggacagaagaagtgagatgaggctgaagcacctggacatggtgctgcctgaggtggccagcagctgtggccccagcaccagccccagcaacaccagccctgaggccggccccagcagccagcccaaggtggatgtgaggatgattgactttgcccacagcaccttcaagggcttcagagatgaccccaccgtgcatgatggccctgaccggggctacgtgtttggcctggagaacctgatcagcatcatggagcagatgagagatgagaaccagtag

SEQ ID NO: 156002 - DNA, 831 bp, synthetic construct; identical to SEQ ID NO: 156001
  misc_feature 1..831: note = Description of Artificial Sequence: Synthetic coding sequence
  source 1..831: mol_type = other DNA

SEQ ID NO: 156003 - DNA, 1281 bp, synthetic construct
  misc_feature 1..1281: note = Description of Artificial Sequence: Synthetic coding sequence
  source 1..1281: mol_type = other DNA
atgagccctgccttccgggccatggatgtggagccccgggccaagggcgtgctgctggagccctttgtgcaccaggtgggcggccacagctgtgtgctgcgcttcaatgagaccaccctgtgcaagcccctggtgccccgggagcaccagttctatgagaccctgcctgctgagatgaggaagttcaccccccagtacaagggcgtggtgtctgtgcgctttgaggaggatgaggacaggaacctgtgcctgattgcctaccccctgaagggggaccatggaattgtggacatcgtggacaacagcgactgtgagcccaagagcaagctgctgcgctggaccaccaacaagaagcaccacgtgctggagacagagaagacccccaaggactgggtgcggcagcacaggaaggaggagaagatgaagagccacaagctggaggaggagtttgagtggctgaagaagtctgaggtgctgtactacacagtggagaagaagggcaacatcagcagccagctgaagcactacaacccctggagcatgaagtgccaccagcagcagctgcagaggatgaaggaaaatgccaagcacaggaaccagtacaagttcatcctgctggagaacctgaccagccgctatgaggtgccctgtgtgctggacctgaagatgggcacccggcagcacggagatgatgccagcgaggagaaggccgccaaccagatcaggaagtgccagcagagcaccagcgctgtgattggagtgcgggtgtgtggcatgcaggtgtaccaggccggcagcggccagctgatgttcatgaacaagtaccacggcaggaagctgtctgtgcagggcttcaaggaggccctcttccagttcttccacaacggccgctacctgcggcgggagctgctgggccctgtgctgaagaagctgacagagctgaaggctgtgctggagcggcaggagagctaccgcttctacagcagcagcctgctggtgatctatgatggcaaggagaggcctgaggtggtgctggacagtgatgctgaggacctggaggacctgtctgaggagagcgcagatgaatctgctggggcctatgcctacaagcccatcggggccagctctgtggatgtgaggatgattgactttgcccacaccacctgccgcctgtatggagaggacacagtggtgcatgagggccaggatgctggctacatcttcggcctgcagagcctgattgacatcgtgacagagatcagcgaggagagcggggagtag

SEQ ID NO: 156004 - DNA, 294 bp, synthetic construct
  misc_feature 1..294: note = Description of Artificial Sequence: Synthetic coding sequence
  source 1..294: mol_type = other DNA
atgagccctgccttccgggccatggatgtggagccccgggccaagggcgtgctgctggagccctttgtgcaccaggtgggcggccacagctgtgtgctgcgcttcaatgagaccaccctgtgcaagcccctggtgccccgggagcaccagttctatgagaccctgcctgctgagatgaggaagttcaccccccagtacaagggccagagccagaggcccctggtgtcctggcccagcctgccccacttcttcccctggagcttccccctgtggccccagggctctgtggcctag

SEQ ID NO: 156005 - DNA, 294 bp, synthetic construct; identical to SEQ ID NO: 156004
  misc_feature 1..294: note = Description of Artificial Sequence: Synthetic coding sequence
  source 1..294: mol_type = other DNA

SEQ ID NO: 156006 - DNA, 558 bp, synthetic construct
  misc_feature 1..558: note = Description of Artificial Sequence: Synthetic coding sequence
  source 1..558: mol_type = other DNA
atgagcctgaacctgcctgaggccagcctgctgagccgggcctcctggccagagcaggccaaggagccccggcgggagggccacacagacaagcagcagacagaagatgtgctggccgccggcctgcgctgcctgccccacctgcctgccatctgtgcccggaggatgagccctgccttccgggccatggatgtggagccccgggccaagggcgtgctgctggagccctttgtgcaccaggtgggcggccacagctgtgtgctgcgcttcaatgagaccaccctgtgcaagcccctggtgccccgggagcaccagttctatgagaccctgcctgctgagatgaggaagttcaccccccagtacaagggcaagagccagctgctggagggcctgccccactggagaggagatgtgcgggaccggggccacggccggccctggcagcccagcctggagcccagcctgccccccaccctgtgcttccccagcctgagcagcttcagcagctcctggcccagcgcccagcacctgacccccagcgtcttcaacccctggtag

SEQ ID NO: 156007 - DNA, 264 bp, synthetic construct
  misc_feature 1..264: note = Description of Artificial Sequence: Synthetic coding sequence
  source 1..264: mol_type = other DNA
atgagccctgccttccgggccatggatgtggagccccgggccaagggcgtgctgctggagccctttgtgcaccaggtgggcggccacagctgtgtgctgcgcttcaatgagaccaccctgtgcaagcccctggtgccccgggagcaccagttctatgagaccctgcctgctgagatgaggaagttcaccccccagtacaagggggacatcagcagccaccagcacggcggcgtgtttgtgggggagtggggcagcctgctgtag

SEQ ID NO: 156008 - DNA, 567 bp, synthetic construct
  misc_feature 1..567: note = Description of Artificial Sequence: Synthetic coding sequence
  source 1..567: mol_type = other DNA
atgaacctgtgccagagccccttccaggagggctgccagagcctgctggcctcctggccagagcaggccaaggagccccggcgggagggccacacagacaagcagcagacagaagatgtgctggccgccggcctgcgctgcctgccccacctgcctgccatctgtgcccggaggatgagccctgccttccgggccatggatgtggagccccgggccaagggcgtgctgctggagccctttgtgcaccaggtgggcggccacagctgtgtgctgcgcttcaatgagaccaccctgtgcaagcccctggtgccccgggagcaccagttctatgagaccctgcctgctgagatgaggaagttcaccccccagtacaagggcaagagccagctgctggagggcctgccccactggagaggagatgtgcgggaccggggccacggccggccctggcagcccagcctggagcccagcctgccccccaccctgtgcttccccagcctgagcagcttcagcagctcctggcccagcgcccagcacctgaccccatctgtgttcaacccctggtag

SEQ ID NO: 156009 - DNA, 1233 bp, synthetic construct
  misc_feature 1..1233: note = Description of Artificial Sequence: Synthetic coding sequence
  source 1..1233: mol_type = other DNA
atggtggtgcagaacagcgcagatgctggggacatgagagctggggtgcagctggagcccttcctgcaccaggtgggcggccacatgtctgtgatgaagtatgatgagcacacagtgtgcaagcccctggtgtcccgggagcagcgcttctatgagagcctgcccctggccatgaagcgcttcaccccccagtacaagggcaccgtgacagtgcacctgtggaaggacagcacaggccacctgagcctggtggccaaccctgtgaaggagagccaggagcccttcaaggtgtccacagaatctgctgctgtggccatctggcagaccctgcagcagaccaccggcagcaatggaagtgactgcaccctggcccagtggccccacgcccagctggcccggagccccaaggagagccctgccaaggccctgctgcggtctgagccccacctgaacaccccagccttcagcctggtggaggacaccaacggcaaccaggtggagaggaagagcttcaacccctggggcctgcagtgccaccaggcccacctgacccggctgtgcagcgagtacccagagaacaagaggcaccgcttcctgctgctggagaatgtggtgtcccagtacacccacccctgtgtgctggacctgaagatgggcacccggcagcacggagatgatgccagcgaggagaagaaggcccggcacatgaggaaatgtgcccagagcaccagcgcctgcctgggcgtgcgcatctgtggcatgcaggtgtaccagacagacaagaagtacttcctgtgcaaggacaagtactacggcaggaagctgtctgtggagggcttccggcaggccctgtaccagttcctgcacaacggcagccacctgcggcgggagctgctggagcccatcctgcaccagctgcgggccctgctgagcgtcatccgcagccagagcagctaccgcttctacagcagcagcctgctggtgatctatgatggccaggagcccccagagcgggcccctggcagcccccacccccatgaggccccccaggccgcccacggcagcagccctgggggcctgaccaaggtggacatccgcatgattgactttgcccacaccacctacaagggctactggaatgagcacaccacctatgatggccctgaccccggctacatcttcggcctggagaacctgatccgcatcctgcaggacatccaggagggggagtag

SEQ ID NO: 156010 - DNA, 1233 bp, synthetic construct; identical to SEQ ID NO: 156009
  misc_feature 1..1233: note = Description of Artificial Sequence: Synthetic coding sequence
  source 1..1233: mol_type = other DNA

SEQ ID NO: 156011 - DNA, 1080 bp, synthetic construct
  misc_feature 1..1080: note = Description of Artificial Sequence: Synthetic coding sequence
  source 1..1080: mol_type = other DNA
atggcccccatgggcatccggctgagccccctgggcgtggccgtgttctgcctgctgggcctgggcgtgctgtaccacctgtacagcggcttcctggccggccgcttcagcctgtttggcctgggcggggagcccggcggcggggccgccggccctgctgctgctgctgatggcggcaccgtggacctgcgggagatgctggccgtgtctgtgctggccgctgtgagaggaggagatgaggtgcggcgggtgcgggagagcaatgtgctgcacgagaagagcaagggcaagacccgggagggcgctgaggacaagatgaccagcggagatgtgctgagcaacaggaagatgttctacctgctgaagacagccttccccagcgtgcagatcaacacagaggagcacgtggatgctgctgaccaggaggtgatcctgtgggaccacaagatccctgaggacatcctgaaggaggtgaccacccccaaggaggtgcctgctgagagcgtgacagtgtggattgaccccctggatgccacccaggagtacacagaggacctgaggaaatatgtgaccaccatggtgtgtgtggccgtgaatggcaagcccatgctgggcgtcatccacaagcccttcagcgagtacacagcctgggccatggtggatggcggcagcaatgtgaaggcccggagcagctacaatgagaagaccccaagaattgtggtgagccgcagccacagcggcatggtgaagcaggtggccctgcagacctttggaaaccagaccaccatcatcccagctgggggcgccggctacaaggtgctggccctgctggatgtgcctgacaagagccaggagaaggctgacctgtacatccacgtgacctacatcaagaagtgggacatctgtgctggaaatgccatcctgaaggccctgggcggccacatgaccaccctgtctggagaggagatctcctacacaggcagtgatggcattgaaggaggcctgctggccagcatccgcatgaaccaccaggccctggtgaggaagctgcctgacctggagaagacaggccacaagtag

SEQ ID NO: 156012 - DNA, 1251 bp, synthetic construct
  misc_feature 1..1251: note = Description of Artificial Sequence: Synthetic coding sequence
  source 1..1251: mol_type = other DNA
atggccacagagccccccagccccctgcgggtggaggcccctggccccccagagatgaggaccagccctgccatcgagagcaccccagagggcaccccccagcctgctgggggccgcctgcgcttcctgaatggctgtgtgcccctgagccaccaggtggccggccacatgtatggcaaggacaaggtgggcatcctgcagcacccagatggcaccgtgctgaagcagctgcagcccccaccccggggcccccgggagctggagttctacaacatggtgtatgctgctgactgctttgatggagtgctgctggagctgaggaagtacctgcccaagtactacggcatctggagccccccaacagccccaaatgacctgtacctgaagctggaggatgtgacccacaagttcaacaagccctgcatcatggatgtgaagattggccagaagagctatgacccctttgccagcagcgagaagatccagcagcaggtgtccaagtaccccctgatggaggagatcggcttcctggtgctgggcatgagggtgtaccacgtgcacagcgacagctatgaaacagagaaccagcactacggccgcagcctgaccaaggagaccatcaaggatggagtgagccgcttcttccacaacggctactgcctgaggaaggatgctgtggccgccagcatccagaagattgagaagatcctgcagtggtttgagaaccagaagcagctgaacttctacgccagcagcctgctgtttgtgtatgagggcagcagccagcccaccaccaccaagctgaatgacaggaccctggccgagaagttcctgagcaagggccagctgagtgacacagaggtgctggagtacaacaacaacttccacgtgctgagcagcacagccaacgggaagattgagagctctgtgggcaagagcctgagcaagatgtatgcccggcacaggaagatctacaccaagaagcaccacagccagaccagcctgaaggtggagaacctggagcaggacaatggctggaagtccatgagccaggagcacctgaatggaaatgtgctgagccagctggagaaggtgttctaccacctgcccaccggctgccaggagattgctgaggtggaggtgaggatgattgactttgcccacgtgttccccagcaacaccattgatgagggctacgtgtatggcctgaagcacctgatctctgtgctgcggagcatcctggacaactag

SEQ ID NO: 156013 - DNA, 3777 bp, synthetic construct
  misc_feature 1..3777: note = Description of Artificial Sequence: Synthetic coding sequence
  source 1..3777: mol_type = other DNA
atggccagcgcctgtggggcccctggccctgggggcgccctgggcagccaggcccccagctggtaccaccgggacctgagcagagctgctgctgaggagctgctggcccgggccggcagagatggcagcttcctggtgcgggacagcgagagcgtggccggggcctttgccctgtgtgtgctgtaccagaagcacgtgcacacctaccgcatcctgcctgatggagaggacttcctggccgtgcagaccagccagggcgtgcctgtgcggcgcttccagaccctgggggagctgattggcctgtatgcccagcccaaccagggcctggtgtgtgccctgctgctgcctgtggagggggagcgggagccagaccccccagatgacagagatgccagtgatggagaagatgagaagccacccctgccccccaggagcggcagcaccagcatcagcgcccccaccggccccagcagccccctgcctgcccctgagacccccacagccccagctgctgagagcgcccccaacggcctgagcacagtgtcccatgactacctgaagggcagctatggcctggacctggaggccgtgcggggcggggccagccacctgccccacctgaccaggaccctggccaccagctgccggcggctgcacagcgaggtggacaaggtgctgagcggcctggagatcctgagcaaggtgtttgaccagcagagcagccccatggtgacccggctgctgcagcagcagaacctgccccagacaggagagcaggagctggagagcctggtgctgaagctgtctgtgctgaaggacttcctgagcggcatccagaagaaggccctgaaggccctgcaggacatgagcagcacagcccccccagccccccagcccagcaccaggaaggccaagaccatccctgtgcaggcctttgaggtgaagctggatgtgaccctgggggacctgaccaagattggcaagagccagaagttcaccctgtctgtggatgtggagggcggccgcctggtgctgctgcggcggcagagggacagccaggaggactggaccaccttcacccatgaccgcatccggcagctgatcaagagccagagggtgcagaacaagctgggcgtggtgtttgagaaggagaaggacaggacccagaggaaggacttcatctttgtgtctgccaggaagcgggaggccttctgccagctgctgcagctgatgaagaacaagcacagcaagcaggatgagccagacatgatctctgtgttcatcggcacctggaacatgggctctgtgcccccacccaagaatgtgacctcctggttcaccagcaagggcctgggcaagaccctggatgaggtgacagtgaccatcccccatgacatctacgtgtttggcacccaggagaacagcgtgggggaccgggagtggctggacctgctgcggggcggcctgaaggagctgacagacctggactaccggcccatcgccatgcagagcctgtggaacatcaaggtggccgtgctggtgaagccagagcatgaaaatcgcatcagccacgtgtccaccagctctgtgaagacaggcatcgccaacaccctgggcaacaagggagctgtgggcgtgtccttcatgtttaatggcaccagctttggatttgtgaactgccacctgaccagcggaaatgagaagacagcccggaggaaccagaactacctggacatcctgcggctgctgagcctgggggaccggcagctgaatgcctttgacatcagcctgcgcttcacccacctgttctggtttggagacctgaactaccgcctggacatggacatccaggagatcctgaactacatcagcaggaaggagtttgagcccctgctgcgggtggaccagctgaacctggagcgggagaagcacaaggtgttcctgcgcttcagcgaggaggagatctccttcccccccacctaccgctatgagcggggcagccgggacacctacgcctggcacaagcagaagcccactggagtgaggaccaacgtgcccagctggtgtgaccgcatcctgtggaagagctacccagagacccacatcatctgcaacagctatggctgcacagatgacatcgtgaccagtgaccacagccctgtgtttggcacctttgaggtgggcgtgaccagccagttcatcagcaagaagggcctgagcaagaccagtgaccaggcctacatcgagtttgagagcattgaggccatcgtgaagacagccagcaggaccaagttcttcatcgagttctacagcacctgcctggaggagtacaagaagagctttgaaaatgatgcccagagcagtgacaacatcaacttcctgaaggtgcagtggagcagccggcagctgcccaccctgaagcccatcctggccgacatcgagtacctgcaggaccagcacctgctgctgactgtgaagtccatggatggctatgagagctatggagaatgtgtggtggccctgaagtccatgattggcagcacagcccagcagttcctgaccttcctgagccacagaggagaggagactggaaacatccggggctccatgaaggtgcgggtgcccacagagcggctgggcacccgggagcggctgtatgagtggatcagcattgacaaggatgaggccggggccaagagcaaggcccccagcgtgtcccggggcagccaggagcccaggagcggcagcaggaagccagccttcacagaggccagctgccccctgagccggctgtttgaggagcctgagaagcccccacccaccggccggcccccagccccaccccgggccgccccccgggaggagcccctgaccccccggctgaagccagagggcgcccctgagcctgagggcgtggccgcccccccacccaagaacagcttcaacaacccagcctactacgtgctggagggcgtgccccaccagctgctgcccccagagccccccagccctgcccgggcccctgtgcccagcgccaccaagaacaaggtggccatcaccgtgcctgccccccagctgggccaccaccgccacccccgggtgggggagggcagcagcagtgatgaggagagcggcggcaccctgcccccaccagacttccccccaccacccctgcctgattctgccatcttcctgccccccagcctggaccccctgcccggccctgtggtgcggggccggggcggcgctgaggcccggggccccccaccacccaaggcccaccccaggcctcccctgcccccaggccccagccctgccagcaccttcctgggggaggtggccagcggagatgacaggagctgcagcgtgctgcagatggccaagaccctgtctgaggtggactatgccccagctggccctgcccggagcgccctgctgcccggccccctggagctgcagcccccccggggcctgcccagcgactatggccggcccctgtccttccccccaccccgcatccgggagagcatccaggaggacctggccgaggaggccccctgcctgcagggcggccgggccagcggcctgggggaggccggcatgtctgcctggctgcgggccatcggcctggagagatatgaggagggcctggtgcacaacggctgggatgacctggagttcctgagtgacatcacagaggaggacctggaggaggccggcgtgcaggaccctgcccacaagaggctgctgctggacaccctgcagctgagcaagtag

SEQ ID NO: 156014 - DNA, 105 bp, synthetic construct
  misc_feature 1..105: note = Description of Artificial Sequence: Synthetic coding sequence
  source 1..105: mol_type = other DNA
atggtgacccggctgctgcagcagcagaacctgccccagacaggagagcaggagctggagagcctggtgctgaagctgtctgtgctgaaggacttcctgtcctag

SEQ ID NO: 156015 - DNA, 3051 bp, synthetic construct
  misc_feature 1..3051: note = Description of Artificial Sequence: Synthetic coding sequence
  source 1..3051: mol_type = other DNA
atggtgacccggctgctgcagcagcagaacctgccccagacaggagagcaggagctggagagcctggtgctgaagctgtctgtgctgaaggacttcctgagcggcatccagaagaaggccctgaaggccctgcaggacatgagcagcacagcccccccagccccccagcccagcaccaggaaggccaagaccatccctgtgcaggcctttgaggtgaagctggatgtgaccctgggggacctgaccaagattggcaagagccagaagttcaccctgtctgtggatgtggagggcggccgcctggtgctgctgcggcggcagagggacagccaggaggactggaccaccttcacccatgaccgcatccggcagctgatcaagagccagagggtgcagaacaagctgggcgtggtgtttgagaaggagaaggacaggacccagaggaaggacttcatctttgtgtctgccaggaagcgggaggccttctgccagctgctgcagctgatgaagaacaagcacagcaagcaggatgagccagacatgatctctgtgttcatcggcacctggaacatgggctctgtgcccccacccaagaatgtgacctcctggttcaccagcaagggcctgggcaagaccctggatgaggtgacagtgaccatcccccatgacatctacgtgtttggcacccaggagaacagcgtgggggaccgggagtggctggacctgctgcggggcggcctgaaggagctgacagacctggactaccggcccatcgccatgcagagcctgtggaacatcaaggtggccgtgctggtgaagccagagcatgaaaatcgcatcagccacgtgtccaccagctctgtgaagacaggcatcgccaacaccctgggcaacaagggagctgtgggcgtgtccttcatgtttaatggcaccagctttggatttgtgaactgccacctgaccagcggaaatgagaagacagcccggaggaaccagaactacctggacatcctgcggctgctgagcctgggggaccggcagctgaatgcctttgacatcagcctgcgcttcacccacctgttctggtttggagacctgaactaccgcctggacatggacatccaggagatcctgaactacatcagcaggaaggagtttgagcccctgctgcgggtggaccagctgaacctggagcgggagaagcacaaggtgttcctgcgcttcagcgaggaggagatctccttcccccccacctaccgctatgagcggggcagccgggacacctacgcctggcacaagcagaagcccactggagtgaggaccaacgtgcccagctggtgtgaccgcatcctgtggaagagctacccagagacccacatcatctgcaacagctatggctgcacagatgacatcgtgaccagtgaccacagccctgtgtttggcacctttgaggtgggcgtgaccagccagttcatcagcaagaagggcctgagcaagaccagtgaccaggcctacatcgagtttgagagcattgaggccatcgtgaagacagccagcaggaccaagttcttcatcgagttctacagcacctgcctggaggagtacaagaagagctttgaaaatgatgcccagagcagtgacaacatcaacttcctgaaggtgcagtggagcagccggcagctgcccaccctgaagcccatcctggccgacatcgagtacctgcaggaccagcacctgctgctgactgtgaagtccatggatggctatgagagctatggagaatgtgtggtggccctgaagtccatgattggcagcacagcccagcagttcctgaccttcctgagccacagaggagaggagactggaaacatccggggctccatgaaggtgcgggtgcccacagagcggctgggcacccgggagcggctgtatgagtggatcagcattgacaaggatgaggccggggccaagagcaaggcccccagcgtgtcccggggcagccaggagcccaggagcggcagcaggaagccagccttcacagaggccagctgccccctgagccggctgtttgaggagcctgagaagcccccacccaccggccggcccccagccccaccccgggccgccccccgggaggagcccctgaccccccggctgaagccagagggcgcccctgagcctgagggcgtggccgcccccccacccaagaacagcttcaacaacccagcctactacgtgctggagggcgtgccccaccagctgctgcccccagagccccccagccctgcccgggcccctgtgcccagcgccaccaagaacaaggtggccatcaccgtgcctgccccccagctgggccaccaccgccacccccgggtgggggagggcagcagcagtgatgaggagagcggcggcaccctgcccccaccagacttccccccaccacccctgcctgattctgccatcttcctgccccccagcctggaccccctgcccggccctgtggtgcggggccggggcggcgctgaggcccggggccccccaccacccaaggcccaccccaggcctcccctgcccccaggccccagccctgccagcaccttcctgggggaggtggccagcggagatgacaggagctgcagcgtgctgcagatggccaagaccctgtctgaggtggactatgccccagctggccctgcccggagcgccctgctgcccggccccctggagctgcagcccccccggggcctgcccagcgactatggccggcccctgtccttccccccaccccgcatccgggagagcatccaggaggacctggccgaggaggccccctgcctgcagggcggccgggccagcggcctgggggaggccggcatgtctgcctggctgcgggccatcggcctggagagatatgaggagggcctggtgcacaacggctgggatgacctggagttcctgagtgacatcacagaggaggacctggaggaggccggcgtgcaggaccctgcccacaagaggctgctgctggacaccctgcagctgagcaagtag

SEQ ID NO: 156016 - DNA, 69 bp, synthetic construct
  misc_feature 1..69: note = Description of Artificial Sequence: Synthetic coding sequence
  source 1..69: mol_type = other DNA
atggccagcgcctgtggggcccctggccctgggggcgccctgggcagccaggcccccagctggtactag

SEQ ID NO: 156017 - DNA, 3051 bp, synthetic construct; identical to SEQ ID NO: 156015
  misc_feature 1..3051: note = Description of Artificial Sequence: Synthetic coding sequence
  source 1..3051: mol_type = other DNA

SEQ ID NO: 156018 - DNA, 57 bp, synthetic construct
  misc_feature 1..57: note = Description of Artificial Sequence: Synthetic coding sequence
  source 1..57: mol_type = other DNA
atggccagcgcctgtggggcccctggccctgggggcgccctgggcagccaggcctag

SEQ ID NO: 156019 - DNA, 474 bp, synthetic construct
  misc_feature 1..474: note = Description of Artificial Sequence: Synthetic coding sequence
  source 1..474: mol_type = other DNA
atggtgacccggctgctgcagcagcagaacctgccccagacaggagagcaggagctggagagcctggtgctgaagctgtctgtgctgaaggacttcctgagcggcatccagaagaaggccctgaaggccctgcaggacatgagcagcacagcccccccagccccccagcccagcaccaggaaggccaagaccatccctgtgcaggcctttgaggtgaagctggatgtgaccctgggggacctgaccaagattggcaagagccagaagttcaccctgtctgtggatgtggagggcggccgcctggtgctgctgcggcggcagagggacagccaggaggactggaccaccttcacccatgaccgcatccggcagctgatcaagagccagagggtgcagaacaagctgggcgtggtgtttgagaaggagaaggacaggacccagaggaaggacttcatctttgtgtctgccaggtag

SEQ ID NO: 156020 - DNA, 1200 bp, synthetic construct
  misc_feature 1..1200: note = Description of Artificial Sequence: Synthetic coding sequence
  source 1..1200: mol_type = other DNA
atgtctgacatcctgcgggagctgctgtgtgtgtctgagaaggccgccaacatcgcccgggcctgccggcagcaggaggccctcttccagctgctgattgaggagaagaaggagggggagaagaacaagaagtttgctgtggacttcaagaccctggctgatgtgctggtgcaggaggtgatcaagcagaacatggagaacaagtttcctggcctggagaagaacatctttggagaggagagcaatgagttcaccaatgactggggcgagaagatcaccctgcggctgtgcagcacagaggaggagacagctgagctgctgagcaaggtgctgaatggaaacaaggtggccagcgaggccctggcccgggtggtgcaccaggatgtggccttcacagaccccaccctggacagcacagagatcaacgtgccccaggacatcctgggcatctgggtggaccccatcgacagcacctaccagtacatcaagggcagcgctgacatcaagagcaaccagggcatcttcccctgtggcctgcagtgtgtgaccatcctgattggagtgtatgacatccagacaggagtgcccctgatgggcgtcatcaaccagccctttgtgtcccgggaccccaacaccctgcgctggaagggccagtgctactggggcctgagctacatgggcaccaacatgcacagcctgcagctgaccatcagcagaagaaatggaagtgagacccacactggaaacacaggcagcgaggccgccttcagccccagcttctctgctgtgatcagcaccagcgagaaggagaccatcaaggccgccctgagccgggtgtgtggggaccgcatctttggagctgctggggccggctacaagagcctgtgtgtggtgcagggcctggtggacatctacatcttcagcgaggacaccaccttcaagtgggacagctgtgccgcccacgccatcctgcgggccatgggcggcggcatcgtggacctgaaggagtgcctggagaggaaccctgagaccggcctggacctgccccagctggtgtaccacgtggagaatgaaggagctgctggggtggaccgctgggccaacaagggcggcctgattgcctaccgcagcaggaagaggctggagaccttcctgagcctgctggtgcagaacctggccccagctgagacccacacctag

SEQ ID NO: 156021 - DNA, 1200 bp, synthetic construct; identical to SEQ ID NO: 156020
  misc_feature 1..1200: note = Description of Artificial Sequence: Synthetic coding sequence
  source 1..1200: mol_type = other DNA

SEQ ID NO: 156022 - DNA, 468 bp, synthetic construct
  misc_feature 1..468: note = Description of Artificial Sequence: Synthetic coding sequence
  source 1..468: mol_type = other DNA
atgtctgacatcctgcgggagctgctgtgtgtgtctgagaaggccgccaacatcgcccgggcctgccggcagcaggaggccctcttccagctgctgattgaggagaagaaggagggggagaagaacaagaagtttgctgtggacttcaagaccctggctgatgtgctggtgcaggaggtgatcaagcagaacatggagaacaagtttcctggcctggagaagaacatctttggagaggagagcaatgagttcaccaatgactggggcgagaagatcaccctgcggctgtgcagcacagaggaggagacagctgagctgctgagcaaggtgctgaatggaaacaaggtggccagcgaggccctggcccgggtggtgcaccaggatgtggccttcacagaccccaccctggacagcacagagatcaacgtgccccaggacatcctgggcatctgggtggaccccatctag

SEQ ID NO: 156023 - DNA, 267 bp, synthetic construct
  misc_feature 1..267: note = Description of Artificial Sequence: Synthetic coding sequence
  source 1..267: mol_type = other DNA
atgtctgacatcctgcgggagctgctgtgtgtgtctgagaaggccgccaacatcgcccgggcctgccggcagcaggaggccctcttccagctgctgattgaggagaagaaggagggggagaagaacaagaagtttgctgtggacttcaagaccctggctgatgtgctggtgcaggaggtgatcaagcagaacatggagaacaagtttcctggcctggagaagaacatctttggagaggagagcaatgagttcaccaatgactggtag

SEQ ID NO: 156024 - DNA, 639 bp, synthetic construct
  misc_feature 1..639: note = Description of Artificial Sequence: Synthetic coding sequence
  source 1..639: mol_type = other DNA
atgtctgacatcctgcgggagctgctgtgtgtgtctgagaaggccgccaacatcgcccgggcctgccggcagcaggaggccctcttccagctgctgattgaggagaagaaggagggggagaagaacaagaagtttgctgtggacttcaagaccctggctgatgtgctggtgcaggaggtgatcaagcagaacatggagaacaagtttcctggcctggagaagaacatctttggagaggagagcaatgagttcaccaatgactggggcgagaagatcaccctgcggctgtgcagcacagaggaggagacagctgagctgctgagcaaggtgctgaatggaaacaaggtggccagcgaggccctggcccgggtggtgcaccaggatgtggccttcacagaccccaccctggacagcacagagatcaacgtgccccaggacatcctgggcatctgggtggaccccatcgacagcacctaccagtacatcaagggcagcgctgacatcaagagcaaccagggcatcttcccctgtggcctgcagtgtgtgaccatcctgattggagtgtatgacatccagacaggagtgcccctgatgggcgtcatcaaccagccctttgtgtcccgggaccccaacacctag

SEQ ID NO: 156025 - DNA, 30 bp, synthetic construct
  misc_feature 1..30: note = Description of Artificial Sequence: Synthetic coding sequence
  source 1..30: mol_type = other DNA
atgtctgacatcctgcgggagctgctgtag

SEQ ID NO: 156026 - DNA, 642 bp, synthetic construct
  misc_feature 1..642: note = Description of Artificial Sequence: Synthetic coding sequence
  source 1..642: mol_type = other DNA
atgtctgacatcctgcgggagctgctgtgtgtgtctgagaaggccgccaacatcgcccgggcctgccggcagcaggaggccctcttccagctgctgattgaggagaagaaggagggggagaagaacaagaagtttgctgtggacttcaagaccctggctgatgtgctggtgcaggaggtgatcaagcagaacatggagaacaagtttcctggcctggagaagaacatctttggagaggagagcaatgagttcaccaatgactggggcgagaagatcaccctgcggctgtgcagcacagaggaggagacagctgagctgctgagcaaggtgctgaatggaaacaaggtggccagcgaggccctggcccgggtggtgcaccaggatgtggccttcacagaccccaccctggacagcacagagatcaacgtgccccaggacatcctgggcatctgggtggaccccatcgacagcacctaccagtacatcaagggcagcgctgacatcaagagcaaccagggcatcttcccctgtggcctgcagtgtgtgaccatcctgattggagtgtatgacatccagacaggagtgcccctgatgggcgtcatcaaccagccctttgtgtcccgggaccccaacaccctgtag

SEQ ID NO: 156027 - DNA, 573 bp, synthetic construct
  misc_feature 1..573: note = Description of Artificial Sequence: Synthetic coding sequence
  source 1..573: mol_type = other DNA
atgtctgacatcctgcgggagctgctgtgtgtgtctgagaaggccgccaacatcgcccgggcctgccggcagcaggaggccctcttccagctgctgattgaggagaagaaggagggggagaagaacaagaagtttgctgtggacttcaagaccctggctgatgtgctggtgcaggaggtgatcaagcagaacatggagaacaagtttcctggcctggagaagaacatctttggagaggagagcaatgagttcaccaatgactggggcgagaagatcaccctgcggctgtgcagcacagaggaggagacagctgagctgctgagcaaggtgctgaatggaaacaaggtggccagcgaggccctggcccgggtggtgcaccaggatgtggccttcacagaccccaccctggacagcacagagatcaacgtgccccaggacatcctgggcatctgggtggaccccatcgacagcacctaccagtacatcaagggcagcgctgacatcaagagcaaccagggcatcttcccctgtggcctgcagtgtgtgaccatcctgattggagtgtatgactag

SEQ ID NO: 156028 - DNA, 93 bp, synthetic construct
  misc_feature 1..93: note = Description of Artificial Sequence: Synthetic coding sequence
  source 1..93: mol_type = other DNA
atgtctgacatcctgcgggagctgctgtgtgtgtctgagaaggccgccaacatcgcccgggcctgccggcagcaggaggccctcttccagtag

SEQ ID NO: 156029 - DNA, 207 bp, synthetic construct
  misc_feature 1..207: note = Description of Artificial Sequence: Synthetic coding sequence
  source 1..207: mol_type = other DNA
atgtctgacatcctgcgggagctgctgtgtgtgtctgagaaggccgccaacatcgcccgggcctgccggcagcaggaggccctcttccagctgctgattgaggagaagaaggagggggagaagaacaagaagtttgctgtggacttcaagaccctggctgatgtgctggtgcaggaggtgatcaagcagaacatggagaacaagtag

SEQ ID NO: 156030 - DNA, 432 bp, synthetic construct
  misc_feature 1..432: note = Description of Artificial Sequence: Synthetic coding sequence
  source 1..432: mol_type = other DNA
atgtctgacatcctgcgggagctgctgtgtgtgtctgagaaggccgccaacatcgcccgggcctgccggcagcaggaggccctcttccagctgctgattgaggagaagaaggagggggagaagaacaagaagtttgctgtggacttcaagaccctggctgatgtgctggtgcaggaggtgatcaagcagaacatggagaacaagtttcctggcctggagaagaacatctttggagaggagagcaatgagttcaccaatgactggggcgagaagatcaccctgcggctgtgcagcacagaggaggagacagctgagctgctgagcaaggtgctgaatggaaacaaggtggccagcgaggccctggcccgggtggtgcaccaggatgtggccttcacagaccccaccctggacagcacagagatcaacgtgtag

SEQ ID NO: 156031 - DNA, 1200 bp, synthetic construct; identical to SEQ ID NO: 156020
  misc_feature 1..1200: note = Description of Artificial Sequence: Synthetic coding sequence
  source 1..1200: mol_type = other DNA

SEQ ID NO: 156032 - DNA, 2934 bp, synthetic construct
  misc_feature 1..2934: note = Description of Artificial Sequence: Synthetic coding sequence
  source 1..2934: mol_type = other DNA
atgacagcccgggagcacagccccaggcatggagcccgggcccgggccatgcagagggccagcaccattgatgtggccgctgacatgctgggcctgagcctggccggcaacatccaggaccctgatgagcccatcctggagttcagcctggcctgcagcgagctgcacacccccagcctggacaggaagcccaacagctttgtggccgtgtctgtgaccaccccaccccaggccttctggaccaagcacgcccagacagagatcatcgagggcaccaacaaccccatcttcctgagcagcatcgccttcttccaggacagcctcatcaaccagatgacccaggtgaagctgtctgtgtatgatgtgaaggacaggagccagggcaccatgtacctgctgggcagcggcaccttcatcgtgaaggacctgctgcaggacagacaccaccggctgcacctgaccctgcggtctgctgagagtgacagagtgggcaacatcaccgtgattggctggcagatggaggagaagagtgaccagaggcctcctgtgaccaggtctgtggacacagtgaatggaaggatggtgctgcctgtggatgagagcctgacagaggccctgggcatccgcagcaaatatgccagcctgaggaaggacaccctgctgaagtctgtgtttggaggagccatctgcaggatgtaccgcttccccaccacagatggcaaccacctgcgcatcctggagcagatggccgagagcgtgctgagcctgcacgtgccccggcagtttgtgaagctgctgctggaggaggatgctgcccgggtgtgtgagctggaggagctgggggagctgagcccctgctgggagagcctgcggcggcagatcgtgacccagtaccagaccatcatcctgacctaccaggagaacctgacagacctgcaccagtaccggggccccagcttcaaggccagcagcctgaaggctgacaagaagctggagtttgtgcccaccaacctgcacatccagaggatgagggtgcaggatgatggcggcagtgaccagaactatgacatcgtgaccatcggggccccagctgcccactgccagggcttcaagagcggcggcctgaggaagaagctgcacaagtttgaggagaccaagaagcactttgaggagtgctgcaccagcagcggctgccagagcatcatctacatcccccaggatgtggtgcgggccaaggagatcatcgcccagatcaacaccctgaagacccaggtgtcctactatgcagagcggctgagcagagctgccaaggacagaagtgccaccggcctggagaggaccctggccatcctggccgacaagacccggcagctggtgacagtgtgtgactgcaagctgctggccaacagcatccacggcctgaatgctgcccggccagactacatcgccagcaaggccagccccaccagcacagaggaggagcaggtgatgctgagaaatgaccaggacaccctgatggcccgctggacaggcaggaacagccgcagcagcctgcaggtggactggcatgaggaggagtgggagaaggtgtggctgaatgtggacaagagcctggagtgcatcatccagagggtggacaagctgctgcagaaggagcggctgcatggagagggctgtgaagatgtgttcccctgtgccggcagctgcaccagcaagaagggcaacccagacagccacgcctactggatccggcctgaggaccccttctgtgatgtgcccagcagcccctgccccagcaccatgcccagcacagcctgccacccccacctgaccacccactgcagccccccacctgaggagagcagccctggagagtggagcgaggccctgtaccccctgctgaccaccctgacagactgtgtggccatgatgtctgacaaggccaagaaggccatggtgttcctgctgatgcaggacagcgcccccaccatcgccacctacctgagcctgcagtacagaagagatgtggtgttctgccagaccctgacagccctgatctgtggcttcatcatcaagctgaggaactgcctgcatgatgatggcttcctgcggcagctgtacaccatcggcctgctggcccagtttgagagcctgctgagcacctacggggaggagctggccatgctggaggacatgagcctgggcatcatggacctgagaaatgtgaccttcaaggtgacccaggccaccagcagcgccagcgctgacatgctgcctgtgatcaccggcaacagagatggcttcaacgtgcgggtgcccctgcccggccccctgtttgatgccctgccccgggagatccagagcggcatgctgctgcgggtgcagcctgtgctcttcaacgtgggcatcaatgagcagcagaccctggccgagagatttggagacaccagcctgcaggaggtgatcaacgtggagagcctggtgcggctgaacagctactttgagcagttcaaggaggtgctgcctgaggactgcctgcccaggagccgcagccagacctgcctgcctgagctgctgcgcttcctgggccagaatgtgcacgccaggaagaacaagaatgtggacatcctgtggcaggccgctgagatctgccggcggctgaatggagtgcgcttcaccagctgcaagagcgccaaggacagaacagccatgtctgtgaccctggagcagtgcctgatcctgcagcacgagcacggcatggccccccaggtgttcacccaggccctggagtgcatgaggtctgagggctgccggcgggagaacaccatgaagaatgtgggcagcaggaaatatgccttcaacagcctgcagctgaaggccttccccaagcactacagacctcctgagggcacctacggcaaggtggagacctag

SEQ ID NO: 156033 - DNA, 2817 bp, synthetic construct
  misc_feature 1..2817: note = Description of Artificial Sequence: Synthetic coding sequence
  source 1..2817: mol_type = other DNA
atgacagcccgggagcacagccccaggcatggagcccgggcccgggccatgcagagggccagcaccattgatgtggccgctgacatgctgggcctgagcctggccggcaacatccaggaccctgatgagcccatcctggagttcagcctggcctgcagcgagctgcacacccccagcctggacaggaagcccaacagctttgtggccgtgtctgtgaccaccccaccccaggccttctggaccaagcacgcccagacagagatcatcgagggcaccaacaaccccatcttcctgagcagcatcgccttcttccaggacagcctcatcaaccagatgacccaggtgaagctgtctgtgtatgatgtgaaggacaggagccagggcaccatgtacctgctgggcagcggcaccttcatcgtgaaggacctgctgcaggacagacaccaccggctgcacctgaccctgcggtctgctgagagtgacagagtgggcaacatcaccgtgattggctggcagatggaggagaagagtgaccagaggcctcctgtgaccaggtctgtggacacagtgaatggaaggatggtgctgcctgtggatgagagcctgacagaggccctgggcatccgcagcaaatatgccagcctgaggaaggacaccctgctgaagtctgtgtttggaggagccatctgcaggatgtaccgcttccccaccacagatggcaaccacctgcgcatcctggagcagatggccgagagcgtgctgagcctgcacgtgccccggcagtttgtgaagctgctgctggaggaggatgctgcccgggtgtgtgagctggaggagctgggggagctgagcccctgctgggagagcctgcggcggcagatcgtgacccagtaccagaccatcatcctgacctaccaggagaacctgacagacctgcaccagtaccggggccccagcttcaaggccagcagcctgaaggctgacaagaagctggagtttgtgcccaccaacctgcacatccagaggatgagggtgcaggatgatggcggcagtgaccagaactatgacatcgtgaccatcggggccccagctgcccactgccagggcttcaagagcggcggcctgaggaagaagctgcacaagtttgaggagaccaagaagcactttgaggagtgctgcaccagcagcggctgccagagcatcatctacatcccccaggatgtggtgcgggccaaggagatcatcgcccagatcaacaccctgaagacccaggtgtcctactatgcagagcggctgagcagagctgccaaggacagaagtgccaccggcctggagaggaccctggccatcctggccgacaagacccggcagctggtgacagtgtgtgactgcaagctgctggccaacagcatccacggcctgaatgctgcccggccagactacatcgccagcaaggccagccccaccagcacagaggaggagcaggtgatgctgagaaatgaccaggacaccctgatggcccgctggacaggcaggaacagccgcagcagcctgcaggtggactggcatgaggaggagtgggagaaggtgtggctgaatgtggacaagagcctggagtgcatcatccagagggtggacaagctgctgcagaaggagcggctgcatggagagggctgtgaagatgtgttcccctgtgccggcagctgcaccagcaagaaggactgcagccccccacctgaggagagcagccctggagagtggagcgaggccctgtaccccctgctgaccaccctgacagactgtgtggccatgatgtctgacaaggccaagaaggccatggtgttcctgctgatgcaggacagcgcccccaccatcgccacctacctgagcctgcagtacagaagagatgtggtgttctgccagaccctgacagccctgatctgtggcttcatcatcaagctgaggaactgcctgcatgatgatggcttcctgcggcagctgtacaccatcggcctgctggcccagtttgagagcctgctgagcacctatggagaggagctggccatgctggaggacatgagcctgggcatcatggacctgagaaatgtgaccttcaaggtgacccaggccaccagcagcgccagcgctgacatgctgcccgtcatcactggaaacagagatggcttcaacgtgcgggtgcccctgcccggccccctgtttgatgccctgccccgggagatccagagcggcatgctgctgcgggtgcagcctgtgctcttcaacgtgggcatcaatgagcagcagaccctggccgagagatttggagacaccagcctgcaggaggtgatcaacgtggagagcctggtgcggctgaacagctactttgagcagttcaaggaggtgctgcctgaggactgcctgcccaggagccgcagccagacctgcctgcctgagctgctgcgcttcctgggccagaatgtgcacgccaggaagaacaagaatgtggacatcctgtggcaggccgctgagatctgccggcggctgaatggagtgcgcttcaccagctgcaagagcgccaaggacagaacagccatgtctgtgaccctggagcagtgcctgatcctgcagcatgaacatggcatggccccccaggtgttcacccaggccctggagtgcatgaggtctgagggctgcagaagagagaacaccatgaagaatgtgggcagcaggaaatatgccttcaacagcctgcagctgaaggccttccccaagcactaccggcccccagagggcacctacggcaaggtggagacctag

SEQ ID NO: 156034 - DNA, 2865 bp, synthetic construct
  misc_feature 1..2865: note = Description of Artificial Sequence: Synthetic coding sequence
  source 1..2865: mol_type = other DNA
atgacagcccgggagcacagccccaggcatggagcccgggcccgggccatgcagagggccagcaccattgatgtggccgctgacatgctgggcctgagcctggccggcaacatccaggaccctgatgagcccatcctggagttcagcctggcctgcagcgagctgcacacccccagcctggacaggaagcccaacagctttgtggccgtgtctgtgaccaccccaccccaggccttctggaccaagcacgcccagacagagatcatcgagggcaccaacaaccccatcttcctgagcagcatcgccttcttccaggacagcctcatcaaccagatgacccaggtgaagctgtctgtgtatgatgtgaaggacaggagccagggcaccatgtacctgctgggcagcggcaccttcatcgtgaaggacctgctgcaggacagacaccaccggctgcacctgaccctgcggtctgctgagagtgacagagtgggcaacatcaccgtgattggctggcagatggaggagaagagtgaccagaggcctcctgtgaccaggtctgtggacacagtgaatggaaggatggtgctgcctgtggatgagagcctgacagaggccctgggcatccgcagcaaatatgccagcctgaggaaggacaccctgctgaagtctgtgtttggaggagccatctgcaggatgtaccgcttccccaccacagatggcaaccacctgcgcatcctggagcagatggccgagagcgtgctgagcctgcacgtgccccggcagtttgtgaagctgctgctggaggaggatgctgcccgggtgtgtgagctggaggagctgggggagctgagcccctgctgggagagcctgcggcggcagatcgtgacccagtaccagaccatcatcctgacctaccaggagaacctgacagacctgcaccagtaccggggccccagcttcaaggccagcagcctgaaggctgacaagaagctggagtttgtgcccaccaacctgcacatccagaggatgagggtgcaggatgatggcggcagtgaccagaactatgacatcgtgaccatcggggccccagctgcccactgccagggcttcaagagcggcggcctgaggaagaagctgcacaagtttgaggagaccaagaagcactttgaggagtgctgcaccagcagcggctgccagagcatcatctacatcccccaggatgtggtgcgggccaaggagatcatcgcccagatcaacaccctgaagacccaggtgtcctactatgcagagcggctgagcagagctgccaaggacagaagtgccaccggcctggagaggaccctggccatcctggccgacaagacccggcagctggtgacagtgtgtgactgcaagctgctggccaacagcatccacggcctgaatgctgcccggccagactacatcgccagcaaggccagccccaccagcacagaggaggagcaggtgatgctgagaaatgaccaggacaccctgatggcccgctggacaggcaggaacagccgcagcagcctgcaggtggactggcatgaggaggagtgggagaaggtgtggctgaatgtggacaagagcctggagtgcatcatccagagggtggacaagctgctgcagaaggagcggctgcatggagagggctgtgaagatgtgttcccctgtgccggcagctgcaccagcaagaaggactgcagccccccacctgaggagagcagccctggagagtggagcgaggccctgtaccccctgctgaccaccctgacagactgtgtggccatgatgtctgacaaggccaagaaggccatggtgttcctgctgatgcaggacagcgcccccaccatcgccacctacctgagcctgcagtacagaagagatgtggtgttctgccagaccctgacagccctgatctgtggcttcatcatcaagctgaggaactgcctgcatgatgatggcttcctgcggcagctgtacaccatcggcctgctggcccagtttgagagcctgctgagcacctatggagaggagctggccatgctggaggacatgagcctgggcatcatggacctgagaaatgtgaccttcaaggtgacccaggccaccagcagcgccagcgctgacatgctgcccgtcatcactggaaacagagatggcttcaacgtgcgggtgcccctgcccggccccctgtttgatgccctgccccgggagatccagagcggcatgctgctgcgggtgcagcctgtgctcttcaacgtgggcatcaatgagcagcagaccctggccgagagatttggagacaccagcctgcaggaggtgatcaacgtggagagcctggtgcggctgaacagctactttgagcagttcaaggaggtgctgcctgaggactgcctgcccaggagccgcagccagacctgcctgcctgagctgctgcgcttcctgggccagaatgtgcacgccaggaagaacaagaatgtggacatcctgtggcaggccgctgagatctgccggcggctgaatggagtgcgcttcaccagctgcaagagcgccaaggacagaacagccatgtctgtgaccctggagcagtgcctgatcctgcagcatgaacatggcatggccccccaggtgttcacccaggccctggagtgcatgaggagcatcggcacccgggaggtggtgacccagaagaacctgagcggcctggtgcccatccgggacctgcggctggaccccagcctgctgtgcagcatccccctgctggccctgagccccaacctgctgattgtgtggctgttcctgagcatcgcctacctggtgaccaagctgcgctgcaagtag

SEQ ID NO: 156035 - DNA, 2919 bp, synthetic construct
  misc_feature 1..2919: note = Description of Artificial Sequence: Synthetic coding sequence
  source 1..2919: mol_type = other DNA
atgacagcccgggagcacagccccaggcatggagcccgggcccgggccatgcagagggccagcaccattgatgtggccgctgacatgctgggcctgagcctggccggcaacatccaggaccctgatgagcccatcctggagttcagcctggcctgcagcgagctgcacacccccagcctggacaggaagcccaacagctttgtggccgtgtctgtgaccaccccaccccaggccttctggaccaagcacgcccagacagagatcatcgagggcaccaacaaccccatcttcctgagcagcatcgccttcttccaggacagcctcatcaaccagatgacccaggtgaagctgtctgtgtatgatgtgaaggacaggagccagggcaccatgtacctgctgggcagcggcaccttcatcgtgaaggacctgctgcaggacagacaccaccggctgcacctgaccctgcggtctgctgagagtgacagagtgggcaacatcaccgtgattggctggcagatggaggagaagagtgaccagaggcctcctgtgaccaggtctgtggacacagtgaatggaaggatggtgctgcctgtggatgagagcctgacagaggccctgggcatccgcagcaaatatgccagcctgaggaaggacaccctgctgaagtctgtgtttggaggagccatctgcaggatgtaccgcttccccaccacagatggcaaccacctgcgcatcctggagcagatggccgagagcgtgctgagcctgcacgtgccccggcagtttgtgaagctgctgctggaggaggatgctgcccgggtgtgtgagctggaggagctgggggagctgagcccctgctgggagagcctgcggcggcagatcgtgacccagtaccagaccatcatcctgacctaccaggagaacctgacagacctgcaccagtaccggggccccagcttcaaggccagcagcctgaaggctgacaagaagctggagtttgtgcccaccaacctgcacatccagaggatgagggtgcaggatgatggcggcagtgaccagaactatgacatcgtgaccatcggggccccagctgcccactgccagggcttcaagagcggcggcctgaggaagaagctgcacaagtttgaggagaccaagaagcacaccagcagcggctgccagagcatcatctacatcccccaggatgtggtgcgggccaaggagatcatcgcccagatcaacaccctgaagacccaggtgtcctactatgcagagcggctgagccgggccgccaaggacagaagtgccaccggcctggagaggaccctggccatcctggccgacaagacccggcagctggtgacagtgtgtgactgcaagctgctggccaacagcatccacggcctgaatgctgcccggccagactacatcgccagcaaggccagccccaccagcacagaggaggagcaggtgatgctgagaaatgaccaggacaccctgatggcccgctggacaggaagaaacagccgcagcagcctgcaggtggactggcatgaggaggagtgggagaaggtgtggctgaatgtggacaagagcctggagtgcatcatccagagggtggacaagctgctgcagaaggagcggctgcacggggagggctgtgaagatgtgttcccctgtgccggcagctgcaccagcaagaagggcaacccagacagccacgcctactggatccggcctgaggaccccttctgtgatgtgcccagcagcccctgccccagcaccatgcccagcacagcctgccacccccacctgaccacccactgcagccccccacctgaggagagcagccctggagagtggagcgaggccctgtaccccctgctgaccaccctgacagactgtgtggccatgatgtctgacaaggccaagaaggccatggtgttcctgctgatgcaggacagcgcccccaccatcgccacctacctgagcctgcagtacagaagagatgtggtgttctgccagaccctgacagccctgatctgtggcttcatcatcaagctgaggaactgcctgcatgatgatggcttcctgcggcagctgtacaccatcggcctgctggcccagtttgagagcctgctgagcacctatggagaggagctggccatgctggaggacatgagcctgggcatcatggacctgagaaatgtgaccttcaaggtgacccaggccaccagcagcgccagcgctgacatgctgcccgtcatcactggaaacagagatggcttcaacgtgcgggtgcccctgcccggccccctgtttgatgccctgccccgggagatccagagcggcatgctgctgcgggtgcagcctgtgctcttcaacgtgggcatcaatgagcagcagaccctggccgagagatttggagacaccagcctgcaggaggtgatcaacgtggagagcctggtgcggctgaacagctactttgagcagttcaaggaggtgctgcctgaggactgcctgcccaggagccgcagccagacctgcctgcctgagctgctgcgcttcctgggccagaatgtgcacgccaggaagaacaagaatgtggacatcctgtggcaggccgctgagatctgccggcggctgaatggagtgcgcttcaccagctgcaagagcgccaaggacagaacagccatgtctgtgaccctggagcagtgcctgatcctgcagcatgaacatggcatggccccccaggtgttcacccaggccctggagtgcatgaggtctgagggctgcagaagagagaacaccatgaagaatgtgggcagcaggaaatatgccttcaacagcctgcagctgaaggccttccccaagcactaccggcccccagagggcacctacggcaaggtggagacctag

SEQ ID NO: 156036 - DNA, 2934 bp, synthetic construct; identical to SEQ ID NO: 156032
  misc_feature 1..2934: note = Description of Artificial Sequence: Synthetic coding sequence
  source 1..2934: mol_type = other DNA

SEQ ID NO: 156037 - DNA, 2817 bp, synthetic construct
  misc_feature 1..2817: note = Description of Artificial Sequence: Synthetic coding sequence
  source 1..2817: mol_type = other DNA
atgacagcccgggagcacagccccaggcatggagcccgggcccgggccatgcagagggccagcaccattgatgtggccgctgacatgctgggcctgagcctggccggcaacatccaggaccctgatgagcccatcctggagttcagcctggcctgcagcgagctgcacacccccagcctggacaggaagcccaacagctttgtggccgtgtctgtgaccaccccaccccaggccttctggaccaagcacgcccagacagagatcatcgagggcaccaacaaccccatcttcctgagcagcatcgccttcttccaggacagcctcatcaaccagatgacccaggtgaagctgtctgtgtatgatgtgaaggacaggagccagggcaccatgtacctgctgggcagcggcaccttcatcgtgaaggacctgctgcaggacagacaccaccggctgcacctgaccctgcggtctgctgagagtgacagagtgggcaacatcaccgtgattggctggcagatggaggagaagagtgaccagaggcctcctgtgaccaggtctgtggacacagtgaatggaaggatggtgctgcctgtggatgagagcctgacagaggccctgggcatccgcagcaaatatgccagcctgaggaaggacaccctgctgaagtctgtgtttggaggagccatctgcaggatgtaccgcttccccaccacagatggcaaccacctgcgcatcctggagcagatggccgagagcgtgctgagcctgcacgtgccccggcagtttgtgaagctgctgctggaggaggatgctgcccgggtgtgtgagctggaggagctgggggagctgagcccctgctgggagagcctgcggcggcagatcgtgacccagtaccagaccatcatcctgacctaccaggagaacctgacagacctgcaccagtaccggggccccagcttcaaggccagcagcctgaaggctgacaagaagctggagtttgtgcccaccaacctgcacatccagaggatgagggtgcaggatgatggcggcagtgaccagaactatgacatcgtgaccatcggggccccagctgcccactgccagggcttcaagagcggcggcctgaggaagaagctgcacaagtttgaggagaccaagaagcagcaggaggagagcaggaccagcagcggctgccagagcatcatctacatcccccaggatgtggtgcgggccaaggagatcatcgcccagatcaacaccctgaagacccaggtgtcctactatgcagagcggctgagcagagctgccaaggacagaagtgccaccggcctggagaggaccctggccatcctggccgacaagacccggcagctggtgacagtgtgtgactgcaagctgctggccaacagcatccacggcctgaatgctgcccggccagactacatcgccagcaaggccagccccaccagcacagaggaggagcaggtgatgctgagaaatgaccaggacaccctgatggcccgctggacaggcaggaacagccgcagcagcctgcaggtggactggcatgaggaggagtgggagaaggtgtggctgaatgtggacaagagcctggagtgcatcatccagagggtggacaagctgctgcagaaggagcggctgcatggagagggctgtgaagatgtgttcccctgtgccggcagctgcaccagcaagaaggactgcagccccccacctgaggagagcagccctggagagtggagcgaggccctgtaccccctgctgaccaccctgacagactgtgtggccatgatgtctgacaaggccaagaaggccatggtgttcctgctgatgcaggacagcgcccccaccatcgccacctacctgagcctgcagtacagaagagatgtggtgttctgccagaccctgacagccctgatctgtggcttcatcatcaagctgaggaactgcctgcatgatgatggcttcctgcggcagctgtacaccatcggcctgctggcccagtttgagagcctgctgagcacctatggagaggagctggccatgctggaggacatgagcctgggcatcatggacctgagaaatgtgaccttcaaggtgacccaggccaccagcagcgccagcgctgacatgctgcccgtcatcactggaaacagagatggcttcaacgtgcgggtgcccctgcccggccccctgtttgatgccctgccccgggagatccagagcggcatgctgctgcgggtgcagcctgtgctcttcaacgtgggcatcaatgagcagcagaccctggccgagagatttggagacaccagcctgcaggaggtgatcaacgtggagagcctggtgcggctgaacagctactttgagcagttcaaggaggtgctgcctgaggactgcctgcccaggagccgcagccagacctgcctgcctgagctgctgcgcttcctgggccagaatgtgcacgccaggaagaacaagaatgtggacatcctgtggcaggccgctgagatctgccggcggctgaatggagtgcgcttcaccagctgcaagagcgccaaggacagaacagccatgtctgtgaccctggagcagtgcctgatcctgcagcatgaacatggcatggccccccaggtgttcacccaggccctggagtgcatgaggtctgagggctgcagaagagagaacaccatgaagaatgtgggcagcaggaaatatgccttcaacagcctgcagctgaaggccttccccaagcactaccggcccccagagggcacctacggcaaggtggagacctag

SEQ ID NO: 156038 - DNA, 3021 bp, synthetic construct
  misc_feature 1..3021: note = Description of Artificial Sequence: Synthetic coding sequence
  source 1..3021: mol_type = other DNA
atggagggccagagcagccggggcagccggcggcccggcacccgggccggcctgggcagcctgcccatgccccagggcgtggcccagacaggagcccccagcaaggtggacagcagcttccagctgcctgccaagaagaatgctgccctgggccccagcgagccccggctggccctggcccctgtgggcccccgggccgccatgtctgccagcagcgagggcccccggctggccctggccagcccccggcccatcctggcccccctgtgcaccccagagggccagaagacagccacagcccacaggagcagcagcctggcccccacctctgtgggccagctggtgatgtctgccagcgctggccccaagcccccaccagccaccactggatctgtgctggcccccaccagcctgggcctggtgatgcctgccagcgctggccccaggagcccccctgtgaccctgggccccaacctggcccccaccagccgggaccagaagcaggagcccccagcctctgtgggccccaagcccaccctggccgccagcggcctgagcctggccctggccagcgaggagcagcccccagagctgcccagcacccccagccctgtgcccagccctgtgctgagccccacccaggagcaggccctggccccagccagcacagccagcggggccgcctctgtgggccagaccagcgccaggaagagagatgccccagccccccggcccctgcctgccagcgagggccacctgcagcccccagcccagaccagcggccccaccggcagccccccctgcatccagaccagcccagacccccggctgagccccagcttccgggcccggcctgaggccctgcacagcagcccagaagatcctgtgctgccccggcccccccagaccctgcccctggatgtgggccagggccccagcgagcccggcacccacagccctggcctgctgagccccaccttccggcctggggcccccagcggccagacagtgcccccacccctgcccaagccacccaggagccccagccgcagccccagccacagccccaacagaagcccctgtgtgcccccagccccagacatggccctgccccggctgggcacccagagcacaggccctggccgctgcctgagccccaacctgcaggcccaggaggccccagcccctgtgaccaccagcagcagcaccagcaccctgagcagcagcccctggagcgcccagcccacctggaagagtgaccccggcttccgcatcaccgtggtgacctggaatgtgggcacagccatgcccccagatgatgtgaccagcctgctgcacctgggcggcggagatgacagtgatggagctgacatgattgccatcggcctgcaggaggtgaacagcatgctgaacaagaggctgaaggatgccctcttcacagaccagtggagcgagctgttcatggatgccctgggccccttcaactttgtgctggtgtcctctgtgaggatgcagggcgtcatcctgctgctgtttgccaagtactaccacctgcccttcctgagagatgtgcagacagactgcaccaggacaggcctgggcggctactggggcaacaagggcggcgtgtctgtgcggctggccgccttcggccacatgctgtgcttcctgaactgccacctgcctgcccacatggacaaggccgagcagaggaaggacaacttccagaccatcctgagcctgcagcagttccagggccctggggcccagggcatcctggaccatgacctggtgttctggtttggagacctgaacttccgcatcgagagctatgacctgcactttgtgaagtttgccatcgacagcgaccagctgcaccagctgtgggagaaggaccagctgaacatggccaagaacacctggcccatcctgaagggcttccaggagggccccctgaactttgcccccaccttcaagtttgatgtgggcaccaacaagtatgacaccagcgccaagaagaggaagccagcctggacagaccgcatcctgtggaaggtgaaggcccctgggggcggccccagccccagcggcaggaagagccaccggctgcaggtgacccagcacagctaccgcagccacatggagtacacagtgtctgaccacaagcctgtggccgcccagttcctgctgcagtttgccttcagagatgacatgcccctggtgcggctggaggtggctgatgagtgggtgcggcctgagcaggccgtggtgcgctacaggatggagaccgtgtttgcccggagctcctgggactggattggcctgtacagagtgggcttccgccactgcaaggactatgtggcctacgtgtgggccaagcatgaagatgtggatggcaacacctaccaggtgaccttcagcgaggagagcctgcccaagggccatggagacttcatcctgggctactacagccacaaccacagcatcctgattggcatcacagagcccttccagatcagcctgcccagcagcgagctggccagcagcagcacagacagcagcggcaccagcagtgaaggagaagatgacagcaccctggagctgctggcccccaagagccgcagccccagccctgggaagagcaagaggcacaggagccgcagccctggcctggcccgcttccctggcctggccctgcggcccagcagccgggagcggcggggggccagccgcagccccagcccccagagccggcggctgagccgggtggccccagacaggagcagcaatggcagcagccggggcagcagcgaggagggccccagcggcctgcccggcccctgggccttccccccagctgtgcccaggagcctgggcctgctgcctgccctgcggctggagaccgtggaccccggcggcggcggctcctggggccctgaccgggaggccctggcccccaacagcctgagccccagcccccagggccaccggggcctggaggagggcggcctgggcccctag

SEQ ID NO: 156039 - DNA, 1920 bp, synthetic construct
  misc_feature 1..1920: note = Description of Artificial Sequence: Synthetic coding sequence
  source 1..1920: mol_type = other DNA
atggccctgccccggctgggcacccagagcactggacctggccgctgcctgagccccaacctgcaggcccaggaggccccagcccctgtgaccaccagcagcagcaccagcaccctgagcagcagcccctggagcgcccagcccacctggaagagtgaccccggcttccgcatcaccgtggtgacctggaatgtgggcacagccatgcccccagatgatgtgaccagcctgctgcacctgggcggcggagatgacagtgatggagctgacatgattgccatcggcctgcaggaggtgaacagcatgctgaacaagaggctgaaggatgccctcttcacagaccagtggagcgagctgttcatggatgccctgggccccttcaactttgtgctggtgtcctctgtgaggatgcagggcgtcatcctgctgctgtttgccaagtactaccacctgcccttcctgagagatgtgcagacagactgcaccaggacaggcctgggcggctactggggcaacaagggcggcgtgtctgtgcggctggccgccttcggccacatgctgtgcttcctgaactgccacctgcctgcccacatggacaaggccgagcagaggaaggacaacttccagaccatcctgagcctgcagcagttccagggccctggggcccagggcatcctggaccatgacctggtgttctggtttggagacctgaacttcagaattgagagctatgacctgcactttgtgaagtttgccatcgacagcgaccagctgcaccagctgtgggagaaggaccagctgaacatggccaagaacacctggcccatcctgaagggcttccaggagggccccctgaactttgcccccaccttcaagtttgatgtgggcaccaacaagtatgacaccagcgccaagaagaggaagccagcctggacagaccgcatcctgtggaaggtgaaggcccctgggggcggccccagccccagcggcaggaagagccaccggctgcaggtgacccagcacagctaccgcagccacatggagtacacagtgtctgaccacaagcctgtggccgcccagttcctgctgcagtttgccttcagagatgacatgcccctggtgcggctggaggtggctgatgagtgggtgcggcctgagcaggccgtggtgcgctacaggatggagaccgtgtttgcccggagctcctgggactggattggcctgtacagagtgggcttccgccactgcaaggactatgtggcctacgtgtgggccaagcatgaagatgtggatggcaacacctaccaggtgaccttcagcgaggagagcctgcccaagggccacggggacttcatcctgggctactacagccacaaccacagcatcctgattggcatcacagagcccttccagatcagcctgcccagcagcgagctggccagcagcagcacagacagcagcggcaccagcagcgagggggaggatgacagcaccctggagctgctggcccccaagagccgcagccccagccctgggaagagcaagaggcacaggagccgcagccctggcctggcccgcttccctggcctggccctgcggcccagcagccgggagaggagaggagccagccgcagccccagcccccagagccggcggctgagccgggtggccccagacaggagcagcaatggcagcagccggggcagcagcgaggagggccccagcggcctgcccggcccctgggccttccccccagctgtgcccaggagcctgggcctgctgcctgccctgcggctggagaccgtggaccccggcggcggcggctcctggggccctgaccgggaggccctggcccccaacagcctgagccccagcccccagggccaccggggcctggaggagggcggcctgggcccctag

SEQ ID NO: 156040 - DNA, 1917 bp, synthetic construct
  misc_feature 1..1917: note = Description of Artificial Sequence: Synthetic coding sequence
  source 1..1917: mol_type = other DNA
atggagggccagagcagccggggcagccggcggcccggcacccgggccggcctgggcagcctgcccatgccccagggcgtggcccagacaggagcccccagcaaggtggacagcagcttccagctgcctgccaagaagaatgctgccctgggccccagcgagccccgcatcaccgtggtgacctggaatgtgggcacagccatgcccccagatgatgtgaccagcctgctgcacctgggcggcggagatgacagtgatggagctgacatgattgccatcggcctgcaggaggtgaacagcatgctgaacaagaggctgaaggatgccctcttcacagaccagtggagcgagctgttcatggatgccctgggccccttcaactttgtgctggtgtcctctgtgaggatgcagggcgtcatcctgctgctgtttgccaagtactaccacctgcccttcctgagagatgtgcagacagactgcaccaggacaggcctgggcggctactggggcaacaagggcggcgtgtctgtgcggctggccgccttcggccacatgctgtgcttcctgaactgccacctgcctgcccacatggacaaggccgagcagaggaaggacaacttccagaccatcctgagcctgcagcagttccagggccctggggcccagggcatcctggaccatgacctggtgttctggtttggagacctgaacttccgcatcgagagctatgacctgcactttgtgaagtttgccatcgacagcgaccagctgcaccagctgtgggagaaggaccagctgaacatggccaagaacacctggcccatcctgaagggcttccaggagggccccctgaactttgcccccaccttcaagtttgatgtgggcaccaacaagtatgacaccagcgccaagaagaggaagccagcctggacagaccgcatcctgtggaaggtgaaggcccctgggggcggccccagccccagcggcaggaagagccaccggctgcaggtgacccagcacagctaccgcagccacatggagtacacagtgtctgaccacaagcctgtggccgcccagttcctgctgcagtttgccttcagagatgacatgcccctggtgcggctggaggtggctgatgagtgggtgcggcctgagcaggccgtggtgcgctacaggatggagaccgtgtttgcccggagctcctgggactggattggcctgtacagagtgggcttccgccactgcaaggactatgtggcctacgtgtgggccaagcatgaagatgtggatggcaacacctaccaggtgaccttcagcgaggagagcctgcccaagggccatggagacttcatcctgggctactacagccacaaccacagcatcctgattggcatcacagagcccttccagatcagcctgcccagcagcgagctggccagcagcagcacagacagcagcggcaccagcagtgaaggagaagatgacagcaccctggagctgctggcccccaagagccgcagccccagccctgggaagagcaagaggcacaggagccgcagccctggcctggcccgcttccctggcctggccctgcggcccagcagccgggagcggcggggggccagccgcagccccagcccccagagccggcggctgagccgggtggccccagacaggagcagcaatggcagcagccggggcagcagcgaggagggccccagcggcctgcccggcccctgggccttccccccagctgtgcccaggagcctgggcctgctgcctgccctgcggctggagaccgtggaccccggcggcggcggctcctggggccctgaccgggaggccctggcccccaacagcctgagccccagcccccagggccaccggggcctggaggagggcggcctgggcccctag

SEQ ID NO: 156041 - DNA, 1920 bp, synthetic construct; identical to SEQ ID NO: 156039
  misc_feature 1..1920: note = Description of Artificial Sequence: Synthetic coding sequence
  source 1..1920: mol_type = other DNA

SEQ ID NO: 156042 - DNA, 2820 bp, synthetic construct
  misc_feature 1..2820: note = Description of Artificial Sequence: Synthetic coding sequence
  source 1..2820: mol_type = other DNA
atgtctgccagcagcgagggcccccggctggccctggccagcccccggcccatcctggcccccctgtgcaccccagagggccagaagacagccacagcccacaggagcagcagcctggcccccacctctgtgggccagctggtgatgtctgccagcgctggccccaagcccccaccagccaccaccggctctgtgctggcccccaccagcctgggcctggtgatgcctgccagcgctggccccaggagcccccctgtgaccctgggccccaacctggcccccaccagccgggaccagaagcaggagcccccagcctctgtgggccccaagcccaccctggccgccagcggcctgagcctggccctggccagcgaggagcagcccccagagctgcccagcacccccagccctgtgcccagccctgtgctgagccccacccaggagcaggccctggccccagccagcacagccagcggggccgcctctgtgggccagaccagcgccaggaagagagatgccccagccccccggcccctgcctgccagcgagggccacctgcagcccccagcccagaccagcggccccaccggcagccccccctgcatccagaccagcccagacccccggctgagccccagcttccgggcccggcctgaggccctgcacagcagccctgaggaccctgtgctgcccaggcctccccagaccctgcccctggatgtgggccagggccccagcgagcccggcacccacagccctggcctgctgagccccaccttccggcctggggcccccagcggccagacagtgcccccacccctgcccaagcccccaagaagccccagccgcagccccagccacagccccaacagaagcccctgtgtgcccccagccccagacatggccctgccccggctgggcacccagagcactggacctggccgctgcctgagccccaacctgcaggcccaggaggccccagcccctgtgaccaccagcagcagcaccagcaccctgagcagcagcccctggagcgcccagcccacctggaagagtgaccccggcttccgcatcaccgtggtgacctggaatgtgggcacagccatgcccccagatgatgtgaccagcctgctgcacctgggcggcggagatgacagtgatggagctgacatgattgccatcggcctgcaggaggtgaacagcatgctgaacaagaggctgaaggatgccctcttcacagaccagtggagcgagctgttcatggatgccctgggccccttcaactttgtgctggtgtcctctgtgaggatgcagggcgtcatcctgctgctgtttgccaagtactaccacctgcccttcctgagagatgtgcagacagactgcaccaggacaggcctgggcggctactggggcaacaagggcggcgtgtctgtgcggctggccgccttcggccacatgctgtgcttcctgaactgccacctgcctgcccacatggacaaggccgagcagaggaaggacaacttccagaccatcctgagcctgcagcagttccagggccctggggcccagggcatcctggaccatgacctggtgttctggtttggagacctgaacttcagaattgagagctatgacctgcactttgtgaagtttgccatcgacagcgaccagctgcaccagctgtgggagaaggaccagctgaacatggccaagaacacctggcccatcctgaagggcttccaggagggccccctgaactttgcccccaccttcaagtttgatgtgggcaccaacaagtatgacaccagcgccaagaagaggaagccagcctggacagaccgcatcctgtggaaggtgaaggcccctgggggcggccccagccccagcggcaggaagagccaccggctgcaggtgacccagcacagctaccgcagccacatggagtacacagtgtctgaccacaagcctgtggccgcccagttcctgctgcagtttgccttcagagatgacatgcccctggtgcggctggaggtggctgatgagtgggtgcggcctgagcaggccgtggtgcgctacaggatggagaccgtgtttgcccggagctcctgggactggattggcctgtacagagtgggcttccgccactgcaaggactatgtggcctacgtgtgggccaagcatgaagatgtggatggcaacacctaccaggtgaccttcagcgaggagagcctgcccaagggccacggggacttcatcctgggctactacagccacaaccacagcatcctgattggcatcacagagcccttccagatcagcctgcccagcagcgagctggccagcagcagcacagacagcagcggcaccagcagcgagggggaggatgacagcaccctggagctgctggcccccaagagccgcagccccagccctgggaagagcaagaggcacaggagccgcagccctggcctggcccgcttccctggcctggccctgcggcccagcagccgggagaggagaggagccagccgcagccccagcccccagagccggcggctgagccgggtggccccagacaggagcagcaatggcagcagccggggcagcagcgaggagggccccagcggcctgcccggcccctgggccttccccccagctgtgcccaggagcctgggcctgctgcctgccctgcggctggagaccgtggaccccggcggcggcggctcctggggccctgaccgggaggccctggcccccaacagcctgagccccagcccccagggccaccggggcctggaggagggcggcctgggcccctag

SEQ ID NO: 156043 - DNA, 3534 bp, synthetic construct
  misc_feature 1..3534: note = Description of Artificial Sequence: Synthetic coding sequence
  source 1..3534: mol_type = other DNA
atggtgccctgctggaaccacggcaacatcaccaggagcaaggccgaggagctgctgagcaggacaggcaaggatggcagcttcctggtgcgggccagcgagagcatcagccgggcctatgccctgtgtgtgctgtacagaaactgtgtgtacacctaccgcatcctgcccaatgaagatgacaagttcaccgtgcaggccagcgagggcgtgtccatgaggttcttcaccaagctggaccagctgattgagttctacaagaaggagaacatgggcctggtgacccacctgcagtaccctgtgcccctggaggaggaggacacaggagatgatcctgaggaggacacagtggagagcgtggtgtccccacctgagctgcccccaagaaacatccccctgacagccagcagctgtgaggccaaggaggtgcccttcagcaatgaaaacccccgggccacagagaccagccggcccagcctgtctgagaccctcttccagaggctgcagagcatggacaccagcggcctgcctgaggagcacctgaaggccatccaggactacctgagcacccagctggcccaggacagcgagtttgtgaagacaggcagcagcagcctgccccacctgaagaagctgaccaccctgctgtgcaaggagctgtatggccagatgctgaggacagtgcccggcatcggcaaggtgaaggaggaggaccacgtgcctggagaggccaaccccatcaacatggtgtccaagctgagccagctgaccagcctgctgagcagcattgaggacaaggtgaaggccctgctgcacgagggccctgagagcccccaccggcccagcctcatcccccctgtgacctttgaggtgaaggccgagagcctgggcatcccccagaagatgcagctgaaggtggatgtggagagcggcaagctgatcatcaagaagagcaaggatggcagcgaggacaagttctacagccacaagaagatcctgcagctgatcaagagccagaagttcctgaacaagctggtgatcctggtggagacagagaaggagaagatcctgaggaaggagtatgtgtttgctgacagcaagaagcgggagggcttctgccagctgctgcagcagatgaagaacaagcacagcgagcagcctgagccagacatgatcaccatcttcatcggcacctggaacatgggaaatgcccccccacccaagaagatcacctcctggttcctgagcaagggccagggcaagaccagagatgacagcgctgactacatcccccatgacatctacgtgattggcacccaggaggaccccctgtctgagaaggagtggctggagatcctgaagcacagcctgcaggagatcacctctgtgaccttcaagacagtggccatccacaccctgtggaacatccgcatcgtggtgctggccaagccagagcatgaaaatcgcatcagccacatctgcacagacaacgtgaagacaggcatcgccaacaccctgggcaacaagggagctgtgggcgtgtccttcatgtttaatggcaccagcctgggctttgtgaacagccacctgaccagcggcagcgagaagaagctgcggaggaaccagaactacatgaacatcctgcgcttcctggccctgggggacaagaagctgagccccttcaacatcacccaccgcttcacccacctgttctggtttggagacctgaactacagagtggacctgcccacctgggaggccgagaccatcatccagaagatcaagcagcagcagtatgctgacctgctgagccatgaccagctgctgacagagcggcgggagcagaaggtgttcctgcactttgaggaggaggagatcacctttgcccccacctacagatttgagcggctgacccgggacaagtatgcctacaccaagcagaaggccaccggcatgaagtacaacctgcccagctggtgtgacagagtgctgtggaagagctaccccctggtgcacgtggtgtgccagagctatggcagcaccagtgacatcatgaccagtgaccacagccctgtgtttgccacctttgaggccggcgtgaccagccagtttgtgtccaagaatggacctggcaccgtggacagccagggccagatcgagttcctgcgctgctacgccaccctgaagaccaagagccagaccaagttctacctggagttccacagcagctgcctggagagctttgtgaagagccaggagggagaaaatgaggagggcagcgagggggagctggtggtgaagtttggagagaccctgcccaagctgaagcccatcatcagtgaccctgagtacctgctggaccagcacatcctgatcagcatcaagagcagtgacagtgatgagagctatggagagggctgcatcgccctgcggctggaggccacagagacccagctgcccatctacacccccctgacccaccacggggagctgaccggccacttccagggcgagatcaagctgcagaccagccagggcaagacccgggagaagctgtatgactttgtgaagacagaaagagatgagagcagcggccccaagaccctgaagagcctgaccagccatgaccccatgaagcagtgggaggtgaccagccgggccccaccctgcagcggcagcagcatcacagagatcatcaaccccaactacatgggcgtgggcccctttggaccacccatgcccctgcacgtgaagcagaccctgagcccagaccagcagcccacagcctggagctatgaccagccccccaaggacagccccctgggcccctgccgcggggagagcccccccaccccacctggccagccccccatcagccccaagaagttcctgcccagcacagccaacagaggcctgccccccaggacccaggagagccggcccagcgacctgggcaagaatgctggggacaccctgccccaggaggacctgcccctgaccaagccagagatgtttgagaaccccctgtatggcagcctgagcagcttccccaagccagcccccaggaaggaccaggagagccccaagatgcccaggaaggagcccccaccctgcccagagcccggcatcctgagccccagcatcgtgctgaccaaggcccaggaggccgacagaggagagggccctgggaagcaggtgcctgccccccggctgcgctccttcacctgcagcagcagcgctgagggccgggctgctggaggagacaagagccagggcaagcccaagacccctgtgagcagccaggcccctgtgcctgccaagaggcccatcaagcccagccgctctgagatcaaccagcagaccccacccacccccacccccaggcctcccctgcctgtgaagagccctgctgtgctgcacctgcagcacagcaagggccgggactacagagacaacacagagctgccccaccacggcaagcacaggcctgaggagggccccccaggccccctgggccgcacagccatgcagtag

SEQ ID NO: 156044 - DNA, 2433 bp, synthetic construct
  misc_feature 1..2433: note = Description of Artificial Sequence: Synthetic coding sequence
  source 1..2433: mol_type = other DNA
aagcgggagggcttctgccagctgctgcagcagatgaagaacaagcacagcgagcagcctgagccagacatgatcaccatcttcatcggcacctggaacatgggaaatgcccccccacccaagaagatcacctcctggttcctgagcaagggccagggcaagaccagagatgattctgctgactacatcccccatgacatctacgtgattggcacccaggaggaccccctgtctgagaaggagtggctggagatcctgaagcacagcctgcaggagatcacctctgtgaccttcaagacagtggccatccacaccctgtggaacatcagaattgtggtgctggccaagccagagcacgagaaccgcatcagccacatctgcacagacaacgtgaagacaggaattgccaacaccctgggcaacaagggagctgtgggcgtgtccttcatgttcaacggcaccagcctgggctttgtgaacagccacctgaccagcggcagcgagaagaagctgcggaggaaccagaactacatgaacatcctgcgcttcctggccctgggggacaagaagctgagccccttcaacatcacccaccgcttcacccacctgttctggtttggagacctgaactacagagtggacctgcccacctgggaggccgagaccatcatccagaagatcaagcagcagcagtatgctgacctgctgagccatgaccagctgctgacagaaagaagagagcagaaggtgttcctgcactttgaggaggaggagatcacctttgcccccacctacagatttgagcggctgacccgggacaagtatgcctacaccaagcagaaggccaccggcatgaagtacaacctgcccagctggtgtgacagagtgctgtggaagagctaccccctggtgcacgtggtgtgccagagctatggcagcaccagtgacatcatgaccagtgaccacagccctgtgtttgccacctttgaagctggggtgaccagccagtttgtgtccaagaatggacctggcaccgtggacagccagggccagatcgagttcctgcgctgctacgccaccctgaagaccaagagccagaccaagttctacctggagttccacagcagctgcctggagagctttgtgaagagccaggagggggagaatgaggagggcagcgagggggagctggtggtgaagtttggagagaccctgcccaagctgaagcccatcatcagtgaccctgagtacctgctggaccagcacatcctgatcagcatcaagagcagtgacagtgatgagagctatggagagggctgcatcgccctgcggctggaggccacagagacccagctgcccatctacacccccctgacccaccacggggagctgaccggccacttccagggcgagatcaagctgcagaccagccagggcaagacccgggagaagctgtatgactttgtgaagacagaaagagatgagagcagcggccccaagaccctgaagagcctgaccagccatgaccccatgaagcagtgggaggtgaccagccgggccccaccctgcagcggcagcagcatcacagagatcatcaaccccaactacatgggcgtgggccccttcggcccccccatgcccctgcacgtgaagcagaccctgagcccagaccagcagcccacagcctggagctatgaccagccccccaaggacagccccctgggcccctgccgcggggagagcccccccaccccacctggccagccccccatcagccccaagaagttcctgcccagcacagccaacagaggcctgccccccaggacccaggagagccggcccagcgacctgggcaagaatgctggggacaccctgccccaggaggacctgcccctgaccaagccagagatgtttgagaaccccctgtatggcagcctgagcagcttccccaagccagcccccaggaaggaccaggagagccccaagatgcccaggaaggagcccccaccctgcccagagcccggcatcctgagccccagcatcgtgctgaccaaggcccaggaggccgacagaggagagggccctgggaagcaggtgcctgccccccggctgcggagcttcacctgcagcagcagcgctgagggccgggccgccggcggggacaagagccagggcaagcccaagacccctgtgagcagccaggcccctgtgcctgccaagaggcccatcaagcccagccgctctgagatcaaccagcagaccccacccacccccaccccccggccccccctgcctgtgaagagccctgctgtgctgcacctgcagcacagcaagggccgggactacagagacaacacagagctgccccaccacggcaagcacaggcctgaggagggccccccaggccccctgggccgcacagccatgcagtag

SEQ ID NO: 156045 - DNA, 666 bp, synthetic construct
  misc_feature 1..666: note = Description of Artificial Sequence: Synthetic coding sequence
  source 1..666: mol_type = other DNA
atggtgccctgctggaaccacggcaacatcaccaggagcaaggccgaggagctgctgagcaggacaggcaaggatggcagcttcctggtgcgggccagcgagagcatcagccgggcctatgccctgtgtgtgctgtacagaaactgtgtgtacacctaccgcatcctgcccaatgaagatgacaagttcaccgtgcaggccagcgagggcgtgtccatgaggttcttcaccaagctggaccagctgattgagttctacaagaaggagaacatgggcctggtgacccacctgcagtaccctgtgcccctggaggaggaggacacaggagatgatcctgaggaggacacagagagcgtggtgagccccccagagctgccccccaggaacatccccctgacagccagcagctgtgaggccaaggaggtgcccttcagcaatgaaaacccccgggccacagagaccagccggcccagcctgtctgagaccctcttccagaggctgcagagcatggacaccagcggcctgcctgaggagcacctgaaggccatccaggactacctgagcacccagctggcccaggacagcgagtttgtgaagacaggcagcagcagcctgccccacctgaagaagctgaccaccctgctgtgcaaggagctgtatggatag

SEQ ID NO: 156046 - DNA, 2433 bp, synthetic construct; identical to SEQ ID NO: 156044
  misc_feature 1..2433: note = Description of Artificial Sequence: Synthetic coding sequence
  source 1..2433: mol_type = other DNA

SEQ ID NO: 156047 - DNA, 2433 bp, synthetic construct; identical to SEQ ID NO: 156044
  misc_feature 1..2433: note = Description of Artificial Sequence: Synthetic coding sequence
  source 1..2433: mol_type = other DNA

SEQ ID NO: 156048 - DNA, 2826 bp, synthetic construct
  misc_feature 1..2826: note = Description of Artificial Sequence: Synthetic coding sequence
  source 1..2826: mol_type = other DNA
cggccccaggtgcctggagaggccaaccccatcaacatggtgtccaagctgagccagctgaccagcctgctgagcagcattgaggacaaggtgaaggccctgctgcacgagggccctgagagcccccaccggcccagcctcatcccccctgtgacctttgaggtgaaggccgagagcctgggcatcccccagaagatgcagctgaaggtggatgtggagagcggcaagctgatcatcaagaagagcaaggatggcagcgaggacaagttctacagccacaagaagatcctgcagctgatcaagagccagaagttcctgaacaagctggtgatcctggtggagacagagaaggagaagatcctgaggaaggagtatgtgtttgctgacagcaagaagcgggagggcttctgccagctgctgcagcagatgaagaacaagcacagcgagcagcctgagccagacatgatcaccatcttcatcggcacctggaacatgggaaatgcccccccacccaagaagatcacctcctggttcctgagcaagggccagggcaagaccagagatgacagcgctgactacatcccccatgacatctacgtgattggcacccaggaggaccccctgtctgagaaggagtggctggagatcctgaagcacagcctgcaggagatcacctctgtgaccttcaagacagtggccatccacaccctgtggaacatccgcatcgtggtgctggccaagccagagcatgaaaatcgcatcagccacatctgcacagacaacgtgaagacaggcatcgccaacaccctgggcaacaagggagctgtgggcgtgtccttcatgtttaatggcaccagcctgggctttgtgaacagccacctgaccagcggcagcgagaagaagctgcggaggaaccagaactacatgaacatcctgcgcttcctggccctgggggacaagaagctgagccccttcaacatcacccaccgcttcacccacctgttctggtttggagacctgaactacagagtggacctgcccacctgggaggccgagaccatcatccagaagatcaagcagcagcagtatgctgacctgctgagccatgaccagctgctgacagagcggcgggagcagaaggtgttcctgcactttgaggaggaggagatcacctttgcccccacctacagatttgagcggctgacccgggacaagtatgcctacaccaagcagaaggccaccggcatgaagtacaacctgcccagctggtgtgacagagtgctgtggaagagctaccccctggtgcacgtggtgtgccagagctatggcagcaccagtgacatcatgaccagtgaccacagccctgtgtttgccacctttgaggccggcgtgaccagccagtttgtgtccaagaatggacctggcaccgtggacagccagggccagatcgagttcctgcgctgctacgccaccctgaagaccaagagccagaccaagttctacctggagttccacagcagctgcctggagagctttgtgaagagccaggagggagaaaatgaggagggcagcgagggggagctggtggtgaagtttggagagaccctgcccaagctgaagcccatcatcagtgaccctgagtacctgctggaccagcacatcctgatcagcatcaagagcagtgacagtgatgagagctatggagagggctgcatcgccctgcggctggaggccacagagacccagctgcccatctacacccccctgacccaccacggggagctgaccggccacttccagggcgagatcaagctgcagaccagccagggcaagacccgggagaagctgtatgactttgtgaagacagaaagagatgagagcagcggccccaagaccctgaagagcctgaccagccatgaccccatgaagcagtgggaggtgaccagccgggccccaccctgcagcggcagcagcatcacagagatcatcaaccccaactacatgggcgtgggcccctttggaccacccatgcccctgcacgtgaagcagaccctgagcccagaccagcagcccacagcctggagctatgaccagccccccaaggacagccccctgggcccctgccgcggggagagcccccccaccccacctggccagccccccatcagccccaagaagttcctgcccagcacagccaacagaggcctgccccccaggacccaggagagccggcccagcgacctgggcaagaatgctggggacaccctgccccaggaggacctgcccctgaccaagccagagatgtttgagaaccccctgtatggcagcctgagcagcttccccaagccagcccccaggaaggaccaggagagccccaagatgcccaggaaggagcccccaccctgcccagagcccggcatcctgagccccagcatcgtgctgaccaaggcccaggaggccgacagaggagagggccctgggaagcaggtgcctgccccccggctgcgctccttcacctgcagcagcagcgctgagggccgggctgctggaggagacaagagccagggcaagcccaagacccctgtgagcagccaggcccctgtgcctgccaagaggcccatcaagcccagccgctctgagatcaaccagcagaccccacccacccccacccccaggcctcccctgcctgtgaagagccctgctgtgctgcacctgcagcacagcaagggccgggactacagagacaacacagagctgccccaccacggcaagcacaggcctgaggagggccccccaggccccctgggccgcacagccatgcagtag

SEQ ID NO: 156049 - DNA, 669 bp, synthetic construct
  misc_feature 1..669: note = Description of Artificial Sequence: Synthetic coding sequence
  source 1..669: mol_type = other DNA
atggtgccctgctggaaccacggcaacatcaccaggagcaaggccgaggagctgctgagcaggacaggcaaggatggcagcttcctggtgcgggccagcgagagcatcagccgggcctatgccctgtgtgtgctgtacagaaactgtgtgtacacctaccgcatcctgcccaatgaagatgacaagttcaccgtgcaggccagcgagggcgtgtccatgaggttcttcaccaagctggaccagctgattgagttctacaagaaggagaacatgggcctggtgacccacctgcagtaccctgtgcccctggaggaggaggacacaggagatgatcctgaggaggacacagtggagagcgtggtgtccccacctgagctgcccccaagaaacatccccctgacagccagcagctgtgaggccaaggaggtgcccttcagcaatgaaaacccccgggccacagagaccagccggcccagcctgtctgagaccctcttccagaggctgcagagcatggacaccagcggcctgcctgaggagcacctgaaggccatccaggactacctgagcacccagctggcccaggacagcgagtttgtgaagacaggcagcagcagcctgccccacctgaagaagctgaccaccctgctgtgcaaggagctgtatggatag

SEQ ID NO: 156050 - DNA, 2826 bp, synthetic construct
  misc_feature 1..2826: note = Description of Artificial Sequence: Synthetic coding sequence
  source 1..2826: mol_type = other DNA
cctccccaggtgcctggagaggccaaccccatcaacatggtgtccaagctgagccagctgaccagcctgctgagcagcattgaggacaaggtgaaggccctgctgcacgagggccctgagagcccccaccggcccagcctcatcccccctgtgacctttgaggtgaaggccgagagcctgggcatcccccagaagatgcagctgaaggtggatgtggagagcggcaagctgatcatcaagaagagcaaggatggcagcgaggacaagttctacagccacaagaagatcctgcagctgatcaagagccagaagttcctgaacaagctggtgatcctggtggagacagagaaggagaagatcctgaggaaggagtatgtgtttgctgacagcaagaagcgggagggcttctgccagctgctgcagcagatgaagaacaagcacagcgagcagcctgagccagacatgatcaccatcttcatcggcacctggaacatgggaaatgcccccccacccaagaagatcacctcctggttcctgagcaagggccagggcaagaccagagatgacagcgctgactacatcccccatgacatctacgtgattggcacccaggaggaccccctgtctgagaaggagtggctggagatcctgaagcacagcctgcaggagatcacctctgtgaccttcaagacagtggccatccacaccctgtggaacatccgcatcgtggtgctggccaagccagagcatgaaaatcgcatcagccacatctgcacagacaacgtgaagacaggcatcgccaacaccctgggcaacaagggagctgtgggcgtgtccttcatgtttaatggcaccagcctgggctttgtgaacagccacctgaccagcggcagcgagaagaagctgcggaggaaccagaactacatgaacatcctgcgcttcctggccctgggggacaagaagctgagccccttcaacatcacccaccgcttcacccacctgttctggtttggagacctgaactacagagtggacctgcccacctgggaggccgagaccatcatccagaagatcaagcagcagcagtatgctgacctgctgagccatgaccagctgctgacagagcggcgggagcagaaggtgttcctgcactttgaggaggaggagatcacctttgcccccacctacagatttgagcggctgacccgggacaagtatgcctacaccaagcagaaggccaccggcatgaagtacaacctgcccagctggtgtgacagagtgctgtggaagagctaccccctggtgcacgtggtgtgccagagctatggcagcaccagtgacatcatgaccagtgaccacagccctgtgtttgccacctttgaggccggcgtgaccagccagtttgtgtccaagaatggacctggcaccgtggacagccagggccagatcgagttcctgcgctgctacgccaccctgaagaccaagagccagaccaagttctacctggagttccacagcagctgcctggagagctttgtgaagagccaggagggagaaaatgaggagggcagcgagggggagctggtggtgaagtttggagagaccctgcccaagctgaagcccatcatcagtgaccctgagtacctgctggaccagcacatcctgatcagcatcaagagcagtgacagtgatgagagctatggagagggctgcatcgccctgcggctggaggccacagagacccagctgcccatctacacccccctgacccaccacggggagctgaccggccacttccagggcgagatcaagctgcagaccagccagggcaagacccgggagaagctgtatgactttgtgaagacagaaagagatgagagcagcggccccaagaccctgaagagcctgaccagccatgaccccatgaagcagtgggaggtgaccagccgggccccaccctgcagcggcagcagcatcacagagatcatcaaccccaactacatgggcgtgggcccctttggaccacccatgcccctgcacgtgaagcagaccctgagcccagaccagcagcccacagcctggagctatgaccagccccccaaggacagccccctgggcccctgccgcggggagagcccccccaccccacctggccagccccccatcagccccaagaagttcctgcccagcacagccaacagaggcctgccccccaggacccaggagagccggcccagcgacctgggcaagaatgctggggacaccctgccccaggaggacctgcccctgaccaagccagagatgtttgagaaccccctgtatggcagcctgagcagcttccccaagccagcccccaggaaggaccaggagagccccaagatgcccaggaaggagcccccaccctgcccagagcccggcatcctgagccccagcatcgtgctgaccaaggcccaggaggccgacagaggagagggccctgggaagcaggtgcctgccccccggctgcgctccttcacctgcagcagcagcgctgagggccgggctgctggaggagacaagagccagggcaagcccaagacccctgtgagcagccaggcccctgtgcctgccaagaggcccatcaagcccagccgctctgagatcaaccagcagaccccacccacccccacccccaggcctcccctgcctgtgaagagccctgctgtgctgcacctgcagcacagcaagggccgggactacagagacaacacagagctgccccaccacggcaagcacaggcctgaggagggccccccaggccccctgggccgcacagccatgcagtag

SEQ ID NO: 156051 - DNA, 1791 bp, synthetic construct
  misc_feature 1..1791: note = Description of Artificial Sequence: Synthetic coding sequence
  source 1..1791: mol_type = other DNA
atggtgccctgctggaaccacggcaacatcaccaggagcaaggccgaggagctgctgagcaggacaggcaaggatggcagcttcctggtgcgggccagcgagagcatcagccgggcctatgccctgtgtgtgctgtacagaaactgtgtgtacacctaccgcatcctgcccaatgaagatgacaagttcaccgtgcaggccagcgagggcgtgtccatgaggttcttcaccaagctggaccagctgattgagttctacaagaaggagaacatgggcctggtgacccacctgcagtaccctgtgcccctggaggaggaggacacaggagatgatcctgaggaggacacagtggagagcgtggtgtccccacctgagctgcccccaagaaacatccccctgacagccagcagctgtgaggccaaggaggtgcccttcagcaatgaaaacccccgggccacagagaccagccggcccagcctgtctgagaccctcttccagaggctgcagagcatggacaccagcggcctgcctgaggagcacctgaaggccatccaggactacctgagcacccagctggcccaggacagcgagtttgtgaagacaggcagcagcagcctgccccacctgaagaagctgaccaccctgctgtgcaaggagctgtatggctactgcctggaggtgctgctgagctaccccctgagcctgctgagccaggtgcctggagaggccaaccccatcaacatggtgtccaagctgagccagctgaccagcctgctgagcagcattgaggacaaggtgaaggccctgctgcacgagggccctgagagcccccaccggcccagcctcatcccccctgtgacctttgaggtgaaggccgagagcctgggcatcccccagaagatgcagctgaaggtggatgtggagagcggcaagctgatcatcaagaagagcaaggatggcagcgaggacaagttctacagccacaagaagatcctgcagctgatcaagagccagaagttcctgaacaagctggtgatcctggtggagacagagaaggagaagatcctgaggaaggagtatgtgtttgctgacagcaagaagcgggagggcttctgccagctgctgcagcagatgaagaacaagcacagcgagcagcctgagccagacatgatcaccatcttcatcggcacctggaacatgggaaatgcccccccacccaagaagatcacctcctggttcctgagcaagggccagggcaagaccagagatgattctgctgactacatcccccatgacatctacgtgattggcacccaggaggaccccctgtctgagaaggagtggctggagatcctgaagcacagcctgcaggagatcacctctgtgaccttcaagacagtggccatccacaccctgtggaacatcagaattgtggtgctggccaagccagagcacgagaaccgcatcagccacatctgcacagacaacgtgaagacaggaattgccaacaccctgggcaacaagggagctgtgggcgtgtccttcatgttcaacggcaccagcctgggctttgtgaacagccacctgaccagcggcagcgagaagaagctgcggaggaaccagaactacatgaacatcctgcgcttcctggccctgggggacaagaagctgagccccttcaacatcacccaccgcttcacccacctgttctggtttggagacctgaactacagagtggacctgcccacctgggaggccgagaccatcatccagaagatcaagcagcagtag

SEQ ID NO: 156052 - DNA, 837 bp, synthetic construct
  misc_feature 1..837: note = Description of Artificial Sequence: Synthetic coding sequence
  source 1..837: mol_type = other DNA
tgacagaagaactggctgcgggagttctaccaggtggtgcacacccacaagccccacttcatggccctgcactgccaggagtttggaggcaagaactatgaggcctccatgagccacgtggacaagtttgtgaaggagctgctgagcagtgatgccatgaaggagtacaacagagcccgggtgtacctggatgagaactacaagagccaggagcacttcaccgccctgggcagcttctacttcctgcacgagagcctgaagaacatctaccagtttgacttcaaggccaagaagtacaggaaggtggccggcaaggagatctacagcgacaccctggagagcacccccatgctggagaaggagaagttcccccaggactacttccctgagtgcaagtggagcaggaagggcttcatccgcacccgctggtgcatcgctgactgtgcctttgacctggtgaacatccacctgttccatgatgccagcaacctggtggcctgggagaccagccccagcgtgtacagcggcatccgccacaaggccctgggctacgtgctggaccgcatcatcgaccagagatttgagaaggtgtcctactttgtgtttggagacttcaacttccggctggacagcaagtctgtggtggagctgctggagtttgacaaggagctgtctgtgttcaaggaccggctgtatgagctggacatctccttccccccatcctacccctacagtgaagatgcccggcagggcgagcagtacatgaacacccgctgcccagcctggtgtgaccgcatcctgatgagccccagcgccaaggagctggtgctgaggtag

SEQ ID NO: 156053 - DNA, 1164 bp, synthetic construct
  misc_feature 1..1164: note = Description of Artificial Sequence: Synthetic coding sequence
  source 1..1164: mol_type = other DNA
atggccggcaaggccgccgcccctggaacagctgtgctgctggtgacagccaacgtgggcagcctgtttgatgatcctgagaacctgcagaagaactggctgcgggagttctaccaggtggtgcacacccacaagccccacttcatggccctgcactgccaggagtttggaggcaagaactatgaggcctccatgagccacgtggacaagtttgtgaaggagctgctgagcagtgatgccatgaaggagtacaacagagcccgggtgtacctggatgagaactacaagagccaggagcacttcaccgccctgggcagcttctacttcctgcacgagagcctgaagaacatctaccagtttgacttcaaggccaagaagtacaggaaggtggccggcaaggagatctacagcgacaccctggagagcacccccatgctggagaaggagaagttcccccaggactacttccctgagtgcaagtggagcaggaagggcttcatccgcacccgctggtgcatcgctgactgtgcctttgacctggtgaacatccacctgttccatgatgccagcaacctggtggcctgggagaccagccccagcgtgtacagcggcatccgccacaaggccctgggctacgtgctggaccgcatcatcgaccagagatttgagaaggtgtcctactttgtgtttggagacttcaacttccggctggacagcaagtctgtggtggagaccctgtgcaccaaggccaccatgcagacagtgcgggctgctgacaccaatgaggtggtgaagctgatcttccgggagagtgacaatgacaggaaggtgatgctgcagctggagaagaagctgtttgactacttcaaccaggaggtgttccgggacaacaacggcacagccctgctggagtttgacaaggagctgagcgtcttcaaggaccggctgtatgagctggacatctccttcccccccagctacccctacagtgaagatgcccggcagggcgagcagtacatgaacacccgctgcccagcctggtgtgaccgcatcctgatgagccccagcgccaaggagctggtgctgcgggtgtctgtgtgctgccccagccctggccaccggggcatgtggagcgctggcagcggcctggcccagccctggtag

SEQ ID NO: 156054 - DNA, 1239 bp, synthetic construct
  misc_feature 1..1239: note = Description of Artificial Sequence: Synthetic coding sequence
  source 1..1239: mol_type = other DNA
atggccggcaaggccgccgcccctggaacagctgtgctgctggtgacagccaacgtgggcagcctgtttgatgatcctgagaacctgcagaagaactggctgcgggagttctaccaggtggtgcacacccacaagccccacttcatggccctgcactgccaggagtttggaggcaagaactatgaggcctccatgagccacgtggacaagtttgtgaaggagctgctgagcagtgatgccatgaaggagtacaacagagcccgggtgtacctggatgagaactacaagagccaggagcacttcaccgccctgggcagcttctacttcctgcacgagagcctgaagaacatctaccagtttgacttcaaggccaagaagtacaggaaggtggccggcaaggagatctacagcgacaccctggagagcacccccatgctggagaaggagaagttcccccaggactacttccctgagtgcaagtggagcaggaagggcttcatccgcacccgctggtgcatcgctgactgtgcctttgacctggtgaacatccacctgttccatgatgccagcaacctggtggcctgggagaccagccccagcgtgtacagcggcatccgccacaaggccctgggctacgtgctggaccgcatcatcgaccagagatttgagaaggtgtcctactttgtgtttggagacttcaacttccggctggacagcaagtctgtggtggagaccctgtgcaccaaggccaccatgcagacagtgcgggctgctgacaccaatgaggtggtgaagctgatcttccgggagagtgacaatgacaggaaggtgatgctgcagctggagaagaagctgtttgactacttcaaccaggaggtgttccgggacaacaacggcacagccctgctggagtttgacaaggagctgagcgtcttcaaggaccggctgtatgagctggacatctccttcccccccagctacccctacagtgaagatgcccggcagggcgagcagtacatgaacacccgctgcccagcctggtgtgaccgcatcctgatgagccccagcgccaaggagctggtgctgcggtctgagagcgaggagaaggtggtgacctatgaccacatcggccccaacgtgtgcatgggagaccacaagcctgtgttcctggccttccgcatcatgcctggggccggcaagccccacgcccacgtgcacaagtgctgcgtggtgcagtag

SEQ ID NO: 156055 - DNA, 558 bp, synthetic construct
  misc_feature 1..558: note = Description of Artificial Sequence: Synthetic coding sequence
  source 1..558: mol_type = other DNA
atggccggcaaggccgccgcccctggaacagctgtgctgctggtgacagccaacgtgggcagcctgtttgatgatcctgagaacctgcagaagaactggctgcgggagttctaccaggtggtgcacacccacaagccccacttcatggccctgcactgccaggagtttggaggcaagaactatgaggcctccatgagccacgtggacaagtttgtgaaggagctgctgagcagtgatgccatgaaggagtacaacagagcccgggtgtacctggatgagaactacaagagccaggagcacttcaccgccctgggcagcttctacttcctgcacgagagcctgaagaacatctaccagtttgacttcaaggccaagaagtacaggaaggtggccggcaaggagatctacagcgacaccctggagagcacccccatgctggagaaggagaagttcccccaggactacttccctgagcggcacgtgccccacaccagcctggaggccctgctgatcctgcacgaggacccccagctgcctgacccccacctgcccctgtag

SEQ ID NO: 156056 - DNA, 1068 bp, synthetic construct
  misc_feature 1..1068: note = Description of Artificial Sequence: Synthetic coding sequence
  source 1..1068: mol_type = other DNA
atggccggcaaggccgccgcccctggaacagctgtgctgctggtgacagccaacgtgggcagcctgtttgatgatcctgagaacctgcagaagaactggctgcgggagttctaccaggtggtgcacacccacaagccccacttcatggccctgcactgccaggagtttggaggcaagaactatgaggcctccatgagccacgtggacaagtttgtgaaggagctgctgagcagtgatgccatgaaggagtacaacagagcccgggtgtacctggatgagaactacaagagccaggagcacttcaccgccctgggcagcttctacttcctgcacgagagcctgaagaacatctaccagtttgacttcaaggccaagaagtacaggaaggtggccggcaaggagatctacagcgacaccctggagagcacccccatgctggagaaggagaagttcccccaggactacttccctgagtgcaagtggagcaggaagggcttcatccgcacccgctggtgcatcgctgactgtgcctttgacctggtgaacatccacctgttccatgatgccagcaacctggtggcctgggagaccagccccagcgtgtacagcggcatccgccacaaggccctgggctacgtgctggaccgcatcatcgaccagagatttgagaaggtgtcctactttgtgtttggagacttcaacttccggctggacagcaagtctgtggtggagctgctggagtttgacaaggagctgtctgtgttcaaggaccggctgtatgagctggacatctccttccccccatcctacccctacagtgaagatgcccggcagggcgagcagtacatgaacacccgctgcccagcctggtgtgaccgcatcctgatgagccccagcgccaaggagctggtgctgcggtctgagagcgaggagaaggtggtgacctatgaccacatcggccccaacgtgtgcatgggagaccacaagcctgtgttcctggccttccgcatcatgcctggagctgggaagccccacgcccacgtgcacaagtgctgcgtggtgcagtag

SEQ ID NO: 156057 - DNA, 417 bp, synthetic construct
  misc_feature 1..417: note = Description of Artificial Sequence: Synthetic coding sequence
  source 1..417: mol_type = other DNA
gtcacagccaacgtgggcagcctgtttgatgatcctgagaacctgcagaagaactggctgcgggagttctaccaggccctgggcagcttctacttcctgcacgagagcctgaagaacatctaccagtttgacttcaaggccaagaagtacaggaaggtggccggcaaggagatctacagcgacaccctggagagcacccccatgctggagaaggagaagttcccccaggactacttccctgagtgcaagtggagcaggaagggcttcatccgcacccgctggtgcatcgctgactgtgcctttgacctggtgaacatccacctgttccatgatgccagcaacctggtggcctgggagaccagccccagcgtgtacagcggcatccgccacaaggccctgggctacgtgctggactag

SEQ ID NO: 156058 - DNA, 990 bp, synthetic construct
  misc_feature 1..990: note = Description of Artificial Sequence: Synthetic coding sequence
  source 1..990: mol_type = other DNA
atgaaggagtacaacagagcccgggtgtacctggatgagaactacaagagccaggagcacttcaccgccctgggcagcttctacttcctgcacgagagcctgaagaacatctaccagtttgacttcaaggccaagaagtacaggaaggtggccggcaaggagatctacagcgacaccctggagagcacccccatgctggagaaggagaagttccccctgctgccccgggtgcagatggtgaagaagaggctgcacccagatgaggtgattgctgactgtgcctttgacctggtgaacatccacctgttccatgatgccagcaacctggtggcctgggagaccagccccagcgtgtacagcggcatccgccacaaggccctgggctacgtgctggaccgcatcatcgaccagagatttgagaaggtgtcctactttgtgtttggagacttcaacttccggctggacagcaagtctgtggtggagaccctgtgcaccaaggccaccatgcagacagtgcgggctgctgacaccaatgaggtggtgaagctgatcttccgggagagtgacaatgacaggaaggtgatgctgcagctggagaagaagctgtttgactacttcaaccaggaggtgttccgggacaacaatggaacagccctgctggagtttgacaaggagctgtctgtgttcaaggaccggctgtatgagctggacatctccttccccccatcctacccctacagtgaagatgcccggcagggcgagcagtacatgaacacccgctgcccagcctggtgtgaccgcatcctgatgagccccagcgccaaggagctggtgctgcggtctgagagcgaggagaaggtggtgacctatgaccacatcggccccaacgtgtgcatgggagaccacaagcctgtgttcctggccttccgcatcatgcctggagctgggaagccccacgcccacgtgcacaagtgctgcgtggtgcagtag

SEQ ID NO: 156059 - DNA, 315 bp, synthetic construct
  misc_feature 1..315: note = Description of Artificial Sequence: Synthetic coding sequence
  source 1..315: mol_type = other DNA
ctggacatctccttcccccccagctacccctacagtgaagatgcccggcagggcgagcagtacatgaacacccgctgcccagcctggtgtgaccgcatcctgatgagccccagcgccaaggagctggtgctgcggtctgagagcgaggagaaggtggtgacctatgaccacatcggccccaacgtgtgcatgggagaccacaagcctgtgttcctggccttccgcatcatgcctggggccggcaagcgctgccagagacatgagaggaccctgcgggagcccccctgcagccggggccccaacacccacagctag

SEQ ID NO: 156060 - DNA, 546 bp, synthetic construct
  misc_feature 1..546: note = Description of Artificial Sequence: Synthetic coding sequence
  source 1..546: mol_type = other DNA
gctgctgcccctggaacagctgtgctgctggtgacagccaacgtgggcagcctgtttgatgatcctgagaacctgcagaagaactggctgcgggagttctaccaggtggtgcacacccacaagccccacttcatggccctgcactgccaggagtttggaggcaagaactatgaggcctccatgagccacgtggacaagtttgtgaaggagctgctgagcagtgatgccatgaaggagtacaacagagcccgggtgtacctggatgagaactacaagagccaggagcacttcaccgccctgggcagcttctacttcctgcacgagagcctgaagaacatctaccagtttgacttcaaggccaagaagtacaggaaggtggccggcaaggagatctacagcgacaccctggagagcacccccatgctggagaaggagaagttcccccaggactacttccctgagcggcacgtgccccacaccagcctggaggccctgctgatcctgcacgaggacccccagctgcctgacccccacctgcccctgtag

SEQ ID NO: 156061 - DNA, 459 bp, synthetic construct
  misc_feature 1..459: note = Description of Artificial Sequence: Synthetic coding sequence
  source 1..459: mol_type = other DNA
atggccggcaaggccgccgcccctggaacagctgtgctgctggtgacagccaacgtgggcagcctgtttgatgatcctgagaacctgcagaagaactggctgcgggagttctaccaggccctgggcagcttctacttcctgcacgagagcctgaagaacatctaccagtttgacttcaaggccaagaagtacaggaaggtggccggcaaggagatctacagcgacaccctggagagcacccccatgctggagaaggagaagttcccccaggactacttccctgagtgcaagtggagcaggaagggcttcatccgcacccgctggtgcatcgctgactgtgcctttgacctggtgaacatccacctgttccatgatgccagcaacctggtggcctgggagaccagccccagcgtgtacagcggcatccgccacaaggccctgggctacgtgctggactag

SEQ ID NO: 156062 - DNA, 1935 bp, synthetic construct
  misc_feature 1..1935: note = Description of Artificial Sequence: Synthetic coding sequence
  source 1..1935: mol_type = other DNA
atgcccagcaaggccgagaacctgcggcccagcgagcccgccccccagcccccagagggccgcaccctgcagggccagctgcccggggcccccccagcccagagagctggcagccccccagatgcccctggcagcgagagccctgccctggcctgcagcaccccagccaccccatctggagaagatcctccagcccgggccgcccccatcgccccccggcccccagcccggccccggctggagcgggccctgagcctggatgacaagggctggaggagaagacgcttccggggcagccaggaggacctggaggccagaaatggcaccagccccagccggggctctgtgcagagcgagggccctggggccccagcccacagctgcagccccccctgcctgagcaccagcctgcaggagatccccaagagcagaggagtgctgagcagcgagcggggcagccccagcagcggcggcaaccccctgagcggcgtggccagcagcagccccaacctgccccacagagatgctgctgtggccggcagcagcccccggctgcccagcctgctgccccccaggcctcctccagccctgagcctggacatcgccagtgacagcctgaggacagccaacaaggtggacagcgacctggccgactacaagctgcgggcccagcccctgctggtgcgggcccacagcagcctgggccctggccggcccaggagccccctggcctgtgatgactgcagcctgcggagcgccaagagcagcttcagcctgctggcccccatccgcagcaaggatgtgcgcagccgcagctacctggagggcagcctgctggccagcggggccctgctgggcgcagatgagctggcccgctacttcccagacagaaatgtggccctgtttgtggccacctggaacatgcagggccagaaggagctgccccccagcctggatgagttcctgctgcctgctgaggccgactatgcccaggacctgtatgtgattggagtgcaggagggctgcagcgacagaagagagtgggagacccggctgcaggagaccctgggcccccactacgtgctgctgagcagcgctgcccacggcgtgctgtacatgagcctcttcatccggcgggacctgatctggttctgcagcgaggtggagtgcagcacagtgaccaccagaattgtgtcccagatcaagaccaagggggccctgggcatctccttcaccttcttcggcaccagcttcctgttcatcaccagccacttcaccagcggagatggcaaggtggccgagcggctgctggactacaccaggacagtgcaggccctggtgctgcccagaaatgtgcctgacaccaacccctaccgcagcagcgctgctgatgtgaccaccaggtttgatgaggtgttctggtttggagacttcaacttccggctgagcggcggccgcacagtggtggatgccctgctgtgccagggcctggtggtggatgtgcctgccctgctgcagcacgaccagctgatccgggagatgaggaagggcagcatcttcaagggcttccaggagccagacatccacttcctgcccagctacaagtttgacatcggcaaggacacctatgacagcaccagcaagcagaggacccccagctacacagacagagtgctgtaccgcagccgccacaagggggacatctgccctgtgtcctacagcagctgccccggcatcaagaccagtgaccacaggcctgtgtatggcctcttccgggtgaaggtgcggcccggccgggacaacatccccctggccgccggcaagtttgaccgggagctgtacctgctgggcatcaagaggcgcatcagcaaggagatccagaggcagcaggccctgcagagccagaacagcagcaccatctgcagcgtgtcctag

SEQ ID NO: 156063 - DNA, 960 bp, synthetic construct
  misc_feature 1..960: note = Description of Artificial Sequence: Synthetic coding sequence
  source 1..960: mol_type = other DNA
atggaccagagcgtggccatccaggagaccctggccgagggggagtactgtgtgattgctgtgcagggcgtgctgtgtgagggggacagccggcagagccggctgctgggcctggtgcgctaccgcctggagcacggcggccaggagcacgccctcttcctgtacacccacaggaggatggccatcactggagatgatgtgtccctggaccagatcgtgcctgtgtcccgggacttcaccctggaggaggtgtccccagatggagagctgtacatcctgggcagtgatgtgacagtgcagctggacacagctgagctgagcctggtgttccagctgcccttcggcagccagaccaggatgttcctgcacgaggtggcccgggcctgccccggctttgacagcgccacccgggaccctgagttcctgtggctgagccgctaccgctgtgccgagctggagctggagatgcccaccccccggggctgcaacagcgccctggtgacctggccaggctacgccaccatcggcggcggccgctaccccagcaggaagaagcgctggggcctggaggaggcccggccccagggcgccggctctgtgctcttctggggcggggccatggagaagacaggcttccggctgatggagcgggcccatggaggcggctttgtgtggggccgcagcgccagagatggaagaagagatgaggagctggaggaggccggccgggagatgtctgctgctgctggcagccgggagaggaacacagctggcagcgctgggggcggcaagctgggctggggcgccggccctggagctgctgtgcggcctgccctgggctgggccggcagcgctgtgtggcctgtggatgcccggggggaggaccagagccctgggggccccctggaggccggcaccctgggccagaagttctgtgatgtgctgctgcggcgggcctag

SEQ ID NO: 156064 - DNA, 2982 bp, synthetic construct
  misc_feature 1..2982: note = Description of Artificial Sequence: Synthetic coding sequence
  source 1..2982: mol_type = other DNA
atggaccagagcgtggccatccaggagaccctggccgagggggagtactgtgtgattgctgtgcagggcgtgctgtgtgagggggacagccggcagagccggctgctgggcctggtgcgctaccgcctggagcacggcggccaggagcacgccctcttcctgtacacccacaggaggatggccatcactggagatgatgtgtccctggaccagatcgtgcctgtgtcccgggacttcaccctggaggaggtgtccccagatggagagctgtacatcctgggcagtgatgtgacagtgcagctggacacagctgagctgagcctggtgttccagctgcccttcggcagccagaccaggatgttcctgcacgaggtggcccgggcctgccccggctttgacagcgccacccgggaccctgagttcctgtggctgagccgctaccgctgtgccgagctggagctggagatgcccaccccccggggctgcaacagcgccctggtgacctggccaggctacgccaccatcggcggcggccgctaccccagcaggaagaagcgctggggcctggaggaggcccggccccagggcgccggctctgtgctcttctggggcggggccatggagaagacaggcttccggctgatggagcgggcccatggaggcggctttgtgtggggccgcagcgccagagatggaagaagagatgaggagctggaggaggccggccgggagatgtctgctgctgctggcagccgggagaggaacacagctgggggcagcaactttgatggcctgcggcccaacgggaagggcgtgcccatggaccagagcagccggggccaggacaagccagagagcctgcagccccggcagaacaagagcaagtctgagatcacagacatggtgcgcagcagcaccatcaccgtgtctgacaaggcccacatcctgtccatgcagaagtttggcctgcgggacaccatcgtgaagagccacctgctgcagaaggaggaggactacacctacatccagaacttccgcttctttgctggcacctacaacgtgaatggccagagccccaaggaatgtctgcggctgtggctgagcaatggcatccaggccccagatgtgtactgtgtgggcttccaggagctggacctgagcaaggaggccttcttcttccatgacacccccaaggaggaggagtggttcaaggctgtgtctgagggcctgcacccagatgccaagtatgccaaggtgaagctgatccggctggtgggcatcatgctgctgctgtatgtgaagcaggagcacgccgcctacatcagcgaggtggaggccgagaccgtgggcaccggcatcatgggccgcatgggcaacaagggcggcgtggccatccgcttccagttccacaacaccagcatctgtgtggtgaacagccacctggccgcccacatcgaggagtatgaaagaagaaaccaggactacaaggacatctgcagcaggatgcagttctgccagcctgaccccagcctgccccccctgaccatcagcaaccatgatgtgatcctgtggctgggggacctgaactaccgcatcgaggagctggatgtggagaaggtgaagaagctgattgaggagaaggacttccagatgctgtatgcctatgaccagctgaagatccaggtggccgccaagacagtgtttgagggcttcacagaaggagagctgaccttccagcccacctacaagtatgacaccggcagtgatgactgggacaccagcgagaagtgccgggccccagcctggtgtgaccgcatcctgtggaagggcaagaacatcacccagctgagctaccagagccacatggccctgaagaccagtgaccacaagcctgtgtcctctgtgtttgacatcggcgtgcgggtggtgaatgatgagctgtacaggaagaccctggaggagatcgtgcgcagcctggacaagatggagaatgccaacatccccagcgtgtccctgagcaagcgggagttctgcttccagaatgtgaagtacatgcagctgaaggtggagagcttcaccatccacaacggccaggtgccctgccactttgagttcatcaacaagccagatgaggagagctactgcaagcagtggctgaatgccaaccccagccggggcttcctgctgcctgacagtgatgtggagattgacctggagctgtttgtgaacaagatgacagccaccaagctgaacagcggggaggacaagattgaggacatcctggtgctgcacctggaccggggcaaggactacttcctgtctgtgtctggcaactacctgcccagctgcttcggcagccccatccacaccctgtgctacatgagggagcccatcctggacctgcccctggagaccatcagcgagctgaccctgatgcctgtgtggacaggagatgatggcagccagctggacagccccatggagatccccaaggagctgtggatgatggtggactacctgtacagaaatgctgtgcagcaggaggacctcttccagcagcccggcctgcggagtgaatttgagcacatccgggactgcctggacaccggcatgattgacaacctgagcgccagcaaccacagcgtggccgaggccctgctgctcttcctggagagcctgcctgagcccgtcatctgctacagcacctaccacaactgcctggagtgcagcggcaactacacagccagcaagcaggtgatcagcaccctgcccatcttccacaagaatgtgttccactacctgatggccttcctgcgggagctgctgaagaacagcgccaagaaccacctggatgagaacatcctggccagcatcttcggcagcctgctgctgagaaatcctgctggccaccagaagctggacatgacagagaagaagaaggcccaggagttcatccaccagttcctgtgcaaccccctgtag

SEQ ID NO: 156065 - DNA, 2742 bp, synthetic construct
  misc_feature 1..2742: note = Description of Artificial Sequence: Synthetic coding sequence
  source 1..2742: mol_type = other DNA
atggaccagagcgtggccatccaggagaccctggccgagggggagtactgtgtgattgctgtgcagggcgtgctgtgtgagggggacagccggcagagccggctgctgggcctggtgcgctaccgcctggagcacggcggccaggagcacgccctcttcctgtacacccacaggaggatggccatcactggagatgatgtgtccctggaccagatcgtgcctgtgtcccgggacttcaccctggaggaggtgtccccagatggagagctgtacatcctgggcagtgatgtgacagtgcagctggacacagctgagctgagcctggtgttccagctgcccttcggcagccagaccaggatgttcctgcacgaggtggcccgggcctgccccggctttgacagcgccacccgggaccctgagttcctgtggctgagccgctaccgctgtgccgagctggagctggagatgcccaccccccggggctgcaacagcgccctggtgacctggccaggctacgccaccatcggcggcggcggcagcaactttgatggcctgcggcccaacgggaagggcgtgcccatggaccagagcagccggggccaggacaagccagagagcctgcagccccggcagaacaagagcaagtctgagatcacagacatggtgcgcagcagcaccatcaccgtgtctgacaaggcccacatcctgtccatgcagaagtttggcctgcgggacaccatcgtgaagagccacctgctgcagaaggaggaggactacacctacatccagaacttccgcttctttgctggcacctacaacgtgaatggccagagccccaaggaatgtctgcggctgtggctgagcaatggcatccaggccccagatgtgtactgtgtgggcttccaggagctggacctgagcaaggaggccttcttcttccatgacacccccaaggaggaggagtggttcaaggctgtgtctgagggcctgcacccagatgccaagtatgccaaggtgaagctgatccggctggtgggcatcatgctgctgctgtatgtgaagcaggagcacgccgcctacatcagcgaggtggaggccgagaccgtgggcaccggcatcatgggccgcatgggcaacaagggcggcgtggccatccgcttccagttccacaacaccagcatctgtgtggtgaacagccacctggccgcccacatcgaggagtatgaaagaagaaaccaggactacaaggacatctgcagcaggatgcagttctgccagcctgaccccagcctgccccccctgaccatcagcaaccatgatgtgatcctgtggctgggggacctgaactaccgcatcgaggagctggatgtggagaaggtgaagaagctgattgaggagaaggacttccagatgctgtatgcctatgaccagctgaagatccaggtggccgccaagacagtgtttgagggcttcacagaaggagagctgaccttccagcccacctacaagtatgacaccggcagtgatgactgggacaccagcgagaagtgccgggccccagcctggtgtgaccgcatcctgtggaagggcaagaacatcacccagctgagctaccagagccacatggccctgaagaccagtgaccacaagcctgtgtcctctgtgtttgacatcggcgtgcgggtggtgaatgatgagctgtacaggaagaccctggaggagatcgtgcgcagcctggacaagatggagaatgccaacatccccagcgtgtccctgagcaagcgggagttctgcttccagaatgtgaagtacatgcagctgaaggtggagagcttcaccatccacaacggccaggtgccctgccactttgagttcatcaacaagccagatgaggagagctactgcaagcagtggctgaatgccaaccccagccggggcttcctgctgcctgacagtgatgtggagattgacctggagctgtttgtgaacaagatgacagccaccaagctgaacagcggggaggacaagattgaggacatcctggtgctgcacctggaccggggcaaggactacttcctgtctgtgtctggcaactacctgcccagctgcttcggcagccccatccacaccctgtgctacatgagggagcccatcctggacctgcccctggagaccatcagcgagctgaccctgatgcctgtgtggacaggagatgatggcagccagctggacagccccatggagatccccaaggagctgtggatgatggtggactacctgtacagaaatgctgtgcagcaggaggacctcttccagcagcccggcctgcggagtgaatttgagcacatccgggactgcctggacaccggcatgattgacaacctgagcgccagcaaccacagcgtggccgaggccctgctgctcttcctggagagcctgcctgagcccgtcatctgctacagcacctaccacaactgcctggagtgcagcggcaactacacagccagcaagcaggtgatcagcaccctgcccatcttccacaagaatgtgttccactacctgatggccttcctgcgggagctgctgaagaacagcgccaagaaccacctggatgagaacatcctggccagcatcttcggcagcctgctgctgagaaatcctgctggccaccagaagctggacatgacagagaagaagaaggcccaggagttcatccaccagttcctgtgcaaccccctgtag

SEQ ID NO: 156066 - DNA, 2982 bp, synthetic construct; identical to SEQ ID NO: 156064
  misc_feature 1..2982: note = Description of Artificial Sequence: Synthetic coding sequence
  source 1..2982: mol_type = other DNA

SEQ ID NO: 156067 - DNA, 2250 bp, synthetic construct
  misc_feature 1..2250: note = Description of Artificial Sequence: Synthetic coding sequence
  source 1..2250: mol_type = other DNA
atgtctgctgctgctggcagccgggagaggaacacagctgggggcagcaactttgatggcctgcggcccaacgggaagggcgtgcccatggaccagagcagccggggccaggacaagccagagagcctgcagccccggcagaacaagagcaagtctgagatcacagacatggtgcgcagcagcaccatcaccgtgtctgacaaggcccacatcctgtccatgcagaagtttggcctgcgggacaccatcgtgaagagccacctgctgcagaaggaggaggactacacctacatccagaacttccgcttctttgctggcacctacaacgtgaatggccagagccccaaggaatgtctgcggctgtggctgagcaatggcatccaggccccagatgtgtactgtgtgggcttccaggagctggacctgagcaaggaggccttcttcttccatgacacccccaaggaggaggagtggttcaaggctgtgtctgagggcctgcacccagatgccaagtatgccaaggtgaagctgatccggctggtgggcatcatgctgctgctgtatgtgaagcaggagcacgccgcctacatcagcgaggtggaggccgagaccgtgggcaccggcatcatgggccgcatgggcaacaagggcggcgtggccatccgcttccagttccacaacaccagcatctgtgtggtgaacagccacctggccgcccacatcgaggagtatgaaagaagaaaccaggactacaaggacatctgcagcaggatgcagttctgccagcctgaccccagcctgccccccctgaccatcagcaaccatgatgtgatcctgtggctgggggacctgaactaccgcatcgaggagctggatgtggagaaggtgaagaagctgattgaggagaaggacttccagatgctgtatgcctatgaccagctgaagatccaggtggccgccaagacagtgtttgagggcttcacagaaggagagctgaccttccagcccacctacaagtatgacaccggcagtgatgactgggacaccagcgagaagtgccgggccccagcctggtgtgaccgcatcctgtggaagggcaagaacatcacccagctgagctaccagagccacatggccctgaagaccagtgaccacaagcctgtgtcctctgtgtttgacatcggcgtgcgggtggtgaatgatgagctgtacaggaagaccctggaggagatcgtgcgcagcctggacaagatggagaatgccaacatccccagcgtgtccctgagcaagcgggagttctgcttccagaatgtgaagtacatgcagctgaaggtggagagcttcaccatccacaacggccaggtgccctgccactttgagttcatcaacaagccagatgaggagagctactgcaagcagtggctgaatgccaaccccagccggggcttcctgctgcctgacagtgatgtggagattgacctggagctgtttgtgaacaagatgacagccaccaagctgaacagcggggaggacaagattgaggacatcctggtgctgcacctggaccggggcaaggactacttcctgtctgtgtctggcaactacctgcccagctgcttcggcagccccatccacaccctgtgctacatgagggagcccatcctggacctgcccctggagaccatcagcgagctgaccctgatgcctgtgtggacaggagatgatggcagccagctggacagccccatggagatccccaaggagctgtggatgatggtggactacctgtacagaaatgctgtgcagcaggaggacctcttccagcagcccggcctgcggagtgaatttgagcacatccgggactgcctggacaccggcatgattgacaacctgagcgccagcaaccacagcgtggccgaggccctgctgctcttcctggagagcctgcctgagcccgtcatctgctacagcacctaccacaactgcctggagtgcagcggcaactacacagccagcaagcaggtgatcagcaccctgcccatcttccacaagaatgtgttccactacctgatggccttcctgcgggagctgctgaagaacagcgccaagaaccacctggatgagaacatcctggccagcatcttcggcagcctgctgctgagaaatcctgctggccaccagaagctggacatgacagagaagaagaaggcccaggagttcatccaccagttcctgtgcaaccccctgtag

SEQ ID NO: 156068 - DNA, 2487 bp, synthetic construct
  misc_feature 1..2487: note = Description of Artificial Sequence: Synthetic coding sequence
  source 1..2487: mol_type = other DNA
atggaccagagcgtggccatccaggagaccctggccgagggggagtactgtgtgattgctgtgcagggcgtgctgtgtgagggggacagccggcagagccggctgctgggcctggtgcgctaccgcctggagcacggcggccaggagcacgccctcttcctgtacacccacaggaggatggccatcactggagatgatgtgtccctggaccagatcgtgcctgtgtcccgggacttcaccctggaggaggtgtccccagatggagagctgtacatcctgggcagtgatgtgacagtgcagctggacacagctgagctgagcctggtgttccagctgcccttcggcagccagaccaggatgttcctgcacgaggtggcccgggcctgccccggctttgacagcgccacccgggaccctgagttcctgtggctgagccgctaccgctgtgccgagctggagctggagatgcccaccccccggggctgcaacagcgccctggtgacctggccaggctacgccaccatcggcggcggccgctaccccagcaggaagaagcgctggggcctggaggaggcccggccccagggcgccggctctgtgctcttctggggcggggccatggagaagacaggcttccggctgatggagcgggcccatggaggcggctttgtgtggggccgcagcgccagagatggaagaagagatgaggagctggaggaggccggccgggagatgtctgctgctgctggcagccgggagaggaacacagctgggggcagcaactttgatggcctgcggcccaacgggaagggcgtgcccatggaccagagcagccggggccaggacaagccagagagcctgcagccccggcagaacaagagcaagtctgagatcacagacatggtgcgcagcagcaccatcaccgtgtctgacaaggcccacatcctgtccatgcagaagtttggcctgcgggacaccatcgtgaagagccacctgctgcagaaggaggaggactacacctacatccagaacttccgcttctttgctggcacctacaacgtgaatggccagagccccaaggaatgtctgcggctgtggctgagcaatggcatccaggccccagatgtgtactgtgtgggcttccaggagctggacctgagcaaggaggccttcttcttccatgacacccccaaggaggaggagtggttcaaggctgtgtctgagggcctgcacccagatgccaagtatgccaaggtgaagctgatccggctggtgggcatcatgctgctgctgtatgtgaagcaggagcacgccgcctacatcagcgaggtggaggccgagaccgtgggcaccggcatcatgggccgcatgggcaacaagggcggcgtggccatccgcttccagttccacaacaccagcatctgtgtggtgaacagccacctggccgcccacatcgaggagtatgaaagaagaaaccaggactacaaggacatctgcagcaggatgcagttctgccagcctgaccccagcctgccccccctgaccatcagcaaccatgatgtgatcctgtggctgggggacctgaactaccgcatcgaggagctggatgtggagaaggtgaagaagctgattgaggagaaggacttccagatgctgtatgcctatgaccagctgaagatccaggtggccgccaagacagtgtttgagggcttcacagaaggagagctgaccttccagcccacctacaagtatgacaccggcagtgatgactgggacaccagcgagaagtgccgggccccagcctggtgtgaccgcatcctgtggaagggcaagaacatcacccagctgagctaccagagccacatggccctgaagaccagtgaccacaagcctgtgtcctctgtgtttgacatcggcgtgcgggtggtgaatgatgagctgtacaggaagaccctggaggagatcgtgcgcagcctggacaagatggagaatgccaacatccccagcgtgtccctgagcaagcgggagttctgcttccagaatgtgaagtacatgcagctgaaggtggagagcttcaccatccacaacggccaggtgccctgccactttgagttcatcaacaagccagatgaggagagctactgcaagcagtggctgaatgccaaccccagccggggcttcctgctgcctgacagtgatgtggagattgacctggagctgtttgtgaacaagatgacagccaccaagctgaacagcggggaggacaagattgaggacatcctggtgctgcacctggaccggggcaaggactacttcctgtctgtgtctggcaactacctgcccagctgcttcggcagccccatccacaccctgtgctacatgagggagcccatcctggacctgcccctggagaccatcagcgagctgctggcctacctggccgcctactgctttgagacccagctggtgaccaagagcctcatctag

SEQ ID NO: 156069 - DNA, 528 bp, synthetic construct
  misc_feature 1..528: note = Description of Artificial Sequence: Synthetic coding sequence
  source 1..528: mol_type = other DNA
atgcagaagtttggcctgcgggacaccatcgtgaagagccacctgctgcagaaggaggaggactacacctacatccagaacttccgcttctttgctggcacctacaacgtgaatggccagagccccaaggagtgcctgcggctgtggctgagcaatggcatccaggccccagatgtgtactgtgtgggcttccaggagctggacctgagcaaggaggccttcttcttccatgacacccccaaggaggaggagtggttcaaggctgtgtctgagggcctgcacccagatgccaagtatgccaaggtgaagctgatccggctggtgggcatcatgctgctgctgtatgtgaagcaggagcacgccgcctacatcagcgaggtggaggccgagaccgtgggcaccggcatcatgggccgcatgtgtgacctggtggccggcggcccccagctgcaggacagaagagctggctgcggcaagtctgagaaggcccacagaagagagggcctgagcaatgctgtgtgcatctag

SEQ ID NO: 156070 - DNA, 834 bp, synthetic construct
  misc_feature 1..834: note = Description of Artificial Sequence: Synthetic coding sequence
  source 1..834: mol_type = other DNA
atggctgacccctggcaggagtgcatggactatgctgtgaccctggcccggcaggccggggaggtggtgtgtgaggccatcaagaatgagatgaatgtgatgctgaagagcagccctgtggacctggtgacagccacagaccagaaggtggagaagatgctgatcagcagcatcaaggagaagtaccccagccacagcttcatcggggaggagagcgtggccgccggggagaagagcatcctgacagacaaccccacctggatcatcgaccccattgatggcaccaccaactttgtgcaccgcttcccctttgtggccgtgtccattggatttgctgtgaacaagaagattgaatttggagtggtgtacagctgtgtggagggcaagatgtacacagccaggaaaggaaaaggagccttctgcaatggccagaagctgcaggtgtcccagcaggaggacatcaccaagagcctgctggtgacagagctgggcagcagcaggaccccagagaccgtgaggatggtgctgagcaacatggagaagctgttctgcatccctgtgcacggcatccgctctgtgggcacagctgctgtgaacatgtgcctggtggccactggaggagcagatgcctactatgagatgggcatccactgctgggatgtggccggggccggcatcatcgtgacagaagctggaggagtgctgatggatgtgactggaggcccctttgacctgatgagccggcgggtgattgctgccaacaaccgcatcctggccgagcgcatcgccaaggagatccaggtgatccccctgcagagagatgatgaggactag

SEQ ID NO: 156071 - DNA, 597 bp, synthetic construct
  misc_feature 1..597: note = Description of Artificial Sequence: Synthetic coding sequence
  source 1..597: mol_type = other DNA
atggctgacccctggcaggagtgcatggactatgctgtgaccctggcccggcaggccggggaggtggtgtgtgaggccatcaagaatgagatgaatgtgatgctgaagagcagccctgtggacctggtgacagccacagaccagaaggtggagaagatgctgatcagcagcatcaaggagaagtaccccagccacagcttcatcggggaggagagcgtggccgccggggagaagagcatcctgacagacaaccccacctggatcatcgaccccattgatggcaccaccaactttgtgcaccgcttcccctttgtggccgtgtccattggatttgctgtgaacaagaagattgaatttggagtggtgtacagctgtgtggagggcaagatgtacacagccaggaaaggaaaaggagccttctgcaatggccagaagctgcaggtgtcccagcaggagggcagcggcgtgctggagcagcagctgctgatctgtgccctgtggcagctggccgagcagatgcacatcatgaagtgggagttcaccgctggcatgctgcaggagctggccctgctgctgctgaagctggtggcctgctag

SEQ ID NO: 156072 - DNA, 1011 bp, synthetic construct
  misc_feature 1..1011: note = Description of Artificial Sequence: Synthetic coding sequence
  source 1..1011: mol_type = other DNA
atgggccagaggcctggccctgtgctgcctgctgtggccgtgctgggccaggtggccaagaggaaggtggcctggctgctgcgctggaaggctgtgaccaggacagaaacagctggcaacagcagcggcgtgtatggctttgggaagatgaagatctttgtgaagtacttccagaagatggctgacccctggcaggagtgcatggactatgctgtgaccctggcccggcaggccggggaggtggtgtgtgaggccatcaagaatgagatgaatgtgatgctgaagagcagccctgtggacctggtgacagccacagaccagaaggtggagaagatgctgatcagcagcatcaaggagaagtaccccagccacagcttcatcggggaggagagcgtggccgccggggagaagagcatcctgacagacaaccccacctggatcatcgaccccattgatggcaccaccaactttgtgcaccgcttcccctttgtggccgtgtccatcggctttgctgtgaacaagaagattgaatttggagtggtgtacagctgtgtggagggcaagatgtacacagccaggaagggcaagggggccttctgcaatggccagaagctgcaggtgtcccagcaggaggacatcaccaagagcctgctggtgacagagctgggcagcagcaggaccccagagaccgtgaggatggtgctgagcaacatggagaagctgttctgcatccctgtgcacggcatccgctctgtgggcacagctgctgtgaacatgtgcctggtggccaccggcggcgcagatgcctactatgagatgggcatccactgctgggatgtggccggggccggcatcatcgtgacagaggccggcggcgtgctgatggatgtgactggaggcccctttgacctgatgagcagaagagtgattgctgccaacaaccgcatcctggccgagagaattgccaaggagatccaggtgatccccctgcagagagatgatgaagattag

SEQ ID NO: 156073 - DNA, 462 bp, synthetic construct
  misc_feature 1..462: note = Description of Artificial Sequence: Synthetic coding sequence
  source 1..462: mol_type = other DNA
atggctgacccctggcaggagtgcatggactatgctgtgaccctggcccggcaggccggggaggtggtgtgtgaggccatcaagaatgagatgaatgtgatgctgaagagcagccctgtggacctggtgacagccacagaccagaaggtggagaagatgctgatcagcagcatcaaggagaagtaccccagccaccgcttcccctttgtggccgtgtccatcggctttgctgtgaacaagaagattgaatttggagtggtgtacagctgtgtggagggcaagatgtacacagccaggaagggcaagggggccttctgcaatggccagaagctgcaggtgtcccagcaggaggacatcaccaagagcctgctggtgacagagctgggcagcagcaggaccccagagaccgtgaggatggtgctgagcaacatggagaagctgttctgcatccctgtgcactag

SEQ ID NO: 156074 - DNA, 636 bp, synthetic construct
  misc_feature 1..636: note = Description of Artificial Sequence: Synthetic coding sequence
  source 1..636: mol_type = other DNA
atgggccagaggcctggccctgtgctgcctgctgtggccgtgctgggccaggtggccaagaggaaggtggcctggctgctgcgctggaaggctgtgaccaggacagaaacagctggcaacagcagcggcgtgtatggctttgggaagatgaagatctttgtgaagtacttccagaagatggctgacccctggcaggagtgcatggactatgctgtgaccctggcccggcaggccggggaggtggtgtgtgaggccatcaagaatgagatgaatgtgatgctgaagagcagccctgtggacctggtgacagccacagaccagaaggtggagaagatgctgatcagcagcatcaaggagaagtaccccagccacagcttcatcggggaggagagcgtggccgccggggagaagagcatcctgacagacaaccccacctggatcatcgaccccattgatggcaccaccaactttgtgcaccgcttcccctttgtggccgtgtccatcggctttgctgtgaacaagaagattgaatttggagtggtgtacagctgtgtggagggcaagatgtacacagccaggaagggcaagggggccttctgcaatggccagaagctgcaggtgtcccagcaggagtag

SEQ ID NO: 156075 - DNA, 867 bp, synthetic construct
  misc_feature 1..867: note = Description of Artificial Sequence: Synthetic coding sequence
  source 1..867: mol_type = other DNA
atgaagcccagcggggaggaccaggccgccctggccgccggcccctgggaggagtgcttccaggccgctgtgcagctggccctgcgggccggccagatcatcaggaaggccctgacagaggagaagagggtgtccaccaagaccagcgctgctgacctggtgacagaaacagaccacctggtggaggacctgatcatcagcgagctgcgggagcgcttccccagccaccgcttcatcgccgaggaggccgccgccagcggggccaagtgtgtgctgacccacagccccacctggatcatcgaccccattgatggcacctgcaactttgtgcaccgcttccccaccgtggccgtgtccatcggctttgctgtgcggcaggagctggagtttggagtcatctaccactgcacagaggagcggctgtacacaggaagaagaggccgcggggccttctgcaatggccagaggctgcgggtgtctggagaaacagacctgagcaaggccctggtgctgacagagatcggccccaagagggaccctgccaccctgaagctgttcctgagcaacatggagcggctgctgcacgccaaggcccatggagtgcgggtcatcggcagcagcaccctggccctgtgccacctggccagcggggctgctgatgcctactaccagtttggcctgcactgctgggacctggccgccgccaccgtcatcatccgggaggccggcggcatcgtgattgacaccagcggcggccccctggacctgatggcctgccgggtggtggccgccagcacccgggagatggccatgctgattgcccaggccctgcagaccatcaactacggcagagatgatgagaagtag

SEQ ID NO: 156076 - DNA, 258 bp, synthetic construct
  misc_feature 1..258: note = Description of Artificial Sequence: Synthetic coding sequence
  source 1..258: mol_type = other DNA
atgaagcccagcggggaggaccaggccgccctggccgccggcccctgggaggagtgcttccaggccgctgtgcagctggccctgcgggccggccagatcatcaggaaggccctgacagaggagaagagggtgtccaccaagaccagcgctgctgacctggtgacagaaacagaccacctggtggaggacctgatcatcagcgagctgcgggagcgcttccccagccacaggagccccttcagcctggtgcacatgtag

SEQ ID NO: 156077 - DNA, 1071 bp, synthetic construct
  misc_feature 1..1071: note = Description of Artificial Sequence: Synthetic coding sequence
  source 1..1071: mol_type = other DNA
atgctggagcagatccggcgggacatccgggacttccgcagcagcgctggcctggacaaggtgattgtgctgtggacagccaacacagagcgcttctgtgaggtgattcctggcctgaatgacacagctgagaacctgctgcggaccatcgagctgggcctggaggtgagccccagcaccctgtttgctgtggccagcatcctggagggctgtgccttcctgaatggcagcccccagaacaccctggtgcctggggccctggagctggcctggcagcaccgggtgtttgtgggcggagatgacttcaagagcggccagaccaaggtgaagtctgtgctggtggacttcctgattggcagcggcctgaagaccatgagcatcgtgtcctacaaccacctgggcaacaatgatggagagaacctgagcgcccccctgcagttccgcagcaaggaggtgtccaagagcaatgtggtggatgacatggtgcagagcaaccctgtgctgtacaccccaggagaggagccagaccactgtgtggtgatcaagtatgtgccctacgtgggggacagcaagagggccctggatgagtacaccagcgagctgatgctgggcggcaccaacaccctggtgctgcacaacacctgtgaggacagcctgctggccgcccccatcatgctggacctggccctgctgacagagctgtgccagagggtgtccttctgcacagacatggaccctgagccccagaccttccaccctgtgctgagcctgctgtccttcctgttcaaggcccccctggtgcccccaggcagccctgtggtgaatgccctcttccggcagaggagctgcatcgagaacatcctgcgggcctgtgtgggcctgcccccccagaaccacatgctgctggagcacaagatggagaggcctggccccagcctgaagagggtgggccctgtggccgccacctaccccatgctgaacaagaagggccctgtgcctgctgccaccaacggctgcacaggagatgccaacggccacctgcaggaggagccccccatgcccaccacctag

SEQ ID NO: 156078 - DNA, 1677 bp, synthetic construct
  misc_feature 1..1677: note = Description of Artificial Sequence: Synthetic coding sequence
  source 1..1677: mol_type = other DNA
atggaggccgccgcccagttctttgtggagagcccagatgtggtgtatggccctgaggccatcgaggcccagtatgagtaccgcaccaccagggtgtcccgggagggcggcgtgctgaaggtgcaccccaccagcacccgcttcaccttcagaacagcccggcaggtgccccggctgggcgtgatgctggtgggctggggcggcaacaacggcagcaccctgacagctgctgtgctggccaaccggctgcggctgtcctggcccaccaggagcggcaggaaggaggccaactactacggcagcctgacccaggccggcaccgtgtccctgggcctggatgctgagggccaggaggtgtttgtgcccttctctgctgtgctgcccatggtggccccaaatgacctggtgtttgatggctgggacatcagcagcctgaacctggccgaggccatgaggcgggccaaggtgctggactggggcctgcaggagcagctgtggccccacatggaggccctgcggccccggcccagcgtgtacatccctgagttcatcgccgccaaccagagcgcccgggctgacaacctgatccctggcagccgggcccagcagctggagcagatccggcgggacatccgggacttccgcagcagcgctggcctggacaaggtgattgtgctgtggacagccaacacagagcgcttctgtgaggtgattcctggcctgaatgacacagctgagaacctgctgcggaccatcgagctgggcctggaggtgagccccagcaccctgtttgctgtggccagcatcctggagggctgtgccttcctgaatggcagcccccagaacaccctggtgcctggggccctggagctggcctggcagcaccgggtgtttgtgggcggagatgacttcaagagcggccagaccaaggtgaagtctgtgctggtggacttcctgattggcagcggcctgaagaccatgagcatcgtgtcctacaaccacctgggcaacaatgatggagagaacctgagcgcccccctgcagttccgcagcaaggaggtgtccaagagcaatgtggtggatgacatggtgcagagcaaccctgtgctgtacaccccaggagaggagccagaccactgtgtggtgatcaagtatgtgccctacgtgggggacagcaagagggccctggatgagtacaccagcgagctgatgctgggcggcaccaacaccctggtgctgcacaacacctgtgaggacagcctgctggccgcccccatcatgctggacctggccctgctgacagagctgtgccagagggtgtccttctgcacagacatggaccctgagccccagaccttccaccctgtgctgagcctgctgtccttcctgttcaaggcccccctggtgcccccaggcagccctgtggtgaatgccctcttccggcagaggagctgcatcgagaacatcctgcgggcctgtgtgggcctgcccccccagaaccacatgctgctggagcacaagatggagaggcctggccccagcctgaagagggtgggccctgtggccgccacctaccccatgctgaacaagaagggccctgtgcctgctgccaccaacggctgcacaggagatgccaacggccacctgcaggaggagccccccatgcccaccacctag

SEQ ID NO: 156079 - DNA, 1515 bp, synthetic construct
  misc_feature 1..1515: note = Description of Artificial Sequence: Synthetic coding sequence
  source 1..1515: mol_type = other DNA
atggaggccgccgcccagttctttgtggagagcccagatgtggtgtatggccctgaggccatcgaggcccagtatgagtaccgcaccaccagggtgtcccgggagggcggcgtgctgaaggaggccaactactacggcagcctgacccaggccggcaccgtgtccctgggcctggatgctgagggccaggaggtgtttgtgcccttctctgctgtgctgcccatggtggccccaaatgacctggtgtttgatggctgggacatcagcagcctgaacctggccgaggccatgaggcgggccaaggtgctggactggggcctgcaggagcagctgtggccccacatggaggccctgcggccccggcccagcgtgtacatccctgagttcatcgccgccaaccagagcgcccgggctgacaacctgatccctggcagccgggcccagcagctggagcagatccggcgggacatccgggacttccgcagcagcgctggcctggacaaggtgattgtgctgtggacagccaacacagagcgcttctgtgaggtgattcctggcctgaatgacacagctgagaacctgctgcggaccatcgagctgggcctggaggtgagccccagcaccctgtttgctgtggccagcatcctggagggctgtgccttcctgaatggcagcccccagaacaccctggtgcctggggccctggagctggcctggcagcaccgggtgtttgtgggcggagatgacttcaagagcggccagaccaaggtgaagtctgtgctggtggacttcctgattggcagcggcctgaagaccatgagcatcgtgtcctacaaccacctgggcaacaatgatggagagaacctgagcgcccccctgcagttccgcagcaaggaggtgtccaagagcaatgtggtggatgacatggtgcagagcaaccctgtgctgtacaccccaggagaggagccagaccactgtgtggtgatcaagtatgtgccctacgtgggggacagcaagagggccctggatgagtacaccagcgagctgatgctgggcggcaccaacaccctggtgctgcacaacacctgtgaggacagcctgctggccgcccccatcatgctggacctggccctgctgacagagctgtgccagagggtgtccttctgcacagacatggaccctgagccccagaccttccaccctgtgctgagcctgctgtccttcctgttcaaggcccccctggtgcccccaggcagccctgtggtgaatgccctcttccggcagaggagctgcatcgagaacatcctgcgggcctgtgtgggcctgcccccccagaaccacatgctgctggagcacaagatggagaggcctggccccagcctgaagagggtgggccctgtggccgccacctaccccatgctgaacaagaagggccctgtgcctgctgccaccaacggctgcacaggagatgccaacggccacctgcaggaggagccccccatgcccaccacctag

SEQ ID NO: 156080 - DNA, 1227 bp, synthetic construct
  misc_feature 1..1227: note = Description of Artificial Sequence: Synthetic coding sequence
  source 1..1227: mol_type = other DNA
atgaggcgggccaaggtgctggactggggcctgcaggagcagctgtggccccacatggaggccctgcggccccggcccagcgtgtacatccctgagttcatcgccgccaaccagagcgcccgggctgacaacctgatccctggcagccgggcccagcagctggagcagatccggcgggacatccgggacttccgcagcagcgctggcctggacaaggtgattgtgctgtggacagccaacacagagcgcttctgtgaggtgattcctggcctgaatgacacagctgagaacctgctgcggaccatcgagctgggcctggaggtgagccccagcaccctgtttgctgtggccagcatcctggagggctgtgccttcctgaatggcagcccccagaacaccctggtgcctggggccctggagctggcctggcagcaccgggtgtttgtgggcggagatgacttcaagagcggccagaccaaggtgaagtctgtgctggtggacttcctgattggcagcggcctgaagaccatgagcatcgtgtcctacaaccacctgggcaacaatgatggagagaacctgagcgcccccctgcagttccgcagcaaggaggtgtccaagagcaatgtggtggatgacatggtgcagagcaaccctgtgctgtacaccccaggagaggagccagaccactgtgtggtgatcaagtatgtgccctacgtgggggacagcaagagggccctggatgagtacaccagcgagctgatgctgggcggcaccaacaccctggtgctgcacaacacctgtgaggacagcctgctggccgcccccatcatgctggacctggccctgctgacagagctgtgccagagggtgtccttctgcacagacatggaccctgagccccagaccttccaccctgtgctgagcctgctgtccttcctgttcaaggcccccctggtgcccccaggcagccctgtggtgaatgccctcttccggcagaggagctgcatcgagaacatcctgcgggcctgtgtgggcctgcccccccagaaccacatgctgctggagcacaagatggagaggcctggccccagcctgaagagggtgggccctgtggccgccacctaccccatgctgaacaagaagggccctgtgcctgctgccaccaacggctgcacaggagatgccaacggccacctgcaggaggagccccccatgcccaccacctag

SEQ ID NO: 156081 - DNA, 1386 bp, synthetic construct
  misc_feature 1..1386: note = Description of Artificial Sequence: Synthetic coding sequence
  source 1..1386: mol_type = other DNA
atgaccctgcccggcggccccaccggcatggcccggcctggaggagcccggccctgcagccctggcctggagcgggccccccggcgctctgtgggggagctgcggctgctgtttgaggcccgctgtgccgctgtggccgctgctgctgctgctggggagccccgggcccggggggccaagagaagaggaggccaggtgcccaacggcctgccccgggcccccccagcccctgtgatcccccagctgactgtgacagctgaggagccagatgtgccccccaccagccctggccccccagagcgggagcgggactgcctgcctgctgctggcagcagccacctgcagcagccccggcggctgagcaccagctctgtgagcagcacaggcagcagcagcctgctggaggacagtgaagatgacctgctgagtgacagcgagagccgcagcagaggaaatgtgcagctggaggccggagaagatgtgggccagaagaaccactggcagaagatccgcaccatggtgaacctgcctgtgatcagccccttcaagaagagatatgcctgggtgcagctggccggccacacaggcagcttcaaggctgctggcaccagcggcctcatcctgaagcgctgcagcgagcctgagcgctactgcctggcccggctgatggctgatgccctgcggggctgtgtgcctgccttccatggagtggtggagagagatggagagagctacctgcagctgcaggacctgctggatggctttgatggcccctgtgtgctggactgcaagatgggcgtgaggacctacctggaggaggagctgaccaaggcccgggagcggcccaagctgaggaaggacatgtacaagaagatgctggccgtggaccctgaggcccccacagaggaggagcacgcccagagagctgtgaccaagccccgctacatgcagtggagggagggcatcagcagcagcaccaccctgggcttccgcatcgagggcatcaagaaggcagatggcagctgcagcacagacttcaagaccaccaggagccgggagcaggtgctgcgggtgtttgaggagtttgtgcagggagatgaggaggtgctgcggcgctacctgaaccggctgcagcagatccgggacaccctggaggtgtctgagttcttcagaagacatgaagtcatcggcagcagcctgctgtttgtgcatgaccactgccaccgggccggcgtgtggctgattgactttgggaagaccacccccctgcctgatggccagatcctggaccaccggcggccctgggaggagggcaacagagaagatggctacctgctgggcctggacaacctgattggcatcctggccagcctggccgagaggtag

SEQ ID NO: 156082 - DNA, 2841 bp, synthetic construct
  misc_feature 1..2841: note = Description of Artificial Sequence: Synthetic coding sequence
  source 1..2841: mol_type = other DNA
atggctgtgtactgctacgccctgaacagcctggtgatcatgaacagcgccaatgagatgaagagcggcggcggccctggccccagcggcagcgagaccccacctccaccccggcgggctgtgctgagccctggcagcgtcttcagccctggccgcggggccagcttcctgtttcctcctgctgagagcctgagccctgaggagcccaggagccctgggggctggaggtctggaagaagaaggctgaacagcagcagcggcagcggcagcggcagcagcggcagctctgtgagcagccccagctgggccggccgcctgcggggggaccggcagcaggtggtggccgccggcaccctgagccccccaggccctgaggaggccaagaggaagctgcgcatcctgcagcgggagctgcagaatgtgcaggtgaaccagaaggtgggcatgtttgaggcccacatccaggcccagagcagcgccatccaggcccccaggagcccccggctgggccgggcccggagccccagcccctgccccttccgcagcagcagccagcccccaggccgggtgctggtgcagggcgcccggtctgaggagaggaggaccaagtcctggggcgagcagtgcccagagaccagcggcacagattctggcaggaagggcggccccagcctgtgcagcagccaggtgaagaagggcatgccacccctgcccggccgggccgcccccaccggcagcgaggcccagggccccagcgcctttgtgaggatggagaagggcatcccagccagcccccgctgtggcagccccacagccatggagattgacaagaggggcagccccaccccaggcaccaggagctgcctggcccccagcctgggcctgtttggagccagcctgaccatggccacagaggtggccgcccgggtgaccagcacaggcccccaccggccccaggacctggccctgacagagcccagcggccgggcccgggagctggaggacctgcagcccccagaggccctggtggagcggcagggccagttcctgggcagcgagaccagccctgcccctgagcggggcggccccagagatggagagcccccaggcaagatgggcaagggctacctgccctgtggcatgcctggcagcggggagcctgaggtgggcaagaggcctgaggagaccaccgtgtctgtgcagagcgctgagagcagtgacagcctgtcctggagccggctgccccgggccctggcctctgtgggccctgaggaggcccggagcggggcccctgtgggcggcggccgctggcagctgagtgacagagtggagggcggcagccccaccctgggcctgctgggcggcagccccagcgcccagcccggcactggaaatgtggaggccggcatccccagcggccgcatgctggagcccctgccctgctgggatgctgccaaggacctgaaggagccccagtgccccccaggggacagagtgggcgtgcagcccggcaacagccgggtgtggcagggcaccatggagaaggccggcctggcctggacccggggcaccggggtgcagagcgagggcacctgggagagccagaggcaggacagtgatgccctgcccagccctgagctgctgccccaggaccctgacaagcccttcctgaggaaggcctgcagccccagcaacatcccagctgtgatcatcacagacatgggcacccaggaggatggagccctggaggagacccagggcagcccccggggcaacctgcccctgaggaagctgagcagcagcagcgccagcagcacaggcttcagcagcagctatgaagattctgaggaggacatcagcagtgaccctgagaggaccctggaccccaacagcgccttcctgcacaccctggaccagcagaagccccgggtgtccaagtcctggaggaagatcaagaacatggtgcactggagcccctttgtgatgtccttcaagaagaagtacccctggatccagctggccggccatgctggcagcttcaaggctgctgccaacggccgcatcctgaagaagcactgtgagagcgagcagcgctgcctggaccggctgatggtggatgtgctgcggccctttgtgcctgcctaccatggagatgtggtgaaggatggagagcgctacaaccagatggatgacctgctggccgactttgacagcccctgtgtgatggactgcaagatgggcatccgcacctacctggaggaggagctgaccaaggccaggaagaagcccagcctgaggaaggacatgtaccagaagatgattgaggtggaccctgaggcccccacagaggaggagaaggcccagagagctgtgaccaagccccgctacatgcagtggagggagaccatcagcagcacagccaccctgggcttcagaattgagggcatcaagaaggaggatggcaccgtgaacagagacttcaagaagaccaagacccgggagcaggtgacagaggccttccgggagttcaccaagggcaaccacaacatcctgattgcctacagagaccggctgaaggccatccgcaccaccctggaggtgagccccttcttcaagtgccacgaggtgattggcagcagcctgctcttcatccatgacaagaaggagcaggccaaggtgtggatgattgactttgggaagaccacccccctgcctgagggccagaccctgcagcatgatgtgccctggcaggagggcaaccgggaggatggctacctgagcggcctgaacaacctggtggacatcctgacagagatgagccaggatgcccccctggcctag

SEQ ID NO: 156083 - DNA, 1935 bp, synthetic construct
  misc_feature 1..1935: note = Description of Artificial Sequence: Synthetic coding sequence
  source 1..1935: mol_type = other DNA
atggctgtgtactgctacgccctgaacagcctggtgatcatgaacagcgccaatgagatgaagagcggcggcggccctggccccagcggcagcgagaccccacctccaccccggcgggctgtgctgagccctggcagcgtcttcagccctggccgcggggccagcttcctgtttcctcctgctgagagcctgagccctgaggagcccaggagccctgggggctggaggtctggaagaagaaggctgaacagcagcagcggcagcggcagcggcagcagcggcagctctgtgagcagccccagctgggccggccgcctgcggggggaccggcagcaggtggtggccgccggcaccctgagccccccaggccctgaggaggccaagaggaagctgcgcatcctgcagcgggagctgcagaatgtgcaggtgaaccagaaggtgggcatgtttgaggcccacatccaggcccagagcagcgccatccaggcccccaggagcccccggctgggccgggcccggagccccagcccctgccccttccgcagcagcagccagcccccaggccgggtgctggtgcagggcgcccggtctgaggagaggaggaccaagtcctggggcgagcagtgcccagagaccagcggcacagattctggcaggaagggcggccccagcctgtgcagcagccaggtgaagaagggcatgccacccctgcccggccgggccgcccccaccggcagcgaggcccagggccccagcgcctttgtgaggatggagaagggcatcccagccagcccccgctgtggcagccccacagccatggagattgacaagaggggcagccccaccccaggcaccaggagctgcctggcccccagcctgggcctgtttggagccagcctgaccatggccacagaggtggccgcccgggtgaccagcacaggcccccaccggccccaggacctggccctgacagagcccagcggccgggcccgggagctggaggacctgcagcccccagaggccctggtggagcggcagggccagttcctgggcagcgagaccagccctgcccctgagcggggcggccccagagatggagagcccccaggcaagatgggcaagggctacctgccctgtggcatgcctggcagcggggagcctgaggtgggcaagaggcctgaggagaccaccgtgtctgtgcagagcgctgagagcagtgacagcctgtcctggagccggctgccccgggccctggcctctgtgggccctgaggaggcccggagcggggcccctgtgggcggcggccgctggcagctgagtgacagagtggagggcggcagccccaccctgggcctgctgggcggcagccccagcgcccagcccggcactggaaatgtggaggccggcatccccagcggccgcatgctggagcccctgccctgctgggatgctgccaaggacctgaaggagccccagtgccccccaggggacagagtgggcgtgcagcccggcaacagccgggtgtggcagggcaccatggagaaggccggcctggcctggacccggggcaccggggtgcagagcgagggcacctgggagagccagaggcaggacagtgatgccctgcccagccctgagctgctgccccaggaccctgacaagcccttcctgaggaaggcctgcagccccagcaacatcccagctgtgatcatcacagacatgggcacccaggaggatggagccctggaggagacccagggcagcccccggggcaacctgcccctgaggaagctgagcagcagcagcgccagcagcacaggcttcagcagcagctatgaagattctgaggaggacatcagcagtgaccctgagaggaccctggaccccaacagcgccttcctgcacaccctggaccagcagaagccccgggtgtag

SEQ ID NO: 156084 - DNA, 2841 bp, synthetic construct; identical to SEQ ID NO: 156082
  misc_feature 1..2841: note = Description of Artificial Sequence: Synthetic coding sequence
  source 1..2841: mol_type = other DNA

SEQ ID NO: 156085 - DNA, 2052 bp, synthetic construct
  misc_feature 1..2052: note = Description of Artificial Sequence: Synthetic coding sequence
  source 1..2052: mol_type = other DNA
atgaggcgctgcccctgccggggcagcctgaatgaagctgaggccggggccctgcctgctgctgccaggatgggcctggaggccccccggggcggcagaagacggcagcccggccagcagaggcctggccctggggccggggccccagctggccggcctgagggcggcggcccctgggccaggacagagggcagcagcctgcacagcgagcctgagcgggccggcctgggccctgcccctggaacagagagcccccaggccgagttctggacagatggccagacagagcctgctgctgctggcctgggcgtggagacagagcggcccaagcagaagacagagccagacaggagcagcctgcggacccacctggagtggagctggagcgagctggagaccacctgcctgtggacagagaccggcacagatggcctgtggacagacccccacagaagtgacctgcagttccagcctgaggaggccagcccctggacccagcccggggtgcacggcccctggacagagctggagacccacggcagccagacccagcctgagcgggtgaagtcctgggccgacaacctgtggacccaccagaacagcagcagcctgcagacccaccctgagggcgcctgccccagcaaggagcccagcgcagatggctcctggaaggagctgtacacagatggcagcaggacccagcaggacatcgagggcccctggacagagccctacacagatggcagccagaagaagcaggacacagaagctgccaggaagcagcccggcaccggcggcttccagatccagcaggacacagatggctcctggacccagcccagcacagatggcagccagacagcccctggaacagactgcctgctgggggagccagaagatggccccctggaggagcctgagcccggggagctgctgacccacctgtacagccacctgaagtgcagccccctgtgccctgtgcccaggctcatcatcaccccagagaccccagagcctgaggcccagcctgtgggcccccccagccgggtggagggcggcagcggcggcttcagcagcgccagcagctttgatgaaagtgaagatgatgtggtggccggcggcggcggggccagtgaccctgaagatagaagtggcagcaagccctggaagaagctgaagacagtgctgaagtacagcccctttgtggtgtccttcaggaagcactacccctgggtgcagctgagcggccacgccggcaacttccaggccggagaagatggccgcatcctgaagcgcttctgccagtgtgagcagaggagcctggagcagctgatgaaggaccccctgcggccctttgtgcctgcctactacggcatggtgctgcaggacggccagaccttcaaccagatggaggacctgctggccgactttgagggccccagcatcatggactgcaagatgggcagcaggacctacctggaggaggagctggtgaaggcccgggagcggccccggcccaggaaggacatgtatgagaagatggtggccgtggaccccggggcccccaccccagaggagcacgcccagggcgctgtgaccaagccccgctacatgcagtggagggagaccatgagcagcaccagcaccctgggcttccgcatcgagggcatcaagaaggcagatggcacctgcaacaccaacttcaagaagacccaggccctggagcaggtgaccaaggtgctggaggactttgtggatggagaccacgtgatcctgcagaagtatgtggcctgcctggaggagctgcgggaggccctggagatcagccccttcttcaagacccatgaggtggtgggcagcagcctgctgtttgtgcatgaccacacaggcctggccaaggtgtggatgattgactttgggaagacagtggccctgcctgaccaccagaccctgagccaccggctgccctgggccgagggcaacagagaagatggctacctgtggggcctggacaacatgatctgcctgctgcagggcctggcccagagctag

SEQ ID NO: 156086 - DNA, 1740 bp, synthetic construct
  misc_feature 1..1740: note = Description of Artificial Sequence: Synthetic coding sequence
  source 1..1740: mol_type = other DNA
atgaggcggcccccaggaaatggagaggccgccagcgagggccctgggggctggggcctgtggggcgtgcaggagagccggcggctgtgctgtgccggccatgaccgctgcaagcaggccctgctgcagatcggcatcaacatgatggccctgcccggcggccgccacctggacagcgtgaccctgcccggccagaggctgcacctgatgcaggtggacagcgtgcagcgctggatggaggacctgaagctgatgacagaatgtgagtgcatgtgtgtgctgcaggccaagcccatcagcctggaggaggatgcccagggcgacctgatcctggccggcggccctggccctggggaccccctgcagctgctgctgaagaggggctgggtgatcagcacagagctgcggcgcatcggccagaagctggcccaggaccgctgggcccgggtgcacagcatgtctgtgcggctgacctgccacgcccgctccatggtgtctgagtacagcgctgtgtccaggaacagcctgaaggagatgggagaaattgagaagctgctgatggagaagtgcagcgagctgtctgctgtgacagagcgctgcctgcaggtggagaatgaacatgtgctgaagtccatgaaggcctgtgtgtctgagaccctgtccatgctgggccagcacttcggccagctgctggagctggccctgacccgggaggtgcaggccctggtgaggaagattgatgccagtgacaacatctacaccacagagagcaccactggaaacctcttcagcctgacccaggagggcgcccccctgtgccgcatcatcgccaaggagggcggcgtggtggccctcttcaaggtgtgccggcaggacagcttccgctgcctgtacccccaggccctgcggaccctggccagcatctgctgcgtggaggagggcgtgcaccagctggagaaggtggatggagtgctgtgcctggccgacatcctgacagacaacagccacagcgaggccaccagggctgaggccgctgctgtggtggcccaggtgaccagcccccacctgcctgtgacccagcacctgagcagcttcctggagagcatggaggagatcgtgacagccctggtgaagctgtgccaggaggccagcagtggagaggtgttcctgctggccagcgctgccctggccaacatcaccttctttgacaccatggcctgtgagatgctgctgcagctgaatgccatccgggtgctgctggaggcctgcagcgacaagcagagggtggacaccccctacacccgggaccagatcgtgaccatcctggccaacatgtctgtgctggagcagtgtgccagtgacatcatccaggagaatggagtgcagctgatcatgggcatgctgtctgagaagcccaggagcggcaccccagctgaggtggccgcctgtgagcgggtgcagcagaaggctgctgtgaccctggcccggctgagccgggaccctgatgtggcccgggaggccgtgcggctgagctgcatgagccggctgattgagctgtgccgcagccccagcgagaggaacagcagtgatgctgtgctggtggcctgcctggccgccctgcggcggctggccggcgtgtgcccagagggcctgcaggacagcgacttccagcagctggtgcagccccggctggtggacagcttcctgctgtgcagcaacatggaggagagctttgtgtag

SEQ ID NO: 156087 - DNA, 1599 bp, synthetic construct
  misc_feature 1..1599: note = Description of Artificial Sequence: Synthetic coding sequence
  source 1..1599: mol_type = other DNA
atgatggccctgcccggcggccgccacctggacagcgtgaccctgcccggccagaggctgcacctgatgcaggtggacagcgtgcagcgctggatggaggacctgaagctgatgacagaatgtgagtgcatgtgtgtgctgcaggccaagcccatcagcctggaggaggatgcccagggcgacctgatcctggccggcggccctggccctggggaccccctgcagctgctgctgaagaggggctgggtgatcagcacagagctgcggagaattggccagaagctggcccaggaccgctgggcccgggtgcacagcatgtctgtgcggctgacctgccacgcccgctccatggtgtctgagtacagcgctgtgtccaggaacagcctgaaggagatgggagaaattgagaagctgctgatggagaagtgcagcgagctgtctgctgtgacagagcgctgcctgcaggtggagaatgagcacgtgctgaagtccatgaaggcctgtgtgtctgagaccctgtccatgctgggccagcacttcggccagctgctggagctggccctgacccgggaggtgcaggccctggtgaggaagattgatgccagtgacaacatctacaccacagagagcaccaccggcaacctcttcagcctgacccaggagggcgcccccctgtgccgcatcatcgccaaggagggcggcgtggtggccctcttcaaggtgtgccggcaggacagcttccgctgcctgtacccccaggccctgcggaccctggccagcatctgctgcgtggaggagggcgtgcaccagctggagaaggtggatggagtgctgtgcctggccgacatcctgacagacaacagccacagcgaggccaccagggctgaggccgctgctgtggtggcccaggtgaccagcccccacctgcctgtgacccagcacctgagcagcttcctggagagcatggaggagatcgtgacagccctggtgaagctgtgccaggaggccagcagcggggaggtgttcctgctggccagcgctgccctggccaacatcaccttctttgacaccatggcctgtgagatgctgctgcagctgaatgccatccgggtgctgctggaggcctgcagcgacaagcagagggtggacaccccctacacccgggaccagatcgtgaccatcctggccaacatgtctgtgctggagcagtgtgccagtgacatcatccaggagaatggagtgcagctgatcatgggcatgctgtctgagaagcccaggagcggcaccccagctgaggtggccgcctgtgagcgggtgcagcagaaggctgctgtgaccctggcccggctgagccgggaccctgatgtggcccgggaggccgtgcggctgagctgcatgagccgcctcatcgagctgtgccgcagccccagcgagaggaacagcagtgatgctgtgctggtggcctgcctggccgccctgcggcggctggccggcgtgtgcccagagggcctgcaggacagcgacttccagcagctggtgcagccccggctggtggacagcttcctgctgtgcagcaacatggaggagagctttgtgtag

SEQ ID NO: 156088 - DNA, 927 bp, synthetic construct
  misc_feature 1..927: note = Description of Artificial Sequence: Synthetic coding sequence
  source 1..927: mol_type = other DNA
atgatggccctgcccggcggccgccacctggacagcgtgaccctgcccggccagaggctgcacctgatgcaggtggacagcgtgcagcgctggatggaggacctgaagctgatgacagaatgtgagtgcatgtgtgtgctgcaggccaagcccatcagcctggaggaggatgcccagggcgacctgatcctggccggcggccctggccctggggaccccctgcagctgctgctgaagaggggctgggtgatcagcacagagctgcggagaattggccagaagctggcccaggaccgctgggcccgggtgcacagcatgtctgtgcggctgacctgccacgcccgctccatggtgtctgagtacagcgctgtgtccaggaacagcctgaaggagatgggagaaattgagaagctgctgatggagaagtgcagcgagctgtctgctgtgacagagcgctgcctgcaggtggagaatgagcacgtgctgaagtccatgaaggcctgtgtgtctgagaccctgtccatgctgggccagcacttcggccagctgctggagctggccctgacccgggaggtgcaggtggagagccacagcgtgacccggctggagtgcagcggggccatcagcgcccagtgcaacctgcggctgctgggcagcagtgacagccctgccagcgccagccaggccctggtgaggaagattgatgccagtgacaacatctacaccacagagagcaccactggaaacctcttcagcctgacccaggagggcgcccccctgtgccgcatcatcgccaaggagggcggcgtggtggccctcttcaaggtgtgccggcaggacagcttccgctgcctgtacccccaggccctgcggaccctggccagcatctgctgcgtggaggagggcgtgcaccagctggagaagtag

SEQ ID NO: 156089 - DNA, 1473 bp, synthetic construct
  misc_feature 1..1473: note = Description of Artificial Sequence: Synthetic coding sequence
  source 1..1473: mol_type = other DNA
atgatggccctgcccggcggccgccacctggacagcgtgaccctgcccggccagaggctgcacctgatgcaggtggacagcgtgcagcgctggatggaggacctgaagctgatgacagaatgtgagtgcatgtgtgtgctgcaggccaagcccatcagcctggaggaggatgcccagggcgacctgatcctggccggcggccctggccctggggaccccctgcagctgctgctgaagaggggctgggtgatcagcacagagctgcggagaattggccagaagctggcccaggaccgctgggcccgggtgcacagcatgtctgtgcggctgacctgccacgcccgctccatggtgtctgagtacagcgctgtgtccaggaacagcctgaaggagatgggagaaattgagaagctgctgatggagaagtgcagcgagctgtctgctgtgacagagcgctgcctgcaggtggagaatgagcacgtgctgaagtccatgaaggcctgtgtgtctgagaccctgtccatgctgggccagcacttcggccagctgctggagctggccctgacccgggaggtgcaggccctggtgaggaagattgatgccagtgacaacatctacaccacagagagcaccaccggcaacctcttcagcctgacccaggagggcgcccccctgtgccgcatcatcgccaaggtggatggagtgctgtgcctggccgacatcctgacagacaacagccacagcgaggccaccagggctgaggccgctgctgtggtggcccaggtgaccagcccccacctgcctgtgacccagcacctgagcagcttcctggagagcatggaggagatcgtgacagccctggtgaagctgtgccaggaggccagcagcggggaggtgttcctgctggccagcgctgccctggccaacatcaccttctttgacaccatggcctgtgagatgctgctgcagctgaatgccatccgggtgctgctggaggcctgcagcgacaagcagagggtggacaccccctacacccgggaccagatcgtgaccatcctggccaacatgtctgtgctggagcagtgtgccagtgacatcatccaggagaatggagtgcagctgatcatgggcatgctgtctgagaagcccaggagcggcaccccagctgaggtggccgcctgtgagcgggtgcagcagaaggctgctgtgaccctggcccggctgagccgggaccctgatgtggcccgggaggccgtgcggctgagctgcatgagccgcctcatcgagctgtgccgcagccccagcgagaggaacagcagtgatgctgtgctggtggcctgcctggccgccctgcggcggctggccggcgtgtgcccagagggcctgcaggacagcgacttccagcagctggtgcagccccggctggtggacagcttcctgctgtgcagcaacatggaggagagctttgtgtag

SEQ ID NO: 156090 - DNA, 1473 bp, synthetic construct; identical to SEQ ID NO: 156089
  misc_feature 1..1473: note = Description of Artificial Sequence: Synthetic coding sequence
  source 1..1473: mol_type = other DNA

SEQ ID NO: 156091 - DNA, 1599 bp, synthetic construct; identical to SEQ ID NO: 156087
  misc_feature 1..1599: note = Description of Artificial Sequence: Synthetic coding sequence
  source 1..1599: mol_type = other DNA

SEQ ID NO: 156092 - DNA, 834 bp, synthetic construct
  misc_feature 1..834: note = Description of Artificial Sequence: Synthetic coding sequence
  source 1..834: mol_type = other DNA
atgccccggctgcatgaccacttctggagctgcagctgtgcccacagcgccaggagaagaggccccccccgggccagcgctgctggcctggccgccaaggtgggggagatgatcaacgtgtctgtgtctggccccagcctgctggccgcccatggagccccagatgctgaccctgccccccggggccgctctgctgccatgagcggccctgagcccggcagcccctaccccaacacctggcaccaccggctgctgcagaggagcctggtgctcttctctgtgggcgtggtgctggccctggtgctgaacctgctgcagatccagagaaatgtgaccctcttccctgaggaggtgattgccaccatcttcagcagcgcctggtgggtgcccccctgctgcggcacagctgctgctgtggtgggcctgctgtacccctgcatcgacagccacctgggggagccccacaagttcaagcgggagtgggcctctgtgatgcgctgcatcgctgtgtttgtgggcatcaaccacgccagcgccaagctggactttgccaacaacgtgcagctgagcctgaccctggccgccctgagcctgggcctgtggtggacctttgacaggagccgcagcggcctgggcctgggcatcaccatcgccttcctggccaccctcatcacccagttcctggtgtacaatggagtgtaccagtacaccagcccagacttcctgtacatccgctcctggctgccctgcatcttcttcagcggcggcgtgacagtgggcaacatcggccggcagctggccatgggcgtgcctgagaagccccacagcgactag

SEQ ID NO: 156093 - DNA, 537 bp, synthetic construct
  misc_feature 1..537: note = Description of Artificial Sequence: Synthetic coding sequence
  source 1..537: mol_type = other DNA
atgccccggctgcatgaccacttctggagctgcagctgtgcccacagcgccaggagaagaggccccccccgggccagcgccaagctggactttgccaacaacgtgcagctgagcctgaccctggccgccctgagcctgggcctgtggtggacctttgacaggagccgcagcggcctgggcctgggcatcaccatcgccttcctggccaccctcatcacccagttcctggtgtacaatggagtgtaccagtacaccagcccagacttcctgtacatccgctcctggctgccctgcatcttcttcagcggcggcgtgacagtgggcaacatcggccggcagctggccatgctgatccccttctgtgaggagctgaacctgaagaccacctggctgttccacaagaccaggagcaactacagagtcttcctgaagagccccatcgtgattgagagcagcaagccacccatcctgcgggccaggaagatcctggaggagaacctgactgtggactatgacaaggactacctgttctcctag

SEQ ID NO: 156094 - DNA, 372 bp, synthetic construct
  misc_feature 1..372: note = Description of Artificial Sequence: Synthetic coding sequence
  source 1..372: mol_type = other DNA
atgccccggctgcatgaccacttctggagctgcagctgtgcccacagcgccaggagaagaggccccccccgggccagcgctgctggcctggccgccaaggtgggggagatgatcaacgtgtctgtgtctggccccagcctgctggccgcccatggagccccagatgctgaccctgccccccggggccgctctgctgccatgagcggccctgagcccggcagcccctaccccaacacctggcaccaccggctgctgcagaggagcctggtgctcttctctgtgggcgtggtgctggccctggtgctgaacctgctgcagatccagagaaatgtgaccctcttccctgaggaggtgattgccaccatcttctag

SEQ ID NO: 156095 - DNA, 495 bp, synthetic construct
  misc_feature 1..495: note = Description of Artificial Sequence: Synthetic coding sequence
  source 1..495: mol_type = other DNA
atgccccggctgcatgaccacttctggagctgcagctgtgcccacagcgccaggagaagaggccccccccgggccagcgctgctggcctggccgccaaggtgggggagatgatcaacgtgtctgtgtctggccccagcctgctggccgcccatggagccccagatgctgaccctgccccccggggccgctctgctgccatgagcggccctgagcccggcagcccctaccccaacacctggcaccaccggctgctgcagaggagcctggtgctcttctctgtgggcgtggtgctggccctggtgctgaacctgctgcagatccagagaaatgtgaccctcttccctgaggaggtgattgccaccatcttcagcagcgcctggtgggtgcccccctgctgcggcacagctgctggcatccacccccagatcagcagcatctttgtgctgggcagcctggtgtacttcagccaggaggccagccgctggggcacctag

SEQ ID NO: 156096 - DNA, 678 bp, synthetic construct
  misc_feature 1..678: note = Description of Artificial Sequence: Synthetic coding sequence
  source 1..678: mol_type = other DNA
atggccgagggggagacagagagccctggccccaagaagtgtggcccctacatcagctctgtgaccagccagagcgtgaacctgatgatccggggcgtggtgctcttcttcatcggggtcttcctggccctggtgctgaacctgctgcagatccagagaaatgtgaccctcttccccccagatgtgattgccagcatcttcagcagcgcctggtgggtgcccccctgctgcggcacagccagcgctgtgattggcctgctgtacccctgcatcgacagacacctgggggagccccacaagttcaagcgggagtggagctctgtgatgagatgtgtggccgtgtttgtgggcatcaaccacgccagcgccaaggtggactttgacaacaacatccagctgagcctgaccctggccgccctgagcatcggcctgtggtggacctttgacaggagccgcagcggcttcggcctgggcgtgggcatcgccttcctggccaccgtggtgacccagctgctggtgtacaatggagtgtaccagtacaccagcccagacttcctgtatgtgcgctcctggctgccctgcatcttctttgctgggggcatcaccatgggcaacatcggccggcagctggccatgtatgagtgcaaggtgattgctgagaagagccaccaggagtag

SEQ ID NO: 156097 - DNA, 4149 bp, synthetic construct
  misc_feature 1..4149: note = Description of Artificial Sequence: Synthetic coding sequence
  source 1..4149: mol_type = other DNA
atggccactggaggaagaagaggagctgctgctgcccccctgctggtggccgtggccgccctgctgctgggcgccgccggccacctgtacccaggagaggtgtgccccggcatggacatccggaacaacctgacccggctgcacgagctggagaactgcagcgtcatcgagggccacctgcagatcctgctgatgttcaagaccaggcctgaggacttccgggacctgtccttccccaagctgatcatgatcacagactacctgctgctcttccgggtgtatggcctggagagcctgaaggacctcttccccaacctgaccgtcatccggggcagccgcctcttcttcaactatgccctggtgatctttgagatggtgcacctgaaggagctgggcctgtacaacctgatgaacatcacccggggctctgtgcgcatcgagaagaacaatgagctgtgctacctggccaccatcgactggagccgcatcctggacagcgtggaggacaactacatcgtgctgaacaaggatgacaatgaagaatgtggggacatctgccctggaacagccaagggcaagaccaactgcccagccaccgtcatcaatggccagtttgtggagcgctgctggacccacagccactgccagaaggtgtgccccaccatctgcaagagccacggctgcacagctgagggcctgtgctgccacagcgagtgcctgggcaactgcagccagccagatgaccccaccaagtgtgtggcctgcaggaacttctacctggatggccgctgtgtggagacctgccccccaccctactaccacttccaggactggaggtgtgtgaacttctccttctgccaggacctgcaccacaagtgcaagaacagccggcggcagggctgccaccagtatgtgatccacaacaacaagtgcatccctgagtgccccagcggctacaccatgaacagcagcaacctgctgtgcaccccctgcctgggcccctgccccaaggtgtgccacctgctggagggggagaagaccatcgacagcgtgaccagcgcccaggagctgcggggctgcaccgtcatcaatggcagcctcatcatcaacatccggggcggcaacaacctggccgctgagctggaggccaacctgggcctcatcgaggagatcagcggctacctgaagatccgccgctcctatgccctggtgtccctgtccttcttcaggaagctgcggctcatccggggggagaccctggagatcggcaactacagcttctacgccctggacaaccagaacctgcggcagctgtgggactggagcaagcacaacctgaccatcacccagggcaagctgttcttccactacaaccccaagctgtgcctgtctgagatccacaagatggaggaggtgtctggcaccaagggccggcaggagagaaatgacatcgccctgaagaccaatggagaccaggccagctgtgaaaatgagctgctgaagttctcctacatccgcaccagctttgacaagatcctgctgcgctgggagccctactggcccccagacttccgggacctgctgggcttcatgctgttctacaaggaggccccctaccagaatgtgacagaatttgatggccaggatgcctgtggcagcaacagctggacagtggtggacattgatcctcccctgcggagcaatgaccccaagagccagaaccaccctggctggctgatgaggggcctgaagccctggacccagtatgccatctttgtgaagaccctggtgaccttcagtgatgaaagaaggacctacggggccaagagtgacatcatctacgtgcagacagatgccaccaaccccagcgtgcccctggaccccatctctgtgagcaacagcagcagccagatcatcctgaagtggaagccacccagcgaccccaatggaaacatcacccactacctggtgttctgggagcggcaggccgaggacagcgagctgtttgagctggactactgcctgaagggcctgaagctgcccagcaggacctggagccccccatttgaaagtgaggacagccagaagcacaaccagagtgaatatgaagattctgctggggagtgctgcagctgccccaagacagacagccagatcctgaaggagctggaggagagcagcttcaggaagacctttgaggactacctgcacaacgtggtgtttgtgcccaggaagaccagcagcggcaccggggctgaggacccccggcccagcaggaagagaagaagcctgggagatgtgggcaatgtgacagtggccgtgcccaccgtggccgccttccccaacaccagcagcacctctgtgcccaccagccctgaggagcaccggccctttgagaaggtggtgaacaaggagagcctggtgatcagcggcctgcggcacttcaccggctaccgcatcgagctgcaggcctgcaaccaggacaccccagaggagcgctgcagcgtggccgcctacgtgtctgcccggaccatgcctgaggccaaggcagatgacatcgtgggccctgtgacccatgagatctttgaaaataatgtggtgcacctgatgtggcaggagcccaaggagcccaacggcctgattgtgctgtatgaggtgtcctacagaagatatggagatgaggagctgcacctgtgtgtgtccaggaagcactttgccctggagcggggctgccgcctgcggggcctgagccctggcaactacagcgtgcgcatccgggccaccagcctggccggaaatggctcctggacagagcccacctacttctacgtgacagactacctggatgtgcccagcaacatcgccaagatcatcatcggccccctcatctttgtgttcctgttctctgtggtgattggcagcatctacctgttcctgaggaagaggcagccagatggccccctgggccccctgtatgccagcagcaaccctgagtacctgagcgccagtgatgtgttcccctgcagcgtgtatgtgcctgatgagtgggaggtgtcccgggagaagatcaccctgctgcgggagctgggccagggcagctttggcatggtgtatgagggcaatgcccgggacatcatcaagggggaggccgagaccagggtggccgtgaagacagtgaatgaaagtgccagcctgcgggagagaattgagttcctgaatgaggcctctgtgatgaagggcttcacctgccaccacgtggtgcggctgctgggcgtggtgtccaagggccagcccaccctggtggtgatggagctgatggcccacggggacctgaagagctacctgcggagcctgcggcctgaggccgagaacaaccctggccggcccccacccaccctgcaggagatgatccagatggctgctgagattgctgatggcatggcctacctgaatgccaagaagtttgtgcaccgggacctggccgccaggaactgcatggtggcccatgacttcaccgtgaagattggagactttggcatgacccgggacatctatgaaacagactactacaggaagggcggcaagggcctgctgcctgtgcgctggatggcccctgagagcctgaaggatggagtcttcaccaccagcagtgacatgtggagctttggagtggtgctgtgggagatcaccagcctggccgagcagccctaccagggcctgagcaatgagcaggtgctgaagtttgtgatggatggcggctacctggaccagcctgacaactgcccagagcgggtgacagacctgatgaggatgtgctggcagttcaaccccaagatgaggcccaccttcctggagatcgtgaacctgctgaaggatgacctgcaccccagcttccctgaggtgtccttcttccacagcgaggagaacaaggcccctgagagcgaggagctggagatggagtttgaggacatggagaatgtgcccctggacaggagcagccactgccagcgggaggaggccggcggcagagatggcggcagcagcctgggcttcaagaggagctatgaggagcacatcccctacacccacatgaatggaggcaagaagaatggccgcatcctgaccctgcccaggagcaaccccagctag

SEQ ID NO: 156098 - DNA, 4113 bp, synthetic construct
  misc_feature 1..4113: note = Description of Artificial Sequence: Synthetic coding sequence
  source 1..4113: mol_type = other DNA
atggccactggaggaagaagaggagctgctgctgcccccctgctggtggccgtggccgccctgctgctgggcgccgccggccacctgtacccaggagaggtgtgccccggcatggacatccggaacaacctgacccggctgcacgagctggagaactgcagcgtcatcgagggccacctgcagatcctgctgatgttcaagaccaggcctgaggacttccgggacctgtccttccccaagctgatcatgatcacagactacctgctgctcttccgggtgtatggcctggagagcctgaaggacctcttccccaacctgaccgtcatccggggcagccgcctcttcttcaactatgccctggtgatctttgagatggtgcacctgaaggagctgggcctgtacaacctgatgaacatcacccggggctctgtgcgcatcgagaagaacaatgagctgtgctacctggccaccatcgactggagccgcatcctggacagcgtggaggacaactacatcgtgctgaacaaggatgacaatgaagaatgtggggacatctgccctggaacagccaagggcaagaccaactgcccagccaccgtcatcaatggccagtttgtggagcgctgctggacccacagccactgccagaaggtgtgccccaccatctgcaagagccacggctgcacagctgagggcctgtgctgccacagcgagtgcctgggcaactgcagccagccagatgaccccaccaagtgtgtggcctgcaggaacttctacctggatggccgctgtgtggagacctgccccccaccctactaccacttccaggactggaggtgtgtgaacttctccttctgccaggacctgcaccacaagtgcaagaacagccggcggcagggctgccaccagtatgtgatccacaacaacaagtgcatccctgagtgccccagcggctacaccatgaacagcagcaacctgctgtgcaccccctgcctgggcccctgccccaaggtgtgccacctgctggagggggagaagaccatcgacagcgtgaccagcgcccaggagctgcggggctgcaccgtcatcaatggcagcctcatcatcaacatccggggcggcaacaacctggccgctgagctggaggccaacctgggcctcatcgaggagatcagcggctacctgaagatccgccgctcctatgccctggtgtccctgtccttcttcaggaagctgcggctcatccggggggagaccctggagatcggcaactacagcttctacgccctggacaaccagaacctgcggcagctgtgggactggagcaagcacaacctgaccatcacccagggcaagctgttcttccactacaaccccaagctgtgcctgtctgagatccacaagatggaggaggtgtctggcaccaagggccggcaggagagaaatgacatcgccctgaagaccaatggagaccaggccagctgtgaaaatgagctgctgaagttctcctacatccgcaccagctttgacaagatcctgctgcgctgggagccctactggcccccagacttccgggacctgctgggcttcatgctgttctacaaggaggccccctaccagaatgtgacagaatttgatggccaggatgcctgtggcagcaacagctggacagtggtggacattgatcctcccctgcggagcaatgaccccaagagccagaaccaccctggctggctgatgaggggcctgaagccctggacccagtatgccatctttgtgaagaccctggtgaccttcagtgatgaaagaaggacctacggggccaagagtgacatcatctacgtgcagacagatgccaccaaccccagcgtgcccctggaccccatctctgtgagcaacagcagcagccagatcatcctgaagtggaagccacccagcgaccccaatggaaacatcacccactacctggtgttctgggagcggcaggccgaggacagcgagctgtttgagctggactactgcctgaagggcctgaagctgcccagcaggacctggagccccccatttgaaagtgaggacagccagaagcacaaccagagtgaatatgaagattctgctggggagtgctgcagctgccccaagacagacagccagatcctgaaggagctggaggagagcagcttcaggaagacctttgaggactacctgcacaacgtggtgtttgtgccccggcccagcaggaagagaagaagcctgggagatgtgggcaatgtgacagtggccgtgcccaccgtggccgccttccccaacaccagcagcacctctgtgcccaccagccctgaggagcaccggccctttgagaaggtggtgaacaaggagagcctggtgatcagcggcctgcggcacttcaccggctaccgcatcgagctgcaggcctgcaaccaggacaccccagaggagcgctgcagcgtggccgcctacgtgtctgcccggaccatgcctgaggccaaggcagatgacatcgtgggccctgtgacccatgagatctttgaaaataatgtggtgcacctgatgtggcaggagcccaaggagcccaacggcctgattgtgctgtatgaggtgtcctacagaagatatggagatgaggagctgcacctgtgtgtgtccaggaagcactttgccctggagcggggctgccgcctgcggggcctgagccctggcaactacagcgtgcgcatccgggccaccagcctggccggaaatggctcctggacagagcccacctacttctacgtgacagactacctggatgtgcccagcaacatcgccaagatcatcatcggccccctcatctttgtgttcctgttctctgtggtgattggcagcatctacctgttcctgaggaagaggcagccagatggccccctgggccccctgtatgccagcagcaaccctgagtacctgagcgccagtgatgtgttcccctgcagcgtgtatgtgcctgatgagtgggaggtgtcccgggagaagatcaccctgctgcgggagctgggccagggcagctttggcatggtgtatgagggcaatgcccgggacatcatcaagggggaggccgagaccagggtggccgtgaagacagtgaatgaaagtgccagcctgcgggagagaattgagttcctgaatgaggcctctgtgatgaagggcttcacctgccaccacgtggtgcggctgctgggcgtggtgtccaagggccagcccaccctggtggtgatggagctgatggcccacggggacctgaagagctacctgcggagcctgcggcctgaggccgagaacaaccctggccggcccccacccaccctgcaggagatgatccagatggctgctgagattgctgatggcatggcctacctgaatgccaagaagtttgtgcaccgggacctggccgccaggaactgcatggtggcccatgacttcaccgtgaagattggagactttggcatgacccgggacatctatgaaacagactactacaggaagggcggcaagggcctgctgcctgtgcgctggatggcccctgagagcctgaaggatggagtcttcaccaccagcagtgacatgtggagctttggagtggtgctgtgggagatcaccagcctggccgagcagccctaccagggcctgagcaatgagcaggtgctgaagtttgtgatggatggcggctacctggaccagcctgacaactgcccagagcgggtgacagacctgatgaggatgtgctggcagttcaaccccaagatgaggcccaccttcctggagatcgtgaacctgctgaaggatgacctgcaccccagcttccctgaggtgtccttcttccacagcgaggagaacaaggcccctgagagcgaggagctggagatggagtttgaggacatggagaatgtgcccctggacaggagcagccactgccagcgggaggaggccggcggcagagatggcggcagcagcctgggcttcaagaggagctatgaggagcacatcccctacacccacatgaatggaggcaagaagaatggccgcatcctgaccctgcccaggagcaaccccagctag

SEQ ID NO: 156099 - DNA, 252 bp, synthetic construct
  misc_feature 1..252: note = Description of Artificial Sequence: Synthetic coding sequence
  source 1..252: mol_type = other DNA
ccctaccagaatgtgacagaatttgatggccaggatgcctgtggcagcaacagctggacagtggtggacatcgacccccccctgcggagcaatgaccccaagagccagaaccaccctggctggctgatgaggggcctgaagccctggacccagtatgccatctttgtgaagaccctggtgaccttcagtgatgagaggaggacctatggagccaagagtgacatcatctacgtgcagacagatgccacctag

SEQ ID NO: 156100 - DNA, 4017 bp, synthetic construct
  misc_feature 1..4017: note = Description of Artificial Sequence: Synthetic coding sequence
  source 1..4017: mol_type = other DNA
atggccagcccccccaggcatggccccccaggccctgccagcggagatggccccaacctgaacaacaacaacaacaacaacaaccacagcgtgaggaaatgtggctacctgaggaagcagaagcacggccacaagcgcttctttgtgctgcggggccctggagctggaggagatgaggccacagctgggggcggcagcgccccccagcccccccggctggagtactatgagagcgagaagaagtggaggagcaaggccggggcccccaagagggtgattgccctggactgctgcctgaacatcaacaagagagcagatgccaagcacaagtacctgattgccctgtacaccaaggatgagtactttgctgtggccgcagaaaatgagcaggagcaggagggctggtaccgggccctgacagacctggtgtctgagggccgggctgctgctggagatgcccccccagctgctgccccagctgccagctgcagcgccagcctgcccggggccctgggcggcagcgctggagctgctggagcagaagattcctatggcctggtggccccagccacagctgcctaccgggaggtgtggcaggtgaacctgaagcccaagggcctgggccagagcaagaacctgactggagtgtaccgcctgtgcctgagcgcccggaccatcggctttgtgaagctgaactgtgagcagcccagcgtgaccctgcagctgatgaacatccgccgctgtggccacagcgacagcttcttcttcatcgaggtgggccgctctgctgtgactggacctggagagctgtggatgcaggctgatgattctgtggtggcccagaacatccacgagaccatcctggaggccatgaaggccctgaaggagctgtttgagttccggcccaggagcaagagccagagcagcggcagcagcgccacccaccccatctctgtgcctggggcccggcggcaccaccacctggtgaacctgccccccagccagacaggcctggtgcggcgcagcaggacagacagcctggccgccaccccacctgctgccaagtgcagcagctgccgggtgaggacagcctctgaaggagatggaggagctgctgctggagctgctgctgctggggcccggcctgtgtctgtggccggcagccccctgagccctggccctgtgcgggcccccctgagccgcagccacaccctgagcggcggctgcggcggccggggcagcaaggtggccctgctgcctgctggaggagccctgcagcacagccgctccatgtccatgcctgtggcccacagccccccagctgccaccagccctggcagcctgagcagcagcagcggccacggcagcggcagctacccacctcctcctggcccccacccccccctgccccaccccctgcaccacggccctggccagaggcccagcagcggcagcgccagcgccagcggcagccccagcgaccccggcttcatgagcctggatgaatatggcagcagccctggggacctgcgggccttctgcagccacaggagcaacaccccagagagcattgctgagaccccaccagccagagatggcggcggcggcggggagttctacggctacatgaccatggaccggcccctgagccactgcggccgcagctacagaagagtgtctggagatgctgcccaggacctggaccggggcctgaggaagaggacctacagcctgaccaccccagcccggcagaggcctgtgccccagcccagcagcgccagcctggatgagtacaccctgatgagggccaccttcagcggcagcgctggccgcctgtgccccagctgcccagccagcagccccaaggtggcctaccacccctacccagaggactatggagacattgaaattggcagccacaggagcagcagcagcaacctgggcgcagatgatggctacatgcccatgacccctggggccgccctggccggcagcggcagcggcagctgccgcagtgatgactacatgcccatgagccctgcctctgtgtctgcccccaagcagatcctgcagcccagggctgctgctgctgctgctgctgctgtgcccagcgctggccctgctggccctgcccccaccagcgctgctggccgcaccttccctgccagcggcggcggctacaaggccagcagccctgctgagagcagccctgaggacagcggctacatgaggatgtggtgtggcagcaagctgtccatggagcacgcagatggcaagctgctgcccaatggagactacctgaatgtgagccccagtgatgctgtgaccaccggcaccccaccagacttcttctctgctgccctgcaccctggaggagagcccctgcggggcgtgcccggctgctgctacagcagcctgcccaggagctacaaggccccctacacctgtggcggggacagcgaccagtatgtgctgatgagcagccctgtgggccgcatcctggaggaggagcggctggagccccaggccaccccaggccccagccaggccgccagcgccttcggggccggccccacccagcccccccaccctgtggtgcccagccctgtgcggcccagcggcggccggcctgagggcttcctgggccagaggggccgggctgtgcggcccacccggctgagcctggagggcctgcccagcctgcccagcatgcatgagtaccccctgcccccagagcccaagagccctggagagtacatcaacatcgactttggagagcccggggcccggctgagccccccagccccacccctgctggccagcgctgccagcagcagcagcctgctgagcgccagcagccctgccagcagcctgggcagcggcaccccaggcaccagcagtgacagccggcagaggagccccctgagtgactacatgaacctggacttcagcagccccaagagccccaagccaggggcccccagcggccaccctgtgggcagcctggatggcctgctgagccctgaggccagcagcccctacccacccctgcccccccggcccagcgccagccccagcagcagcctgcagcccccacctcctcctccagcccctggagagctgtaccgcctgcccccagccagcgctgtggccacagcccagggccctggggccgccagcagcctgagcagtgacaccggggacaatggagactacacagagatggcctttggagtggccgccaccccaccccagcccatcgccgccccacccaagccagaggccgcccgggtggccagccccaccagcggcgtgaagaggctgagcctgatggagcaggtgtctggagtggaggccttcctgcaggccagccagcccccagacccccacagaggagccaaggtgatccgggctgacccccagggcggcagaagaagacacagcagcgagaccttcagcagcaccaccaccgtgacccctgtgagccccagctttgcccacaaccccaagaggcacaacagcgcctctgtggagaatgtgtccctgaggaagagcagcgagggcggcgtgggcgtgggccctggaggaggagatgagccccccaccagcccccggcagctgcagcctgccccacccctggccccccagggccggccctggaccccaggccagcccggcggcctggtgggctgccccggcagcggcggcagccccatgaggcgggagaccagcgctggcttccagaatggcctgaactacatcgccattgatgtgcgggaggagcccggcctgcccccccagccccagcccccacctccacccctgccccagcccggggacaagagctcctggggccgcaccaggagcctgggcggcctcatctctgctgtgggcgtgggcagcactggaggcggctgcggcggccctggccctggggccctgcccccagccaacacctacgccagcattgacttcctgagccaccacctgaaggaggccaccatcgtgaaggagtag

SEQ ID NO: 156101 - DNA, 3894 bp, synthetic construct
  misc_feature 1..3894: note = Description of Artificial Sequence: Synthetic coding sequence
  source 1..3894: mol_type = other DNA
atggctgtgcccagcctgtggccctggggcgcctgcctgcccgtcatcttcctgagcctgggcttcggcctggacacagtggaggtgtgccccagcctggacatccgctctgaggtggccgagctgcggcagctggagaactgcagcgtggtggagggccacctgcagatcctgctgatgttcaccgccaccggggaggacttccggggcctgtccttcccccggctgacccaggtgacagactacctgctgctcttccgggtgtatggcctggagagcctgcgggacctcttccccaacctggccgtcatccggggcaccaggctcttcctgggctacgccctggtgatctttgagatgccccacctgagagatgtggccctgcctgccctgggcgctgtgctgcggggagctgtgcgggtggagaagaaccaggagctgtgccacctgagcaccatcgactggggcctgctgcagcctgcccctggggccaaccacatcgtgggcaacaagctgggggaggagtgtgctgatgtgtgccctggggtgctgggcgctgctggggagccctgtgccaagaccaccttcagcggccacacagactaccgctgctggaccagcagccactgccagagggtgtgcccctgcccccacggcatggcctgcacagcccggggggagtgctgccacacagagtgcctgggcggctgcagccagcctgaggacccccgggcctgtgtggcctgccgccacctgtacttccagggcgcctgcctgtgggcctgccccccaggcacctaccagtatgaatcctggaggtgtgtgacagctgagcgctgtgccagcctgcacagcgtgcccggccgggccagcaccttcggcatccaccagggcagctgcctggcccagtgccccagcggcttcaccaggaacagcagcagcatcttctgccacaagtgtgagggcctgtgccccaaggagtgcaaggtgggcaccaagaccatcgacagcatccaggccgcccaggacctggtgggctgcacccacgtggagggcagcctcatcctgaacctgcggcagggctacaacctggagccccagctgcagcacagcctgggcctggtggagaccatcaccggcttcctgaagatcaagcacagctttgccctggtgtccctgggcttcttcaagaacctgaagctgatcagaggagatgccatggtggatggcaactacaccctgtatgtgctggacaaccagaacctgcagcagctgggctcctgggtggccgccggcctgaccatccctgtgggcaagatctactttgccttcaacccccggctgtgcctggagcacatctaccgcctggaggaggtgacaggcacccggggccggcagaacaaggccgagatcaaccccaggaccaacggggaccgggccgcctgccagaccaggaccctgcgctttgtgtccaatgtgacagaggccgaccgcatcctgctgcgctgggagagatatgagcccctggaggcccgggacctgctgtccttcatcgtgtactacaaggagagccccttccagaatgccacagagcacgtgggcccagatgcctgtggcacccagagctggaacctgctggatgtggagctgcccctgagcaggacccaggagcccggggtgaccctggccagcctgaagccctggacccagtatgctgtgtttgtgcgggccatcaccctgaccacagaggaggacagcccccaccagggcgcccagagccccatcgtgtacctgcggaccctgcctgctgcccccaccgtgccccaggacgtcatcagcaccagcaacagcagcagccacctgctggtgcgctggaagccacccacccagagaaatggaaacctgacctactacctggtgctgtggcagaggctggctgaagatggagacctgtacctgaatgactactgccaccggggcctgcggctgcccaccagcaacaatgaccccaggtttgatggagaagatggagaccctgaggccgagatggagagtgactgctgcccctgccagcaccccccacctggccaggtgctgccccccctggaggcccaggaggccagcttccagaagaagtttgagaacttcctgcacaatgccatcaccatccccatcagcccctggaaggtgaccagcatcaacaagagcccccagagggacagcggccgccacagaagagctgctggccccctgcggctgggcggcaacagcagtgactttgagatccaggaggacaaggtgccccgggagagagctgtgctgagcggcctgcggcacttcacagagtacagaattgacatccacgcctgcaaccacgccgcccacacagtgggctgcagcgctgccacctttgtgtttgcccggaccatgccccaccgggaggctgatggcatccctgggaaggtggcctgggaggccagcagcaagaacagcgtgctgctgcgctggctggagcccccagaccccaacggcctcatcctgaagtatgagatcaagtaccgccgcctgggggaggaggccaccgtgctgtgtgtgtcccggctgcgctatgccaagtttggaggagtgcacctggccctgctgcccccaggcaactacagcgcccgggtgcgggccaccagcctggccggaaatggctcctggacagacagcgtggccttctacatcctgggccctgaggaggaggatgctgggggcctgcacgtgctgctgacagccacccctgtgggcctgaccctgctgattgtgctggccgccctgggcttcttctacggcaagaagaggaacagaaccctgtatgcctctgtgaaccctgagtacttcagcgccagtgacatgtatgtgcctgatgagtgggaggtgccccgggagcagatcagcatcatccgggagctgggccagggcagctttggcatggtgtatgagggcctggcccggggcctggaggccggggaggagagcacccctgtggccctgaagacagtgaatgagctggccagccccagagaatgtattgagttcctgaaggaggcctctgtgatgaaggccttcaagtgccaccacgtggtgcggctgctgggcgtggtgtcccagggccagcccaccctggtgatcatggagctgatgaccaggggggacctgaagagccacctgcggagcctgcggcctgaggccgagaacaaccctggcctgccccagcctgccctgggggagatgatccagatggccggggagattgctgatggcatggcctacctggccgccaacaagtttgtgcaccgggacctggccgccaggaactgcatggtgtcccaggacttcaccgtgaagattggagactttggcatgaccagagatgtgtatgaaacagactactacaggaagggcggcaagggcctgctgcctgtgcgctggatggcccctgagagcctgaaggatggcatcttcaccacccacagtgatgtgtggagctttggagtggtgctgtgggagatcgtgaccctggccgagcagccctaccagggcctgagcaatgagcaggtgctgaagtttgtgatggatggaggagtgctggaggagctggagggctgccccctgcagctgcaggagctgatgagccgctgctggcagcccaacccccggctgcggcccagcttcacccacatcctggacagcatccaggaggagctgcggcccagcttccggctgctgtccttctactacagccctgagtgccgcggggcccggggcagcctgcccaccacagatgctgagccagacagcagccccaccccccgggactgcagcccccagaatggaggccctggccactag

SEQ ID NO: 156102 - DNA, 3060 bp, synthetic construct
  misc_feature 1..3060: note = Description of Artificial Sequence: Synthetic coding sequence
  source 1..3060: mol_type = other DNA
atgagataccgcctggcctggctgctgcacccagccctgcccagcaccttccgctctgtgctgggcgcccggctgcccccacctgagcggctgtgtggcttccagaagaagacctacagcaagatgaacaacccagccatcaagagaattggcaaccacatcaccaagagccctgaggacaagcgggagtaccggggcctggagctggccaacggcatcaaggtgctgctgatcagtgaccccaccacagacaagagcagcgctgccctggatgtgcacatcggcagcctgagtgacccccccaacattgctggcctgagccacttctgtgagcacatgctgttcctgggcaccaagaagtaccccaaggaaaatgagtacagccagttcctgtctgagcacgccggcagcagcaatgccttcaccagcggggagcacaccaactactactttgatgtgtcccatgagcacctggagggcgccctggacagatttgcccagttcttcctgtgccccctgtttgatgagagctgcaaggaccgggaggtgaatgctgtggacagcgagcacgagaagaatgtgatgaatgatgcctggaggctcttccagctggagaaggccaccggcaaccccaagcaccccttcagcaagtttggcaccggcaacaagtacaccctggagacccggcccaaccaggagggcattgatgtgcggcaggagctgctgaagttccacagcgcctactacagcagcaacctgatggctgtgtgtgtgctgggccgggagagcctggatgacctgaccaacctggtggtgaagctgttcagcgaggtggagaacaagaatgtgcccctgcctgagttccctgagcaccccttccaggaggagcacctgaagcagctgtacaagatcgtgcccatcaaggacatccggaacctgtatgtgaccttccccatcccagacctgcagaagtactacaagagcaaccctggccactacctgggccacctgattggccacgagggccctggcagcctgctgtctgagctgaagagcaagggctgggtgaacaccctggtgggcggccagaaggagggcgcccggggcttcatgttcttcatcatcaacgtggacctgacagaggagggcctgctgcacgtggaggacatcatcctgcacatgttccagtacatccagaagctgcgggcagagggcccccaggagtgggtgttccaggagtgcaaggacctgaatgctgtggccttccgcttcaaggacaaggagcggccccggggctacaccagcaagattgctggcatcctgcactactaccccctggaggaggtgctgacagctgagtacctgctggaggagttccggccagacctgattgagatggtgctggacaagctgcggccagaaaatgtgcgggtggccatcgtgtccaagagctttgagggcaagacagacagaacagaggagtggtacggcacccagtacaagcaggaggccatcccagatgaagtcatcaagaagtggcagaatgctgacctgaatggcaagttcaagctgcccaccaagaatgagttcatccccaccaactttgagatcctgcccctggagaaggaggccaccccctacccagccctgatcaaggacacagccatgagcaagctgtggttcaagcaggatgacaagttcttcctgcccaaggcctgcctgaactttgagttcttcagcccctttgcctacgtggaccccctgcactgcaacatggcctacctgtacctggagctgctgaaggacagcctgaatgaatatgcctatgctgctgagctggccggcctgtcctatgacctgcagaacaccatctacggcatgtacctgtctgtgaagggctacaatgacaagcagcccatcctgctgaagaagatcatcgagaagatggccacctttgaaattgatgagaagagatttgagatcatcaaggaggcctacatgaggagcctgaacaacttccgggcagagcagccccaccagcacgccatgtactacctgcggctgctgatgacagaggtggcctggaccaaggatgagctgaaggaggccctggatgatgtgaccctgccccggctgaaggccttcatcccccagctgctgagccggctgcacatcgaggccctgctgcacggcaacatcaccaagcaggccgccctgggcatcatgcagatggtggaggacaccctcatcgagcacgcccacaccaagcccctgctgcccagccagctggtgcgctaccgggaggtgcagctgcctgaccggggctggtttgtgtaccagcagagaaatgaggtgcacaacaactgtggcatcgagatctactaccagacagacatgcagagcaccagcgagaacatgttcctggagctgttctgccagatcatcagcgagccctgcttcaacaccctgcggaccaaggagcagctgggctacatcgtgttttctggcccccggcgggccaacggcatccagggcctgcgcttcatcatccagagcgagaagccaccccactacctggagagccgggtggaggccttcctgatcaccatggagaagagcattgaggacatgacagaggaggccttccagaagcacatccaggccctggccatccggcggctggacaagcccaagaagctgtctgcagaatgtgccaagtactggggcgagatcatcagccagcagtacaactttgaccgggacaacacagaggtggcctacctgaagaccctgaccaaggaggacatcatcaagttctacaaggagatgctggccgtggatgccccccggcggcacaaggtgtctgtgcacgtgctggcccgggagatggacagctgccctgtggtgggggagttcccctgccagaatgacatcaacctgagccaggccccagccctgccccagcctgaggtgatccagaacatgacagagttcaagaggggcctgcccctcttccccctggtgaagccccacatcaacttcatggccgccaagctgtag

SEQ ID NO: 156103 - DNA, 1395 bp, synthetic construct
  misc_feature 1..1395: note = Description of Artificial Sequence: Synthetic coding sequence
  source 1..1395: mol_type = other DNA
atgagcaagctgtggttcaagcaggatgacaagttcttcctgcccaaggcctgcctgaactttgagttcttcagcccctttgcctacgtggaccccctgcactgcaacatggcctacctgtacctggagctgctgaaggacagcctgaatgaatatgcctatgctgctgagctggccggcctgtcctatgacctgcagaacaccatctacggcatgtacctgtctgtgaagggctacaatgacaagcagcccatcctgctgaagaagatcatcgagaagatggccacctttgaaattgatgagaagagatttgagatcatcaaggaggcctacatgaggagcctgaacaacttccgggcagagcagccccaccagcacgccatgtactacctgcggctgctgatgacagaggtggcctggaccaaggatgagctgaaggaggccctggatgatgtgaccctgccccggctgaaggccttcatcccccagctgctgagccggctgcacatcgaggccctgctgcacggcaacatcaccaagcaggccgccctgggcatcatgcagatggtggaggacaccctgattgaacatgcccacaccaagcccctgctgcccagccagctggtgcgctaccgggaggtgcagctgcctgaccggggctggtttgtgtaccagcagagaaatgaggtgcacaacaactgtggcatcgagatctactaccagacagacatgcagagcaccagcgagaacatgttcctggagctgttctgccagatcatcagcgagccctgcttcaacaccctgcggaccaaggagcagctgggctacatcgtgttcagcggcccccggcgggccaacggcatccagggcctgcgcttcatcatccagagcgagaagccaccccactacctggagagccgggtggaggccttcctgatcaccatggagaagagcattgaggacatgacagaggaggccttccagaagcacatccaggccctggccatccggcggctggacaagcccaagaagctgtctgcagaatgtgccaagtactggggcgagatcatcagccagcagtacaactttgaccgggacaacacagaggtggcctacctgaagaccctgaccaaggaggacatcatcaagttctacaaggagatgctggccgtggatgcccccaggaggcacaaggtgtctgtgcacgtgctggcccgggagatggacagctgccctgtggtgggggagttcccctgccagaatgacatcaacctgagccaggccccagccctgccccagcctgaggtgatccagaacatgacagagttcaagaggggcctgcccctcttccccctggtgaagccccacatcaacttcatggccgccaagctgtag

SEQ ID NO: 156104 - DNA, 774 bp, synthetic construct
  misc_feature 1..774: note = Description of Artificial Sequence: Synthetic coding sequence
  source 1..774: mol_type = other DNA
gagttcatcatccggggcggccgggtgcccagccactgcctgcacttcagccgctccttccagaagaagacctacagcaagatgaacaacccagccatcaagagaattggcaaccacatcaccaagagccctgaggacaagcgggagtaccggggcctggagctggccaacggcatcaaggtgctgctgatcagtgaccccaccacagacaagagcagcgctgccctggatgtgcacatcggcagcctgagtgacccccccaacattgctggcctgagccacttctgtgagcacatgctgttcctgggcaccaagaagtaccccaaggaaaatgagtacagccagttcctgtctgagcacgccggcagcagcaatgccttcaccagcggggagcacaccaactactactttgatgtgtcccatgagcacctggagggcgccctggacagatttgcccagttcttcctgtgccccctgtttgatgagagctgcaaggaccgggaggtgaatgctgtggacagcgagcacgagaagaatgtgatgaatgatgcctggaggctcttccagctggagaaggccaccggcaaccccaagcaccccttcagcaagtttggcaccggcaacaagtacaccctggagacccggcccaaccaggagggcattgatgtgcggcaggagctgctgaagttccacagcgcctactacagcagcaacctgatggctgtgtgtgtgctgggccgggagagcctggatgacctgaccaacctggtgtag

SEQ ID NO: 156105 - DNA, 396 bp, synthetic construct
  misc_feature 1..396: note = Description of Artificial Sequence: Synthetic coding sequence
  source 1..396: mol_type = other DNA
atggacccccggctgcctgcctgggccctggtgctgctgggccctgccctggtgtttgccctgggccctgcccccaccccagagatgagggagaagctgtgtggccaccactttgtgcgggccctggtgcgggtgtgtggcggcccccgctggagcacagaggcccggcggcctgccaccggcggggaccgggagctgctgcagtggctggagcggcggcacctgctgcacggcctggtggccgacagcaacctgaccctgggccctggcctgcagcccctgccccagaccagccaccaccaccgccaccacagagctgctgccaccaacccagcccgctactgctgcctgagcggctgcacccagcaggacctgctgaccctgtgcccctactag

SEQ ID NO: 156106 - DNA, 474 bp, synthetic construct
  misc_feature 1..474: note = Description of Artificial Sequence: Synthetic coding sequence
  source 1..474: mol_type = other DNA
atggacccccggctgcctgcctgggccctggtgctgctgggccctgccctggtgtttgccctgggccctgcccccaccccagagatgagggagaagctgtgtggccaccactttgtgcgggccctggtgcgggtgtgtggcggcccccgctggagcacagaggcccggcggcctgccaccggcggggaccagcgggagagccacagcgtgtcccaggccggcctgaagctgctgagcagcagcaacccccccaccctgaccttccagagcgtgggcatcagtgatgtgtcctgctacagcggctggagagatgacatctgcagcatgggctggtggcccaccgtcatcagccgctgggacctggcctgcagcccctgcccccggcccctgaccatcacagccaccaccgtgcagctgccccccaccctgcacgccacagctgcctctgtggccgtgcccaacaagacctgctag

SEQ ID NO: 156107 - DNA, 420 bp, synthetic construct
  misc_feature 1..420: note = Description of Artificial Sequence: Synthetic coding sequence
  source 1..420: mol_type = other DNA
atggccagcctcttccgcagctacctgcctgccatctggctgctgctgagccagctgctgcgggagagcctggccgctgagctgcggggctgcggccccaggtttgggaagcacctgctgagctactgccccatgcctgagaagaccttcaccaccacccctgggggctggctgctggagagcggccggcccaaggagatggtgtccaccagcaacaacaaggatggccaggccctgggcaccaccagcgagttcatccccaacctgagccctgagctgaagaagcccctgtctgagggccagcccagcctgaagaagatcatcctgagcaggaagaagaggagcggccgccacagatttgaccccttctgctgtgaggtgatctgtgatgatggcacctctgtgaagctgtgcacctag

SEQ ID NO: 156108 - DNA, 408 bp, synthetic construct
  misc_feature 1..408: note = Description of Artificial Sequence: Synthetic coding sequence
  source 1..408: mol_type = other DNA
atgaagggcagcatcttcaccctcttcctgttctctgtgctgtttgccatcagcgaggtgcgcagcaaggagagcgtgcggctgtgtggcctggagtacatccgcaccgtcatctacatctgtgccagcagccgctggaggaggcaccaggagggcatcccccaggcccagcaggccgagactggaaacagcttccagctgccccacaagcgggagttcagcgaggagaacccagcccagaacctgcccaaggtggatgccagcggggaggaccggctgtggggcggccagatgcccacagaggagctgtggaagagcaagaagcacagcgtgatgagccggcaggacctgcagaccctgtgctgcacagatggctgcagcatgacagacctgagcgccctgtgctag

SEQ ID NO: 156109 - DNA, 642 bp, synthetic construct
  misc_feature 1..642: note = Description of Artificial Sequence: Synthetic coding sequence
  source 1..642: mol_type = other DNA
atgccccggctgctgcggctgagcctgctgtggctgggcctgctgctggtgcgcttcagccgggagctgagtgacatcagcagcgccaggaagctgtgtggccgctacctggtgaaggagattgagaagctgtgtggccacgccaactggagccagttccgctttgaggaggagacccccttcagccggctgattgcccaggccagcgagaaggtggaggcctacagcccctaccagtttgagagcccccagacagccagccctgcccggggccggggcaccaaccctgtgtccacctcctgggaggaggccgtgaacagctgggagatgcagagcctgcctgagtacaaggacaagaagggctacagccccctgggcaagacccgggagttcagcagcagccacaacatcaacgtgtacatccatgaaaatgccaagttccagaagaagagaagaaacaagatcaagaccctgagcaacctcttctggggccaccacccccagaggaagagaagaggctacagcgagaagtgctgcctgaccggctgcaccaaggaggagctgagcatcgcctgcctgccctacatcgacttcaagaggctgaaggagaagaggagcagcctggtgaccaagatctactag

SEQ ID NO: 156110 - DNA, 1734 bp, synthetic construct
  misc_feature 1..1734: note = Description of Artificial Sequence: Synthetic coding sequence
  source 1..1734: mol_type = other DNA
atgaacaagctgtacatcggcaacctgaatgaatctgtgaccccagctgacctggagaaggtgtttgctgagcacaagatctcctacagcggccagttcctggtgaagagcggctacgcctttgtggactgcccagatgagcactgggccatgaaggccatcgagaccttcagcggcaaggtggagctgcagggcaagaggctggagattgagcacagcgtgcccaagaagcagaggagcaggaagatccagatccggaacatccccccccagctgcgctgggaggtgctggacagcctgctggcccagtatggcaccgtggagaactgtgagcaggtgaacacagaaagtgaaacagctgtggtgaatgtgacctacagcaaccgggagcagacccggcaggccatcatgaagctgaatggccaccagctggagaaccacgccctgaaggtgtcctacatcccagatgagcagatcgcccagggcccagaaaatggaagaagaggaggcttcggcagccggggccagccccggcagggcagccctgtggccgccggggccccagccaagcagcagcaggtggacatccccctgcggctgctggtgcccacccagtatgtgggcgccatcatcggcaaggagggcgccaccatccggaacatcaccaagcagacccagagcaagattgatgtgcacaggaaagaaaatgctggagctgctgagaaggccatctctgtgcacagcaccccagagggctgcagcagcgcctgcaagatgatcctggagatcatgcacaaggaggccaaggacaccaagacagcagatgaggtgcccctgaagatcctggcccacaacaactttgtgggccgcctcatcggcaaggagggcaggaacctgaagaaggtggagcaggacacagagaccaagatcaccatcagcagcctgcaggacctgaccctgtacaaccctgagaggaccatcaccgtgaagggggccatcgagaactgctgcagagctgagcaggagatcatgaagaaggtgcgggaggcctatgaaaatgatgtggccgccatgagcctgcagagccacctgatccctggcctgaacctggccgctgtgggcctcttccctgccagcagcagcgctgtgcccccaccacccagctctgtgactggagctgccccctacagcagcttcatgcaggcccctgagcaggagatggtgcaggtgttcatcccagcccaggccgtgggcgccatcatcggcaagaagggccagcacatcaagcagctgagcagatttgccagcgccagcatcaagatcgcccctcctgagaccccagacagcaaggtgaggatggtgatcatcactggacctcctgaggcccagttcaaggcccagggccgcatctacggcaagctgaaggaggagaacttcttcggccccaaggaggaggtgaagctggagacccacatccgggtgcctgccagcgctgctggccgggtgattggaaaaggaggcaagacagtgaatgagctgcagaacctgacagctgctgaggtggtggtgccccgggaccagaccccagatgaaaatgaccaggtgattgtgaagatcatcggccacttctacgccagccagatggcccagaggaagatccgggacatcctggcccaggtgaagcagcagcaccagaagggccagagcaaccaggcccaggcccggaggaagtag

SEQ ID NO: 156111 - DNA, 1317 bp, synthetic construct
  misc_feature 1..1317: note = Description of Artificial Sequence: Synthetic coding sequence
  source 1..1317: mol_type = other DNA
atgaacaagctgtacatcggcaacctgaatgaatctgtgaccccagctgacctggagaaggtgtttgctgagcacaagatctcctacagcggccagttcctggtgaagagcggctacgcctttgtggactgcccagatgagcactgggccatgaaggccatcgagaccttcagcggcaaggtggagctgcagggcaagaggctggagattgagcacagcgtgcccaagaagcagaggagcaggaagatccagatccggaacatccccccccagctgcgctgggaggtgctggacagcctgctggcccagtatggcaccgtggagaactgtgagcaggtgaacacagaaagtgaaacagctgtggtgaatgtgacctacagcaaccgggagcagacccggcaggctgatgaggtgcccctgaagatcctggcccacaacaactttgtgggccgcctgattggcaaggagggcaggaacctgaagaaggtggagcaggacacagagaccaagatcaccatcagcagcctgcaggacctgaccctgtacaaccctgagaggaccatcaccgtgaagggggccatcgagaactgctgcagagctgagcaggagatcatgaagaaggtgcgggaggcctatgaaaatgatgtggccgccatgagcctgcagagccacctgatccctggcctgaacctggccgctgtgggcctcttccctgccagcagcagcgctgtgcccccaccacccagctctgtgactggagctgccccctacagcagcttcatgcaggcccctgagcaggagatggtgcaggtgttcatcccagcccaggccgtgggcgccatcatcggcaagaagggccagcacatcaagcagctgagcagatttgccagcgccagcatcaagatcgcccctcctgagaccccagacagcaaggtgaggatggtgatcatcaccggccccccagaggcccagttcaaggcccagggccgcatctacggcaagctgaaggaggagaacttcttcggccccaaggaggaggtgaagctggagacccacatccgggtgcctgccagcgctgctggccgggtcatcggcaagggcggcaagacagtgaatgagctgcagaacctgacagctgctgaggtggtggtgccccgggaccagaccccagatgaaaatgaccaggtgattgtgaagatcatcggccacttctacgccagccagatggcccagaggaagatccgggacatcctggcccaggtgaagcagcagcaccagaagggccagagcaaccaggcccaggcccggaggaagtag

SEQ ID NO: 156112 - DNA, 1671 bp, synthetic construct
  misc_feature 1..1671: note = Description of Artificial Sequence: Synthetic coding sequence
  source 1..1671: mol_type = other DNA
atgatgaacaagctgtacatcggcaacctgagccctgctgtgacagcagatgacctgcggcagctgtttggagacaggaagctgcccctggccggccaggtgctgctgaagagcggctacgcctttgtggactacccagaccagaactgggccatccgggccatcgagaccctgagcggcaaggtggagctgcacggcaagatcatggaggtggactacagcgtgtccaagaagctgcggagcaggaagatccagatccggaacatccccccccacctgcagtgggaggtgctggatggcctgctggcccagtatggaacagtggagaatgtggagcaggtgaacacagacacagaaacagctgtggtgaatgtgacctacgccacccgggaggaggccaagatcgccatggagaagctgagcggccaccagtttgagaactacagcttcaagatctcctacatcccagatgaggaggtgagcagccccagccccccccagagggcccagagaggagaccacagcagccgggagcagggccacgcccctgggggcaccagccaggcccggcagattgacttccccctgcgcatcctggtgcccacccagtttgtgggcgccatcatcggcaaggagggcctgaccatcaagaacatcaccaagcagacccagagccgggtggacatccacaggaaagaaaattctggagctgctgagaagcctgtgaccatccacgccaccccagagggcaccagcgaggcctgcaggatgatcctggagatcatgcagaaggaggctgatgagaccaagctggccgaggagatccccctgaagatcctggcccacaacggcctggtgggccgcctcatcggcaaggagggcaggaacctgaagaagattgagcacgagaccggcaccaagatcaccatcagcagcctgcaggacctgagcatctacaaccctgagaggaccatcaccgtgaagggcaccgtggaggcctgtgccagcgctgagattgagatcatgaagaagctgcgggaggcctttgaaaatgacatgctggccgtgaacacccacagcggctacttcagcagcctgtacccccaccaccagtttggccccttcccccaccaccacagctacccagagcaggagatcgtgaacctcttcatccccacccaggccgtgggcgccatcatcggcaagaagggggcccacatcaagcagctggccaggtttgctggggccagcatcaagatcgccccagctgagggcccagatgtgtctgagaggatggtgatcatcaccggccccccagaggcccagttcaaggcccagggccgcatctttgggaagctgaaggaggagaacttcttcaaccccaaggaggaggtgaagctggaggcccacatccgggtgcccagcagcacagctggccgggtcatcggcaagggcggcaagacagtgaatgagctgcagaacctgaccagcgctgaggtgattgtgccccgggaccagaccccagatgaaaatgaggaggtgattgtgcgcatcatcggccacttctttgccagccagacagcccagaggaagatccgggagatcgtgcagcaggtgaagcagcaggagcagaagtacccccagggcgtggccagccagaggagcaagtag

SEQ ID NO: 156113 - DNA, 1800 bp, synthetic construct
  misc_feature 1..1800: note = Description of Artificial Sequence: Synthetic coding sequence
  source 1..1800: mol_type = other DNA
atgatgaacaagctgtacatcggcaacctgagccctgctgtgacagcagatgacctgcggcagctgtttggagacaggaagctgcccctggccggccaggtgctgctgaagagcggctacgcctttgtggactacccagaccagaactgggccatccgggccatcgagaccctgagcggcaaggtggagctgcacggcaagatcatggaggtggactacagcgtgtccaagaagctgcggagcaggaagatccagatccggaacatccccccccacctgcagtgggaggtgctggatggcctgctggcccagtatggaacagtggagaatgtggagcaggtgaacacagacacagaaacagctgtggtgaatgtgacctacgccacccgggaggaggccaagatcgccatggagaagctgagcggccaccagtttgagaactacagcttcaagatctcctacatcccagatgaggaggtgagcagccccagccccccccagagggcccagagaggagaccacagcagccgggagcagggccacgcccctgggggcaccagccaggcccggcagattgacttccccctgcgcatcctggtgcccacccagtttgtgggcgccatcatcggcaaggagggcctgaccatcaagaacatcaccaagcagacccagagccgggtggacatccacaggaaagaaaattctggagctgctgagaagcctgtgaccatccacgccaccccagagggcaccagcgaggcctgcaggatgatcctggagatcatgcagaaggaggctgatgagaccaagctggccgaggagatccccctgaagatcctggcccacaacggcctggtgggccgcctcatcggcaaggagggcaggaacctgaagaagattgagcacgagaccggcaccaagatcaccatcagcagcctgcaggacctgagcatctacaaccctgagaggaccatcaccgtgaagggcaccgtggaggcctgtgccagcgctgagattgagatcatgaagaagctgcgggaggcctttgaaaatgacatgctggccgtgaaccagcaggccaacctgatccctggcctgaacctgagcgccctgggcatcttcagcacaggcctgtctgtgctgagccccccagctggccccaggggggcccctcctgctgccccctaccaccccttcaccacccacagcggctacttcagcagcctgtacccccaccaccagtttggccccttcccccaccaccacagctacccagagcaggagatcgtgaacctcttcatccccacccaggccgtgggcgccatcatcggcaagaagggggcccacatcaagcagctggccaggtttgctggggccagcatcaagatcgccccagctgagggcccagatgtgtctgagaggatggtgatcatcactggacctcctgaggcccagttcaaggcccagggccgcatctttgggaagctgaaggaggagaacttcttcaaccccaaggaggaggtgaagctggaggcccacatccgggtgcccagcagcacagctggccgggtgattggaaaaggaggcaagacagtgaatgagctgcagaacctgaccagcgctgaggtgattgtgccccgggaccagaccccagatgaaaatgaggaggtgattgtgcgcatcatcggccacttctttgccagccagacagcccagaggaagatccgggagatcgtgcagcaggtgaagcagcaggagcagaagtacccccagggcgtggccagccagaggagcaagtag

SEQ ID NO: 156114 - DNA, 1629 bp, synthetic construct
  misc_feature 1..1629: note = Description of Artificial Sequence: Synthetic coding sequence
  source 1..1629: mol_type = other DNA
atgttcagctgccccggccactaccacgtggatggcttcctgaaccctggcagcaggaagatccagatccggaacatccccccccacctgcagtgggaggtgctggatggcctgctggcccagtatggcaccgtggagaatgtggagcaggtgtttgccttcagcctggtgaacacagacacagaaacagctgtggtgaatgtgacctacgccacccgggaggaggccaagatcgccatggagaagctgagcggccaccagtttgagaactacagcttcaagatctcctacatcccagatgaggaggtgagcagccccagccccccccagagggcccagagaggagaccacagcagccgggagcagggccacgcccctgggggcaccagccaggcccggcagattgacttccccctgcgcatcctggtgcccacccagtttgtgggcgccatcatcggcaaggagggcctgaccatcaagaacatcaccaagcagacccagagccgggtggacatccacaggaaggagaacagcggggctgctgagaagcctgtgaccatccacgccaccccagagggcaccagcgaggcctgcaggatgatcctggagatcatgcagaaggaggctgatgagaccaagctggccgaggagatccccctgaagatcctggcccacaacggcctggtgggccgcctgattggcaaggagggcaggaacctgaagaagattgaacatgaaacaggcaccaagatcaccatcagcagcctgcaggacctgagcatctacaaccctgagaggaccatcaccgtgaagggcaccgtggaggcctgtgccagcgctgagattgagatcatgaagaagctgcgggaggcctttgaaaatgacatgctggccgtgaaccagcaggccaacctgatccctggcctgaacctgagcgccctgggcatcttcagcacaggcctgtctgtgctgagccccccagctggccccaggggggcccccccagctgccccctaccaccccttcaccacccacagcggctacttcagcagcctgtacccccaccaccagtttggccccttcccccaccaccacagctacccagagcaggagatcgtgaacctcttcatccccacccaggccgtgggcgccatcatcggcaagaagggggcccacatcaagcagctggccaggtttgctggggccagcatcaagatcgccccagctgagggcccagatgtgtctgagaggatggtgatcatcaccggccccccagaggcccagttcaaggcccagggccgcatctttgggaagctgaaggaggagaacttcttcaaccccaaggaggaggtgaagctggaggcccacatccgggtgcccagcagcacagctggccgggtcatcggcaagggcggcaagacagtgaatgagctgcagaacctgaccagcgctgaggtgattgtgccccgggaccagaccccagatgaaaatgaggaggtgattgtgcgcatcatcggccacttctttgccagccagacagcccagaggaagatccgggagatcgtgcagcaggtgaagcagcaggagcagaagtacccccagggcgtggccagccagaggagcaagtag

SEQ ID NO: 156115 - DNA, 1740 bp, synthetic construct
  misc_feature 1..1740: note = Description of Artificial Sequence: Synthetic coding sequence
  source 1..1740: mol_type = other DNA
atgaacaagctgtacatcggcaacctgtctgaaaatgctgcccccagcgacctggagagcatcttcaaggatgccaagatccctgtgtctggccccttcctggtgaagacaggctacgcctttgtggactgcccagatgagagctgggccctgaaggccatcgaggccctgagcggcaagattgagctgcacggcaagcccatcgaggtggagcacagcgtgcccaagaggcagaggatcaggaagctgcagatccggaacatccccccccacctgcagtgggaggtgctggacagcctgctggtgcagtatggagtggtggagagctgtgagcaggtgaacacagattctgaaacagctgtggtgaatgtgacctacagcagcaaggaccaggcccggcaggccctggacaagctgaatggcttccagctggagaacttcaccctgaaggtggcctacatcccagatgagatggccgcccagcagaaccccctgcagcagccccggggcagaagaggcctgggccagaggggcagcagccggcagggcagccctggctctgtgtccaagcagaagccctgtgacctgcccctgcggctgctggtgcccacccagtttgtgggcgccatcatcggcaaggagggcgccaccatccggaacatcaccaagcagacccagagcaagattgatgtgcacaggaaagaaaatgctggagctgctgagaagagcatcaccatcctgagcaccccagagggcaccagcgctgcctgcaagagcatcctggagatcatgcacaaggaggcccaggacatcaagttcacagaggagatccccctgaagatcctggcccacaacaactttgtgggccgcctcatcggcaaggagggcaggaacctgaagaagattgagcaggacacagacaccaagatcaccatcagccccctgcaggagctgaccctgtacaaccctgagaggaccatcaccgtgaagggaaatgtggagacctgtgccaaggccgaggaggagatcatgaagaagatccgggagagctatgaaaatgacatcgcctccatgaacctgcaggcccacctgatccctggcctgaacctgaatgccctgggcctcttcccccccaccagcggcatgcccccacccaccagcggccccccatctgccatgaccccaccctacccccagtttgagcagagcgagacagaaacagtgcacctgttcatcccagccctgtctgtgggcgccatcatcggcaagcagggccagcacatcaagcagctgagcagatttgctggggccagcatcaagatcgccccagctgaggccccagatgccaaggtgaggatggtgatcatcactggacctcctgaggcccagttcaaggcccagggccgcatctacggcaagatcaaggaggagaactttgtgagccccaaggaggaggtgaagctggaggcccacatccgggtgcccagctttgctgctggccgggtgattggaaaaggaggcaagacagtgaatgagctgcagaacctgagcagcgctgaggtggtggtgccccgggaccagaccccagatgaaaatgaccaggtggtggtgaagatcaccggccacttctacgcctgccaggtggcccagaggaagatccaggagatcctgacccaggtgaagcagcaccagcagcagaaggccctgcagagcggccccccccagagcaggaggaagtag

SEQ ID NO: 156116 - DNA, 7476 bp, synthetic construct
  misc_feature 1..7476: note = Description of Artificial Sequence: Synthetic coding sequence
  source 1..7476: mol_type = other DNA
atgggcgctgctgctggccgcagcccccacctgggccctgccccagcccggcggccccagaggagcctgctgctgctgcagctgctgctgctggtggccgcccctggcagcacccaggcccaggccgcccccttccctgagctgtgcagctacacctgggaggccgtggacaccaagaacaacgtgctgtacaagatcaacatctgtggctctgtggacatcgtgcagtgtggccccagcagcgctgtgtgcatgcatgacctgaagaccaggacctaccacagcgtgggggacagcgtgctgcggagcgccaccaggagcctgctggagttcaacaccaccgtgtcctgtgaccagcagggcaccaaccaccgggtgcagagcagcatcgccttcctgtgtgggaagaccctgggcaccccagagtttgtgacagccacagaatgtgtgcactactttgagtggaggaccacagctgcctgcaagaaggacatcttcaaggccaacaaggaggtgccctgctacgtgtttgatgaggagctgaggaagcatgacctgaaccccctcatcaagctgagcggggcctacctggtggatgacagcgaccctgacaccagcctcttcatcaacgtgtgccgggacatcgacaccctgcgggaccccggcagccagctgcgggcctgccccccaggcacagctgcctgcctggtgcggggccaccaggcctttgatgtgggccagcccagagatggcctgaagctggtgaggaaggaccggctggtgctgtcctatgtgcgggaggaggccggcaagctggacttctgtgatggccacagccctgctgtgaccatcacctttgtgtgccccagcgagcggcgggagggcaccatccccaagctgacagccaagagcaactgccgctatgaaattgagtggatcacagaatatgcctgccaccgggactacctggagagcaagacctgcagcctgtctggagagcagcaggatgtgtccattgacctgacccccctggcccagagcggcggcagcagctacatcagtgatggcaaggagtacctgttctacctgaatgtgtgtggggagacagagatccagttctgcaacaagaagcaggccgctgtgtgccaggtgaagaagagtgacaccagccaggtgaaggctgctggccgctaccacaaccagaccctgcgctacagtgatggagacctgaccctcatctactttggaggagatgaatgtagcagcggcttccagaggatgtctgtcatcaactttgagtgcaacaagacagctggaaatgatggcaagggcacccctgtgttcaccggggaggtggactgcacctacttcttcacctgggacacagaatatgcctgtgtgaaggagaaggaggacctgctgtgtggggccacagatggcaagaagagatatgacctgagcgccctggtgagacatgctgagcctgagcagaactgggaggccgtggatggcagccagacagaaacagagaagaagcacttcttcatcaacatctgccaccgggtgctgcaggagggcaaggcccggggctgcccagaagatgctgctgtgtgtgctgtggacaagaatggcagcaagaacctgggcaagttcatcagcagccccatgaaggagaagggcaacatccagctgagctacagtgatggagatgactgtggccacggcaagaagatcaagaccaacatcaccctggtgtgcaagccaggggacctggagagcgcccctgtgctgcggaccagcggggagggcggctgcttctatgaatttgagtggcacacagctgctgcctgtgtgctgagcaagacagaaggagagaactgcaccgtgtttgacagccaggccggcttctcctttgacctgagccccctgaccaagaagaatggagcctacaaggtggagaccaagaagtatgacttctacatcaacgtgtgtggccctgtgtctgtgagcccctgccagcctgacagcggggcctgccaggtggccaagagtgatgagaagacctggaacctgggcctgagcaatgccaagctgagctactatgatggcatgatccagctgaactacagaggaggcaccccctacaacaatgaaagacacaccccccgggccaccctcatcaccttcctgtgtgacagagatgctggggtgggcttccctgagtaccaggaggaggacaacagcacctacaacttccgctggtacaccagctatgcctgcccagaggagcccctggagtgtgtggtgacagaccccagcaccctggagcagtatgacctgagcagcctggccaagtctgagggcggcctgggcggcaactggtacgccatggacaacagcggggagcacgtgacctggaggaagtactacatcaacgtgtgccggcccctgaaccctgtgcccggctgcaacagatatgccagcgcctgccagatgaagtatgagaaggaccagggcagcttcacagaggtggtgtccatcagcaacctgggcatggccaagacaggccctgtggtggaggacagcggcagcctgctgctggagtatgtgaatggaagtgcctgcaccaccagtgatggccggcagaccacctacaccacccgcatccacctggtgtgcagccggggccgcctgaacagccaccccatcttcagcctgaactgggagtgtgtggtgtccttcctgtggaacacagaggccgcctgccccatccagaccaccacagacacagaccaggcctgcagcatccgggaccccaacagcggctttgtgttcaacctgaaccccctgaacagcagccagggctacaacgtgtctggaattggcaagatcttcatgttcaacgtgtgtggcaccatgcctgtgtgtggcaccatcctgggcaagccagccagcggctgtgaggccgagacccagacagaggagctgaagaactggaagccagcccggcctgtgggcatcgagaagagcctgcagctgagcacagagggcttcatcaccctgacctacaagggccccctgagcgccaagggcacagcagatgccttcatcgtgcgctttgtgtgcaatgatgatgtgtacagcggccccctgaagttcctgcaccaggacatcgacagcggccagggcatccggaacacctactttgaatttgaaacagccctggcctgtgtgcccagccctgtggactgccaggtgacagacctggccggaaatgaatatgacctgaccggcctgagcacagtgaggaagccctggacagctgtggacacctctgtggatggcaggaagaggaccttctacctgtctgtgtgcaaccccctgccctacatccctggctgccagggcagcgctgtgggcagctgcctggtgtctgagggcaacagctggaacctgggcgtggtgcagatgagcccccaggccgccgccaacggcagcctgagcatcatgtatgtgaatggagacaagtgtggcaaccagcgcttcagcacccgcatcacctttgaatgtgcccagatcagcggcagccctgccttccagctgcaggacggctgtgaatatgtgttcatctggaggacagtggaggcctgccctgtggtgcgggtggagggggacaactgtgaggtgaaggaccccaggcatggcaacctgtatgacctgaagcccctgggcctgaatgacaccatcgtgtctgctggggagtacacctactacttccgggtgtgtgggaagctgagcagtgatgtgtgccccaccagtgacaagagcaaggtggtgagcagctgccaggagaagcgggagccccagggcttccacaaggtggccggcctgctgacccagaagctgacctatgaaaatggcctgctgaagatgaacttcaccggcggggacacctgccacaaggtgtaccagaggagcacagccatcttcttctactgtgaccggggcacccagaggcctgtgttcctgaaggagaccagtgactgcagctacctgtttgagtggaggacccagtatgcctgccccccatttgacctgacagagtgcagcttcaaggatggagctggcaacagctttgacctgagcagcctgagccgctacagcgacaactgggaggccatcactggaactggagaccctgagcactacctgatcaacgtgtgcaagagcctggccccccaggccggcacagagccctgccccccagaggccgccgcctgcctgctgggcggcagcaagcctgtgaacctgggccgggtgagagatggcccccagtggagagatggcatcatcgtgctgaagtatgtggatggagacctgtgcccagatggcatcaggaagaagagcaccaccatccgcttcacctgcagcgagagccaggtgaacagccggcccatgttcatctctgctgtggaggactgtgagtacacctttgcctggcccacagccacagcctgccccatgaagagcaatgaacatgatgactgccaggtgaccaaccccagcacaggccacctgtttgacctgagcagcctgagcggccgggccggcttcaccgctgcctacagcgagaagggcctggtgtacatgagcatctgtggagaaaatgaaaactgccccccaggagtgggcgcctgcttcggccagacccgcatctctgtgggcaaggccaacaagaggctgcgctacgtggaccaggtgctgcagctggtgtacaaggatggcagcccctgccccagcaagagcggcctgagctacaagagcgtcatcagctttgtgtgcaggcctgaggcccggcccaccaaccggcccatgctgatcagcctggacaagcagacctgcaccctcttcttctcctggcacacccccctggcctgtgagcaggccacagaatgttctgtgagaaatggcagcagcatcgtggacctgagccccctcatccacaggactggaggctatgaggcctatgatgaaagtgaagatgatgccagtgacaccaacccagacttctacatcaacatctgccagcccctgaaccccatgcacggcgtgccctgcccagctggagctgctgtgtgcaaggtgcccattgatggcccccccatcgacatcggccgggtggccggcccccccatcctgaaccccatcgccaatgagatctacctgaactttgagagcagcaccccctgcctggccgacaagcacttcaactacaccagcctcatcgccttccactgcaagaggggcgtgtccatgggcacccccaagctgctgcggaccagtgaatgtgactttgtgtttgagtgggagacccctgtggtgtgcccagatgaggtgaggatggatggctgcaccctgacagatgagcagctgctgtacagcttcaacctgagcagcctgagcaccagcaccttcaaggtgacccgggacagcaggacctacagcgtgggcgtgtgcacctttgctgtgggccctgagcagggcggctgcaaggatggcggcgtgtgcctgctgagcggcaccaagggggccagctttggccgcctgcagagcatgaagctggactaccgccaccaggatgaggccgtggtgctgtcctatgtgaatggagaccgctgccccccagagacagatgatggagtgccctgtgtgttccccttcatcttcaacgggaagagctatgaggagtgcatcatcgagagccgggccaagctgtggtgcagcaccacagctgactatgaccgggaccacgagtggggcttctgccgccacagcaacagctaccgcaccagcagcatcatcttcaagtgtgatgaagatgaagatattggccggccccaggtgttcagcgaggtgcggggctgtgatgtgacctttgagtggaagaccaaggtggtgtgcccccccaagaagctggagtgcaagtttgtgcagaagcacaagacctatgacctgcggctgctgagcagcctgaccggctcctggagcctggtgcacaacggggtgtcctactacatcaacctgtgccagaagatctacaagggccccctgggctgcagcgagcgggccagcatctgcaggaggaccaccactggagatgtgcaggtgctgggcctggtgcacacccagaagctgggcgtcatcggggacaaggtggtggtgacctacagcaagggctacccctgtggcggcaacaagacagccagcagcgtcatcgagctgacctgcaccaagacagtgggccgcccagccttcaagagatttgacatcgacagctgcacctactacttctcctgggacagcagagctgcctgtgctgtgaagccccaggaggtgcagatggtgaatggcaccatcaccaaccccatcaacgggaagagcttcagcctgggggacatctacttcaagctgttccgggccagcggggacatgaggaccaatggagacaactacctgtatgagatccagctgagcagcatcaccagcagcaggaacccagcctgcagcggggccaacatctgccaggtgaagcccaatgaccagcacttcagcaggaaggtgggcaccagtgacaagaccaagtactacctgcaggatggagacctggatgtggtgtttgccagcagcagcaaatgtgggaaggacaagaccaagtctgtgagcagcaccatcttcttccactgtgaccccctggtggaggatggcatccctgagttcagccatgaaacagctgactgccagtacctgttctcctggtacaccagcgctgtgtgccccctgggcgtgggctttgacagtgaaaatcctggagatgatggccagatgcacaagggcctgtctgagaggagccaggccgtgggcgctgtgctgagcctgctgctggtggccctgacctgctgcctgctggccctgctgctgtacaagaaggagcggcgggagaccgtcatcagcaagctgaccacctgctgccgccgcagcagcaatgtgtcctacaagtacagcaaggtgaacaaggaggaggagacagatgaaaatgaaacagagtggctgatggaggagatccagctgcccccaccccggcagggcaaggagggccaggagaatggccacatcaccaccaagtctgtgaaggccctgagcagcctgcatggagatgaccaggacagtgaagatgaggtgctgaccatccctgaggtgaaggtgcacagcggcagaggagctggagctgagagcagccaccctgtgagaaatgcccagagcaatgccctgcaggagagagaagatgacagagtgggcctggtgcggggggagaaggccaggaagggcaagagcagcagcgcccagcagaagacagtgagcagcaccaagctggtgtccttccatgatgacagtgatgaggacctgctgcacatctag

SEQ ID NO: 156117 - DNA, 780 bp, synthetic construct
  misc_feature 1..780: note = Description of Artificial Sequence: Synthetic coding sequence
  source 1..780: mol_type = other DNA
atgtctgaggtgcctgtggcccgggtgtggctggtgctgctgctgctgactgtgcaggtgggcgtgacagctggggccccctggcagtgtgccccctgcagcgctgagaagctggccctgtgcccccctgtgtctgccagctgcagcgaggtgaccaggtctgctggctgcggctgctgccccatgtgtgccctgcccctgggcgccgcctgtggggtggccacagcccgctgtgcccggggcctgagctgccgggccctgcccggggagcagcagcccctgcacgccctgacccggggccagggcgcctgtgtgcaggagagtgatgccagcgcccctcatgctgctgaggccggcagccctgagagccctgagagcacagagatcacagaggaggagctgctggacaacttccacctgatggcccccagcgaggaggaccacagcatcctgtgggatgccatcagcacctatgatggcagcaaggccctgcacgtgaccaacatcaagaagtggaaggagccctgccgcatcgagctgtacagagtggtggagagcctggccaaggcccaggagaccagcggggaggagatcagcaagttctacctgcccaactgcaacaagaatggcttctaccacagccggcagtgtgagacctccatggatggagaggccggcctgtgctggtgtgtgtacccctggaatggcaagagaattcctggcagccctgagatccggggggaccccaactgccagatctacttcaacgtgcagaactag

SEQ ID NO: 156118 - DNA, 777 bp, synthetic construct
  misc_feature 1..777: note = Description of Artificial Sequence: Synthetic coding sequence
  source 1..777: mol_type = other DNA
atgctgcccctgtgcctggtggccgccctgctgctggccgccggccctggccccagcctgggagatgaggccatccactgccccccctgcagcgaggagaagctggcccgctgccggccccctgtgggctgtgaggagctggtgcgggagcccggctgcggctgctgtgccacctgtgccctgggcctgggcatgccctgtggggtgtacaccccccgctgtggcagcggcctgcgctgctacccaccccggggcgtggagaagcccctgcacaccctgatgcacggccagggcgtgtgcatggagctggccgagattgaggccatccaggagagcctgcagcccagcgacaaggatgaaggagaccaccccaacaacagcttcagcccctgcagcgcccatgaccggcgctgcctgcagaagcactttgccaagatccgggacaggagcaccagcggcggcaagatgaaggtgaatggagccccccgggaggatgcccggcctgtgccccagggcagctgccagagcgagctgcaccgggccctggagcggctggccgccagccagagcaggacccatgaggacctgtacatcatccccatccccaactgtgacagaaatggaaacttccaccccaagcagtgccacccagccctggatggccagaggggcaagtgctggtgtgtggacaggaagacaggagtgaagctgcccggcggcctggagcccaagggggagctggactgccaccagctggccgacagcttccgggagtag

SEQ ID NO: 156119 - DNA, 477 bp, synthetic construct
  misc_feature 1..477: note = Description of Artificial Sequence: Synthetic coding sequence
  source 1..477: mol_type = other DNA
atggagctggccgagattgaggccatccaggagagcctgcagcccagcgacaaggatgaaggagaccaccccaacaacagcttcagcccctgcagcgcccatgaccggcgctgcctgcagaagcactttgccaagatccgggacaggagcaccagcggcggcaagatgaaggtgaatggagccccccgggaggatgcccggcctgtgccccagggcagctgccagagcgagctgcaccgggccctggagcggctggccgccagccagagcaggacccatgaggacctgtacatcatccccatccccaactgtgacagaaatggaaacttccaccccaagcagtgccacccagccctggatggccagaggggcaagtgctggtgtgtggacaggaagacaggagtgaagctgcccggcggcctggagcccaagggggagctggactgccaccagctggccgacagcttccgggagtag

SEQ ID NO: 156120 - DNA, 849 bp, synthetic construct
  misc_feature 1..849: note = Description of Artificial Sequence: Synthetic coding sequence
  source 1..849: mol_type = other DNA
atggagcggcccagcctgcgggccctgctgctgggcgccgccggcctgctgctgctgctgctgcccctgagcagcagcagcagcagtgacacctgtggcccctgtgagcccgccagctgcccccccctgccccccctgggctgcctgctgggggagaccagagatgcctgtggctgctgccccatgtgtgcccggggggagggggagccctgtggcggcggcggggccggccggggctactgtgcccctggcatggagtgtgtgaagagcaggaagaggaggaagggcaaggccggggctgctgctgggggccctggggtgtctggagtgtgtgtgtgcaagagccgctaccctgtgtgtggcagtgatggcaccacctaccccagcggctgccagctgcgggccgccagccagagagctgagagcagaggagagaaggccatcacccaggtgtccaagggcacctgtgagcagggccccagcatcgtgaccccacccaaggacatctggaatgtgactggagcccaggtgtacctgagctgtgaggtgattggcatccccacccctgtgctgatctggaacaaggtgaagaggggccactatggagtgcagaggacagagctgctgcccggggaccgggacaacctggccatccagacccggggcggccctgagaagcatgaggtgacaggctgggtgctggtgagccccctgagcaaagaagatgctggggagtatgaatgtcatgccagcaacagccagggccaggccagcgccagcgccaagatcaccgtggtggatgccctgcacgagatccctgtgaagaagggggagggcgctgagctgtag

SEQ ID NO: 156121 - DNA, 840 bp, synthetic construct
  misc_feature 1..840: note = Description of Artificial Sequence: Synthetic coding sequence
  source 1..840: mol_type = other DNA
atggagcggcccagcctgcgggccctgctgctgggcgccgccggcctgctgctgctgctgctgcccctgagcagcagcagcagcagtgacacctgtggcccctgtgagcccgccagctgcccccccctgccccccctgggctgcctgctgggggagaccagagatgcctgtggctgctgccccatgtgtgcccggggggagggggagccctgtggcggcggcggggccggccggggctactgtgcccctggcatggagtgtgtgaagagcaggaagaggaggaagggcaaggccggggctgctgctgggggccctggggtgtctggagtgtgtgtgtgcaagagccgctaccctgtgtgtggcagtgatggcaccacctaccccagcggctgccagctgcgggccgccagccagagagctgagagcagaggagagaaggccatcacccaggtgtccaagggcacctgtgagcagggccccagcatcgtgaccccacccaaggacatctggaatgtgactggagcccaggtgtacctgagctgtgaggtgattggcatccccacccctgtgctgatctggaacaaggtgaagaggggccactatggagtgcagaggacagagctgctgcccggggaccgggacaacctggccatccagacccggggcggccctgagaagcatgaggtgacaggctgggtgctggtgagccccctgagcaaagaagatgctggggagtatgaatgtcatgccagcaacagccagggccaggccagcgccagcgccaagatcaccgtggtggatgccctgcacgagatccctgtgaagaagggcacccagtag

SEQ ID NO: 156122 - DNA, 393 bp, synthetic construct
  misc_feature 1..393: note = Description of Artificial Sequence: Synthetic coding sequence
  source 1..393: mol_type = other DNA
atggagaccctgggcgccctgctggtgctggagttcctgctgctgagccctgtggaggcccagcaggccacagagcaccggctgaagccctggctggtgggcctggccgctgtggtgggcttcctgttcatcgtgtacctggtgctgctggccaaccggctgtggtgcagcaaggcccgggcagaagatgaggaggagaccaccttcaggatggagagcaacctgtaccaggaccagagcgaggacaagcgggagaagaaggaggccaaggagaaggaggagaagaggaagaaggagaagaagacagccaaggagggggagagcaacctgggcctggacctggaggagaaggagcccggggaccacgagcgggccaagagcacagtgatgtag

SEQ ID NO: 156123 - DNA, 1932 bp, synthetic construct
  misc_feature 1..1932: note = Description of Artificial Sequence: Synthetic coding sequence
  source 1..1932: mol_type = other DNA
atggccctgaggaaggccggggacctggagccccagttcaccccagagcggcgcttccggctgtgctggtaccaggcccacagcggccgggccctgctgggccccccaccccaggccagccccccagctgggggcctggccctggccctgctgctgctgtcctgggtggccctgggccccaggagcctggagggcgctgaccccggcaccccaggagaggccgagggccctgcctgcccagctgcctgtgtgtgcagctatgatgatgatgctgatgagctgtctgtgttctgcagcagcaggaacctgacccggctgcctgatggagtgcctgggggcacccaggccctgtggctggatggcaacaacctgagctctgtgcccccagctgccttccagaacctgagcagcctgggcttcctgaacctgcagggcggccagctgggcagcctggagccccaggccctgctgggcctggagaacctgtgccacctgcacctggagaggaaccagctgcggagcctggccctgggcacctttgcccacaccccagccctggccagcctgggcctgagcaacaaccggctgagccggctggaggatggcctgtttgagggcctgggcagcctgtgggacctgaacctgggctggaacagcctggccgtgctgcctgatgctgccttccggggcctgggcagcctgcgggagctggtgctggccggcaaccggctggcctacctgcagcctgccctcttcagcggcctggccgagctgcgggagctggacctgagcagaaatgccctgcgggccatcaaggccaacgtgtttgtgcagctgccccggctgcagaagctgtacctggacaggaacctgattgctgctgtggcccctggggccttcctgggcctgaaggccctgcgctggctggacctgagccacaacagagtggccggcctgctggaggacaccttccctggcctgctgggcctgcgggtgctgcggctgagccacaatgccatcgccagcctgcggcccaggaccttcaaggacctgcacttcctggaggagctgcagctgggccacaaccgcatccggcagctggccgagaggagctttgagggcctgggccagctggaggtgctgaccctggaccacaaccagctgcaggaggtgaaggccggggccttcctgggcctgaccaacgtggccgtgatgaacctgagcggcaactgcctgaggaacctgcctgagcaggtgttccggggcctgggcaagctgcacagcctgcacctggagggcagctgcctgggccgcatccggccccacaccttcaccggcctgagcggcctgcggcggctcttcctgaaggacaatggcctggtgggcatcgaggagcagagcctgtggggcctggccgagctgctggagctggacctgaccagcaaccagctgacccacctgccccacaggctcttccagggcctgggcaagctggagtacctgctgctgagcaggaaccggctggccgagctgcctgcagatgccctgggccccctgcagagggccttctggctggatgtgagccacaaccggctggaggccctgcccaacagcctgctggcccccctgggccgcctgcgctacctgagcctgaggaacaacagcctgcggaccttcaccccccagcccccaggcctggagcggctgtggctggagggcaacccctgggactgtggctgccccctgaaggccctgcgggactttgccctgcagaaccccagcgctgtgcccaggtttgtgcaggccatctgtgaaggagatgactgccagcccccagcctacacctacaacaacatcacctgtgccagccccccagaggtggtgggcctggacctgcgggacctgtctgaggcccactttgccccctgctag

SEQ ID NO: 156124 - DNA, 1533 bp, synthetic construct
  misc_feature 1..1533: note = Description of Artificial Sequence: Synthetic coding sequence
  source 1..1533: mol_type = other DNA
atgccccggggcttcctggtgaagaggagcaagaagagcacccctgtgtcctacagagtgcggggcggggaggatggagaccgggccctgctgctgagccccagctgtggcggggcccgggcagagcccccagcccccagccctgtgcccggccccctgcccccacctcctcctgctgagcgggcccacgccgccctggccgccgccctggcctgtgcccctggcccccagcccccaccccagggccccagggctgcccacttcggcaaccctgaggccgcccacccagcccccctgtacagccccaccaggcctgtgtcccgggagcacgagaagcacaagtactttgagaggagcttcaacctgggcagccctgtgtctgctgagagcttccccaccccagctgccctgctgggcggcggcggcggcggcggggccagcggggccggcggcggcggcacctgtggcggggaccccctgctgtttgccccagctgagctgaagatgggcacagccttctctgctggagctgaggccgcccggggccctggccctggcccccccctgcccccagctgctgccctgcggcccccaggcaagaggcctcctccacccacagctgctgagcccccagccaaggctgtgaaggcccctggggccaagaagcccaaggccatcaggaagctgcactttgaagatgaggtgaccaccagccctgtgctgggcctgaagatcaaggagggccctgtggaggccccccggggccgggccggcggggccgcccggcccctgggggagttcatctgccagctgtgcaaggaggagtatgctgacccctttgccctggcccagcacaagtgcagccgcatcgtgcgggtggagtaccgctgcccagaatgtgccaaggtgttcagctgcccagccaacctggccagccaccggcgctggcacaagcccaggcctgccccagctgctgcccgggcccctgagcctgaggccgccgcccgggcagaggcccgggaggcccctgggggcggcagtgaccgggacacccccagccctgggggcgtgtctgagagcggctctgaagatggcctgtatgagtgccaccactgtgccaagaagttccggcggcaggcctacctgaggaagcacctgctggcccaccaccaggccctgcaggccaagggggcccccctggcccccccagctgaggacctgctggccctgtacccaggcccagatgagaaggccccccaggaggccgctggagatggagagggcgccggcgtgctgggcctgagcgccagcgctgagtgccacctgtgccctgtgtgtggggagagctttgccagcaaaggagcccaggagcggcacctgcggctgctgcatgctgcccaggtgttcccctgcaagtactgcccagccaccttctacagcagccctggcctgaccaggcacatcaacaagtgccaccccagtgaaaatcggcaggtgatcctgctgcaggtgcctgtgcggcctgcctgctag

SEQ ID NO: 156125 - DNA, 1701 bp, synthetic construct
  misc_feature 1..1701: note = Description of Artificial Sequence: Synthetic coding sequence
  source 1..1701: mol_type = other DNA
atgccccggggcttcctggtgaagaggaccaagaggactggaggcctgtacagagtgcggctggccgagagggtcttccccctgctgggcccccagggcgccccacccttcctggaggaggcccccagcgccagcctgcctggagctgagcgggccaccccacccacccgggaggagcccgggaagggcctgacagctgaggccgcccgggagcagagcggcagcccctgcagagctgctggggtgtccccaggcaccggcggccgggagggcgctgagtggagggctgggggccgggagggccctggccccagccccagccccagccccagccctgccaagccagctggagctgagctgcggcgggccttcctggagcgctgcctgagcagccctgtgtctgctgagagcttccctggaggagctgctgctgtggccgccttcagctgcagcgtggccccagctgctgcccccaccccaggagagcagttcctgctgcccctgcgggcccccttccctgagcccgccctgcagcctgaccctgcccccctgtctgctgccctgcagagcctgaagagagctgctggaggagagcggcggggcaaggcccccacagactgtgccagcggccctgctgctgctggcatcaagaagcccaaggccatgaggaagctgagctttgctgatgaggtgaccaccagccctgtgctgggcctgaagatcaaggaggaggagcccggggcccccagccggggcctgggcggcagcaggacccccctgggggagttcatctgccagctgtgcaaggagcagtatgctgacccctttgccctggcccagcaccgctgcagccgcatcgtgcgggtggagtaccgctgcccagaatgtgacaaggtgttcagctgcccagccaacctggccagccaccggcgctggcacaagcccaggcctgctgctgccaatgctgccaccgtgtcctctgcagatggcaagccacccagcagcagcagcagcagcagccgggacagcggggccatcgccagcttcctggccgagggcaaggagaacagcagaattgaaagaacagctgaccagcacccccaggcccgggacagcagtggagctgaccagcacccagattctgccccccggcagggcctgcaggtgctgacccaccctgagccccccctgccccagggcccctacacagaaggagtgctgggcagaagagtgcctgtgcccggcagcaccagcggcggccggggcagcgagatctttgtgtgcccctactgccacaagaagttccggcggcaggcctacctgaggaagcacctgagcacccatgaggccggcagcgcccgggccctggcccctggcttcggcagcgagcggggggcccccctggcctttgcctgccccctgtgtggggcccacttccccacagctgacatccgggagaagcaccggctgtggcatgctgtgcgggaggagctgctgctgcctgccctggccggggcccctcctgagaccagcggccccagcggccccagtgatggcagcgcccagcagatcttcagctgcaagcactgccccagcaccttcttcagcagccctggcctgaccaggcacatcaacaagtgccaccccagcgagagccggcaggtgctgctgctgcagatgcccctgcggcccggctgctag

SEQ ID NO: 156126 - DNA, 792 bp, synthetic construct
  misc_feature 1..792: note = Description of Artificial Sequence: Synthetic coding sequence
  source 1..792: mol_type = other DNA
atggtgaagatcgccttcaacacccccacagctgtgcagaaggaggaggcccggcaggatgtggaggccctgctgagcaggacagtgaggacccagatcctgaccgggaaggagctgcgggtggccacccaggagaaggagggcagcagcggccgctgcatgctgaccctgctgggcctgtccttcatcctggccggcctcatcgtgggcggggcctgcatctacaagtacttcatgcccaagagcaccatctacagaggagagatgtgcttctttgacagtgaagatcctgccaacagcctgcggggcggggagcccaacttcctgcctgtgacagaggaggccgacatcagagaagatgacaacatcgccatcattgatgtgcctgtgcccagcttcagtgacagcgaccctgctgccatcatccatgactttgagaagggcatgacagcctacctggacctgctgctgggcaactgctacctgatgcccctgaacaccagcatcgtgatgccacccaagaacctggtggagctgtttgggaagctggccagcggccgctacctgccccagacctacgtggtgcgggaggacctggtggccgtggaggagatcagagatgtgagcaacctgggcatcttcatctaccagctgtgcaacaacaggaagagcttccggctgcggcggcgggacctgctgctgggcttcaacaagagggccatcgacaagtgctggaagatccgccacttccccaatgagttcatcgtggagaccaagatctgccaggagtag

SEQ ID NO: 156127 - DNA, 660 bp, synthetic construct
  misc_feature 1..660: note = Description of Artificial Sequence: Synthetic coding sequence
  source 1..660: mol_type = other DNA
atggtgaagatcgccttcaacacccccacagctgtgcagaaggaggaggcccggcaggatgtggaggccctgctgagcaggacagtgaggacccagatcctgaccgggaagagcaccatctacagaggagagatgtgcttctttgacagtgaagatcctgccaacagcctgcggggcggggagcccaacttcctgcctgtgacagaggaggccgacatcagagaagatgacaacatcgccatcattgatgtgcctgtgcccagcttcagtgacagcgaccctgctgccatcatccatgactttgagaagggcatgacagcctacctggacctgctgctgggcaactgctacctgatgcccctgaacaccagcatcgtgatgccacccaagaacctggtggagctgtttgggaagctggccagcggccgctacctgccccagacctacgtggtgcgggaggacctggtggccgtggaggagatcagagatgtgagcaacctgggcatcttcatctaccagctgtgcaacaacaggaagagcttccggctgcggcggcgggacctgctgctgggcttcaacaagagggccatcgacaagtgctggaagatccgccacttccccaatgagttcatcgtggagaccaagatctgccaggagtag

SEQ ID NO: 156128 - DNA, 801 bp, synthetic construct
  misc_feature 1..801: note = Description of Artificial Sequence: Synthetic coding sequence
  source 1..801: mol_type = other DNA
atggtgaaggtgaccttcaacagcgccctggcccagaaggaggccaagaaggatgagcccaagagcggggaggaggccctgatcatccccccagatgctgtggccgtggactgcaaggaccctgatgatgtggtgcctgtgggccagaggcgggcctggtgctggtgcatgtgcttcggcctggccttcatgctggccggggtcatcctgggcggggcctacctgtacaagtactttgccctgcagccagatgatgtgtactactgcggcatcaagtacatcaaggatgatgtgatcctgaatgagcccagcgcagatgccccagctgccctgtaccagaccatcgaggagaacatcaagatctttgaggaggaggaggtggagttcatctctgtgcctgtgcctgagtttgctgacagcgaccctgccaacatcgtgcatgacttcaacaagaagctgacagcctacctggacctgaacctggacaagtgctacgtgatccccctgaacaccagcatcgtgatgccacccaggaacctgctggagctgctgatcaacatcaaggccggcacctacctgccccagagctacctgatccacgagcacatggtgatcacagacagaattgagaacatcgaccacctgggcttcttcatctaccgcctgtgccacgacaaggagacctacaagctgcagaggcgggagaccatcaagggcatccagaagcgggaggccagcaactgctttgccatccgccactttgagaacaagtttgctgtggagaccctcatctgcagctag

SEQ ID NO: 156129 - DNA, 693 bp, synthetic construct
  misc_feature 1..693: note = Description of Artificial Sequence: Synthetic coding sequence
  source 1..693: mol_type = other DNA
atggtgaagatctccttccagcctgctgtggccggcatcaagggggacaaggctgacaaggccagcgccagcgccccagccccagccagcgccacagagatcctgctgaccccagcccgggaggagcagcccccccagcacaggagcaagaggggcggctctgtgggcggcgtgtgctacctgtccatgggcatggtggtgctgctgatgggcctggtgtttgcctctgtgtacatctaccgctacttcttcctggcccagctggcccgggacaacttcttccgctgtggggtgctgtatgaggacagcctgagcagccaggtgaggacccagatggagctggaggaggatgtgaagatctacctggatgagaactatgaaagaatcaacgtgcctgtgccccagtttggaggaggagaccctgctgacatcatccatgacttccagaggcggggcacctacctgccccagacctacatcatccaggaggagatggtggtgacagagcacgtgtctgacaaggaggccctgggcagcttcatctaccacctgtgcaatggcaaggacacctaccgcctgcggcggcgggccacccggcggcgcatcaacaagagaggagccaagaactgcaatgccatccgccactttgagaacacctttgtggtggagaccctcatctgtggggtggtgtag

SEQ ID NO: 156130 - DNA, 804 bp, synthetic construct
  misc_feature 1..804: note = Description of Artificial Sequence: Synthetic coding sequence
  source 1..804: mol_type = other DNA
atggtgaagatctccttccagcctgctgtggccggcatcaagggggacaaggctgacaaggccagcgccagcgccccagccccagccagcgccacagagatcctgctgaccccagcccgggaggagcagcccccccagcacaggagcaagaggggcggctctgtgggcggcgtgtgctacctgtccatgggcatggtggtgctgctgatgggcctggtgtttgcctctgtgtacatctaccgctacttcttcctggcccagctggcccgggacaacttcttccgctgtggggtgctgtatgaggacagcctgagcagccaggtgaggacccagatggagctggaggaggatgtgaagatctacctggatgagaactatgaaagaatcaacgtgcctgtgccccagtttggaggaggagaccctgctgacatcatccatgacttccagaggggcctgacagcctaccatgacatcagcctggacaagtgctacgtgattgagctgaacaccaccatcgtgctgcccccaagaaacttctgggagctgctgatgaatgtgaagaggggcacctacctgccccagacctacatcatccaggaggagatggtggtgacagaacatgtgtctgacaaggaggccctgggcagcttcatctaccacctgtgcaatggcaaggacacctaccgcctgcggcggcgggccacccggcggcgcatcaacaagagaggagccaagaactgcaatgccatccgccactttgagaacacctttgtggtggagaccctcatctgtggggtggtgtag

SEQ ID NO: 156131 - DNA, 663 bp, synthetic construct
  misc_feature 1..663: note = Description of Artificial Sequence: Synthetic coding sequence
  source 1..663: mol_type = other DNA
atggtgaagatctccttccagcctgctgtggccggcatcaagggggacaaggctgacaaggccagcgccagcgccccagccccagccagcgccacagagatcctgctgaccccagcccggctggcccgggacaacttcttccgctgtggggtgctgtatgaggacagcctgagcagccaggtgaggacccagatggagctggaggaggatgtgaagatctacctggatgaaaattatgagcgcatcaacgtgcctgtgccccagtttggaggaggagaccctgctgacatcatccatgacttccagaggggcctgacagcctaccatgacatcagcctggacaagtgctacgtgattgagctgaacaccaccatcgtgctgccccccaggaacttctgggagctgctgatgaatgtgaagaggggcacctacctgccccagacctacatcatccaggaggagatggtggtgacagagcacgtgtctgacaaggaggccctgggcagcttcatctaccacctgtgcaatggcaaggacacctaccgcctgcggcggcgggccacccggcggcgcatcaacaagagaggagccaagaactgcaatgccatccgccactttgagaacacctttgtggtggagaccctcatctgtggggtggtgtag

SEQ ID NO: 156132 - DNA, 543 bp, synthetic construct
  misc_feature 1..543: note = Description of Artificial Sequence: Synthetic coding sequence
  source 1..543: mol_type = other DNA
atggtgaagatctccttccagcctgctgtggccggcatcaagggggacaaggctgacaaggccagcgccagcgccccagccccagccagcgccacagagatcctgctgaccccagcccgggaggagcagcccccccagcacaggagcaagaggggcggctctgtgggcggcgtgtgctacctgtccatgggcatggtggtgctgctgatgggcctggtgtttgcctctgtgtacatctaccgctacttcttcctggcccagctggcccgggacaacttcttccgctgtggggtgctgtatgaggacagcctgagcagccaggtgaggacccagatggagctggaggaggatgtgaagatctacctggatgagaactatgaaagaatcaacgtgcctgtgccccagtttggaggaggagaccctgctgacatcatccatgacttccagaggggcctgacagcctaccatgacatcagcctggacaagtgctacgtgattgagctgaacaccaccatcgtgctgcccccaagaaacttctggtag

SEQ ID NO: 156133 - DNA, 1839 bp, synthetic construct
  misc_feature 1..1839: note = Description of Artificial Sequence: Synthetic coding sequence
  source 1..1839: mol_type = other DNA
atggctgctgctggccgcctgcccagctcctgggccctcttcagccccctgctggccggcctggccctgctgggcgtgggccctgtgcctgcccgggccctgcacaacgtgacagctgagctgtttggagctgaggcctggggcaccctggccgcctttggagacctgaacagcgacaagcagacagacctgtttgtgctgcgggagagaaatgacctgattgtgttcctggccgaccagaatgccccctacttcaagcccaaggtgaaggtgtccttcaagaaccacagcgccctgatcacctctgtggtgcctggggactatgatggagacagccagatggatgtgctgctgacctacctgcccaagaactatgccaagtctgagctgggcgccgtcatcttctggggccagaaccagaccctggaccccaacaacatgaccatcctgaacagaaccttccaggatgagcccctcatcatggacttcaacggggacctgatcccagacatcttcggcatcaccaatgaaagcaaccagccccagatcctgctgggcggcaacctgtcctggcacccagccctgaccaccaccagcaagatgaggatcccccacagccacgccttcatcgacctgacagaggacttcaccgctgacctcttcctgaccaccctgaatgccaccaccagcaccttccagtttgagatctgggagaacctggatggcaacttctctgtgtccaccatcctggagaagccccagaacatgatggtggtgggccagagcgcctttgctgactttgatggagatggccacatggaccacctgctgcccggctgtgaggacaagaactgccagaagagcaccatctacctggtgcgcagcggcatgaagcagtgggtgcctgtgctgcaggacttcagcaacaagggcaccctgtggggctttgtgccctttgtggatgagcagcagcccacagagatccccatccccatcaccctgcacatcggggactacaacatggatggctacccagatgccctggtgatcctgaagaacaccagcggcagcaaccagcaggccttcctgctggagaatgtgccctgcaacaatgccagctgtgaggaggcccggaggatgttcaaggtgtactgggagctgacagacctgaaccagatcaaggatgccatggtggccaccttctttgacatctatgaagatggcatcctggacatcgtggtgctgagcaagggctacaccaagaatgactttgccatccacaccctgaagaacaactttgaagcagatgcctactttgtgaaggtgattgtgctgagcggcctgtgcagcaatgactgccccaggaagatcacccccttcggcgtgaaccagcccggcccctacatcatgtacaccaccgtggatgccaacggctacctgaagaatggcagcgctggccagctgagccagagcgcccacctggccctgcagctgccctacaacgtgctgggcctgggccgcagcgccaacttcctggaccacctgtatgtgggcatcccccggcccagcggggagaagagcatcaggaagcaggagtggacagccatcatccccaacagccagctgattgtcatcccctacccccacaacgtgcccaggtcctggagcgccaagctgtacctgacccccagcaacatcgtgctgctgacagccatcgccctgattggagtgtgtgtgttcatcctggccatcatcggcatcctgcactggcaggagaagaaggcagatgaccgggagaagaggcaggaggcccaccgcttccactttgatgccatgtag

SEQ ID NO: 156134 - DNA, 819 bp, synthetic construct
  misc_feature 1..819: note = Description of Artificial Sequence: Synthetic coding sequence
  source 1..819: mol_type = other DNA
atggatggctacccagatgccctggtgatcctgaagaacaccagcggcagcaaccagcaggccttcctgctggagaatgtgccctgcaacaatgccagctgtgaggaggcccggaggatgttcaaggtgtactgggagctgacagacctgaaccagatcaaggatgccatggtggccaccttctttgacatctatgaagatggcatcctggacatcgtggtgctgagcaagggctacaccaagaatgactttgccatccacaccctgaagaacaactttgaagcagatgcctactttgtgaaggtgattgtgctgagcggcctgtgcagcaatgactgccccaggaagatcacccccttcggcgtgaaccagcccggcccctacatcatgtacaccaccgtggatgccaacggctacctgaagaatggcagcgctggccagctgagccagagcgcccacctggccctgcagctgccctacaacgtgctgggcctgggccgcagcgccaacttcctggaccacctgtatgtgggcatcccccggcccagcggggagaagagcatcaggaagcaggagtggacagccatcatccccaacagccagctgattgtcatcccctacccccacaacgtgcccaggtcctggagcgccaagctgtacctgacccccagcaacatcgtgctgctgacagccatcgccctgattggagtgtgtgtgttcatcctggccatcatcggcatcctgcactggcaggagaagaaggcagatgaccgggagaagaggcaggaggcccaccgcttccactttgatgccatgtag

SEQ ID NO: 156135 - DNA, 1074 bp, synthetic construct
  misc_feature 1..1074: note = Description of Artificial Sequence: Synthetic coding sequence
  source 1..1074: mol_type = other DNA
atgatggtggtgggccagagcgcctttgctgactttgatggagatggccacatggaccacctgctgcccggctgtgaggacaagaactgccagaagagcaccatctacctggtgcgcagcggcatgaagcagtgggtgcctgtgctgcaggacttcagcaacaagggcaccctgtggggctttgtgccctttgtggatgagcagcagcccacagagatccccatccccatcaccctgcacatcggggactacaacatggatggctacccagatgccctggtgatcctgaagaacaccagcggcagcaaccagcaggccttcctgctggagaatgtgccctgcaacaatgccagctgtgaggaggcccggaggatgttcaaggtgtactgggagctgacagacctgaaccagatcaaggatgccatggtggccaccttctttgacatctatgaagatggcatcctggacatcgtggtgctgagcaagggctacaccaagaatgactttgccatccacaccctgaagaacaactttgaagcagatgcctactttgtgaaggtgattgtgctgagcggcctgtgcagcaatgactgccccaggaagatcaccccatttggagtgaaccagcccggcccctacatcatgtacaccaccgtggatgccaacggctacctgaagaatggatctgctggccagctgagccagagcgcccacctggccctgcagctgccctacaacgtgctgggcctgggccgcagcgccaacttcctggaccacctgtatgtgggcatcccccggcccagcggggagaagagcatcaggaagcaggagtggacagccatcatccccaacagccagctgattgtcatcccctacccccacaacgtgcccaggtcctggagcgccaagctgtacctgacccccagcaacatcgtgctgctgacagccatcgccctgattggagtgtgtgtgttcatcctggccatcatcggcatcctgcactggcaggagaagaaggcagatgaccgggagaagaggcaggaggcccaccgcttccactttgatgccatgtag

SEQ ID NO: 156136 - DNA, 1395 bp, synthetic construct
  misc_feature 1..1395: note = Description of Artificial Sequence: Synthetic coding sequence
  source 1..1395: mol_type = other DNA
atggatgtgctgctgacctacctgcccaagaactatgccaagtctgagctgggcgctgtgatcttctggggccagaaccagaccctggaccccaacaacatgaccatcctgaacagaaccttccaggatgagcccctcatcatggacttcaatggagacctgatcccagacatcttcggcatcaccaatgaaagcaaccagccccagatcctgctgggcggcaacctgtcctggcacccagccctgaccaccaccagcaagatgaggatcccccacagccacgccttcatcgacctgacagaggacttcaccgctgacctcttcctgaccaccctgaatgccaccaccagcaccttccagtttgagatctgggagaacctggatggcaacttctctgtgtccaccatcctggagaagccccagaacatgatggtggtgggccagagcgcctttgctgactttgatggagatggccacatggaccacctgctgcccggctgtgaggacaagaactgccagaagagcaccatctacctggtgcgcagcggcatgaagcagtgggtgcctgtgctgcaggacttcagcaacaagggcaccctgtggggctttgtgccctttgtggatgagcagcagcccacagagatccccatccccatcaccctgcacatcggggactacaacatggatggctacccagatgccctggtgatcctgaagaacaccagcggcagcaaccagcaggccttcctgctggagaatgtgccctgcaacaatgccagctgtgaggaggcccggaggatgttcaaggtgtactgggagctgacagacctgaaccagatcaaggatgccatggtggccaccttctttgacatctatgaagatggcatcctggacatcgtggtgctgagcaagggctacaccaagaatgactttgccatccacaccctgaagaacaactttgaagcagatgcctactttgtgaaggtgattgtgctgagcggcctgtgcagcaatgactgccccaggaagatcaccccatttggagtgaaccagcccggcccctacatcatgtacaccaccgtggatgccaacggctacctgaagaatggatctgctggccagctgagccagagcgcccacctggccctgcagctgccctacaacgtgctgggcctgggccgcagcgccaacttcctggaccacctgtatgtgggcatcccccggcccagcggggagaagagcatcaggaagcaggagtggacagccatcatccccaacagccagctgattgtcatcccctacccccacaacgtgcccaggagcagccaccgctgcctgtgcttccacctgggcaacaactggcacttcaccctggccggcaaggagagcaggtag

SEQ ID NO: 156137 - DNA, 1044 bp, synthetic construct
  misc_feature 1..1044: note = Description of Artificial Sequence: Synthetic coding sequence
  source 1..1044: mol_type = other DNA
atgagcctgctgtgcaggaacaagggctgcggccagcactttgaccccaacaccaacctgcctgacagctgctgccaccaccctggggtgcccatcttccatgatgccctgaagggctggagctgctgcaggaagaggacagtggacttcagcgagttcctgaacatcaagggctgcaccatgggcccccactgtgccgagaagctgcctgaggccccccagcctgagggccctgccaccagcagcagcctgcaggagcagaagcccctgaatgtcatccccaagtctgctgagaccctgcggcgggagcggcccaagtctgagctgcccctgaagctgctgcccctgaacatcagccaggccctggagatggccctggagcagaaggagctggaccaggagcctggagctggcctggacagcctcatcagaacaggcagcagctgccagaaccctggctgtgatgctgtgtaccagggccctgagagtgatgccaccccctgcacctaccaccctggggccccccgcttccacgagggcatgaagtcctggagctgctgcggcatccagaccctggactttggagccttcctggcccagcccggctgccgggtgggcagacatgactggggcaagcagctgcctgccagctgcagacatgactggcaccagacagacagcctggtggtggtgacagtgtatggccagatccccctgcctgccttcaactgggtgaaggccagccagacagagctgcacgtgcacatcgtgtttgatggcaacagagtcttccaggcccagatgaagctgtggggcgtcatcaacgtggagcagagcagcgtcttcctgatgcccagccgggtggagatcagcctggtgaaggctgaccccggctcctgggcccagctggagcacccagatgccctggccaagaaggcccgggccggcgtggtgctggagatggatgaggaggagagtgatgacagtgatgatgacctgtcctggacagaggaggaggaggaggaggaggccatgggagagtag

SEQ ID NO: 156138 - DNA, 990 bp, synthetic construct
  misc_feature 1..990: note = Description of Artificial Sequence: Synthetic coding sequence
  source 1..990: mol_type = other DNA
atgagcacagacagctgctgccaccaccctggggtgcccatcttccatgatgccctgaagggctggagctgctgcaggaagaggacagtggacttcagcgagttcctgaacatcaagggctgcaccatgggcccccactgtgccgagaagctgcctgaggccccccagcctgagggccctgccaccagcagcagcctgcaggagcagaagcccctgaatgtcatccccaagtctgctgagaccctgcggcgggagcggcccaagtctgagctgcccctgaagctgctgcccctgaacatcagccaggccctggagatggccctggagcagaaggagctggaccaggagcctggagctggcctggacagcctcatcagaacaggcagcagctgccagaaccctggctgtgatgctgtgtaccagggccctgagagtgatgccaccccctgcacctaccaccctggggccccccgcttccacgagggcatgaagtcctggagctgctgcggcatccagaccctggactttggagccttcctggcccagcccggctgccgggtgggcagacatgactggggcaagcagctgcctgccagctgcagacatgactggcaccagacagacagcctggtggtggtgacagtgtatggccagatccccctgcctgccttcaactgggtgaaggccagccagacagagctgcacgtgcacatcgtgtttgatggcaacagagtcttccaggcccagatgaagctgtggggcgtcatcaacgtggagcagagcagcgtcttcctgatgcccagccgggtggagatcagcctggtgaaggctgaccccggctcctgggcccagctggagcacccagatgccctggccaagaaggcccgggccggcgtggtgctggagatggatgaggaggagagtgatgacagtgatgatgacctgtcctggacagaggaggaggaggaggaggaggccatgggagagtag

SEQ ID NO: 156139 - DNA, 603 bp, synthetic construct
  misc_feature 1..603: note = Description of Artificial Sequence: Synthetic coding sequence
  source 1..603: mol_type = other DNA
atgttcaggaagggcaagaagaggcacagcagcagcagcagccagagcagcgagatcagcaccaagagcaagtctgtggacagcagcctgggcggcctgagccgcagcagcacagtggccagcctggacacagacagcaccaagagcagcggccagagcaacaacaacagcgacacctgtgccgagttccgcatcaagtatgtgggcgccatcgagaagctgaagctgtctgagggcaagggcctggagggccccctggacctgatcaactacattgatgtggcccagcaggacggcaagctgccctttgtgcccccagaggaggagttcatcatgggcgtgtccaaatatggcatcaaggtgtccaccagtgaccagtatgatgtgctgcacagacatgccctgtacctgatcatccgcatggtgtgctatgatgatggcctgggcgctgggaagagcctgctggccctgaagaccacagatgccagcaatgaggagtacagcctgtgggtgtaccagtgcaacagcctggagcaggcccaggccatctgcaaggtgctgagcacagcctttgattctgtgctgaccagcgagaagccctag

SEQ ID NO: 156140 - DNA, 603 bp, synthetic construct; identical to SEQ ID NO: 156139
  misc_feature 1..603: note = Description of Artificial Sequence: Synthetic coding sequence
  source 1..603: mol_type = other DNA

SEQ ID NO: 156141 - DNA, 255 bp, synthetic construct
  misc_feature 1..255: note = Description of Artificial Sequence: Synthetic coding sequence
  source 1..255: mol_type = other DNA
atgttcaggaagggcaagaagaggcacagcagcagcagcagccagagcagcgagatcagcaccaagagcaagtctgtggacagcagcctgggcggcctgagccgcagcagcacagtggccagcctggacacagacagcaccaagagcagcggccagagcaacaacaacagcgacacctgtgccgagttccgcatcaagtatgtgggcgccatcgagaagctgaagctgtctgagggcaagggcctggagggctag

SEQ ID NO: 156142 - DNA, 291 bp, synthetic construct
  misc_feature 1..291: note = Description of Artificial Sequence: Synthetic coding sequence
  source 1..291: mol_type = other DNA
atgttcaggaagggcaagaagaggcacagcagcagcagcagccagagcagcgagatcagcaccaagagcaagtctgtggacagcagcctgggcggcctgagccgcagcagcacagtggccagcctggacacagacagcaccaagagcagcggccagagcaacaacaacagcgacacctgtgccgagttccgcatcaagtatgtgggcgccatcgagaagctgaagctgtctgagggcaagggcctggagggccccctggacctgatcaactacattgatgtggcccagtag

SEQ ID NO: 156143 - DNA, 261 bp, synthetic construct
  misc_feature 1..261: note = Description of Artificial Sequence: Synthetic coding sequence
  source 1..261: mol_type = other DNA
atgttcaggaagggcaagaagaggcacagcagcagcagcagccagagcagcgagatcagcaccaagagcaagtctgtggacagcagcctgggcggcctgagccgcagcagcacagtggccagcctggacacagacagcaccaagagcagcggccagagcaacaacaacagcgacacctgtgccgagttccgcatcaagtatgtgggcgccatcgagaagctgaagctgtctgagggcaagggcctggagggccccctgtag

SEQ ID NO: 156144 - DNA, 411 bp, synthetic construct
  misc_feature 1..411: note = Description of Artificial Sequence: Synthetic coding sequence
  source 1..411: mol_type = other DNA
atgttcaggaagggcaagaagaggcacagcagcagcagcagccagagcagcgagatcagcaccaagagcaagtctgtggacagcagcctgggcggcctgagccgcagcagcacagtggccagcctggacacagacagcaccaagagcagcggccagagcaacaacaacagcgacacctgtgccgagttccgcatcaagtatgtgggcgccatcgagaagctgaagctgtctgagggcaagggcctggagggccccctggacctgatcaactacattgatgtggcccagcaggacggcaagctgccctttgtgcccccagaggaggagttcatcatgggcgtgtccaaatatggcatcaaggtgtccaccagtgaccagtatgatgtgctgcacagacatgccctgtactag

SEQ ID NO: 156145 - DNA, 345 bp, synthetic construct
  misc_feature 1..345: note = Description of Artificial Sequence: Synthetic coding sequence
  source 1..345: mol_type = other DNA
atgttcaggaagggcaagaagaggcacagcagcagcagcagccagagcagcgagatcagcaccaagagcaagtctgtggacagcagcctgggcggcctgagccgcagcagcacagtggccagcctggacacagacagcaccaagagcagcggccagagcaacaacaacagcgacacctgtgccgagttccgcatcaagtatgtgggcgccatcgagaagctgaagctgtctgagggcaagggcctggagggccccctggacctgatcaactacattgatgtggcccagcaggacggcaagctgccctttgtgcccccagaggaggagttcatcatgggcgtgtag

SEQ ID NO: 156146 - DNA, 198 bp, synthetic construct
  misc_feature 1..198: note = Description of Artificial Sequence: Synthetic coding sequence
  source 1..198: mol_type = other DNA
atgttcaggaagggcaagaagaggcacagcagcagcagcagccagagcagcgagatcagcaccaagagcaagtctgtggacagcagcctgggcggcctgagccgcagcagcacagtggccagcctggacacagacagcaccaagagcagcggccagagcaacaacaacagcgacacctgtgccgagttccgcatctag

SEQ ID NO: 156147 - DNA, 453 bp, synthetic construct
  misc_feature 1..453: note = Description of Artificial Sequence: Synthetic coding sequence
  source 1..453: mol_type = other DNA
atgttcaggaagggcaagaagaggcacagcagcagcagcagccagagcagcgagatcagcaccaagagcaagtctgtggacagcagcctgggcggcctgagccgcagcagcacagtggccagcctggacacagacagcaccaagagcagcggccagagcaacaacaacagcgacacctgtgccgagttccgcatcaagtatgtgggcgccatcgagaagctgaagctgtctgagggcaagggcctggagggccccctggacctgatcaactacattgatgtggcccagcaggacggcaagctgccctttgtgcccccagaggaggagttcatcatgggcgtgtccaaatatggcatcaaggtgtccaccagtgaccagtatgagcaggcccaggccatctgcaaggtgctgagcacagcctttgattctgtgctgaccagcgagaagccctag

SEQ ID NO: 156148 - DNA, 534 bp, synthetic construct
  misc_feature 1..534: note = Description of Artificial Sequence: Synthetic coding sequence
  source 1..534: mol_type = other DNA
atgcctgtgaagaggagcctgaagctggatggcctgctggaggagaacagctttgaccccagcaagatcaccaggaagaagagcgtcatcacctacagccccaccaccggcacctgccagatgagcctgtttgccagccccaccagcagcgaggagcagaagcacagaaatggcctgagcaatgagaagaggaagaagctgaaccaccccagcctgacagagagcaaggagagcaccaccaaggacaatgatgagttcatgatgctgctgagcaaggtggagaagctgtctgaggagatcatggagatcatgcagaacctgagcagcatccaggccctggagggcagccgggagctggagaacctgattggcatcagctgtgccagccacttcctgaagcgggagatgcagaagaccaaggagctgatgaccaaggtgaacaagcagaagctgtttgagaagagcacaggcctgccccacaaggccagccgccacctggacagctatgagttcctgaaggccatcctgaactag

SEQ ID NO: 156149 - DNA, 513 bp, synthetic construct
  misc_feature 1..513: note = Description of Artificial Sequence: Synthetic coding sequence
  source 1..513: mol_type = other DNA
atgcctgtgaagaggagcctgaagctggatggcctgctggaggagaacagctttgaccccagcaagatcaccaggaagaagagcgtcatcacctacagccccaccaccggcacctgccagatgagcctgtttgccagccccaccagcagcgaggagcagaagcacagaaatggcctgagcaatgagaagaggaagaagctgaaccaccccagcctgacagagagcaaggagagcaccaccaaggacaatgatgagttcatgatgctgctgagcaaggtggagaagctgtctgaggagatcatggagatcatgcagaacctgagcagcatccaggccctggagggcagccgggagctggagaacctgattggcatcagctgtgccagccacttcctgaagcgggagatgcagaagaccaaggagctgatgaccaaggtgaacaagcagaagctgtttgagaagagcacaggcctgccccacaagggccagccccagatgagccagcccctgtag

SEQ ID NO: 156150 - DNA, 651 bp, synthetic construct
  misc_feature 1..651: note = Description of Artificial Sequence: Synthetic coding sequence
  source 1..651: mol_type = other DNA
atgccctttgcccctgtggcccaggcccgggtgcagtggcatgacttccgcagcctgcagcacctgctgcctgccttcaagcgcttcagctgcctgagcctgggcagctcctgggactacagcgtgaagaggagcctgaagctggatggcctgctggaggagaacagctttgaccccagcaagatcaccaggaagaagagcgtcatcacctacagccccaccaccggcacctgccagatgagcctgtttgccagccccaccagcagcgaggagcagaagcacagaaatggcctgagcaatgagaagaggaagaagctgaaccaccccagcctgacagagagcaaggagagcaccaccaaggacaatgatgagttcatgatgctgctgagcaaggtggagaagctgtctgaggagatcatggagatcatgcagaacctgagcagcatccaggccctggagggcagccgggagctggagaacctgattggcatcagctgtgccagccacttcctgaagcgggagatgcagaagaccaaggagctgatgaccaaggtgaacaagcagaagctgtttgagaagagcacaggcctgccccacaaggccagccgccacctggacagctatgagttcctgaaggccatcctgaactag

SEQ ID NO: 156151 - DNA, 3540 bp, synthetic construct
  misc_feature 1..3540: note = Description of Artificial Sequence: Synthetic coding sequence
  source 1..3540: mol_type = other DNA
atggccccccggccccgggcccggcctggggtggccgtggcctgctgctggctgctgactgtggtgctgcgctgctgcgtgtccttcaacgtggatgtgaagaacagcatgaccttcagcggccctgtggaggacatgtttggctacacagtgcagcagtatgaaaatgaggagggcaagtgggtgctgattggcagccccctggtgggccagcccaagaacagaactggagatgtgtacaagtgccctgtgggccgcggggagagcctgccctgtgtgaagctggacctgcctgtgaacaccagcatccccaacgtgacagaggtgaaggagaacatgaccttcggcagcaccctggtgaccaaccccaacggcggcttcctggcctgtggccccctgtatgcctaccgctgtggccacctgcactacaccaccggcatctgcagtgatgtgagccccaccttccaggtggtgaacagcatcgcccctgtgcaggagtgcagcacccagctggacatcgtgattgtgctggatggcagcaacagcatctacccctgggacagcgtgacagccttcctgaatgacctgctggagaggatggacatcggccccaagcagacccaggtgggcatcgtgcagtacggggagaatgtgacccatgagttcaacctgaacaagtacagcagcacagaggaggtgctggtggccgccaagaagatcgtgcagaggggcggccggcagaccatgacagccctgggcatcgacacagccaggaaggaggccttcacagaggcccggggggccaggagaggagtgaagaaggtgatggtgattgtgacagatggagagagccatgacaaccaccggctgaagaaggtgatccaggactgtgaagatgagaacatccagcgcttcagcatcgccatcctgggcagctacaacagaggcaacctgagcacagagaagtttgtggaggagatcaagagcatcgccagcgagcccacagagaagcacttcttcaacgtgtctgatgagctggccctggtgaccatcgtgaagaccctgggggagcgcatctttgccctggaggccacagctgaccagagcgctgccagctttgagatggagatgagccagacaggcttcagcgcccactacagccaggactgggtgatgctgggcgctgtgggcgcctatgactggaatggcaccgtggtgatgcagaaggccagccagatcatcatccccaggaacaccaccttcaacgtggagagcaccaagaagaatgagcccctggccagctacctgggctacacagtgaacagcgccacagccagcagtggagatgtgctgtacatcgccggccagccccgctacaaccacacaggccaggtgatcatctacaggatggaggatggcaacatcaagatcctgcagaccctgagcggggagcagatcggcagctacttcggcagcatcctgaccaccacagacatcgacaaggacagcaacacagacatcctgctggtgggcgcccccatgtacatgggcacagagaaggaggagcagggcaaggtgtatgtgtatgccctgaaccagaccaggtttgagtaccagatgagcctggagcccatcaagcagacctgctgcagcagccggcagcacaacagctgcaccacagagaacaagaatgagccctgtggggccaggtttggaacagccatcgctgctgtgaaggacctgaacctggatggcttcaatgacatcgtgattggagcccccctggaggatgaccatggaggagctgtgtacatctaccacggcagcggcaagaccatcaggaaggagtatgcccagaggatccccagcggaggagatggcaagaccctgaagttcttcggccagagcatccacggggagatggacctgaatggagatggcctgacagatgtgaccatcggcggcctgggcggggccgccctcttctggagcagagatgtggccgtggtgaaggtgaccatgaactttgagcccaacaaggtgaacatccagaagaagaactgccacatggagggcaaggagaccgtgtgcatcaatgccaccgtgtgctttgatgtgaagctgaagagcaaggaggacaccatctatgaggccgacctgcagtacagagtgaccctggacagcctgcggcagatcagccgctccttcttcagcggcacccaggagaggaaggtgcagaggaacatcaccgtgaggaagtcagaatgtaccaagcacagcttctacatgctggacaagcatgacttccaggacagcgtgcgcatcaccctggacttcaacctgacagatcctgaaaatggacctgtgctggatgacagcctgcccaacagcgtgcatgagtacatcccctttgccaaggactgtggcaacaaggagaagtgcatcagtgacctgagcctgcacgtggccaccacagagaaggacctgctgattgtgcgcagccagaatgacaagttcaacgtgtccctgactgtgaagaacaccaaggacagcgcctacaacaccaggaccatcgtgcactacagccccaacctggtgttcagcggcatcgaggccatccagaaggacagctgtgagagcaaccacaacatcacctgcaaggtgggctaccccttcctgcggcggggggagatggtgaccttcaagatcctcttccagttcaacaccagctacctgatggagaatgtgaccatctacctgagcgccaccagtgacagcgaggagcccccagagaccctgagtgacaacgtggtgaacatcagcatccctgtgaagtatgaggtgggcctgcagttctacagcagcgccagcgagtaccacatcagcattgctgccaatgagaccgtgcctgaggtgatcaacagcacagaagatattggaaatgagatcaacatcttctacctgatcaggaagagcggcagcttccccatgcctgagctgaagctgagcatctccttccccaacatgaccagcaatggctaccctgtgctgtaccccaccggcctgagcagcagtgaaaatgccaactgccggccccacatctttgaggaccccttcagcatcaacagcggcaagaagatgaccaccagcacagaccacctgaagaggggcaccatcctggactgcaacacctgcaagtttgccaccatcacctgcaacctgaccagcagtgacatcagccaggtgaatgtgtccctcatcctgtggaagcccaccttcatcaagagctacttcagcagcctgaacctgaccatccggggggagctgcggagtgaaaatgccagcctggtgctgagcagcagcaaccagaagcgggagctggccatccagatcagcaaggatggcctgcccggccgggtgcccctgtgggtgatcctgctgagcgcctttgctggcctgctgctgctgatgctgctgatcctggccctgtggaagattggcttcttcaagaggcccctgaagaagaagatggagaagtag

SEQ ID NO: 156152 - DNA, 3567 bp, synthetic construct
  misc_feature 1..3567: note = Description of Artificial Sequence: Synthetic coding sequence
  source 1..3567: mol_type = other DNA
atggacctgccccggggcctggtggtggcctgggccctgagcctgtggccaggcttcacagacaccttcaacatggacaccaggaagcccagggtcatccctggcagcaggacagccttcttcggctacacagtgcagcagcacgacatcagcggcaacaagtggctggtggtgggcgcccccctggagaccaacggctaccagaagacaggagatgtgtacaagtgccctgtgatccacggcaactgcaccaagctgaacctgggccgggtgaccctgagcaatgtgtctgagaggaaggacaacatgaggctgggcctgagcctggccaccaaccccaaggacaacagcttcctggcctgcagccccctgtggagccatgaatgtggcagcagctactacaccaccggcatgtgcagccgggtgaacagcaacttccgcttcagcaagacagtggccccagccctgcagcgctgccagacctacatggacatcgtgattgtgctggatggcagcaacagcatctacccctgggtggaggtgcagcacttcctgatcaacatcctgaagaagttctacatcggccctggccagatccaggtgggcgtggtgcagtacggggaggatgtggtgcatgagttccacctgaatgactacagatctgtgaaggatgtggtggaggccgccagccacatcgagcagaggggcggcacagagaccaggacagccttcggcatcgagtttgcccggtctgaggccttccagaagggcggcaggaagggggccaagaaggtgatgatcgtcatcacagatggagagagccatgacagcccagacctggagaaggtgatccagcagagcgagcgggacaacgtgaccaggtatgctgtggccgtgctgggctactacaacagaagaggcatcaaccctgagaccttcctgaatgagatcaagtacatcgccagtgaccctgatgacaagcacttcttcaacgtgacagatgaggccgccctgaaggacatcgtggatgccctgggggaccgcatcttcagcctggagggcaccaacaagaatgagaccagctttggcctggagatgagccagacaggcttcagcagccacgtggtggaggatggagtgctgctgggcgctgtgggcgcctatgactggaatggagctgtgctgaaggagaccagcgctgggaaggtgatccccctgcgggagagctacctgaaggagttccctgaggagctgaagaaccacggggcctacctgggctacacagtgacctctgtggtgagcagccggcagggccgggtgtatgtggccggggccccccgcttcaaccacacaggcaaggtgatcctcttcaccatgcacaacaacagaagcctgaccatccaccaggccatgaggggccagcagatcggcagctacttcggcagcgagatcacctctgtggacattgatggagatggagtgacagatgtgctgctggtgggcgcccccatgtacttcaatgaaggccgggagcggggcaaggtgtatgtgtatgagctgcggcagaacctgtttgtgtacaacggcaccctgaaggacagccacagctaccagaatgcccgcttcggcagcagcatcgcctctgtgcgggacctgaaccaggacagctacaatgatgtggtggtgggcgcccccctggaggacaaccacgccggggccatctacatcttccacggcttccggggcagcatcctgaagacccccaagcagaggatcacagccagcgagctggccaccggcctgcagtacttcggctgcagcatccacggccagctggacctgaatgaagatggcctgattgacctggccgtgggcgccctgggcaatgctgtgatcctgtggagcaggcctgtggtgcagatcaatgccagcctgcactttgagcccagcaagatcaacatcttccaccgggactgcaagaggagcggcagagatgccacctgcctggccgccttcctgtgcttcacccccatcttcctggccccccacttccagaccaccaccgtgggcatccgctacaatgccaccatggatgagcggcgctacaccccccgggcccacctggatgaaggaggagaccgcttcaccaacagagctgtgctgctgagcagcggccaggagctgtgtgagcgcatcaacttccacgtgctggacacagctgactatgtgaagcctgtgaccttctctgtggagtacagcctggaggaccctgaccacggccccatgctggatgatggctggcccaccaccctgcgggtgtctgtgcccttctggaatggctgcaatgaagatgagcactgtgtgcctgacctggtgctggatgcccggagtgacctgcccacagccatggagtactgccagagggtgctgaggaagccagcccaggactgcagcgcctacaccctgagctttgacaccaccgtcttcatcatcgagagcacccggcagagggtggccgtggaggccaccctggagaacagaggagaaaatgcctacagcacagtgctgaacatcagccagagcgccaacctgcagtttgccagcctcatccagaaggaggacagtgatggcagcattgaatgtgtgaatgaggagcggcggctgcagaagcaggtgtgcaatgtgtcctaccccttcttccgggccaaggccaaggtggccttccggctggactttgagttcagcaagagcatcttcctgcaccacctggagattgagctggccgccggcagtgacagcaatgaaagagacagcaccaaggaggacaacgtggcccccctgcgcttccacctgaagtatgaagcagatgtgctcttcaccaggagcagcagcctgagccactatgaggtgaagcccaacagcagcctggagagatatgatggcatcggcccccccttcagctgcatcttccgcatccagaacctgggcctcttccccatccacggcatgatgatgaagatcaccatccccatcgccaccaggagcggcaaccggctgctgaagctgcgggacttcctgacagatgaggccaacaccagctgcaacatctggggcaacagcacagagtaccggcccacccctgtggaggaggacctgcggcgggccccccagctgaaccacagcaacagtgatgtggtgtccatcaactgcaacatccggctggtgcccaaccaggagatcaacttccacctgctgggcaacctgtggctgcggagcctgaaggccctgaagtacaagtccatgaagatcatggtgaatgctgccctgcagaggcagttccacagccccttcatcttccgggaggaggaccccagccggcagatcgtgtttgagatcagcaagcaggaggactggcaggtgcccatctggatcatcgtgggcagcaccctgggcggcctgctgctgctggccctgctggtgctggccctgtggaagctgggcttcttccgcagcgccaggagaagaagagagcccggcctggaccccacccccaaggtgctggagtag

SEQ ID NO: 156153 - DNA, 3570 bp, synthetic construct
  misc_feature 1..3570: note = Description of Artificial Sequence: Synthetic coding sequence
  source 1..3570: mol_type = other DNA
atggacctgccccggggcctggtggtggcctgggccctgagcctgtggccaggcttcacagacaccttcaacatggacaccaggaagcccagggtcatccctggcagcaggacagccttcttcggctacacagtgcagcagcacgacatcagcggcaacaagtggctggtggtgggcgcccccctggagaccaacggctaccagaagacaggagatgtgtacaagtgccctgtgatccacggcaactgcaccaagctgaacctgggccgggtgaccctgagcaatgtgtctgagaggaaggacaacatgaggctgggcctgagcctggccaccaaccccaaggacaacagcttcctggcctgcagccccctgtggagccatgaatgtggcagcagctactacaccaccggcatgtgcagccgggtgaacagcaacttccgcttcagcaagacagtggccccagccctgcagcgctgccagacctacatggacatcgtgattgtgctggatggcagcaacagcatctacccctgggtggaggtgcagcacttcctgatcaacatcctgaagaagttctacatcggccctggccagatccaggtgggcgtggtgcagtacggggaggatgtggtgcatgagttccacctgaatgactacagatctgtgaaggatgtggtggaggccgccagccacatcgagcagaggggcggcacagagaccaggacagccttcggcatcgagtttgcccggtctgaggccttccagaagggcggcaggaagggggccaagaaggtgatgatcgtcatcacagatggagagagccatgacagcccagacctggagaaggtgatccagcagagcgagcgggacaacgtgaccaggtatgctgtggccgtgctgggctactacaacagaagaggcatcaaccctgagaccttcctgaatgagatcaagtacatcgccagtgaccctgatgacaagcacttcttcaacgtgacagatgaggccgccctgaaggacatcgtggatgccctgggggaccgcatcttcagcctggagggcaccaacaagaatgagaccagctttggcctggagatgagccagacaggcttcagcagccacgtggtggaggatggagtgctgctgggcgctgtgggcgcctatgactggaatggagctgtgctgaaggagaccagcgctgggaaggtgatccccctgcgggagagctacctgaaggagttccctgaggagctgaagaaccacggggcctacctgggctacacagtgacctctgtggtgagcagccggcagggccgggtgtatgtggccggggccccccgcttcaaccacacaggcaaggtgatcctcttcaccatgcacaacaacagaagcctgaccatccaccaggccatgaggggccagcagatcggcagctacttcggcagcgagatcacctctgtggacattgatggagatggagtgacagatgtgctgctggtgggcgcccccatgtacttcaatgaaggccgggagcggggcaaggtgtatgtgtatgagctgcggcagaacctgtttgtgtacaacggcaccctgaaggacagccacagctaccagaatgcccgcttcggcagcagcatcgcctctgtgcgggacctgaaccaggacagctacaatgatgtggtggtgggcgcccccctggaggacaaccacgccggggccatctacatcttccacggcttccggggcagcatcctgaagacccccaagcagaggatcacagccagcgagctggccaccggcctgcagtacttcggctgcagcatccacggccagctggacctgaatgaagatggcctgattgacctggccgtgggcgccctgggcaatgctgtgatcctgtggagcaggcctgtggtgcagatcaatgccagcctgcactttgagcccagcaagatcaacatcttccaccgggactgcaagaggagcggcagagatgccacctgcctggccgccttcctgtgcttcacccccatcttcctggccccccacttccagaccaccaccgtgggcatccgctacaatgccaccatggatgagcggcgctacaccccccgggcccacctggatgaaggaggagaccgcttcaccaacagagctgtgctgctgagcagcggccaggagctgtgtgagcgcatcaacttccacgtgctggacacagctgactatgtgaagcctgtgaccttctctgtggagtacagcctggaggaccctgaccacggccccatgctggatgatggctggcccaccaccctgcgggtgtctgtgcccttctggaatggctgcaatgaagatgagcactgtgtgcctgacctggtgctggatgcccggagtgacctgcccacagccatggagtactgccagagggtgctgaggaagccagcccaggactgcagcgcctacaccctgagctttgacaccaccgtcttcatcatcgagagcacccggcagagggtggccgtggaggccaccctggagaacagaggagaaaatgcctacagcacagtgctgaacatcagccagagcgccaacctgcagtttgccagcctcatccagaaggaggacagtgatggcagcattgaatgtgtgaatgaggagcggcggctgcagaagcaggtgtgcaatgtgtcctaccccttcttccgggccaaggccaaggtggccttccggctggactttgagttcagcaagagcatcttcctgcaccacctggagattgagctggccgccggcagtgacagcaatgaaagagacagcaccaaggaggacaacgtggcccccctgcgcttccacctgaagtatgaagcagatgtgctcttcaccaggagcagcagcctgagccactatgaggtgaagcccaacagcagcctggagagatatgatggcatcggcccccccttcagctgcatcttccgcatccagaacctgggcctcttccccatccacggcatgatgatgaagatcaccatccccatcgccaccaggagcggcaaccggctgctgaagctgcgggacttcctgacagatgaggtggccaacaccagctgcaacatctggggcaacagcacagagtaccggcccacccctgtggaggaggacctgcggcgggccccccagctgaaccacagcaacagtgatgtggtgtccatcaactgcaacatccggctggtgcccaaccaggagatcaacttccacctgctgggcaacctgtggctgcggagcctgaaggccctgaagtacaagtccatgaagatcatggtgaatgctgccctgcagaggcagttccacagccccttcatcttccgggaggaggaccccagccggcagatcgtgtttgagatcagcaagcaggaggactggcaggtgcccatctggatcatcgtgggcagcaccctgggcggcctgctgctgctggccctgctggtgctggccctgtggaagctgggcttcttccgcagcgccaggagaagaagagagcccggcctggaccccacccccaaggtgctggagtag

SEQ ID NO: 156154 - DNA, 2472 bp, synthetic construct
  misc_feature 1..2472: note = Description of Artificial Sequence: Synthetic coding sequence
  source 1..2472: mol_type = other DNA
atgagccagacaggcttcagcagccacgtggtggaggatggagtgctgctgggcgctgtgggcgcctatgactggaatggagctgtgctgaaggagaccagcgctgggaaggtgatccccctgcgggagagctacctgaaggagttccctgaggagctgaagaaccacggggcctacctgggctacacagtgacctctgtggtgagcagccggcagggccgggtgtatgtggccggggccccccgcttcaaccacacaggcaaggtgatcctcttcaccatgcacaacaacagaagcctgaccatccaccaggccatgaggggccagcagatcggcagctactttggaagtgagatcacctctgtggacattgatggagatggagtgacagatgtgctgctggtgggcgcccccatgtacttcaatgaaggccgggagcggggcaaggtgtatgtgtatgagctgcggcagaacctgtttgtgtacaacggcaccctgaaggacagccacagctaccagaatgccaggtttggcagcagcatcgcctctgtgcgggacctgaaccaggacagctacaatgatgtggtggtgggcgcccccctggaggacaaccacgccggggccatctacatcttccacggcttccggggcagcatcctgaagacccccaagcagaggatcacagccagcgagctggccaccggcctgcagtacttcggctgcagcatccacggccagctggacctgaatgaagatggcctgattgacctggccgtgggcgccctgggcaatgctgtgatcctgtggagcaggcctgtggtgcagatcaatgccagcctgcactttgagcccagcaagatcaacatcttccaccgggactgcaagaggagcggcagagatgccacctgcctggccgccttcctgtgcttcacccccatcttcctggccccccacttccagaccaccaccgtgggcatccgctacaatgccaccatggatgaaagacgctacaccccccgggcccacctggatgagggcggggaccgcttcaccaacagagctgtgctgctgagcagcggccaggagctgtgtgagcgcatcaacttccacgtgctggacacagctgactatgtgaagcctgtgaccttctctgtggagtacagcctggaggaccctgaccacggccccatgctggatgatggctggcccaccaccctgcgggtgtctgtgcccttctggaatggctgcaatgaagatgagcactgtgtgcctgacctggtgctggatgcccggagtgacctgcccacagccatggagtactgccagagggtgctgaggaagccagcccaggactgcagcgcctacaccctgagctttgacaccaccgtcttcatcatcgagagcacccggcagagggtggccgtggaggccaccctggagaacagaggagaaaatgcctacagcacagtgctgaacatcagccagagcgccaacctgcagtttgccagcctcatccagaaggaggacagtgatggcagcattgaatgtgtgaatgaggagcggcggctgcagaagcaggtgtgcaatgtgtcctaccccttcttccgggccaaggccaaggtggccttccggctggactttgagttcagcaagagcatcttcctgcaccacctggagattgagctggccgccggcagtgacagcaatgaaagagacagcaccaaggaggacaacgtggcccccctgcgcttccacctgaagtatgaagcagatgtgctcttcaccaggagcagcagcctgagccactatgaggtgaagcccaacagcagcctggagagatatgatggcatcggcccccccttcagctgcatcttccgcatccagaacctgggcctcttccccatccacggcatgatgatgaagatcaccatccccatcgccaccaggagcggcaaccggctgctgaagctgcgggacttcctgacagatgaggccaacaccagctgcaacatctggggcaacagcacagagtaccggcccacccctgtggaggaggacctgcggcgggccccccagctgaaccacagcaacagtgatgtggtgtccatcaactgcaacatccggctggtgcccaaccaggagatcaacttccacctgctgggcaacctgtggctgcggagcctgaaggccctgaagtacaagtccatgaagatcatggtgaatgctgccctgcagaggcagttccacagccccttcatcttccgggaggaggaccccagccggcagatcgtgtttgagatcagcaagcaggaggactggcaggtgcccatctggatcatcgtgggcagcaccctgggcggcctgctgctgctggccctgctggtgctggccctgtggaagctgggcttcttccgcagcgccaggagaagaagagagcccggcctggaccccacccccaaggtgctggagtag

SEQ ID NO: 156155 - DNA, 1953 bp, synthetic construct
  misc_feature 1..1953: note = Description of Artificial Sequence: Synthetic coding sequence
  source 1..1953: mol_type = other DNA
atggacctgccccggggcctggtggtggcctgggccctgagcctgtggccaggcttcacagacaccttcaacatggacaccaggaagcccagggtcatccctggcagcaggacagccttcttcggctacacagtgcagcagcacgacatcagcggcaacaagtggctggtggtgggcgcccccctggagaccaacggctaccagaagacaggagatgtgtacaagtgccctgtgatccacggcaactgcaccaagctgaacctgggccgggtgaccctgagcaatgtgtctgagaggaaggacaacatgaggctgggcctgagcctggccaccaaccccaaggacaacagcttcctggcctgcagccccctgtggagccatgaatgtggcagcagctactacaccaccggcatgtgcagccgggtgaacagcaacttccgcttcagcaagacagtggccccagccctgcagcgctgccagacctacatggacatcgtgattgtgctggatggcagcaacagcatctacccctgggtggaggtgcagcacttcctgatcaacatcctgaagaagttctacatcggccctggccagatccaggtgggcgtggtgcagtacggggaggatgtggtgcatgagttccacctgaatgactacagatctgtgaaggatgtggtggaggccgccagccacatcgagcagaggggcggcacagagaccaggacagccttcggcatcgagtttgcccggtctgaggccttccagaagggcggcaggaagggggccaagaaggtgatgatcgtcatcacagatggagagagccatgacagcccagacctggagaaggtgatccagcagagcgagcgggacaacgtgaccaggtatgctgtggccgtgctgggctactacaacagaagaggcatcaaccctgagaccttcctgaatgagatcaagtacatcgccagtgaccctgatgacaagcacttcttcaacgtgacagatgaggccgccctgaaggacatcgtggatgccctgggggaccgcatcttcagcctggagggcaccaacaagaatgagaccagctttggcctggagatgagccagacaggcttcagcagccacgtggtggaggatggagtgctgctgggcgctgtgggcgcctatgactggaatggagctgtgctgaaggagaccagcgctgggaaggtgatccccctgcgggagagctacctgaaggagttccctgaggagctgaagaaccacggggcctacctgggctacacagtgacctctgtggtgagcagccggcagggccgggtgtatgtggccggggccccccgcttcaaccacacaggcaaggtgatcctcttcaccatgcacaacaacagaagcctgaccatccaccaggccatgaggggccagcagatcggcagctacttcggcagcgagatcacctctgtggacattgatggagatggagtgacagatgtgctgctggtgggcgcccccatgtacttcaatgaaggccgggagcggggcaaggtgtatgtgtatgagctgcggcagaacctgtttgtgtacaacggcaccctgaaggacagccacagctaccagaatgcccgcttcggcagcagcatcgcctctgtgcgggacctgaaccaggacagctacaatgatgtggtggtgggcgcccccctggaggacaaccacgccggggccatctacatcttccacggcttccggggcagcatcctgaagacccccaagcagaggatcacagccagcgagctggccaccggcctgcagtacttcggctgcagcatccacggccagctggacctgaatgaagatggcctgattgacctggccgtgggcgccctgggcaatgctgtgatcctgtggaccccaccacccaagtgctggagcgaggcccctgaggagaccctgtcctag

SEQ ID NO: 156156 - DNA, 3546 bp, synthetic construct
  misc_feature 1..3546: note = Description of Artificial Sequence: Synthetic coding sequence
  source 1..3546: mol_type = other DNA
atgggccctgagaggactggagctgcccccctgcccctgctgctggtgctggccctgagccagggcatcctgaactgctgcctggcctacaacgtgggcctgcctgaggccaagatcttcagcggccccagcagcgagcagtttggctatgctgtgcagcagttcatcaaccccaagggcaactggctgctggtgggcagcccctggagcggcttccctgagaacaggatgggagatgtgtacaagtgccctgtggacctgagcacagccacctgtgagaagctgaacctgcagaccagcaccagcatccccaacgtgacagagatgaagaccaacatgagcctgggcctcatcctgaccaggaacatgggcactggaggcttcctgacctgtggccccctgtgggcccagcagtgtggcaaccagtactacaccaccggggtgtgcagcgacatcagcccagacttccagctgagcgccagcttcagccctgccacccagccctgccccagcctgattgatgtggtggtggtgtgtgatgagagcaacagcatctacccctgggatgctgtgaagaacttcctggagaagtttgtgcagggcctggacatcggccccaccaagacccaggtgggcctcatccagtatgccaacaacccccgggtggtgttcaacctgaacacctacaagaccaaggaggagatgattgtggccaccagccagaccagccagtatggaggagacctgaccaacacctttggagccatccagtatgccaggaaatatgcctacagcgctgccagcggcggcagaagaagtgccaccaaggtgatggtggtggtgacagatggagagagccatgatggctccatgctgaaggccgtcatcgaccagtgcaaccacgacaacatcctgcgctttggaattgctgtgctgggctacctgaacagaaatgccctggacaccaagaacctgatcaaggagatcaaggccatcgccagcatccccacagagcgctacttcttcaacgtgtctgatgaggccgccctgctggagaaggccggcaccctgggggagcagatcttcagcattgagggcaccgtgcagggcggggacaacttccagatggagatgagccaggtgggcttctctgctgactacagcagccagaatgacatcctgatgctgggcgctgtgggcgccttcggctggagcggcaccatcgtgcagaagaccagccacggccacctgatcttccccaagcaggcctttgaccagatcctgcaggacaggaaccacagcagctacctgggctacagcgtggccgccatcagcactggagagagcacccactttgtggccggggccccccgggccaactacacaggccagatcgtgctgtacagcgtgaatgaaaatggaaacatcaccgtcatccaggcccacagaggagaccagatcggcagctactttggatctgtgctgtgcagcgtggatgtggacaaggacaccatcacagatgtgctgctggtgggcgcccccatgtacatgtctgacctgaagaaggaggagggccgggtgtacctgttcaccatcaaggagggcatcctgggccagcaccagttcctggagggccctgagggcatcgagaacacccgcttcggcagcgccatcgccgccctgagtgacatcaacatggatggcttcaatgatgtgattgtgggcagccccctggagaaccagaacagcggggctgtgtacatctacaacggccaccagggcaccatccgcaccaagtacagccagaagatcctgggcagtgatggagccttccgcagccacctgcagtacttcggccgcagcctggatggctatggagacctgaatggagacagcatcacagatgtgtccatcggggccttcggccaggtggtgcagctgtggagccagagcattgctgatgtggccatcgaggccagcttcaccccagagaagatcaccctggtgaacaagaatgcccagatcatcctgaagctgtgcttcagcgccaagttccggcccaccaagcagaacaaccaggtggccatcgtgtacaacatcaccctggatgctgatggcttcagcagccgggtgaccagccggggcctcttcaaggaaaataatgaacgctgcctgcagaagaacatggtggtgaaccaggcccagagctgcccagagcacatcatctacatccaggagcccagtgatgtggtgaacagcctggacctgcgggtggacatcagcctggagaaccctggcaccagccctgccctggaggcctacagcgagacagccaaggtgttcagcatccccttccacaaggactgtggagaagatggcctgtgcatcagtgacctggtgctggatgtgcggcagatcccagctgcccaggagcagcccttcatcgtgagcaaccagaacaagaggctgaccttctctgtgaccctgaagaacaagcgggagagcgcctacaacacaggaattgtggtggacttctctgaaaatctcttctttgccagcttcagcctgcctgtggatggaacagaggtgacctgccaggtggccgccagccagaagtctgtggcctgtgatgtgggctacccagccctgaagcgggagcagcaggtgaccttcaccatcaactttgacttcaacctgcagaacctgcagaaccaggccagcctgtccttccaggccctgtctgagagccaggaggagaacaaggctgacaacctggtgaacctgaagatccccctgctgtatgatgctgagatccacctgaccaggagcaccaacatcaacttctatgagatcagcagtgatggaaatgtgcccagcatcgtgcacagctttgaagatgtgggccccaagttcatcttcagcctgaaggtgaccactggatctgtgcctgtgtccatggccaccgtcatcatccacatcccccagtacaccaaggagaagaaccccctgatgtacctgactggagtgcagacagacaaggccggggacatcagctgcaatgctgacatcaaccccctgaagattggccagaccagcagctctgtgtccttcaagtctgagaacttccgccacaccaaggagctgaactgcaggacagccagctgcagcaatgtgacctgctggctgaaggatgtgcacatgaagggggagtactttgtgaatgtgaccacccgcatctggaatggcacctttgccagcagcaccttccagacagtgcagctgacagctgctgctgagatcaacacctacaaccctgagatctacgtgattgaggacaacacagtgaccatccccctgatgatcatgaagccagatgagaaggccgaggtgcccaccggggtcatcatcggcagcatcatcgccggcatcctgctgctgctggccctggtggccatcctgtggaagctgggcttcttcaagaggaaatatgagaagatgaccaagaacccagatgaaattgatgagaccacagagctgagcagctag

SEQ ID NO: 156157 - DNA, 2448 bp, synthetic construct
  misc_feature 1..2448: note = Description of Artificial Sequence: Synthetic coding sequence
  source 1..2448: mol_type = other DNA
atgggccctgagaggactggagctgcccccctgcccctgctgctggtgctggccctgagccagggcatcctgaactgctgcctggcctacaacgtgggcctgcctgaggccaagatcttcagcggccccagcagcgagcagtttggctatgctgtgcagcagttcatcaaccccaagggcaactggctgctggtgggcagcccctggagcggcttccctgagaacaggatgggagatgtgtacaagtgccctgtggacctgagcacagccacctgtgagaagctgaacctgcagaccagcaccagcatccccaacgtgacagagatgaagaccaacatgagcctgggcctcatcctgaccaggaacatgggcactggaggcttcctgacctgtggccccctgtgggcccagcagtgtggcaaccagtactacaccaccggggtgtgcagcgacatcagcccagacttccagctgagcgccagcttcagccctgccacccagccctgccccagcctgattgatgtggtggtggtgtgtgatgagagcaacagcatctacccctgggatgctgtgaagaacttcctggagaagtttgtgcagggcctggacatcggccccaccaagacccaggtgggcctcatccagtatgccaacaacccccgggtggtgttcaacctgaacacctacaagaccaaggaggagatgattgtggccaccagccagaccagccagtatggaggagacctgaccaacacctttggagccatccagtatgccaggaaatatgcctacagcgctgccagcggcggcagaagaagtgccaccaaggtgatggtggtggtgacagatggagagagccatgatggctccatgctgaaggccgtcatcgaccagtgcaaccacgacaacatcctgcgctttggaattgctgtgctgggctacctgaacagaaatgccctggacaccaagaacctgatcaaggagatcaaggccatcgccagcatccccacagagcgctacttcttcaacgtgtctgatgaggccgccctgctggagaaggccggcaccctgggggagcagatcttcagcattgagggcaccgtgcagggcggggacaacttccagatggagatgagccaggtgggcttctctgctgactacagcagccagaatgacatcctgatgctgggcgctgtgggcgccttcggctggagcggcaccatcgtgcagaagaccagccacggccacctgatcttccccaagcaggcctttgaccagatcctgcaggacaggaaccacagcagctacctgggctacagcgtggccgccatcagcactggagagagcacccactttgtggccggggccccccgggccaactacacaggccagatcgtgctgtacagcgtgaatgaaaatggaaacatcaccgtcatccaggcccacagaggagaccagatcggcagctactttggatctgtgctgtgcagcgtggatgtggacaaggacaccatcacagatgtgctgctggtgggcgcccccatgtacatgtctgacctgaagaaggaggagggccgggtgtacctgttcaccatcaaggagggcatcctgggccagcaccagttcctggagggccctgagggcatcgagaacacccgcttcggcagcgccatcgccgccctgagtgacatcaacatggatggcttcaatgatgtgattgtgggcagccccctggagaaccagaacagcggggctgtgtacatctacaacggccaccagggcaccatccgcaccaagtacagccagaagatcctgggcagtgatggagccttccgcagccacctgcagtacttcggccgcagcctggatggctatggagacctgaatggagacagcatcacagatgtgtccatcggggccttcggccaggtggtgcagctgtggagccagagcattgctgatgtggccatcgaggccagcttcaccccagagaagatcaccctggtgaacaagaatgcccagatcatcctgaagctgtgcttcagcgccaagttccggcccaccaagcagaacaaccaggtggccatcgtgtacaacatcaccctggatgctgatggcttcagcagccgggtgaccagccggggcctcttcaaggaaaataatgaacgctgcctgcagaagaacatggtggtgaaccaggcccagagctgcccagagcacatcatctacatccaggagcccagtgatgtggtgaacagcctggacctgcgggtggacatcagcctggagaaccctggcaccagccctgccctggaggcctacagcgagacagccaaggtgttcagcatccccttccacaaggactgtggagaagatggcctgtgcatcagtgacctggtgctggatgtgcggcagatcccagctgcccagctgatgggccagaagtag

SEQ ID NO: 156158 - DNA, 1926 bp, synthetic construct
  misc_feature 1..1926: note = Description of Artificial Sequence: Synthetic coding sequence
  source 1..1926: mol_type = other DNA
atgggccctgagaggactggagctgcccccctgcccctgctgctggtgctggccctgagccagggcatcctgaactgctgcctggcctacaacgtgggcctgcctgaggccaagatcttcagcggccccagcagcgagcagtttggctatgctgtgcagcagttcatcaaccccaagggcaactggctgctggtgggcagcccctggagcggcttccctgagaacaggatgggagatgtgtacaagtgccctgtggacctgagcacagccacctgtgagaagctgaacctgcagaccagcaccagcatccccaacgtgacagagatgaagaccaacatgagcctgggcctcatcctgaccaggaacatgggcactggaggcttcctgacctgtggccccctgtgggcccagcagtgtggcaaccagtactacaccaccggggtgtgcagcgacatcagcccagacttccagctgagcgccagcttcagccctgccacccagccctgccccagcctgattgatgtggtggtggtgtgtgatgagagcaacagcatctacccctgggatgctgtgaagaacttcctggagaagtttgtgcagggcctggacatcggccccaccaagacccaggtgggcctcatccagtatgccaacaacccccgggtggtgttcaacctgaacacctacaagaccaaggaggagatgattgtggccaccagccagaccagccagtatggaggagacctgaccaacacctttggagccatccagtatgccaggaaatatgcctacagcgctgccagcggcggcagaagaagtgccaccaaggtgatggtggtggtgacagatggagagagccatgatggctccatgctgaaggccgtcatcgaccagtgcaaccacgacaacatcctgcgctttggaattgctgtgctgggctacctgaacagaaatgccctggacaccaagaacctgatcaaggagatcaaggccatcgccagcatccccacagagcgctacttcttcaacgtgtctgatgaggccgccctgctggagaaggccggcaccctgggggagcagatcttcagcattgagggcaccgtgcagggcggggacaacttccagatggagatgagccaggtgggcttctctgctgactacagcagccagaatgacatcctgatgctgggcgctgtgggcgccttcggctggagcggcaccatcgtgcagaagaccagccacggccacctgatcttccccaagcaggcctttgaccagatcctgcaggacaggaaccacagcagctacctgggctacagcgtggccgccatcagcactggagagagcacccactttgtggccggggccccccgggccaactacacaggccagatcgtgctgtacagcgtgaatgaaaatggaaacatcaccgtcatccaggcccacagaggagaccagatcggcagctactttggatctgtgctgtgcagcgtggatgtggacaaggacaccatcacagatgtgctgctggtgggcgcccccatgtacatgtctgacctgaagaaggaggagggccgggtgtacctgttcaccatcaaggagggcatcctgggccagcaccagttcctggagggccctgagggcatcgagaacacccgcttcggcagcgccatcgccgccctgagtgacatcaacatggatggcttcaatgatgtgattgtgggcagccccctggagaaccagaacagcggggctgtgtacatctacaacggccaccagggcaccatccgcaccaagtacagccagctgctgtgcaccatcatcagctgccagacctgcagcttcaggaagtcctgggaccccatggagcccctgggcgccatcagcagcaccctgggcggcccctggatggccatggagatctag

SEQ ID NO: 156159 - DNA, 2829 bp, synthetic construct
  misc_feature 1..2829: note = Description of Artificial Sequence: Synthetic coding sequence
  source 1..2829: mol_type = other DNA
atgggccctgagaggactggagctgcccccctgcccctgctgctggtgctggccctgagccagggcatcctgaactgctgcctggcctacaacgtgggcctgcctgaggccaagatcttcagcggccccagcagcgagcagtttggctatgctgtgcagcagttcatcaaccccaagggcaactggctgctggtgggcagcccctggagcggcttccctgagaacaggatgggagatgtgtacaagtgccctgtggacctgagcacagccacctgtgagaagctgaacctgcagaccagcaccagcatccccaacgtgacagagatgaagaccaacatgagcctgggcctcatcctgaccaggaacatgggcactggaggcttcctgacctgtggccccctgtgggcccagcagtgtggcaaccagtactacaccaccggggtgtgcagcgacatcagcccagacttccagctgagcgccagcttcagccctgccacccagccctgccccagcctgattgatgtggtggtggtgtgtgatgagagcaacagcatctacccctgggatgctgtgaagaacttcctggagaagtttgtgcagggcctggacatcggccccaccaagacccaggtgggcctcatccagtatgccaacaacccccgggtggtgttcaacctgaacacctacaagaccaaggaggagatgattgtggccaccagccagaccagccagtatggaggagacctgaccaacacctttggagccatccagtatgccaggaaatatgcctacagcgctgccagcggcggcagaagaagtgccaccaaggtgatggtggtggtgacagatggagagagccatgatggctccatgctgaaggccgtcatcgaccagtgcaaccacgacaacatcctgcgctttggaattgctgtgctgggctacctgaacagaaatgccctggacaccaagaacctgatcaaggagatcaaggccatcgccagcatccccacagagcgctacttcttcaacgtgtctgatgaggccgccctgctggagaaggccggcaccctgggggagcagatcttcagcattgagggcaccgtgcagggcggggacaacttccagatggagatgagccaggtgggcttctctgctgactacagcagccagaatgacatcctgatgctgggcgctgtgggcgccttcggctggagcggcaccatcgtgcagaagaccagccacggccacctgatcttccccaagcaggcctttgaccagatcctgcaggacaggaaccacagcagctacctgggctacagcgtggccgccatcagcactggagagagcacccactttgtggccggggccccccgggccaactacacaggccagatcgtgctgtacagcgtgaatgaaaatggaaacatcaccgtcatccaggcccacagaggagaccagatcggcagctactttggatctgtgctgtgcagcgtggatgtggacaaggacaccatcacagatgtgctgctggtgggcgcccccatgtacatgtctgacctgaagaaggaggagggccgggtgtacctgttcaccatcaaggagggcatcctgggccagcaccagttcctggagggccctgagggcatcgagaacacccgcttcggcagcgccatcgccgccctgagtgacatcaacatggatggcttcaatgatgtgattgtgggcagccccctggagaaccagaacagcggggctgtgtacatctacaacggccaccagggcaccatccgcaccaagtacagccagaagatcctgggcagtgatggagccttccgcagccacctgcagtacttcggccgcagcctggatggctatggagacctgaatggagacagcatcacagatgtgtccatcggggccttcggccaggtggtgcagctgtggagccagagcattgctgatgtggccatcgaggccagcttcaccccagagaagatcaccctggtgaacaagaatgcccagatcatcctgaagctgtgcttcagcgccaagttccggcccaccaagcagaacaaccaggtggccatcgtgtacaacatcaccctggatgctgatggcttcagcagccgggtgaccagccggggcctcttcaaggaaaataatgaacgctgcctgcagaagaacatggtggtgaaccaggcccagagctgcccagagcacatcatctacatccaggagcccagtgatgtggtgaacagcctggacctgcgggtggacatcagcctggagaaccctggcaccagccctgccctggaggcctacagcgagacagccaaggtgttcagcatccccttccacaaggactgtggagaagatggcctgtgcatcagtgacctggtgctggatgtgcggcagatcccagctgcccaggagcagcccttcatcgtgagcaaccagaacaagaggctgaccttctctgtgaccctgaagaacaagcgggagagcgcctacaacacaggaattgtggtggacttctctgaaaatctcttctttgccagcttcagcctgcctgtggatggaacagaggtgacctgccaggtggccgccagccagaagtctgtggcctgtgatgtgggctacccagccctgaagcgggagcagcaggtgaccttcaccatcaactttgacttcaacctgcagaacctgcagaaccaggccagcctgtccttccaggccctgtctgagagccaggaggagaacaaggctgacaacctggtgaacctgaagatccccctgctgtatgatgctgagatccacctgaccaggtag

SEQ ID NO: 156160 - DNA, 3120 bp, synthetic construct
  misc_feature 1..3120: note = Description of Artificial Sequence: Synthetic coding sequence
  source 1..3120: mol_type = other DNA
atggcccgggccctgtgccccctgcaggccctgtggctgctggagtgggtgctgctgctgctgggcccctgtgccgcccccccagcctgggccctgaacctggaccctgtgcagctgaccttctacgccggccccaacggcagccagtttggcttcagcctggacttccacaaggacagccacggccgggtggccatcgtggtgggcgcccccaggaccctgggccccagccaggaggagactggaggagtcttcctgtgcccctggagggctgagggcggccagtgccccagcctgctgtttgacctgagagatgagaccagaaatgtgggcagccagaccctgcagaccttcaaggcccggcagggcctgggcgcctctgtggtgtcctggagcgatgtgattgtggcctgtgccccctggcagcactggaatgtgctggagaagacagaggaggccgagaagacccctgtgggcagctgcttcctggcccagcctgagagcggccggcgggcagagtacagcccctgccggggcaacaccctgagccgcatctacgtggagaatgacttctcctgggacaagcgctactgtgaggccggcttcagctctgtggtgacccaggccggggagctggtgctgggcgcccctgggggctactacttcctgggcctgctggcccaggcccctgtggccgacatcttcagcagctaccggcccggcatcctgctgtggcacgtgagcagccagagcctgagctttgacagcagcaaccctgagtactttgatggctactggggctacagcgtggccgtgggggagtttgatggagacctgaacaccacagaatatgtggtgggcgcccccacctggagctggaccctgggcgctgtggagatcctggacagctactaccagaggctgcaccggctgcggggggagcagatggccagctacttcggccacagcgtggccgtgacagatgtgaatggagatggaagacatgacctgctggtgggcgcccccctgtacatggagagcagagctgacaggaagctggccgaggtgggccgggtgtacctgttcctgcagccccggggcccccacgccctgggcgcccccagcctgctgctgaccggcacccagctgtatggccgctttggaagtgccatcgcccccctgggggacctggacagagatggctacaatgacattgctgtggccgccccctatggaggccccagcggccggggccaggtgctggtgttcctgggccagagcgagggcctgcggagccggcccagccaggtgctggacagccccttccccaccggcagcgccttcggcttcagcctgcggggagctgtggacattgatgacaatggctacccagacctgattgtgggcgcctatggagccaaccaggtggccgtgtaccgggcccagcctgtggtgaaggcctctgtgcagctgctggtgcaggacagcctgaacccagctgtgaagagctgtgtgctgccccagaccaagacccctgtgtcctgcttcaacatccagatgtgtgtgggcgccaccggccacaacatcccccagaagctgagcctgaatgctgagctgcagctggaccggcagaagccccggcagggccggcgggtgctgctgctgggcagccagcaggccggcaccaccctgaacctggacctgggcggcaagcacagccccatctgccacaccaccatggccttcctgagagatgaagctgacttccgggacaagctgagccccatcgtgctgagcctgaatgtgtccctgcccccaacagaagctggcatggccccagctgtggtgctgcacggggacacccacgtgcaggagcagaccagaattgtgctggactgtggagaagatgatgtgtgtgtgccccagctgcagctgacagcctctgtgacaggcagccccctgctggtgggcgctgacaacgtgctggagctgcagatggatgctgccaatgaaggagagggcgcctatgaggccgagctggccgtgcacctgccccagggcgcccactacatgagggccctgagcaatgtggagggctttgagcggctcatctgcaaccagaagaaggaaaatgagaccagggtggtgctgtgtgagctgggcaaccccatgaagaagaatgcccagatcggcatcgccatgctggtgtctgtgggcaacctggaggaggccggggagagcgtgtccttccagctgcagatccgcagcaagaacagccagaaccccaacagcaagatcgtgctgctggatgtgcctgtgcgggcagaggcccaggtggagctgcggggcaacagcttccctgccagcctggtggtggccgctgaggagggggagcgggagcagaacagcctggacagctggggccccaaggtggagcacacctatgagctgcacaacaacggccctggcaccgtgaatggcctgcacctgagcatccacctgcccggccagagccagcccagcgacctgctgtacatcctggacatccagccccagggcggcctgcagtgcttcccccagccccctgtgaaccccctgaaggtggactggggcctgcccatccccagccccagccccatccacccagcccaccacaagagggaccggcggcagatcttcctgcctgagcctgagcagcccagccggctgcaggaccctgtgctggtgtcctgtgacagcgccccctgcaccgtggtgcagtgtgacctgcaggagatggcccggggccagagggccatggtgacagtgctggccttcctgtggctgcccagcctgtaccagaggcccctggaccagtttgtgctgcagagccacgcctggttcaacgtgagcagcctgccctatgctgtgccccccctgagcctgcccagaggagaggcccaggtgtggacccagctgctgcgggccctggaggagcgggccatccccatctggtgggtgctggtgggcgtgctgggcggcctgctgctgctgaccatcctggtgctggccatgtggaaggtgggcttcttcaagaggaacagaccacccctggaggaggatgatgaggagggggagtag

SEQ ID NO: 156161 - DNA, 3018 bp, synthetic construct
  misc_feature 1..3018: note = Description of Artificial Sequence: Synthetic coding sequence
  source 1..3018: mol_type = other DNA
atggcccgggccctgtgccccctgcaggccctgtggctgctggagtgggtgctgctgctgctgggcccctgtgccgcccccccagcctgggccctgaacctggaccctgtgcagctgaccttctacgccggccccaacggcagccagtttggcttcagcctggacttccacaaggacagccacggccgggtggccatcgtggtgggcgcccccaggaccctgggccccagccaggaggagactggaggagtcttcctgtgcccctggagggctgagggcggccagtgccccagcctgctgtttgacctgagagatgagaccagaaatgtgggcagccagaccctgcagaccttcaaggcccggcagggcctgggcgcctctgtggtgtcctggagcgatgtgattgtggcctgtgccccctggcagcactggaatgtgctggagaagacagaggaggccgagaagacccctgtgggcagctgcttcctggcccagcctgagagcggccggcgggcagagtacagcccctgccggggcaacaccctgagccgcatctacgtggagaatgacttctcctgggacaagcgctactgtgaggccggcttcagctctgtggtgacccaggccggggagctggtgctgggcgcccctgggggctactacttcctgggcctgctggcccaggcccctgtggccgacatcttcagcagctaccggcccggcatcctgctgtggcacgtgagcagccagagcctgagctttgacagcagcaaccctgagtactttgatggctactggggctacagcgtggccgtgggggagtttgatggagacctgaacaccacagaatatgtggtgggcgcccccacctggagctggaccctgggcgctgtggagatcctggacagctactaccagaggctgcaccggctgcggggggagcagatggccagctacttcggccacagcgtggccgtgacagatgtgaatggagatggaagacatgacctgctggtgggcgcccccctgtacatggagagcagagctgacaggaagctggccgaggtgggccgggtgtacctgttcctgcagccccggggcccccacgccctgggcgcccccagcctgctgctgaccggcacccagctgtatggccgctttggaagtgccatcgcccccctgggggacctggacagagatggctacaatgacattgctgtggccgccccctatggaggccccagcggccggggccaggtgctggtgttcctgggccagagcgagggcctgcggagccggcccagccaggtgctggacagccccttccccaccggcagcgccttcggcttcagcctgcggggagctgtggacattgatgacaatggctacccagacctgattgtgggcgcctatggagccaaccaggtggccgtgtaccgggcccagcctgtggtgaaggcctctgtgcagctgctggtgcaggacagcctgaacccagctgtgaagagctgtgtgctgccccagaccaagacccctgtgtcctgcttcaacatccagatgtgtgtgggcgccaccggccacaacatcccccagaagctgagcctgaatgctgagctgcagctggaccggcagaagccccggcagggccggcgggtgctgctgctgggcagccagcaggccggcaccaccctgaacctggacctgggcggcaagcacagccccatctgccacaccaccatggccttcctgagagatgaagctgacttccgggacaagctgagccccatcgtgctgagcctgaatgtgtccctgcccccaacagaagctggcatggccccagctgtggtgctgcacggggacacccacgtgcaggagcagaccagaattgtgctggactgtggagaagatgatgtgtgtgtgccccagctgcagctgacagcctctgtgacaggcagccccctgctggtgggcgctgacaacgtgctggagctgcagatggatgctgccaatgaaggagagggcgcctatgaggccgagctggccgtgcacctgccccagggcgcccactacatgagggccctgagcaatgtggagggctttgagcggctcatctgcaaccagaagaaggaaaatgagaccagggtggtgctgtgtgagctgggcaaccccatgaagaagaatgcccagatcggcatcgccatgctggtgtctgtgggcaacctggaggaggccggggagagcgtgtccttccagctgcagatccgcagcaagaacagccagaaccccaacagcaagatcgtgctgctggatgtgcctgtgcgggcagaggcccaggtggagctgcggggcaacagcttccctgccagcctggtggtggccgctgaggagggggagcgggagcagaacagcctggacagctggggccccaaggtggagcacacctatgagctgcacaacaacggccctggcaccgtgaatggcctgcacctgagcatccacctgcccggccagagccagcccagcgacctgctgtacatcctggacatccagccccagggcggcctgcagtgcttcccccagccccctgtgaaccccctgaaggtggactggggcctgcccatccccagccccagccccatccacccagcccaccacaagagggaccggcggcagatcttcctgcctgagcctgagcagcccagccggctgcaggaccctgtgctggtgtcctgtgacagcgccccctgcaccgtggtgcagtgtgacctgcaggagatggcccggggccagagggccatggtgacagtgctggccttcctgtggctgcccagcctgtaccaggtgtggacccagctgctgcgggccctggaggagcgggccatccccatctggtgggtgctggtgggcgtgctgggcggcctgctgctgctgaccatcctggtgctggccatgtggaaggtgggcttcttcaagaggaacagaccacccctggaggaggatgatgaggagggggagtag

SEQ ID NO: 156162 - DNA, 660 bp, synthetic construct
  misc_feature 1..660: note = Description of Artificial Sequence: Synthetic coding sequence
  source 1..660: mol_type = other DNA
atggccagctacttcggccacagcgtggccgtgacagatgtgaatggagatggaagacatgacctgctggtgggcgcccccctgtacatggagagcagagctgacaggaagctggccgaggtgggccgggtgtacctgttcctgcagccccggggcccccacgccctgggcgcccccagcctgctgctgaccggcacccagctgtatggccgcttcggcagcgccatcgcccccctgggggacctggacagagatggctacaatgacattgctgtggccgccccctacggcggccccagcggccggggccaggtgctggtgttcctgggccagagcgagggcctgcggagccggcccagccaggtgctggacagccccttccccactggaagtgccttcggcttcagcctgcggggagctgtggacattgatgacaatggctacccaggggccctggactgcctgcagctggagatgcccaagaagggcccctggacctttgctggcagcgccaagagacatggccagggcctgatgcctggcctggtgagccactacggcctgcctgagggcctgggggagaccagcagcggcggcggcggcgtgggcaacccctgggaggatgagatgaggatcccctgccccaaccggcagttctag

SEQ ID NO: 156163 - DNA, 3201 bp, synthetic construct
  misc_feature 1..3201: note = Description of Artificial Sequence: Synthetic coding sequence
  source 1..3201: mol_type = other DNA
atgggccctggccccagccgggccccccgggccccccggctgatgctgtgtgccctggccctgatggtggccgccggcggctgtgtggtgtctgccttcaacctggacacccgcttcctggtggtgaaggaggccggcaaccctggcagcctgtttggctacagcgtggccctgcaccggcagacagagcggcagcagcgctacctgctgctggccggggccccccgggagctggccgtgcctgatggctacaccaacagaactggagctgtgtacctgtgccccctgacagcccacaaggatgactgtgagaggatgaacatcaccgtgaagaatgaccccggccaccacatcatcgaggacatgtggctgggcgtgacagtggccagccagggccctgctggccgggtgctggtgtgtgcccaccgctacacccaggtgctgtggagcggcagcgaggaccagaggaggatggtgggcaaatgttatgtgagaggaaatgacctggagctggacagcagtgatgactggcagacctaccacaatgagatgtgcaacagcaacacagactacctggagaccggcatgtgccagctgggcaccagcggcggcttcacccagaacacagtgtactttggagcccctggggcctacaactggaagggcaacagctacatgatccagaggaaggagtgggacctgtctgagtacagctacaaggaccctgaggaccagggcaacctgtacatcggctacaccatgcaggtgggcagcttcatcctgcaccccaagaacatcaccatcgtgactggagcccccaggcaccgccacatgggcgctgtgttcctgctgagccaggaggccggcggggacctgcggcggcggcaggtgctggagggcagccaggtgggcgcctactttggaagtgccatcgccctggccgacctgaacaatgatggctggcaggacctgctggtgggcgccccctactactttgagaggaaggaggaggtgggcggggccatctacgtgttcatgaaccaggccggcaccagcttccctgcccaccccagcctgctgctgcacggccccagcggcagcgccttcggcctgtctgtggccagcatcggggacatcaaccaggacggcttccaggacattgctgtgggcgccccctttgagggcctgggcaaggtgtacatctaccacagcagcagcaagggcctgctgcggcagccccagcaggtgatccacggggagaagctgggcctgcccggcctggccaccttcggctacagcctgagcggccagatggatgtggatgagaacttctacccagacctgctggtgggcagcctgagtgaccacatcgtgctgctgcgggcccggcctgtgatcaacatcgtgcacaagaccctggtgcccaggcctgctgtgctggaccctgccctgtgcacagccaccagctgtgtgcaggtggagctgtgctttgcctacaaccagagcgctggcaaccccaactacagaagaaacatcaccctggcctacaccctggaggccgaccgggaccggcggcccccccggctgcgctttgctggcagcgagagcgctgtgttccacggcttcttctccatgcctgagatgcgctgccagaagctggagctgctgctgatggacaacctgcgggacaagctgcggcccatcatcatctccatgaactacagcctgcccctgaggatgccagaccggccccggctgggcctgcggagcctggatgcctaccccatcctgaaccaggcccaggccctggagaaccacacagaggtgcagttccagaaggaatgtggccctgacaacaagtgtgagagcaacctgcagatgagagctgcctttgtgtctgagcagcagcagaagctgagccggctgcagtacagcagagatgtgaggaagctgctgctgagcatcaacgtgaccaacaccaggaccagcgagaggtctggagaagatgcccacgaggccctgctgaccctggtggtgcccccagccctgctgctgagctctgtgcggcccccaggggcctgccaggccaatgagaccatcttctgtgagctgggcaaccccttcaagaggaaccagaggatggagctgctgattgcctttgaggtgattggagtgaccctgcacacccgggacctgcaggtgcagctgcagctgagcaccagcagccaccaggacaacctgtggcccatgatcctgaccctgctggtggactacaccctgcagaccagcctgtccatggtgaaccaccggctgcagagcttctttggaggcaccgtgatgggagagagcggcatgaagacagtggaggatgtgggcagccccctgaagtatgagttccaggtgggccccatgggagagggcctggtgggcctgggcaccctggtgctgggcctggagtggccctatgaggtgtccaatggcaagtggctgctgtaccccacagagatcaccgtgcatggaaatggctcctggccctgccggcccccaggggacctgatcaaccccctgaacctgaccctgagtgaccccggggaccggcccagcagcccccagaggagaagacggcagctggaccccggcggcggccagggccccccacctgtgaccctggccgccgccaagaaggccaagtctgagaccgtgctgacctgtgccaccggccgggcccactgtgtgtggctggagtgccccatcccagatgcccctgtggtgaccaacgtgacagtgaaggcccgggtgtggaacagcaccttcatcgaggactacagagactttgacagagtgcgggtgaatggctgggccaccctcttcctgcggaccagcatccccaccatcaacatggagaacaagaccacctggttctctgtggacatcgacagcgagctggtggaggagctgcctgctgagattgagctgtggctggtgctggtggccgtgggcgccggcctgctgctgctgggcctcatcatcctgctgctgtggaagtgtgacttcttcaagaggacccgctactaccagatcatgcccaagtaccacgctgtgcgcatccgggaggaggagcgctacccacctcctggcagcaccctgcccaccaagaagcactgggtgacctcctggcagacccgggaccagtactactag

SEQ ID NO: 156164 - DNA, 3156 bp, synthetic construct
  misc_feature 1..3156: note = Description of Artificial Sequence: Synthetic coding sequence
  source 1..3156: mol_type = other DNA
atgggccctggccccagccgggccccccgggccccccggctgatgctgtgtgccctggccctgatggtggccgccggcggctgtgtggtgtctgccttcaacctggacacccgcttcctggtggtgaaggaggccggcaaccctggcagcctgtttggctacagcgtggccctgcaccggcagacagagcggcagcagcgctacctgctgctggccggggccccccgggagctggccgtgcctgatggctacaccaacagaactggagctgtgtacctgtgccccctgacagcccacaaggatgactgtgagaggatgaacatcaccgtgaagaatgaccccggccaccacatcatcgaggacatgtggctgggcgtgacagtggccagccagggccctgctggccgggtgctggtgtgtgcccaccgctacacccaggtgctgtggagcggcagcgaggaccagaggaggatggtgggcaaatgttatgtgagaggaaatgacctggagctggacagcagtgatgactggcagacctaccacaatgagatgtgcaacagcaacacagactacctggagaccggcatgtgccagctgggcaccagcggcggcttcacccagaacacagtgtactttggagcccctggggcctacaactggaagggcaacagctacatgatccagaggaaggagtgggacctgtctgagtacagctacaaggaccctgaggaccagggcaacctgtacatcggctacaccatgcaggtgggcagcttcatcctgcaccccaagaacatcaccatcgtgactggagcccccaggcaccgccacatgggcgctgtgttcctgctgagccaggaggccggcggggacctgcggcggcggcaggtgctggagggcagccaggtgggcgcctactttggaagtgccatcgccctggccgacctgaacaatgatggctggcaggacctgctggtgggcgccccctactactttgagaggaaggaggaggtgggcggggccatctacgtgttcatgaaccaggccggcaccagcttccctgcccaccccagcctgctgctgcacggccccagcggcagcgccttcggcctgtctgtggccagcatcggggacatcaaccaggacggcttccaggacattgctgtgggcgccccctttgagggcctgggcaaggtgtacatctaccacagcagcagcaagggcctgctgcggcagccccagcaggtgatccacggggagaagctgggcctgcccggcctggccaccttcggctacagcctgagcggccagatggatgtggatgagaacttctacccagacctgctggtgggcagcctgagtgaccacatcgtgctgctgcgggcccggcctgtgatcaacatcgtgcacaagaccctggtgcccaggcctgctgtgctggaccctgccctgtgcacagccaccagctgtgtgcaggtggagctgtgctttgcctacaaccagagcgctggcaaccccaactacagaagaaacatcaccctggcctacaccctggaggccgaccgggaccggcggcccccccggctgcgctttgctggcagcgagagcgctgtgttccacggcttcttctccatgcctgagatgcgctgccagaagctggagctgctgctgatggacaacctgcgggacaagctgcggcccatcatcatctccatgaactacagcctgcccctgaggatgccagaccggccccggctgggcctgcggagcctggatgcctaccccatcctgaaccaggcccaggccctggagaaccacacagaggtgcagttccagaaggaatgtggccctgacaacaagtgtgagagcaacctgcagatgagagctgcctttgtgtctgagcagcagcagaagctgagccggctgcagtacagcagagatgtgaggaagctgctgctgagcatcaacgtgaccaacaccaggaccagcgagaggtctggagaagatgcccacgaggccctgctgaccctggtggtgcccccagccctgctgctgagctctgtgcggcccccaggggcctgccaggccaatgagaccatcttctgtgagctgggcaaccccttcaagaggaaccagaggatggagctgctgattgcctttgaggtgattggagtgaccctgcacacccgggacctgcaggtgcagctgcagctgagcaccagcagccaccaggacaacctgtggcccatgatcctgaccctgctggtggactacaccctgcagaccagcctgtccatggtgaaccaccggctgcagagcttctttggaggcaccgtgatgggagagagcggcatgaagacagtggaggatgtgggcagccccctgaagtatgagttccaggtgggccccatgggagagggcctggtgggcctgggcaccctggtgctgggcctggagtggccctatgaggtgtccaatggcaagtggctgctgtaccccacagagatcaccgtgcatggaaatggctcctggccctgccggcccccaggggacctgatcaaccccctgaacctgaccctgagtgaccccggggaccggcccagcagcccccagaggagaagacggcagctggaccccggcggcggccagggccccccacctgtgaccctggccgccgccaagaaggccaagtctgagaccgtgctgacctgtgccaccggccgggcccactgtgtgtggctggagtgccccatcccagatgcccctgtggtgaccaacgtgacagtgaaggcccgggtgtggaacagcaccttcatcgaggactacagagactttgacagagtgcgggtgaatggctgggccaccctcttcctgcggaccagcatccccaccatcaacatggagaacaagaccacctggttctctgtggacatcgacagcgagctggtggaggagctgcctgctgagattgagctgtggctggtgctggtggccgtgggcgccggcctgctgctgctgggcctcatcatcctgctgctgtggaagtgtggcttcttcaagagggcccggacccgggccctgtatgaggccaagaggcagaaggccgagatgaagagccagcccagcgagacagagcggctgacagatgactactag

SEQ ID NO: 156165 - DNA, 3114 bp, synthetic construct
  misc_feature 1..3114: note = Description of Artificial Sequence: Synthetic coding sequence
  source 1..3114: mol_type = other DNA
atgctgtgtgccctggccctgatggtggccgccggcggctgtgtggtgtctgccttcaacctggacacccgcttcctggtggtgaaggaggccggcaaccctggcagcctgtttggctacagcgtggccctgcaccggcagacagagcggcagcagcgctacctgctgctggccggggccccccgggagctggccgtgcctgatggctacaccaacagaactggagctgtgtacctgtgccccctgacagcccacaaggatgactgtgagaggatgaacatcaccgtgaagaatgaccccggccaccacatcatcgaggacatgtggctgggcgtgacagtggccagccagggccctgctggccgggtgctggtgtgtgcccaccgctacacccaggtgctgtggagcggcagcgaggaccagaggaggatggtgggcaaatgttatgtgagaggaaatgacctggagctggacagcagtgatgactggcagacctaccacaatgagatgtgcaacagcaacacagactacctggagaccggcatgtgccagctgggcaccagcggcggcttcacccagaacacagtgtactttggagcccctggggcctacaactggaagggcaacagctacatgatccagaggaaggagtgggacctgtctgagtacagctacaaggaccctgaggaccagggcaacctgtacatcggctacaccatgcaggtgggcagcttcatcctgcaccccaagaacatcaccatcgtgactggagcccccaggcaccgccacatgggcgctgtgttcctgctgagccaggaggccggcggggacctgcggcggcggcaggtgctggagggcagccaggtgggcgcctactttggaagtgccatcgccctggccgacctgaacaatgatggctggcaggacctgctggtgggcgccccctactactttgagaggaaggaggaggtgggcggggccatctacgtgttcatgaaccaggccggcaccagcttccctgcccaccccagcctgctgctgcacggccccagcggcagcgccttcggcctgtctgtggccagcatcggggacatcaaccaggacggcttccaggacattgctgtgggcgccccctttgagggcctgggcaaggtgtacatctaccacagcagcagcaagggcctgctgcggcagccccagcaggtgatccacggggagaagctgggcctgcccggcctggccaccttcggctacagcctgagcggccagatggatgtggatgagaacttctacccagacctgctggtgggcagcctgagtgaccacatcgtgctgctgcgggcccggcctgtgatcaacatcgtgcacaagaccctggtgcccaggcctgctgtgctggaccctgccctgtgcacagccaccagctgtgtgcaggtggagctgtgctttgcctacaaccagagcgctggcaaccccaactacagaagaaacatcaccctggcctacaccctggaggccgaccgggaccggcggcccccccggctgcgctttgctggcagcgagagcgctgtgttccacggcttcttctccatgcctgagatgcgctgccagaagctggagctgctgctgatggacaacctgcgggacaagctgcggcccatcatcatctccatgaactacagcctgcccctgaggatgccagaccggccccggctgggcctgcggagcctggatgcctaccccatcctgaaccaggcccaggccctggagaaccacacagaggtgcagttccagaaggaatgtggccctgacaacaagtgtgagagcaacctgcagatgagagctgcctttgtgtctgagcagcagcagaagctgagccggctgcagtacagcagagatgtgaggaagctgctgctgagcatcaacgtgaccaacaccaggaccagcgagaggtctggagaagatgcccacgaggccctgctgaccctggtggtgcccccagccctgctgctgagctctgtgcggcccccaggggcctgccaggccaatgagaccatcttctgtgagctgggcaaccccttcaagaggaaccagaggatggagctgctgattgcctttgaggtgattggagtgaccctgcacacccgggacctgcaggtgcagctgcagctgagcaccagcagccaccaggacaacctgtggcccatgatcctgaccctgctggtggactacaccctgcagaccagcctgtccatggtgaaccaccggctgcagagcttctttggaggcaccgtgatgggagagagcggcatgaagacagtggaggatgtgggcagccccctgaagtatgagttccaggtgggccccatgggagagggcctggtgggcctgggcaccctggtgctgggcctggagtggccctatgaggtgtccaatggcaagtggctgctgtaccccacagagatcaccgtgcatggaaatggctcctggccctgccggcccccaggggacctgatcaaccccctgaacctgaccctgagtgaccccggggaccggcccagcagcccccagaggagaagacggcagctggaccccggcggcggccagggccccccacctgtgaccctggccgccgccaagaaggccaagtctgagaccgtgctgacctgtgccaccggccgggcccactgtgtgtggctggagtgccccatcccagatgcccctgtggtgaccaacgtgacagtgaaggcccgggtgtggaacagcaccttcatcgaggactacagagactttgacagagtgcgggtgaatggctgggccaccctcttcctgcggaccagcatccccaccatcaacatggagaacaagaccacctggttctctgtggacatcgacagcgagctggtggaggagctgcctgctgagattgagctgtggctggtgctggtggccgtgggcgccggcctgctgctgctgggcctcatcatcctgctgctgtggaagtgtggcttcttcaagagggcccggacccgggccctgtatgaggccaagaggcagaaggccgagatgaagagccagcccagcgagacagagcggctgacagatgactactag

SEQ ID NO: 156166 - DNA, 885 bp, synthetic construct
  misc_feature 1..885: note = Description of Artificial Sequence: Synthetic coding sequence
  source 1..885: mol_type = other DNA
atgatccagaggaaggagtgggacctgtctgagtacagctacaaggaccctgaggaccagggcaacctgtacatcggctacaccatgcaggtgggcagcttcatcctgcaccccaagaacatcaccatcgtgactggagcccccaggcaccgccacatgggcgctgtgttcctgctgagccaggaggccggcggggacctgcggcggcggcaggtgctggagggcagccaggtgggcgcctacttcggcagcgccatcgccctggccgacctgaacaatgatggctggcaggacctgctggtgggcgccccctactactttgagaggaaggaggaggtgggcggggccatctacgtgttcatgaaccaggccggcaccagcttccctgcccaccccagcctgctgctgcacggccccagcggcagcgccttcggcctgtctgtggccagcattggagacatcaaccaggacggcttccaggacattgctgtgggcgccccctttgagggcctgggcaaggtgtacatctaccacagcagcagcaagggcctgctgcggcagccccagcaggtgattcatggagagaagctgggcctgcccggcctggccaccttcggctacagcctgagcggccagatggatgtggatgagaacttctacccagacctgctggtgggcagcctgagtgaccacatcgtgctgctgcgggcccggcctgtgatcaacatcgtgcacaagaccctggtgcccaggcctgctgtgctggaccctgccctgtgcacagccaccagctgtgtgcaggtggagctgtgctttgcctacaaccagagcgctggcaaccccaactacagaagaaacatcagcgagtgctggggcgccgcctag

SEQ ID NO: 156167 - DNA, 3108 bp, synthetic construct
  misc_feature 1..3108: note = Description of Artificial Sequence: Synthetic coding sequence
  source 1..3108: mol_type = other DNA
atgggcggccctgctgcccccaggggggccggccgcctgcgggccctgctgctggccctggtggtggccggcatcccagctggggcctacaacctggacccccagaggcctgtgcacttccagggccctgctgacagcttcttcggctatgctgtgctggagcacttccatgacaacacccgctgggtgctggtgggcgcccccaaggctgacagcaagtacagccccagcgtgaagagccctggagctgtgttcaagtgccgggtgcacaccaacccagaccggcgctgcacagagctggacatggcccggggcaagaacagaggcaccagctgtgggaagacctgccgggaggacagagatgatgagtggatgggcgtgtccctggcccggcagcccaaggcagatggccgggtgctggcctgtgcccaccgctggaagaacatctactatgaagctgaccacatcctgccccacggcttctgctacatcatccccagcaacctgcaggccaagggccgcaccctcatcccctgctatgaggagtacaagaagaagtatggagaggagcacggcagctgccaggccggcattgctggcttcttcacagaggagctggtggtgatgggcgcccctggcagcttctactgggccggcaccatcaaggtgctgaacctgacagacaacacctacctgaagctgaatgatgaggtgatcatgaacagacgctacacctacctgggctatgctgtgacagctggccacttcagccaccccagcaccattgatgtggtgggcggggccccccaggacaagggcatcggcaaggtgtacatcttccgggctgaccggcgcagcggcaccctcatcaagatcttccaggccagcggcaagaagatgggcagctacttcggcagcagcctgtgtgctgtggacctgaatggagatggcctgagtgacctgctggtgggcgcccccatgttttctgagatcagagatgagggccaggtgacagtgtacatcaacagaggaaatggagccctggaggagcagctggccctgactggagatggagcctacaatgcccactttggagagagcatcgccagcctggatgacctggacaatgatggcttcccagatgtggccatcggggcccccaaggaggatgactttgctggagctgtgtacatctaccatggagatgctgggggcatcgtgccccagtacagcatgaagctgagcggccagaagatcaaccctgtgctgaggatgtttggccagagcatcagcggcggcatcgacatggatggaaatggctacccagatgtgacagtgggcgccttcatgtctgattctgtggtgctgctgcgggcccggcctgtgatcaccgtggatgtgtccatcttcctgcccggcagcatcaacatcacagccccccagtgccatgatggccagcagcctgtgaactgcctgaatgtgaccacctgcttctccttccacggcaagcacgtgcctggagaaattggcctgaactacgtgctgatggctgatgtggccaagaaggagaagggccagatgccccgggtgtactttgtgctgctgggggagaccatgggccaggtgacagagaagctgcagctgacctacatggaggagacctgccgccactacgtggcccacgtgaagagaagagtgcaggacgtcatcagccccatcgtgtttgaagctgcctacagcctgtctgagcacgtgactggagaggaggagcgggagctgccccccctgacccctgtgctgcgctggaagaagggccagaagatcgcccagaagaaccagacagtgtttgagaggaactgccgctctgaggactgtgccgctgacctgcagctgcagggcaagctgctgctgagctccatggatgagaagaccctgtacctggccctgggcgctgtgaagaacatcagcctgaacatcagcatcagcaacctgggagatgatgcctatgatgccaacgtgtccttcaacgtgtcccgggagctgttcttcatcaacatgtggcagaaggaggagatgggcatcagctgtgagctgctggagagtgacttcctgaagtgcagcgtgggcttccccttcatgaggagcaagagcaaatatgagttcagcgtcatctttgacaccagccacctgtctggagaggaggaggtgctgtccttcatcgtgacagcccagagcggcaacacagagaggtctgagagcctgcatgacaacaccctggtgctgatggtgcccctgatgcatgaggtggacaccagcatcaccggcatcatgagccccaccagctttgtgtatggagagagcgtggatgctgccaacttcatccagctggatgacctggagtgccacttccagcccatcaacatcaccctgcaggtgtacaacacaggccccagcaccctgcccggcagctctgtgtccatctccttccccaaccggctgagcagtggaggagctgagatgttccacgtgcaggagatggtggtgggccaggagaagggcaactgcagcttccagaagaaccccaccccctgcatcatcccccaggagcaggagaacatcttccacaccatctttgccttcttcaccaagagcggcaggaaggtgctggactgtgagaagccaggcatcagctgcctgacagcccactgcaacttcagcgccctggccaaggaggagagcaggaccatcgacatctacatgctgctgaacacagagatcctgaagaaggacagcagcagcgtcatccagttcatgagccgggccaaggtgaaggtggaccctgccctgcgggtggtggagatcgcccacggcaaccctgaggaggtgacagtggtgtttgaggccctgcacaacctggagccccggggctacgtggtgggctggatcatcgccatcagcctgctggtgggcatcctgatcttcctgctgctggccgtgctgctgtggaagatgggcttcttcagaagacgctacaaggagatcattgaagctgagaagaacagaaaagaaaatgaagattcctgggactgggtgcagaagaaccagtag

SEQ ID NO: 156168 - DNA, 696 bp, synthetic construct
  misc_feature 1..696: note = Description of Artificial Sequence: Synthetic coding sequence
  source 1..696: mol_type = other DNA
atgtgccagcccccacccacagcccctggctcctggcctgtggcccggccctgcacagaatctgtgggccgcacccacacccagagggtgcctgccagctgctgggcccgggccggccgcagcagccggcagagccccaccccccggcagtttgccctgatgcagtacagcaacctgctgaagatccacttcaccttcacccagttccgcaccagccccagccagcagagcctggtggaccccatcgtgcagctgaagggcctgaccttcaccgccaccggcatcctgactgtggtgacccagctgttccaccacaagaatggagccaggaagagcgccaagaagatcctgattgtcatcacagatggccagaagtacaaggaccccctggagtacagtgatgtgatcccccaggccgagaaggccggcatcatccgctatgccatcggcgtgcggctcttcttcaccccagcccctggcagcgcctgcatctccttccgctgcagcgctgctggcctcatcctgctgggctgcctgtctgctgctgggggcacccgcttccctggcacccactgccaggccggggctgagtaccaccagctgagcgccagcgctggcccccgggtgcagggcggccagctgtgcagcccctggcagcaccctgaggccgctgctggggaggacctgtgcagctag

SEQ ID NO: 156169 - DNA, 3486 bp, synthetic construct
  misc_feature 1..3486: note = Description of Artificial Sequence: Synthetic coding sequence
  source 1..3486: mol_type = other DNA
atgacctttggaacagtgctgctgctgtctgtgctggccagctaccacggcttcaacctggatgtggaggagcccaccatcttccaggaggatgctgggggcttcggccagagcgtggtgcagtttggaggcagccggctggtggtgggcgcccccctggaggtggtggccgccaaccagacaggccgcctgtatgactgtgccgccgccaccggcatgtgccagcccatccccctgcacatccggcctgaggccgtgaacatgagcctgggcctgaccctggccgccagcaccaacggcagccggctgctggcctgtggccccaccctgcaccgggtgtgtggggagaacagctacagcaagggcagctgcctgctgctgggcagccgctgggagatcatccagacagtgcctgatgccaccccagaatgtccccaccaggagatggacatcgtgttcctgattgatggcagcggcagcattgaccagaatgacttcaaccagatgaagggctttgtgcaggccgtgatgggccagtttgagggcacagacaccctgtttgccctgatgcagtacagcaacctgctgaagatccacttcaccttcacccagttccgcaccagccccagccagcagagcctggtggaccccatcgtgcagctgaagggcctgaccttcaccgccaccggcatcctgactgtggtgacccagctgttccaccacaagaatggagccaggaagagcgccaagaagatcctgattgtcatcacagatggccagaagtacaaggaccccctggagtacagtgatgtgatcccccaggccgagaaggccggcatcatccgctatgccatcggcgtgggccacgccttccagggccccacagcccggcaggagctgaacaccatcagcagcgccccaccccaggaccacgtgttcaaggtggacaactttgctgccctgggcagcatccagaagcagctgcaggagaagatctatgctgtggagggcacccagagccgggccagcagcagcttccagcacgagatgagccaggagggcttcagcacagccctgaccatggatggcctcttcctgggcgctgtgggcagcttctcctggagcggcggggccttcctgtacccacccaacatgagccccaccttcatcaacatgagccaggagaatgtggacatgagggacagctacctgggctacagcacagagctggccctgtggaagggcgtgcagaacctggtgctgggcgccccccgctaccagcacacaggcaaggccgtcatcttcacccaggtgtcccggcagtggaggaagaaggccgaggtgacaggcacccagatcggcagctactttggagccagcctgtgcagcgtggatgtggacagtgatggcagcacagacctgatcctgattggagccccccactactatgagcagacccggggcggccaggtgtctgtgtgccccctgccccggggccgggtgcagtggcagtgtgatgctgtgctgcggggggagcagggccacccctggggccgctttggagctgccctgactgtgctgggagatgtgaatgaagacaagctgattgatgtggccatcggggcccctggagagcaggagaacagaggagctgtgtacctgttccacggggccagcgagagcggcatcagccccagccacagccagagaattgccagcagccagctgagcccccggctgcagtacttcggccaggccctgagcggcggccaggacctgacccaggacggcctgatggacctggccgtgggcgcccggggccaggtgctgctgctgcggagcctgcctgtgctgaaggtgggcgtggccatgaggttcagccctgtggaggtggccaaggctgtgtaccgctgctgggaggagaagcccagcgccctggaggccggagatgccaccgtgtgcctgaccatccagaagagcagcctggaccagctgggggacatccagagctctgtgcgctttgacctggccctggaccccggccgcctgaccagccgggccatcttcaatgagaccaagaaccccaccctgaccaggaggaagaccctgggcctgggcatccactgtgagaccctgaagctgctgctgcctgactgtgtggaggatgtggtgagccccatcatcctgcacctgaacttcagcctggtgcgggagcccatccccagcccccagaacctgcggcctgtgctggccgtgggcagccaggacctcttcaccgccagcctgccctttgagaagaactgtggccaggacggcctgtgtgagggggacctgggcgtgaccctgtccttcagcggcctgcagaccctgactgtgggcagcagcctggagctgaatgtgattgtgacagtgtggaatgctggagaagattcctatggcaccgtggtgtccctgtactacccagctggcctgagccacagaagagtgtctggggcccagaagcagccccaccagagcgccctgcggctggcctgtgaaacagtgcccacagaagatgagggcctgcggagcagccgctgcagcgtgaaccaccccatcttccacgagggcagcaatggcaccttcatcgtgacctttgatgtgtcctacaaggccaccctgggggacaggatgctgatgagggccagcgccagcagcgagaacaacaaggccagcagcagcaaggccaccttccagctggagctgcctgtgaagtatgctgtgtacaccatgatcagccggcaggaggagagcaccaagtacttcaactttgccaccagtgatgagaagaagatgaaggaggccgagcaccgctacagagtgaacaacctgagccagagggacctggccatcagcatcaacttctgggtgcctgtgctgctgaatggagtggccgtgtgggatgtggtgatggaggcccccagccagagcctgccctgtgtgtctgagaggaagccaccccagcacagcgacttcctgacccagatcagccgcagccccatgctggactgcagcattgctgactgcctgcagttccgctgtgatgtgcccagcttctctgtgcaggaggagctggacttcaccctgaagggcaacctgagctttggctgggtgcgggagaccctgcagaagaaggtgctggtggtgtctgtggccgagatcacctttgacacctctgtgtacagccagctgcccggccaggaggccttcatgagggcccagatggagatggtgctggaggaggatgaggtgtacaatgccatccccatcatcatgggcagctctgtgggcgccctgctgctgctggccctgatcacagccaccctgtacaagctgggcttcttcaagaggcactacaaggagatgctggaggacaagccagaggacacagccaccttctctggagatgacttcagctgtgtggccccaaatgtgcccctgtcctag

SEQ ID NO: 156170 - DNA, 3534 bp, synthetic construct
  misc_feature 1..3534: note = Description of Artificial Sequence: Synthetic coding sequence
  source 1..3534: mol_type = other DNA
tgtgccctgagccccaccttccacttccccagcacccgctgcagcggcatgacctttggaacagtgctgctgctgtctgtgctggccagctaccacggcttcaacctggatgtggaggagcccaccatcttccaggaggatgctgggggcttcggccagagcgtggtgcagtttggaggcagccggctggtggtgggcgcccccctggaggtggtggccgccaaccagacaggccgcctgtatgactgtgccgccgccaccggcatgtgccagcccatccccctgcacatccggcctgaggccgtgaacatgagcctgggcctgaccctggccgccagcaccaacggcagccggctgctggcctgtggccccaccctgcaccgggtgtgtggggagaacagctacagcaagggcagctgcctgctgctgggcagccgctgggagatcatccagacagtgcctgatgccaccccagaatgtccccaccaggagatggacatcgtgttcctgattgatggcagcggcagcattgaccagaatgacttcaaccagatgaagggctttgtgcaggccgtgatgggccagtttgagggcacagacaccctgtttgccctgatgcagtacagcaacctgctgaagatccacttcaccttcacccagttccgcaccagccccagccagcagagcctggtggaccccatcgtgcagctgaagggcctgaccttcaccgccaccggcatcctgactgtggtgacccagctgttccaccacaagaatggagccaggaagagcgccaagaagatcctgattgtcatcacagatggccagaagtacaaggaccccctggagtacagtgatgtgatcccccaggccgagaaggccggcatcatccgctatgccatcggcgtgggccacgccttccagggccccacagcccggcaggagctgaacaccatcagcagcgccccaccccaggaccacgtgttcaaggtggacaactttgctgccctgggcagcatccagaagcagctgcaggagaagatctatgctgtggagggcacccagagccgggccagcagcagcttccagcacgagatgagccaggagggcttcagcacagccctgaccatggatggcctcttcctgggcgctgtgggcagcttctcctggagcggcggggccttcctgtacccacccaacatgagccccaccttcatcaacatgagccaggagaatgtggacatgagggacagctacctgggctacagcacagagctggccctgtggaagggcgtgcagaacctggtgctgggcgccccccgctaccagcacacaggcaaggccgtcatcttcacccaggtgtcccggcagtggaggaagaaggccgaggtgacaggcacccagatcggcagctactttggagccagcctgtgcagcgtggatgtggacagtgatggcagcacagacctgatcctgattggagccccccactactatgagcagacccggggcggccaggtgtctgtgtgccccctgccccggggccgggtgcagtggcagtgtgatgctgtgctgcggggggagcagggccacccctggggccgctttggagctgccctgactgtgctgggagatgtgaatgaagacaagctgattgatgtggccatcggggcccctggagagcaggagaacagaggagctgtgtacctgttccacggggccagcgagagcggcatcagccccagccacagccagagaattgccagcagccagctgagcccccggctgcagtacttcggccaggccctgagcggcggccaggacctgacccaggacggcctgatggacctggccgtgggcgcccggggccaggtgctgctgctgcggagcctgcctgtgctgaaggtgggcgtggccatgaggttcagccctgtggaggtggccaaggctgtgtaccgctgctgggaggagaagcccagcgccctggaggccggagatgccaccgtgtgcctgaccatccagaagagcagcctggaccagctgggggacatccagagctctgtgcgctttgacctggccctggaccccggccgcctgaccagccgggccatcttcaatgagaccaagaaccccaccctgaccaggaggaagaccctgggcctgggcatccactgtgagaccctgaagctgctgctgcctgactgtgtggaggatgtggtgagccccatcatcctgcacctgaacttcagcctggtgcgggagcccatccccagcccccagaacctgcggcctgtgctggccgtgggcagccaggacctcttcaccgccagcctgccctttgagaagaactgtggccaggacggcctgtgtgagggggacctgggcgtgaccctgtccttcagcggcctgcagaccctgactgtgggcagcagcctggagctgaatgtgattgtgacagtgtggaatgctggagaagattcctatggcaccgtggtgtccctgtactacccagctggcctgagccacagaagagtgtctggggcccagaagcagccccaccagagcgccctgcggctggcctgtgaaacagtgcccacagaagatgagggcctgcggagcagccgctgcagcgtgaaccaccccatcttccacgagggcagcaatggcaccttcatcgtgacctttgatgtgtcctacaaggccaccctgggggacaggatgctgatgagggccagcgccagcagcgagaacaacaaggccagcagcagcaaggccaccttccagctggagctgcctgtgaagtatgctgtgtacaccatgatcagccggcaggaggagagcaccaagtacttcaactttgccaccagtgatgagaagaagatgaaggaggccgagcaccgctacagagtgaacaacctgagccagagggacctggccatcagcatcaacttctgggtgcctgtgctgctgaatggagtggccgtgtgggatgtggtgatggaggcccccagccagagcctgccctgtgtgtctgagaggaagccaccccagcacagcgacttcctgacccagatcagccgcagccccatgctggactgcagcattgctgactgcctgcagttccgctgtgatgtgcccagcttctctgtgcaggaggagctggacttcaccctgaagggcaacctgagctttggctgggtgcgggagaccctgcagaagaaggtgctggtggtgtctgtggccgagatcacctttgacacctctgtgtacagccagctgcccggccaggaggccttcatgagggcccagatggagatggtgctggaggaggatgaggtgtacaatgccatccccatcatcatgggcagctctgtgggcgccctgctgctgctggccctgatcacagccaccctgtacaagctgggcttcttcaagaggcactacaaggagatgctggaggacaagccagaggacacagccaccttctctggagatgacttcagctgtgtggccccaaatgtgcccctgtcctag

SEQ ID NO: 156171 - DNA, 3513 bp, synthetic construct
  misc_feature 1..3513: note = Description of Artificial Sequence: Synthetic coding sequence
  source 1..3513: mol_type = other DNA
atgaaggacagctgcatcaccgtgatggccatggccctgctgagcggcttcttcttctttgccccagccagcagctacaacctggatgtgcggggggcccgctccttcagcccccccagggctggccgccacttcggctacagagtgctgcaggtgggcaatggagtgattgtgggcgcccctggagagggcaacagcacaggcagcctgtaccagtgccagagcggcaccggccactgcctgcctgtgaccctgcggggcagcaactacaccagcaagtacctgggcatgaccctggccacagaccccacagatggcagcatcctggcctgtgaccccggcctgagcaggacctgtgaccagaacacctacctgagcggcctgtgctacctgttccggcagaacctgcagggccccatgctgcagggccggcccggcttccaggagtgcatcaagggaaatgtggacctggtgttcctgtttgatggctccatgagcctgcagccagatgagttccagaagatcctggacttcatgaaggatgtgatgaagaagctgagcaacaccagctaccagtttgctgctgtgcagttcagcaccagctacaagacagaatttgacttcagtgactatgtgaagaggaaggaccctgatgccctgctgaagcacgtgaagcacatgctgctgctgaccaacaccttcggggccatcaactacgtggccacagaggtgttccgggaggagctgggcgcccggccagatgccaccaaggtgctgatcatcatcacagatggagaggccacagacagcggcaacattgatgctgccaaggacatcatccgctacatcatcggcatcggcaagcacttccagaccaaggagagccaggagaccctgcacaagtttgccagcaagccagccagcgagtttgtgaagatcctggacacctttgagaagctgaaggacctcttcacagagctgcagaagaagatctacgtgattgagggcaccagcaagcaggacctgaccagcttcaacatggagctgagcagcagcggcatctctgctgacctgagccggggccatgctgtggtgggcgctgtgggcgccaaggactgggccggcggcttcctggacctgaaggctgacctgcaggatgacaccttcatcggaaatgagcccctgaccccagaggtgcgggccggctacctgggctacacagtgacctggctgcccagccggcagaagaccagcctgctggccagcggggccccccgctaccagcacatgggccgggtgctgctcttccaggagccccagggcggcggccactggagccaggtgcagaccatccacggcacccagatcggcagctactttggaggagagctgtgtggggtggatgtggaccaggatggagaaacagagctgctgctgattggagcccccctcttctacggggagcagagaggaggccgggtcttcatctaccagaggcggcagctgggctttgaggaggtgtctgagctgcagggcgaccccggctaccccctgggccgctttggagaggccatcacagccctgacagacatcaatggagatggcctggtggatgtggccgtgggcgcccccctggaggagcagggcgctgtgtacatcttcaacggccgccacggcggcctgagcccccagcccagccagagaattgagggcacccaggtgctgagcggcatccagtggtttggccgcagcatccacggcgtgaaggacctggagggagatggcctggctgatgtggccgtgggcgctgagagccagatgattgtgctgagcagcaggcctgtggtggacatggtgaccctgatgtccttcagccctgctgagatccctgtgcatgaggtggagtgcagctacagcaccagcaacaagatgaaggagggcgtgaacatcaccatctgcttccagatcaagagcctcatcccccagttccagggccgcctggtggccaacctgacctacaccctgcagctggatggccacaggacccggcggcggggcctcttccctgggggcagacatgagctgcggagaaatattgctgtgaccacctccatgagctgcacagacttctccttccacttccctgtgtgtgtgcaggacctgatcagccccatcaacgtgtccctgaacttcagcctgtgggaggaggagggcaccccccgggaccagagggcccagggcaaggacatcccccccatcctgcggcccagcctgcacagcgagacctgggagatcccctttgagaagaactgtggggaggacaagaagtgtgaggccaacctgcgggtgtccttctccccagcccggagccgggccctgcggctgacagcctttgccagcctgtctgtggagctgagcctgagcaacctggaggaggatgcctactgggtgcagctggacctgcacttccccccaggcctgtccttcaggaaggtggagatgctgaagccccacagccagatccctgtgtcctgtgaggagctgcctgaggagagccggctgctgagccgggccctgagctgcaatgtgagcagccccatcttcaaggccggccacagcgtggccctgcagatgatgttcaacaccctggtgaacagctcctggggagacagcgtggagctgcacgccaacgtgacctgcaacaatgaagattctgacctgctggaggacaacagcgccaccaccatcatccccatcctgtaccccatcaacatcctgatccaggaccaggaggacagcaccctgtatgtgtccttcacccccaagggccccaagatccaccaggtgaagcacatgtaccaggtgcgcatccagcccagcatccatgaccacaacatccccaccctggaggccgtggtgggcgtgccccagccccccagcgagggccccatcacccaccagtggagcgtgcagatggagccccctgtgccctgccactatgaggacctggagcggctgcctgatgctgctgagccctgcctgcccggggccctcttccgctgccctgtggtgttccggcaggagatcctggtgcaggtgattggcaccctggagctggtgggggagattgaggccagctccatgttcagcctgtgcagcagcctgagcatctccttcaacagcagcaagcacttccacctgtatggcagcaatgccagcctggcccaggtggtgatgaaggtggatgtggtgtatgagaagcagatgctgtacctgtatgtgctgagcggcatcggcggcctgctgctgctgctgctgatcttcatcgtgctgtacaaggtgggcttcttcaagaggaacctgaaggagaagatggaggccggccggggcgtgcccaacggcatcccagctgaggacagcgagcagctggccagcggccaggaggccggggaccccggctgcctgaagcccctgcacgagaaggacagcgagagcggcggcggcaaggactag

SEQ ID NO: 156172 - DNA, 3261 bp, synthetic construct
  misc_feature 1..3261: note = Description of Artificial Sequence: Synthetic coding sequence
  source 1..3261: mol_type = other DNA
atgaaggacagctgcatcaccgtgatggccatggccctgctgagcggcttcttcttctttgccccagccagcagctacaacctggatgtgcggggggcccgctccttcagcccccccagggctggccgccacttcggctacagagtgctgcaggtgggcaatggagtgattgtgggcgcccctggagagggcaacagcacaggcagcctgtaccagtgccagagcggcaccggccactgcctgcctgtgaccctgcggggcagcaactacaccagcaagtacctgggcatgaccctggccacagaccccacagatggcagcatcctgtttgctgctgtgcagttcagcaccagctacaagacagaatttgacttcagtgactatgtgaagaggaaggaccctgatgccctgctgaagcacgtgaagcacatgctgctgctgaccaacacctttggagccatcaactacgtggccacagaggtgttccgggaggagctgggcgcccggccagatgccaccaaggtgctgatcatcatcacagatggagaggccacagattctggcaacattgatgctgccaaggacatcatccgctacatcattggaattggcaagcacttccagaccaaggagagccaggagaccctgcacaagtttgccagcaagccagccagcgagtttgtgaagatcctggacacctttgagaagctgaaggacctcttcacagagctgcagaagaagatctacgtgattgagggcaccagcaagcaggacctgaccagcttcaacatggagctgagcagcagcggcatctctgctgacctgagccggggccatgctgtggtgggcgctgtgggcgccaaggactgggccggcggcttcctggacctgaaggctgacctgcaggatgacaccttcatcggaaatgagcccctgaccccagaggtgcgggccggctacctgggctacacagtgacctggctgcccagccggcagaagaccagcctgctggccagcggggccccccgctaccagcacatgggccgggtgctgctcttccaggagccccagggcggcggccactggagccaggtgcagaccatccacggcacccagatcggcagctactttggaggagagctgtgtggggtggatgtggaccaggatggagaaacagagctgctgctgattggagcccccctcttctatggagagcagaggggcggccgggtcttcatctaccagaggcggcagctgggctttgaggaggtgtctgagctgcagggcgaccccggctaccccctgggccgctttggagaggccatcacagccctgacagacatcaatggagatggcctggtggatgtggccgtgggcgcccccctggaggagcagggcgctgtgtacatcttcaacggcagacatggaggcctgagcccccagcccagccagagaattgagggcacccaggtgctgagcggcatccagtggtttggccgcagcatccatggagtgaaggacctggagggagatggcctggctgatgtggccgtgggcgctgagagccagatgattgtgctgagcagcaggcctgtggtggacatggtgaccctgatgtccttctccccagctgagatccctgtgcatgaggtggagtgcagctacagcaccagcaacaagatgaaggagggcgtgaacatcaccatctgcttccagatcaagagcctcatcccccagttccagggccgcctggtggccaacctgacctacaccctgcagctggatggccacaggaccaggagaagaggcctcttccctgggggcagacatgagctgcggaggaacattgctgtgaccacctccatgagctgcacagacttctccttccacttccctgtgtgtgtgcaggacctgatcagccccatcaacgtgtccctgaacttcagcctgtgggaggaggagggcaccccccgggaccagagagctgggaaggacatcccccccatcctgcggcccagcctgcacagcgagacctgggagatcccctttgagaagaactgtggggaggacaagaagtgtgaggccaacctgcgggtgtccttctccccagcccggagccgggccctgcggctgacagcctttgccagcctgtctgtggagctgagcctgagcaacctggaggaggatgcctactgggtgcagctggacctgcacttccccccaggcctgtccttcaggaaggtggagatgctgaagccccacagccagatccctgtgtcctgtgaggagctgcctgaggagagccggctgctgagccgggccctgagctgcaatgtgagcagccccatcttcaaggccggccacagcgtggccctgcagatgatgttcaacaccctggtgaacagctcctggggagacagcgtggagctgcacgccaacgtgacctgcaacaatgaagattctgacctgctggaggacaacagcgccaccaccatcatccccatcctgtaccccatcaacatcctgatccaggaccaggaggacagcaccctgtatgtgtccttcacccccaagggccccaagatccaccaggtgaagcacatgtaccaggtgcgcatccagcccagcatccatgaccacaacatccccaccctggaggccgtggtgggcgtgccccagccccccagcgagggccccatcacccaccagtggagcgtgcagatggagccccctgtgccctgccactatgaggacctggagcggctgcctgatgctgctgagccctgcctgcccggggccctcttccgctgccctgtggtgttccggcaggagatcctggtgcaggtgattggcaccctggagctggtgggggagattgaggccagctccatgttcagcctgtgcagcagcctgagcatctccttcaacagcagcaagcacttccacctgtatggcagcaatgccagcctggcccaggtggtgatgaaggtggatgtggtgtatgagaagcagatgctgtacctgtatgtgctgagcggcatcggcggcctgctgctgctgctgctgatcttcatcgtgctgtacaaggtgggcttcttcaagaggaacctgaaggagaagatggaggccggccggggcgtgcccaacggcatcccagctgaggacagcgagcagctggccagcggccaggaggccggggaccccggctgcctgaagcccctgcacgagaaggacagcgagagcggcggcggcaaggactag

SEQ ID NO: 156173 - DNA, 1215 bp, synthetic construct
  misc_feature 1..1215: note = Description of Artificial Sequence: Synthetic coding sequence
  source 1..1215: mol_type = other DNA
atgaaggacagctgcatcaccgtgatggccatggccctgctgagcggcttcttcttctttgccccagccagcagctacaacctggatgtgcggggggcccgctccttcagcccccccagggctggccgccacttcggctacagagtgctgcagatcaagagcctcatcccccagttccagggccgcctggtggccaacctgacctacaccctgcagctggatggccacaggacccggcggcggggcctcttccctgggggcagacatgagctgcggagaaatattgctgtgaccacctccatgagctgcacagacttctccttccacttccccatgatgttcaacaccctggtgaacagctcctggggagacagcgtggagctgcacgccaacgtgacctgcaacaatgaagattctgacctgctggaggacaacagcgccaccaccatcatccccatcctgtaccccatcaacatcctgatccaggaccaggaggacagcaccctgtatgtgtccttcacccccaagggccccaagatccaccaggtgaagcacatgtaccaggtgcgcatccagcccagcatccatgaccacaacatccccaccctggaggccgtggtgggcgtgccccagccccccagcgagggccccatcacccaccagtggagcgtgcagatggagccccctgtgccctgccactatgaggacctggagcggctgcctgatgctgctgagccctgcctgcccggggccctcttccgctgccctgtggtgttccggcaggagatcctggtgcaggtgattggcaccctggagctggtgggggagattgaggccagctccatgttcagcctgtgcagcagcctgagcatctccttcaacagcagcaagcacttccacctgtatggcagcaatgccagcctggcccaggtggtgatgaaggtggatgtggtgtatgagaagcagatgctgtacctgtatgtgctgagcggcatcggcggcctgctgctgctgctgctgatcttcatcgtgctgtacaaggtgggcttcttcaagaggaacctgaaggagaagatggaggccggccggggcgtgcccaacggcatcccagctgaggacagcgagcagctggccagcggccaggaggccggggaccccggctgcctgaagcccctgcacgagaaggacagcgagagcggcggcggcaaggactag

SEQ ID NO: 156174 - DNA, 489 bp, synthetic construct
  misc_feature 1..489: note = Description of Artificial Sequence: Synthetic coding sequence
  source 1..489: mol_type = other DNA
atgaaggacagctgcatcaccgtgatggccatggccctgctgagcggcttcttcttctttgccccagccagcagctacaacctggatgtgcggggggcccgctccttcagcccccccagggctggccgccacttcggctacagagtgctgcaggtgggcaatggagtgattgtgggcgcccctggagagggcaacagcacaggcagcctgtaccagtgccagagcggcaccggccactgcctgcctgtgaccctgcggggcagcaactacaccagcaagtacctgggcatgaccctggccacagaccccacagatggcagcatcctggcctgtgaccccggcctgagcaggacctgtgaccagaacacctacctgagcggcctgtgctacctgttccggcagaacctgcagggccccatgctgcagggccggcccggcttccaggtgtgctgctgcagcgtcttccacaagctgcagaaccgcatctag

SEQ ID NO: 156175 - DNA, 3459 bp, synthetic construct
  misc_feature 1..3459: note = Description of Artificial Sequence: Synthetic coding sequence
  source 1..3459: mol_type = other DNA
atggccctgcgggtgctgctgctgacagccctgaccctgtgccacggcttcaacctggacacagaaaatgccatgaccttccaggagaatgcccggggcttcggccagagcgtggtgcagctgcagggcagccgggtggtggtgggcgccccccaggagatcgtggccgccaaccagaggggcagcctgtaccagtgtgactacagcacaggcagctgtgagcccatccggctgcaggtgcctgtggaggccgtgaacatgagcctgggcctgagcctggccgccaccaccagccccccccagctgctggcctgtggccccaccgtgcaccagacctgcagcgagaacacctacgtgaagggcctgtgcttcctgtttggcagcaacctgcggcagcagccccagaagtttcctgaggccctgcggggctgcccccaggaggacagcgacatcgccttcctgattgatggcagcggcagcatcatcccccatgacttccggaggatgaaggagtttgtgtccacagtgatggagcagctgaagaagagcaagaccctcttcagcctgatgcagtacagcgaggagttccgcatccacttcaccttcaaggagttccagaacaaccccaaccccaggagcctggtgaagcccatcacccagctgctgggccgcacccacacagccaccggcatcaggaaggtggtgcgggagctgttcaacatcaccaatggagccaggaagaatgccttcaagatcctggtggtgatcacagatggagagaagtttggagaccccctgggctatgaagatgtgattcctgaggccgaccgggagggcgtcatccgctacgtgattggagtgggagatgccttccgctctgagaagagccggcaggagctgaacaccatcgccagcaagccaccccgggaccacgtgttccaggtgaacaactttgaggccctgaagaccatccagaaccagctgcgggagaagatctttgccatcgagggcacccagacaggcagcagcagcagctttgagcacgagatgagccaggagggcttctctgctgccatcaccagcaatggccccctgctgagcacagtgggcagctatgactgggccggcggcgtcttcctgtacaccagcaaggagaagagcaccttcatcaacatgaccagggtggacagcgacatgaatgatgcctacctgggctatgctgctgccatcatcctgaggaacagagtgcagagcctggtgctgggcgccccccgctaccagcacatcggcctggtggccatgttccggcagaacacaggcatgtgggagagcaatgccaacgtgaagggcacccagattggagcctactttggagccagcctgtgcagcgtggatgtggacagcaatggcagcacagacctggtgctgattggagccccccactactatgagcagacccggggcggccaggtgtctgtgtgccccctgccccggggccgggcccgctggcagtgtgatgctgtgctgtatggagagcagggccagccctggggccgctttggagctgccctgactgtgctgggagatgtgaatggagacaagctgacagatgtggccatcggggcccctggagaggaggacaacagaggagctgtgtacctgttccacggcaccagcggcagcggcatcagccccagccacagccagagaattgctggcagcaagctgagcccccggctgcagtacttcggccagagcctgagcggcggccaggacctgaccatggatggcctggtggacctgactgtgggcgcccagggccacgtgctgctgctgcggagccagcctgtgctgcgggtgaaggccatcatggagttcaacccccgggaggtggccagaaatgtgtttgaatgtaatgaccaggtggtgaagggcaaggaggccggggaggtgcgggtgtgcctgcacgtgcagaagagcacccgggaccggctgcgggagggccagatccagagcgtggtgacctatgacctggccctggacagcggccggccccacagcagagctgtgttcaatgagaccaagaacagcacccggcggcagacccaggtgctgggcctgacccagacctgtgagaccctgaagctgcagctgcccaactgcattgaagatcctgtgagccccatcgtgctgcggctgaacttcagcctggtgggcacccccctgagcgcctttggaaacctgcggcctgtgctggccgaggatgcccagaggctcttcaccgccctcttcccctttgagaagaactgtggaaatgacaacatctgccaggatgacctgagcatcaccttctccttcatgagcctggactgcctggtggtgggcggcccccgggagttcaacgtgacagtgacagtgagaaatgatggagaagattcctaccgcacccaggtgaccttcttcttccccctggacctgagctacaggaaggtgtccaccctgcagaaccagaggagccagaggtcctggaggctggcctgtgagagcgccagcagcacagaggtgtctggggccctgaagagcaccagctgcagcatcaaccaccccatcttcccagaaaattctgaggtgaccttcaacatcacctttgatgtggacagcaaggccagcctgggcaacaagctgctgctgaaggccaacgtgaccagcgagaacaacatgcccaggaccaacaagacagagttccagctggagctgcctgtgaagtatgctgtgtacatggtggtgaccagccacggcgtgtccaccaagtacctgaacttcaccgccagcgagaacaccagccgggtgatgcagcaccagtaccaggtgagcaacctgggccagaggagcctgcccatcagcctggtgttcctggtgcctgtgcggctgaaccagaccgtcatctgggaccggccccaggtgaccttcagcgagaacctgagcagcacctgccacaccaaggagcggctgcccagccacagcgacttcctggccgagctgaggaaggcccctgtggtgaactgcagcattgctgtgtgccagaggatccagtgtgacatccccttcttcggcatccaggaggagttcaatgccaccctgaagggcaacctgagctttgactggtacatcaagaccagccacaaccacctgctgattgtgtccacagctgagatcctcttcaatgattctgtgttcaccctgctgcccggccagggcgcctttgtgcgcagccagacagagaccaaggtggagccctttgaggtgcccaaccccctgcccctgattgtgggcagctctgtgggcggcctgctgctgctggccctgatcacagctgccctgtacaagctgggcttcttcaagaggcagtacaaggacatgatgtctgagggcggccccccaggagctgagccccagtag

SEQ ID NO: 156176 - DNA, 3462 bp, synthetic construct
  misc_feature 1..3462: note = Description of Artificial Sequence: Synthetic coding sequence
  source 1..3462: mol_type = other DNA
atggccctgcgggtgctgctgctgacagccctgaccctgtgccacggcttcaacctggacacagaaaatgccatgaccttccaggagaatgcccggggcttcggccagagcgtggtgcagctgcagggcagccgggtggtggtgggcgccccccaggagatcgtggccgccaaccagaggggcagcctgtaccagtgtgactacagcacaggcagctgtgagcccatccggctgcaggtgcctgtggaggccgtgaacatgagcctgggcctgagcctggccgccaccaccagccccccccagctgctggcctgtggccccaccgtgcaccagacctgcagcgagaacacctacgtgaagggcctgtgcttcctgtttggcagcaacctgcggcagcagccccagaagtttcctgaggccctgcggggctgcccccaggaggacagcgacatcgccttcctgattgatggcagcggcagcatcatcccccatgacttccggaggatgaaggagtttgtgtccacagtgatggagcagctgaagaagagcaagaccctcttcagcctgatgcagtacagcgaggagttccgcatccacttcaccttcaaggagttccagaacaaccccaaccccaggagcctggtgaagcccatcacccagctgctgggccgcacccacacagccaccggcatcaggaaggtggtgcgggagctgttcaacatcaccaatggagccaggaagaatgccttcaagatcctggtggtgatcacagatggagagaagtttggagaccccctgggctatgaagatgtgattcctgaggccgaccgggagggcgtcatccgctacgtgattggagtgggagatgccttccgctctgagaagagccggcaggagctgaacaccatcgccagcaagccaccccgggaccacgtgttccaggtgaacaactttgaggccctgaagaccatccagaaccagctgcgggagaagatctttgccatcgagggcacccagacaggcagcagcagcagctttgagcacgagatgagccaggagggcttctctgctgccatcaccagcaatggccccctgctgagcacagtgggcagctatgactgggccggcggcgtcttcctgtacaccagcaaggagaagagcaccttcatcaacatgaccagggtggacagcgacatgaatgatgcctacctgggctatgctgctgccatcatcctgaggaacagagtgcagagcctggtgctgggcgccccccgctaccagcacatcggcctggtggccatgttccggcagaacacaggcatgtgggagagcaatgccaacgtgaagggcacccagattggagcctactttggagccagcctgtgcagcgtggatgtggacagcaatggcagcacagacctggtgctgattggagccccccactactatgagcagacccggggcggccaggtgtctgtgtgccccctgccccggggccagagggcccgctggcagtgtgatgctgtgctgtatggagagcagggccagccctggggccgctttggagctgccctgactgtgctgggagatgtgaatggagacaagctgacagatgtggccatcggggcccctggagaggaggacaacagaggagctgtgtacctgttccacggcaccagcggcagcggcatcagccccagccacagccagagaattgctggcagcaagctgagcccccggctgcagtacttcggccagagcctgagcggcggccaggacctgaccatggatggcctggtggacctgactgtgggcgcccagggccacgtgctgctgctgcggagccagcctgtgctgcgggtgaaggccatcatggagttcaacccccgggaggtggccagaaatgtgtttgagtgcaatgaccaggtggtgaagggcaaggaggccggggaggtgcgggtgtgcctgcacgtgcagaagagcacccgggaccggctgcgggagggccagatccagagcgtggtgacctatgacctggccctggacagcggccggccccacagcagagctgtgttcaatgagaccaagaacagcacccggcggcagacccaggtgctgggcctgacccagacctgtgagaccctgaagctgcagctgcccaactgcatcgaggaccctgtgagccccatcgtgctgcggctgaacttcagcctggtgggcacccccctgagcgccttcggcaacctgcggcctgtgctggctgaagatgcccagaggctcttcaccgccctcttcccctttgagaagaactgtggaaatgacaacatctgccaggatgacctgagcatcaccttctccttcatgagcctggactgcctggtggtgggcggcccccgggagttcaacgtgacagtgacagtgagaaatgatggagaggacagctaccgcacccaggtgaccttcttcttccccctggacctgagctacaggaaggtgtccaccctgcagaaccagaggagccagaggtcctggaggctggcctgtgagagcgccagcagcacagaggtgtctggggccctgaagagcaccagctgcagcatcaaccaccccatcttccctgagaacagcgaggtgaccttcaacatcacctttgatgtggacagcaaggccagcctgggcaacaagctgctgctgaaggccaacgtgaccagcgagaacaacatgcccaggaccaacaagacagagttccagctggagctgcctgtgaagtatgctgtgtacatggtggtgaccagccatggagtgtccaccaagtacctgaacttcaccgccagcgagaacaccagccgggtgatgcagcaccagtaccaggtgagcaacctgggccagaggagcctgcccatcagcctggtgttcctggtgcctgtgcggctgaaccagaccgtcatctgggaccggccccaggtgaccttcagcgagaacctgagcagcacctgccacaccaaggagcggctgcccagccacagcgacttcctggccgagctgaggaaggcccctgtggtgaactgcagcattgctgtgtgccagaggatccagtgtgacatccccttcttcggcatccaggaggagttcaatgccaccctgaagggcaacctgagctttgactggtacatcaagaccagccacaaccacctgctgattgtgtccacagctgagatcctcttcaatgacagcgtcttcaccctgctgcccggccagggcgcctttgtgcgcagccagacagagaccaaggtggagccctttgaggtgcccaaccccctgcccctcatcgtgggcagctctgtgggcggcctgctgctgctggccctgatcacagctgccctgtacaagctgggcttcttcaagaggcagtacaaggacatgatgtctgagggcggccccccaggagctgagccccagtag

SEQ ID NO: 156177 - DNA, 3492 bp, synthetic construct
  misc_feature 1..3492: note = Description of Artificial Sequence: Synthetic coding sequence
  source 1..3492: mol_type = other DNA
atgaccaggacccgggccgccctgctgctcttcaccgccctggccaccagcctgggcttcaacctggacacagaggagctgacagccttccgggtggacagcgctggctttggagacagcgtggtgcagtatgccaacagctgggtggtggtgggcgccccccagaagatcacagctgccaaccagacaggaggcctgtaccagtgtggctacagcactggagcctgtgagcccatcggcctgcaggtgcccccagaggccgtgaacatgagcctgggcctgagcctggccagcaccaccagccccagccagctgctggcctgtggccccaccgtgcaccatgaatgtggcaggaacatgtacctgaccggcctgtgcttcctgctgggccccacccagctgacccagaggctgcctgtgtcccggcaggagtgcccccggcaggagcaggacatcgtgttcctgattgatggcagcggcagcatcagcagcaggaactttgccaccatgatgaactttgtgcgggccgtcatcagccagttccagaggcccagcacccagttcagcctgatgcagttcagcaacaagttccagacccacttcacctttgaggagttcagaagaagcagcaaccccctgagcctgctggcctctgtgcaccagctgcagggcttcacctacacagccacagccatccagaatgtggtgcacaggctcttccacgccagctatggagccaggagagatgctgccaagatcctgattgtcatcacagatggcaagaaggagggggacagcctggactacaaggatgtgatccccatggctgatgctgctggcatcatccgctatgccatcggcgtgggcctggccttccagaacagaaattcctggaaggagctgaatgacatcgccagcaagcccagccaggagcacatcttcaaggtggaggactttgatgccctgaaggacatccagaaccagctgaaggagaagatctttgccatcgagggcacagagaccaccagcagcagcagctttgagctggagatggcccaggagggcttctctgctgtgttcaccccagatggccctgtgctgggcgctgtgggcagcttcacctggagcggcggggccttcctgtacccacccaacatgagccccaccttcatcaacatgagccaggagaatgtggacatgagggacagctacctgggctacagcacagagctggccctgtggaagggcgtgcagagcctggtgctgggcgccccccgctaccagcacacaggcaaggctgtgatcttcacccaggtgtcccggcagtggaggatgaaggccgaggtgacaggcacccagatcggcagctactttggagccagcctgtgcagcgtggatgtggacagtgatggcagcacagacctggtgctgattggagccccccactactatgagcagacccggggcggccaggtgtctgtgtgccccctgccccggggctggaggcgctggtggtgtgatgctgtgctgtatggagagcagggccacccctggggccgctttggagctgccctgactgtgctgggagatgtgaatggagacaagctgacagatgtggtgattggagcccctggagaggaggagaacagaggagctgtgtacctgttccatggagtgctgggccccagcatcagccccagccacagccagagaattgctggcagccagctgagcagccggctgcagtacttcggccaggccctgagcggcggccaggacctgacccaggacggcctggtggacctggccgtgggcgcccggggccaggtgctgctgctgcggaccaggcctgtgctgtgggtgggcgtgtccatgcagttcatcccagctgagatccccaggtctgcctttgagtgccgggagcaggtggtgtctgagcagaccctggtgcagagcaacatctgcctgtacatcgacaagaggagcaagaacctgctgggcagccgggacctgcagagctctgtgaccctggacctggccctggaccccggccgcctgagcccccgggccaccttccaggagaccaagaacagaagcctgagccgggtgcgggtgctgggcctgaaggcccactgtgagaacttcaacctgctgctgcccagctgtgtggaggacagcgtgacccccatcaccctgcggctgaacttcaccctggtgggcaagcccctgctggccttcaggaacctgcggcccatgctggccgcagatgcccagcgctacttcaccgccagcctgccctttgagaagaactgtggggctgaccacatctgccaggacaacctgggcatctccttctccttccctggcctgaagagcctgctggtgggcagcaacctggagctgaatgctgaggtgatggtgtggaatgatggagaggacagctatggcaccaccatcaccttcagccaccctgctggcctgagctaccgctacgtggccgagggccagaagcagggccagctgcggagcctgcacctgacctgtgacagcgcccctgtgggcagccagggcacctggagcaccagctgccgcatcaaccacctgatcttccggggcggggcccagatcaccttcctggccacctttgatgtgagccccaaggctgtgctgggggaccggctgctgctgacagccaacgtgtcctctgagaacaacacccccaggaccagcaagaccaccttccagctggagctgcctgtgaagtatgctgtgtacacagtggtgagcagccatgagcagttcaccaagtacctgaacttcagcgagagcgaggagaaggagagccacgtggccatgcaccgctaccaggtgaacaacctgggccagagggacctgcctgtgtccatcaacttctgggtgcctgtggagctgaaccaggaggccgtgtggatggatgtggaggtgagccacccccagaaccccagcctgcgctgcagcagcgagaagatcgcccccccagccagtgacttcctggcccacatccagaagaaccctgtgctggactgcagcattgctggctgcctgcgcttccgctgtgatgtgcccagcttctctgtgcaggaggagctggacttcaccctgaagggcaacctgagctttggctgggtgcggcagatcctgcagaagaaggtgtctgtggtgtctgtggccgagatcacctttgacacctctgtgtacagccagctgcccggccaggaggccttcatgagggcccagaccaccaccgtgctggagaagtacaaggtgcacaaccccacccccctgattgtgggcagcagcatcggcggcctgctgctgctggccctgatcacagctgtgctgtacaaggtgggcttcttcaagaggcagtacaaggagatgatggaggaggccaacggccagatcgccccagaaaatggcacccagacccccagccccccatctgagaagtag

SEQ ID NO: 156178 - DNA, 5469 bp, synthetic construct
  misc_feature 1..5469: note = Description of Artificial Sequence: Synthetic coding sequence
  source 1..5469: mol_type = other DNA
atggccggcccccggcccagcccctgggcccggctgctgctggccgccctgatctctgtgtccctgagcggcaccctggccaaccgctgcaagaaggcccctgtgaagagctgcacagaatgtgtgcgggtggacaaggactgtgcctactgcacagatgagatgttccgggaccggcgctgcaacacccaggccgagctgctggccgccggctgccagcgggagagcatcgtggtgatggagagcagcttccagatcacagaggagacccagattgacaccaccctgcggcgcagccagatgagcccccagggcctgcgggtgcggctgcggcctggagaggagcggcactttgagctggaggtgtttgagcccctggagagccctgtggacctgtacatcctgatggacttcagcaacagcatgtctgatgacctggacaacctgaagaagatgggccagaacctggcccgggtgctgagccagctgaccagtgactacaccatcggctttgggaagtttgtggacaaggtgtctgtgccccagacagacatgaggcctgagaagctgaaggagccctggcccaacagcgacccccccttctccttcaagaatgtcatcagcctgacagaagatgtggatgagttcaggaacaagctgcagggcgagcgcatcagcggcaacctggatgcccctgagggcggctttgatgccatcctgcagacagctgtgtgcacccgggacatcggctggaggccagacagcacccacctgctggtgttcagcacagaaagtgccttccactatgaagcagatggagccaacgtgctggccggcatcatgagcagaaatgatgagcgctgccacctggacaccaccggcacctacacccagtaccgcacccaggactaccccagcgtgcccaccctggtgcggctgctggccaagcacaacatcatccccatctttgctgtgaccaactacagctacagctactatgagaagctgcacacctacttccctgtgagcagcctgggcgtgctgcaggaggacagcagcaacatcgtggagctgctggaggaggccttcaaccgcatccgcagcaacctggacatccgggccctggacagcccccggggcctgaggacagaggtgaccagcaagatgttccagaagaccaggacaggcagcttccacatcagaagaggagaggtgggcatctaccaggtgcagctgcgggccctggagcacgtggatggcacccacgtgtgccagctgcctgaggaccagaagggcaacatccacctgaagcccagcttcagtgatggcctgaagatggatgctggcatcatctgtgatgtgtgcacctgtgagctgcagaaggaggtgcgcagcgcccgctgcagcttcaatggagactttgtgtgtggccagtgtgtgtgcagcgagggctggagcggccagacctgcaactgcagcacaggcagcctgagtgacatccagccctgcctgcgggagggggaggacaagccctgcagcggcagaggagagtgccagtgtggccactgtgtgtgctacggggagggccgctatgagggccagttctgtgaatatgacaacttccagtgccccaggaccagcggcttcctgtgcaatgaccggggccgctgcagcatgggccagtgtgtgtgtgagcccggctggacaggccccagctgtgactgccccctgagcaatgccacctgcatcgacagcaatggaggcatctgcaatggccggggccactgtgaatgtggccgctgccactgccaccagcagagcctgtacacagacaccatctgtgagatcaactacagcgccatccaccctggcctgtgtgaggacctgcggagctgtgtgcagtgccaggcctggggcaccggggagaagaagggccgcacctgtgaggagtgcaacttcaaggtgaagatggtggatgagctgaagagagctgaggaggtggtggtgcgctgcagcttcagagatgaagatgatgactgcacctacagctacaccatggagggagatggagcccctggccccaacagcacagtgctggtgcacaagaagaaggactgccccccaggcagcttctggtggctgatccccctgctgctgctgctgctgcccctgctggccctgctgctgctgctgtgctggaagtactgtgcctgctgcaaggcctgcctggccctgctgccctgctgcaacagaggccacatggtgggcttcaaggaggaccactacatgctgcgggagaacctgatggccagtgaccacctggacacccccatgctgcggagcggcaacctgaagggcagagatgtggtgcgctggaaggtgaccaacaacatgcagaggcctggctttgccacccatgctgccagcatcaaccccacagagctggtgccctacggcctgagcctgcggctggcccggctgtgcacagagaacctgctgaagccagacaccagagaatgtgcccagctgcggcaggaggtggaggagaacctgaatgaggtgtaccggcagatctctggagtgcacaagctgcagcagaccaagttccggcagcagcccaatgccggcaagaagcaggaccacaccatcgtggacacagtgctgatggcccccaggtctgccaagccagccctgctgaagctgacagagaagcaggtggagcagagggccttccatgacctgaaggtggcccctggctactacaccctgacagctgaccaggatgcccggggcatggtggagttccaggagggcgtggagctggtggatgtgcgggtgcccctcttcatccggccagaagatgatgatgagaagcagctgctggtggaggccattgatgtgcctgctggaacagccaccctgggccggcggctggtgaacatcaccatcatcaaggagcaggccagagatgtggtgtcctttgagcagcctgagttctctgtgtccagaggagaccaggtggcccgcatccctgtgatccggcgggtgctggatggcggcaagagccaggtgtcctaccgcacccaggacggcacagcccagggcaacagagactacatccctgtggagggggagctgctcttccagcccggggaggcctggaaggagctgcaggtgaagctgctggagctgcaggaggtggacagcctgctgcggggccggcaggtgcggcgcttccacgtgcagctgagcaaccccaagtttggagcccacctgggccagccccacagcaccaccatcatcatccgggaccctgatgagctggaccgctccttcaccagccagatgctgagcagccagcccccaccccacggggacctgggcgccccccagaaccccaatgccaaggccgccggcagcaggaagatccacttcaactggctgcccccatctgggaagcccatgggctacagagtgaagtactggatccagggcgacagcgagagcgaggcccacctgctggacagcaaggtgcccagcgtggagctgaccaacctgtacccctactgtgactatgagatgaaggtgtgtgcctatggagcccagggcgagggcccctacagcagcctggtgtcctgcaggacccaccaggaggtgcccagcgagcccggccgcctggccttcaacgtggtgagcagcacagtgacccagctgtcctgggccgagcctgctgagaccaatggagagatcacagcctatgaggtgtgctacggcctggtgaatgatgacaaccggcccatcggccccatgaagaaggtgctggtggacaaccccaagaacaggatgctgctgattgagaacctgcgggagagccagccctaccgctacacagtgaaggccagaaatggagctggctggggccctgagcgggaggccatcatcaacctggccacccagcccaagaggcccatgagcatccccatcatcccagacatccccatcgtggatgcccagagcggagaagattatgacagcttcctgatgtacagtgatgatgtgctgcggagccccagcggcagccagaggcccagcgtgtctgatgacaccggctgcggctggaagtttgagcccctgctgggggaggagctggacctgcggcgggtgacctggaggctgcccccagagctgatcccccggctgagcgccagcagcggccgcagcagtgatgctgaggccccccacggccccccagatgatggaggagctgggggcaaaggaggcagcctgcccaggtctgccaccccaggccccccaggagagcacctggtgaatggccgcatggactttgccttccctggcagcaccaacagcctgcacaggatgaccaccaccagcgctgctgcctacggcacccacctgagcccccacgtgccccaccgggtgctgagcaccagcagcaccctgacccgggactacaacagcctgaccaggtctgagcacagccacagcaccaccctgccccgggactacagcaccctgacctctgtgagcagccatgacagccggctgacagctggggtgcctgacacccccacccggctggtgttttctgccctgggccccaccagcctgcgggtgtcctggcaggagccccgctgtgagcggcccctgcagggctacagcgtggagtaccagctgctgaatggaggagagctgcaccggctgaacatccccaacccagcccagacctctgtggtggtggaggacctgctgcccaaccacagctatgtgttccgggtgcgggcccagagccaggagggctggggccgggagcgggagggcgtcatcaccatcgagagccaggtgcacccccagagccccctgtgccccctgcccggcagcgccttcaccctgagcacccccagcgcccctggccccctggtgttcaccgccctgagcccagacagcctgcagctgtcctgggagcggccccggcggcccaacggggacatcgtgggctacctggtgacctgtgagatggcccagggcggcggccctgccacagccttccgggtggatggagacagccctgagagccggctgactgtgcccggcctgtctgaaaatgtgccctacaagttcaaggtgcaggcccggaccacagagggcttcggccctgagcgggagggcatcatcaccatcgagagccaggacggcggccccttcccccagctgggcagcagagctggcctcttccagcaccccctgcagagcgagtacagcagcatcaccaccacccacaccagcgccacagagcccttcctggtggatggcctgaccctgggcgcccagcacctggaggccggcggcagcctgaccaggcatgtgacccaggagtttgtgtccaggaccctgaccaccagcggcaccctgagcacccacatggaccagcagttcttccagacctag

SEQ ID NO: 156179 - DNA, 5418 bp, synthetic construct
  misc_feature 1..5418: note = Description of Artificial Sequence: Synthetic coding sequence
  source 1..5418: mol_type = other DNA
atggccggcccccggcccagcccctgggcccggctgctgctggccgccctgatctctgtgtccctgagcggcaccctggccaaccgctgcaagaaggcccctgtgaagagctgcacagaatgtgtgcgggtggacaaggactgtgcctactgcacagatgagatgttccgggaccggcgctgcaacacccaggccgagctgctggccgccggctgccagcgggagagcatcgtggtgatggagagcagcttccagatcacagaggagacccagattgacaccaccctgcggcgcagccagatgagcccccagggcctgcgggtgcggctgcggcctggagaggagcggcactttgagctggaggtgtttgagcccctggagagccctgtggacctgtacatcctgatggacttcagcaacagcatgtctgatgacctggacaacctgaagaagatgggccagaacctggcccgggtgctgagccagctgaccagtgactacaccatcggctttgggaagtttgtggacaaggtgtctgtgccccagacagacatgaggcctgagaagctgaaggagccctggcccaacagcgacccccccttctccttcaagaatgtcatcagcctgacagaagatgtggatgagttcaggaacaagctgcagggcgagcgcatcagcggcaacctggatgcccctgagggcggctttgatgccatcctgcagacagctgtgtgcacccgggacatcggctggaggccagacagcacccacctgctggtgttcagcacagaaagtgccttccactatgaagcagatggagccaacgtgctggccggcatcatgagcagaaatgatgagcgctgccacctggacaccaccggcacctacacccagtaccgcacccaggactaccccagcgtgcccaccctggtgcggctgctggccaagcacaacatcatccccatctttgctgtgaccaactacagctacagctactatgagaagctgcacacctacttccctgtgagcagcctgggcgtgctgcaggaggacagcagcaacatcgtggagctgctggaggaggccttcaaccgcatccgcagcaacctggacatccgggccctggacagcccccggggcctgaggacagaggtgaccagcaagatgttccagaagaccaggacaggcagcttccacatcagaagaggagaggtgggcatctaccaggtgcagctgcgggccctggagcacgtggatggcacccacgtgtgccagctgcctgaggaccagaagggcaacatccacctgaagcccagcttcagtgatggcctgaagatggatgctggcatcatctgtgatgtgtgcacctgtgagctgcagaaggaggtgcgcagcgcccgctgcagcttcaatggagactttgtgtgtggccagtgtgtgtgcagcgagggctggagcggccagacctgcaactgcagcacaggcagcctgagtgacatccagccctgcctgcgggagggggaggacaagccctgcagcggcagaggagagtgccagtgtggccactgtgtgtgctacggggagggccgctatgagggccagttctgtgaatatgacaacttccagtgccccaggaccagcggcttcctgtgcaatgaccggggccgctgcagcatgggccagtgtgtgtgtgagcccggctggacaggccccagctgtgactgccccctgagcaatgccacctgcatcgacagcaatggaggcatctgcaatggccggggccactgtgaatgtggccgctgccactgccaccagcagagcctgtacacagacaccatctgtgagatcaactacagcgccatccaccctggcctgtgtgaggacctgcggagctgtgtgcagtgccaggcctggggcaccggggagaagaagggccgcacctgtgaggagtgcaacttcaaggtgaagatggtggatgagctgaagagagctgaggaggtggtggtgcgctgcagcttcagagatgaagatgatgactgcacctacagctacaccatggagggagatggagcccctggccccaacagcacagtgctggtgcacaagaagaaggactgccccccaggcagcttctggtggctgatccccctgctgctgctgctgctgcccctgctggccctgctgctgctgctgtgctggaagtactgtgcctgctgcaaggcctgcctggccctgctgccctgctgcaacagaggccacatggtgggcttcaaggaggaccactacatgctgcgggagaacctgatggccagtgaccacctggacacccccatgctgcggagcggcaacctgaagggcagagatgtggtgcgctggaaggtgaccaacaacatgcagaggcctggctttgccacccatgctgccagcatcaaccccacagagctggtgccctacggcctgagcctgcggctggcccggctgtgcacagagaacctgctgaagccagacaccagagaatgtgcccagctgcggcaggaggtggaggagaacctgaatgaggtgtaccggcagatctctggagtgcacaagctgcagcagaccaagttccggcagcagcccaatgccggcaagaagcaggaccacaccatcgtggacacagtgctgatggcccccaggtctgccaagccagccctgctgaagctgacagagaagcaggtggagcagagggccttccatgacctgaaggtggcccctggctactacaccctgacagctgaccaggatgcccggggcatggtggagttccaggagggcgtggagctggtggatgtgcgggtgcccctcttcatccggccagaagatgatgatgagaagcagctgctggtggaggccattgatgtgcctgctggaacagccaccctgggccggcggctggtgaacatcaccatcatcaaggagcaggccagagatgtggtgtcctttgagcagcctgagttctctgtgtccagaggagaccaggtggcccgcatccctgtgatccggcgggtgctggatggcggcaagagccaggtgtcctaccgcacccaggacggcacagcccagggcaacagagactacatccctgtggagggggagctgctcttccagcccggggaggcctggaaggagctgcaggtgaagctgctggagctgcaggaggtggacagcctgctgcggggccggcaggtgcggcgcttccacgtgcagctgagcaaccccaagtttggagcccacctgggccagccccacagcaccaccatcatcatccgggaccctgatgagctggaccgctccttcaccagccagatgctgagcagccagcccccaccccacggggacctgggcgccccccagaaccccaatgccaaggccgccggcagcaggaagatccacttcaactggctgcccccatctgggaagcccatgggctacagagtgaagtactggatccagggcgacagcgagagcgaggcccacctgctggacagcaaggtgcccagcgtggagctgaccaacctgtacccctactgtgactatgagatgaaggtgtgtgcctatggagcccagggcgagggcccctacagcagcctggtgtcctgcaggacccaccaggaggtgcccagcgagcccggccgcctggccttcaacgtggtgagcagcacagtgacccagctgtcctgggccgagcctgctgagaccaatggagagatcacagcctatgaggtgtgctacggcctggtgaatgatgacaaccggcccatcggccccatgaagaaggtgctggtggacaaccccaagaacaggatgctgctgattgagaacctgcgggagagccagccctaccgctacacagtgaaggccagaaatggagctggctggggccctgagcgggaggccatcatcaacctggccacccagcccaagaggcccatgagcatccccatcatcccagacatccccatcgtggatgcccagagcggagaagattatgacagcttcctgatgtacagtgatgatgtgctgcggagccccagcggcagccagaggcccagcgtgtctgatgacacagagcacctggtgaatggccgcatggactttgccttccctggcagcaccaacagcctgcacaggatgaccaccaccagcgctgctgcctacggcacccacctgagcccccacgtgccccaccgggtgctgagcaccagcagcaccctgacccgggactacaacagcctgaccaggtctgagcacagccacagcaccaccctgccccgggactacagcaccctgacctctgtgagcagccacggcctgccccccatctgggagcacggccgcagccggctgcccctgtcctgggccctgggcagccgcagccgggcccagatgaagggcttcccccccagccggggcccccgggacagcatcatcctggccggccggcctgctgcccccagctggggccctgacagccggctgacagctggggtgcctgacacccccacccggctggtgttcagcgccctgggccccaccagcctgcgggtgtcctggcaggagccccgctgtgagcggcccctgcagggctacagcgtggagtaccagctgctgaatggaggagagctgcaccggctgaacatccccaacccagcccagacctctgtggtggtggaggacctgctgcccaaccacagctatgtgttccgggtgcgggcccagagccaggagggctggggccgggagcgggagggcgtcatcaccatcgagagccaggtgcacccccagagccccctgtgccccctgcccggcagcgccttcaccctgagcaccccatctgcccctggccccctggtgttcaccgccctgagcccagacagcctgcagctgtcctgggagcggccccggcggcccaatggagacatcgtgggctacctggtgacctgtgagatggcccagggcggcggccctgccacagccttccgggtggatggagacagccctgagagccggctgactgtgcccggcctgtctgaaaatgtgccctacaagttcaaggtgcaggcccggaccacagagggctttggacctgagcgggagggcatcatcaccatcgagagccaggacggcggccccttcccccagctgggcagccgggccggcctcttccagcaccccctgcagagcgagtacagcagcatcaccaccacccacaccagcgccacagagcccttcctggtggatggcctgaccctgggcgcccagcacctggaggccggcggcagcctgaccaggcatgtgacccaggagtttgtgtccaggaccctgaccaccagcggcaccctgagcacccacatggaccagcagttcttccagacctag

SEQ ID NO: 156180 - DNA, 5418 bp, synthetic construct; identical to SEQ ID NO: 156179
  misc_feature 1..5418: note = Description of Artificial Sequence: Synthetic coding sequence
  source 1..5418: mol_type = other DNA

SEQ ID NO: 156181 - DNA, 1932 bp, synthetic construct
  misc_feature 1..1932: note = Description of Artificial Sequence: Synthetic coding sequence
  source 1..1932: mol_type = other DNA
gggggcatcgaggagacccagattgacaccaccctgcggcgcagccagatgagcccccagggcctgcgggtgcggctgcggcctggagaggagcggcactttgagctggaggtgtttgagcccctggagagccctgtggacctgtacatcctgatggacttcagcaacagcatgtctgatgacctggacaacctgaagaagatgggccagaacctggcccgggtgctgagccagctgaccagtgactacaccatcggctttgggaagtttgtggacaaggtgtctgtgccccagacagacatgaggcctgagaagctgaaggagccctggcccaacagcgacccccccttctccttcaagaatgtcatcagcctgacagaagatgtggatgagttcaggaacaagctgcagggcgagcgcatcagcggcaacctggatgcccctgagggcggctttgatgccatcctgcagacagctgtgtgcacccgggacatcggctggaggccagacagcacccacctgctggtgttcagcacagaaagtgccttccactatgaagcagatggagccaacgtgctggccggcatcatgagcagaaatgatgagcgctgccacctggacaccaccggcacctacacccagtaccgcacccaggactaccccagcgtgcccaccctggtgcggctgctggccaagcacaacatcatccccatctttgctgtgaccaactacagctacagctactatgagaagctgcacacctacttccctgtgagcagcctgggcgtgctgcaggaggacagcagcaacatcgtggagctgctggaggaggccttcaaccgcatccgcagcaacctggacatccgggccctggacagcccccggggcctgaggacagaggtgaccagcaagatgttccagaagaccaggacaggcagcttccacatcagaagaggagaggtgggcatctaccaggtgcagctgcgggccctggagcacgtggatggcacccacgtgtgccagctgcctgaggaccagaagggcaacatccacctgaagcccagcttcagtgatggcctgaagatggatgctggcatcatctgtgatgtgtgcacctgtgagctgcagaaggaggtgcgcagcgcccgctgcagcttcaatggagactttgtgtgtggccagtgtgtgtgcagcgagggctggagcggccagacctgcaactgcagcacaggcagcctgagtgacatccagccctgcctgcgggagggggaggacaagccctgcagcggcagaggagagtgccagtgtggccactgtgtgtgctacggggagggccgctatgagggccagttctgtgaatatgacaacttccagtgccccaggaccagcggcttcctgtgcaatgaccggggccgctgcagcatgggccagtgtgtgtgtgagcccggctggacaggccccagctgtgactgccccctgagcaatgccacctgcatcgacagcaatggaggcatctgcaatggccggggccactgtgaatgtggccgctgccactgccaccagcagagcctgtacacagacaccatctgtgagatcaactacagcgccatccaccctggcctgtgtgaggacctgcggagctgtgtgcagtgccaggcctggggcaccggggagaagaagggccgcacctgtgaggagtgcaacttcaaggtgaagatggtggatgagctgaagagagctgaggaggtggtggtgcgctgcagcttcagagatgaagatgatgactgcacctacagctacaccatggagggagatggagcccctggccccaacagcacagtgctggtgcacaagaagaaggactgccccccaggcagcttctggtggctgatccccctgctgctgctgctgctgcccctgctggccctgtag

SEQ ID NO: 156182 - DNA, 2367 bp, synthetic construct
  misc_feature 1..2367: note = Description of Artificial Sequence: Synthetic coding sequence
  source 1..2367: mol_type = other DNA
atgggcatcgagctgctgtgcctcttcttcctgttcctgggcagaaatgaccacgtgcagggcggctgtgccctgggcggcgctgagacctgtgaggactgcctgctgattggcccccagtgtgcctggtgtgcccaggagaacttcacccaccccagcggcgtgggggagcgctgtgacaccccagccaacctgctggccaagggctgccagctgaacttcatcgagaaccctgtgtcccaggtggagatcctgaagaacaagcccctgtctgtgggccggcagaagaacagcagtgacatcgtgcagatcgccccccagagcctcatcctgaagctgcggcctggaggagcccagaccctgcaggtgcacgtgcggcagacagaggactaccctgtggacctgtactacctgatggacctgagcgcctccatggatgatgacctgaacaccatcaaggagctgggcagccggctgagcaaggagatgagcaagctgaccagcaacttccggctgggcttcggcagctttgtggagaagcctgtgagcccctttgtgaagaccaccccagaggagatcgccaacccctgcagcagcatcccctacttctgcctgcccaccttcggcttcaagcacatcctgcccctgaccaatgatgctgagcgcttcaatgagatcgtgaagaaccagaagatcagcgccaacatcgacaccccagagggcggctttgatgccatcatgcaggccgctgtgtgcaaggagaagattggctggagaaatgacagcctgcacctgctggtgtttgtgtctgatgctgacagccacttcggcatggacagcaagctggccggcatcgtcatccccaatgatggcctgtgccacctggacagcaagaatgagtacagcatgagcacagtgctggagtaccccaccatcggccagctgattgacaagctggtgcagaacaacgtgctgctgatctttgctgtgacccaggagcaggtgcacctgtatgaaaattatgccaagctgatccctggggccaccgtgggcctgctgcagaaggacagcggcaacatcctgcagctgatcatcagcgcctatgaggagctgcggtctgaggtggagctggaggtgctgggggacacagagggcctgaacctgtccttcaccgccatctgcaacaacggcaccctcttccagcaccagaagaagtgcagccacatgaaggtgggggacacagccagcttctctgtgacagtgaacatcccccactgtgagcggcgcagccgccacatcatcatcaagcctgtgggcctgggagatgccctggagctgctggtgtccccagagtgcaactgtgactgccagaaggaggtggaggtgaacagcagcaagtgccaccacggcaatggcagcttccagtgtggggtgtgtgcctgccaccctggccacatgggcccccgctgtgaatgtggggaggacatgctgagcacagacagctgcaaggaggccccagaccaccccagctgcagcggccgcggggactgctactgcggccagtgcatctgccacctgagcccctacggcaacatctacggcccctactgccagtgtgacaacttcagctgtgtgcgccacaagggcctgctgtgtggcggcaatggagactgtgactgtggggagtgtgtgtgccgcagcggctggacaggagagtactgcaactgcaccaccagcacagacagctgtgtgtctgaagatggagtgctgtgcagcggccgcggggactgtgtgtgtgggaaatgtgtgtgcaccaaccctggggccagcggccccacctgtgagcgctgccccacctgtggggacccctgcaacagcaagaggagctgcatcgagtgccacctgtctgctgctggccaggcccgggaggagtgtgtggacaagtgcaagctggccggggccaccatcagcgaggaggaggacttcagcaaggatggctctgtgtcctgcagcctgcagggagaaaatgaatgtctcatcaccttcctgatcaccacagacaatgaaggcaagaccatcatccacagcatcaatgagaaggactgccccaagccacccaacatccccatgatcatgctgggcgtgtccctggccatcctgctgattggagtggtgctgctgtgcatctggaagctgctggtgtccttccatgacaggaaggaggtggccaagtttgaagctgagaggagcaaggccaagtggcagacaggcaccaaccccctgtaccggggcagcaccagcaccttcaagaatgtgacctacaagcaccgggagaagcagaaggtggacctgagcacagactgctag

SEQ ID NO: 156183 - DNA, 2367 bp, synthetic construct; identical to SEQ ID NO: 156182
  misc_feature 1..2367: note = Description of Artificial Sequence: Synthetic coding sequence
  source 1..2367: mol_type = other DNA

SEQ ID NO: 156184 - DNA, 2397 bp, synthetic construct
  misc_feature 1..2397: note = Description of Artificial Sequence: Synthetic coding sequence
  source 1..2397: mol_type = other DNA
atggtggccctgcccatggtgctggtgctgctgctggtgctgagcagaggagagagcgagctggatgccaagatccccagcactggagatgccacagagtggaggaacccccacctgtccatgctgggcagctgccagcctgcccccagctgccagaagtgcatcctgagccaccccagctgtgcctggtgcaagcagctgaacttcaccgccagcggggaggccgaggcccggcgctgtgcccggcgggaggagctgctggcccggggctgccccctggaggagctggaggagccccggggccagcaggaggtgctgcaggaccagcccctgagccagggcgcccggggggagggcgccacccagctggccccccagagggtgcgggtgaccctgcggcctggagagccccagcagctgcaggtgcgcttcctgcgggcagagggctaccctgtggacctgtactacctgatggacctgagctacagcatgaaggatgacctggagcgggtgcggcagctgggccacgccctgctggtgcggctgcaggaggtgacccacagcgtgagaattggatttggcagctttgtggacaagacagtgctgccctttgtgtccacagtgcccagcaagctgcggcacccctgccccacccggctggagcgctgccagagccccttctccttccaccacgtgctgagcctgactggagatgcccaggcctttgagcgggaggtgggccggcagagcgtgtctggcaacctggacagccctgagggcggctttgatgccatcctgcaggccgccctgtgccaggagcagatcggctggagaaatgtgtcccggctgctggtgttcaccagtgatgacaccttccacacagctggagatggcaagctgggcggcatcttcatgcccagtgatggccactgccacctggacagcaatggcctgtacagccgcagcacagaatttgactaccccagcgtgggccaggtggcccaggccctgtctgctgccaacatccagcccatctttgctgtgaccagcgctgccctgcctgtgtaccaggagctgagcaagctgatccccaagtctgctgtgggggagctgtctgaggacagcagcaatgtggtgcagctgatcatggatgcctacaacagcctgagcagcacagtgaccctggagcacagcagcctgcccccaggagtgcacatctcctatgagagccagtgtgagggccctgagaagcgggagggcaaggcagaagatcggggccagtgcaaccacgtgcgcatcaaccagacagtgaccttctgggtgtccctgcaggccacccactgcctgcctgagccccacctgctgcggctgcgggccctgggcttcagcgaggagctgattgtggagctgcacaccctgtgtgactgcaactgcagcgacacccagccccaggccccccactgcagtgatggccagggccacctgcagtgtggggtgtgcagctgtgcccctggccgcctgggccgcctgtgtgagtgcagcgtggccgagctgagcagcccagacctggagagcggctgccgggccccaaatggaacaggccccctgtgcagcggcaagggccactgccagtgtggccgctgcagctgcagcggccagagcagcggccacctgtgtgaatgtgatgatgccagctgtgaaagacatgagggcatcctgtgtggcggcttcggccgctgccagtgtggggtgtgccactgccacgccaacagaacaggccgggcctgtgaatgttctggggacatggacagctgcatcagccctgagggcggcctgtgcagcggccacggccgctgcaagtgcaaccgctgccagtgcctggatggctactatggagccctgtgtgaccagtgccccggctgcaagaccccctgtgagcggcaccgggactgtgctgaatgtggggccttcagaacaggccccctggccaccaactgcagcacagcctgtgcccacaccaacgtgaccctggccctggcccccatcctggatgatggctggtgcaaggagaggaccctggacaaccagctgttcttcttcctggtggaggatgatgcccggggcaccgtggtgctgcgggtgcggccccaggagaagggagctgaccacacccaggccatcgtgctgggctgtgtgggcggcatcgtggccgtgggcctgggcctggtgctggcctaccgcctgtctgtggagatctatgacagaagagagtacagcagatttgagaaggagcagcagcagctgaactggaagcaggacagcaaccccctgtacaagagcgccatcaccaccaccatcaacccccgcttccaggaggccgacagccccaccctgtag

SEQ ID NO: 156185 - DNA, 1953 bp, synthetic construct
  misc_feature 1..1953: note = Description of Artificial Sequence: Synthetic coding sequence
  source 1..1953: mol_type = other DNA
atggtggccctgcccatggtgctggtgctgctgctggtgctgagcagaggagagagcgagctggatgccaagatccccagcactggagatgccacagagtggaggaacccccacctgtccatgctgggcagctgccagcctgcccccagctgccagaagtgcatcctgagccaccccagctgtgcctggtgcaagcagctgaacttcaccgccagcggggaggccgaggcccggcgctgtgcccggcgggaggagctgctggcccggggctgccccctggaggagctggaggagccccggggccagcaggaggtgctgcaggaccagcccctgagccagggcgcccggggggagggcgccacccagctggccccccagagggtgcgggtgaccctgcggcctggagagccccagcagctgcaggtgcgcttcctgcgggcagagggctaccctgtggacctgtactacctgatggacctgagctacagcatgaaggatgacctggagcgggtgcggcagctgggccacgccctgctggtgcggctgcaggaggtgacccacagcgtgagaattggatttggcagctttgtggacaagacagtgctgccctttgtgtccacagtgcccagcaagctgcggcacccctgccccacccggctggagcgctgccagagccccttctccttccaccacgtgctgagcctgactggagatgcccaggcctttgagcgggaggtgggccggcagagcgtgtctggcaacctggacagccctgagggcggctttgatgccatcctgcaggccgccctgtgccaggagcagatcggctggagaaatgtgtcccggctgctggtgttcaccagtgatgacaccttccacacagctggagatggcaagctgggcggcatcttcatgcccagtgatggccactgccacctggacagcaatggcctgtacagccgcagcacagaatttgactaccccagcgtgggccaggtggcccaggccctgtctgctgccaacatccagcccatctttgctgtgaccagcgctgccctgcctgtgtaccaggagctgagcaagctgatccccaagtctgctgtgggggagctgtctgaggacagcagcaatgtggtgcagctgatcatggatgcctacaacagcctgagcagcacagtgaccctggagcacagcagcctgcccccaggagtgcacatctcctatgagagccagtgtgagggccctgagaagcgggagggcaaggcagaagatcggggccagtgcaaccacgtgcgcatcaaccagacagtgaccttctgggtgtccctgcaggccacccactgcctgcctgagccccacctgctgcggctgcgggccctgggcttcagcgaggagctgattgtggagctgcacaccctgtgtgactgcaactgcagcgacacccagccccaggccccccactgcagtgatggccagggccacctgcagtgtggggtgtgccgggactgtgctgaatgtggggccttcagaacaggccccctggccaccaactgcagcacagcctgtgcccacaccaacgtgaccctggccctggcccccatcctggatgatggctggtgcaaggagaggaccctggacaaccagctgttcttcttcctggtggaggatgatgcccggggcaccgtggtgctgcgggtgcggccccaggagaagggagctgaccacacccaggccatcgtgctgggctgtgtgggcggcatcgtggccgtgggcctgggcctggtgctggcctaccgcctgtctgtggagatctatgacagaagagagtacagcagatttgagaaggagcagcagcagctgaactggaagcaggacagcaaccccctgtacaagagcgccatcaccaccaccatcaacccccgcttccaggaggccgacagccccaccctgtag

SEQ ID NO: 156186 - DNA, 2397 bp, synthetic construct; identical to SEQ ID NO: 156184
  misc_feature 1..2397: note = Description of Artificial Sequence: Synthetic coding sequence
  source 1..2397: mol_type = other DNA

SEQ ID NO: 156187 - DNA, 1206 bp, synthetic construct
  misc_feature 1..1206: note = Description of Artificial Sequence: Synthetic coding sequence
  source 1..1206: mol_type = other DNA
atgaacctggtggccgtgatgggcgccttcaacaagggccacggcaaatgtgactgtgggaaatgtaaatgtgaccagggctggtatggagatgcctgccagtaccccaccaactgtgacctgaccaagaagaagagcaaccagatgtgcaagaacagccaggacatcatctgcagcaatgccggcacctgccactgcggccgctgcaagtgtgacaacagtgatggcagcggcctggtgtatggcaagttctgtgaatgtgatgacagagaatgtattgatgatgaaacagaggagatctgtggcggccacggcaagtgctactgcggcaactgctactgcaaggccggctggcatggagacaagtgtgagttccagtgtgacatcaccccctgggagagcaagaggcgctgcaccagcccagatggcaagatctgcagcaacagaggcacctgtgtgtgtggggagtgcacctgccatgatgtggaccccactggagactggggagacatccacggggacacctgtgaatgtgatgagcgggactgcagagctgtgtatgaccgctacagtgatgacttctgcagcggccacggccagtgcaactgtggccgctgtgactgcaaggccggctggtacggcaagaagtgtgagcacccccagagctgcaccctgtctgctgaggagagcatcaggaagtgccagggcagcagtgacctgccctgcagcggccggggcaaatgtgaatgtgggaagtgcacctgctacccacctggggacagaagagtgtatggcaagacctgtgaatgtgatgacagaagatgtgaggacctggatggagtggtgtgtggcggccacggcacctgcagctgtggccgctgtgtgtgtgagcggggctggtttgggaagctgtgccagcaccccaggaagtgcaacatgacagaggagcagagcaagaacctgtgtgagagcgcagatggcatcctgtgcagcggcaagggcagctgccactgtgggaagtgcatctgcagcgctgaggagtggtacatctctggagagttctgtgactgtgatgaccgggactgtgacaagcatgatggcctcatctgcacaggaaatggcatctgcagctgtggcaactgtgagtgctgggatggctggaatggaaatgcctgtgagatctggctgggcagcgagtacccctag

SEQ ID NO: 156188 - DNA, 1485 bp, synthetic construct
  misc_feature 1..1485: note = Description of Artificial Sequence: Synthetic coding sequence
  source 1..1485: mol_type = other DNA
atgaggcctcctggcttcaggaacttcctgctgctggccagcagcctgctgtttgctggcctgtctgctgtgccccagagcttcagccccagcctgcgctcctggccaggggccgcctgccgcctgagcagagctgagagcgagcggcgctgccgggcccctggccagcccccaggggccgccctgtgccacggccggggccgctgtgactgtggggtgtgcatctgccacgtgacagagcccggcatgttcttcggccccctgtgtgagtgccacgagtgggtgtgtgagacctatgatggcagcacctgtgccggccatggaaaatgtgactgtgggaagtgcaagtgtgaccagggctggtatggagatgcctgccagtaccccaccaactgtgacctgaccaagaagaagagcaaccagatgtgcaagaacagccaggacatcatctgcagcaatgccggcacctgccactgcggccgctgcaagtgtgacaacagtgatggcagcggcctggtgtatggcaagttctgtgaatgtgatgaccgggagtgcattgatgatgaaacagaggagatctgtggcggccacggcaagtgctactgcggcaactgctactgcaaggccggctggcacggggacaagtgtgagttccagtgtgacatcaccccctgggagagcaagaggcgctgcaccagcccagatggcaagatctgcagcaacagaggcacctgtgtgtgtggagaatgtacctgccatgatgtggaccccaccggggactggggagacatccatggagacacctgtgaatgtgatgagcgggactgcagagctgtgtatgaccgctacagtgatgacttctgcagcggccacggccagtgcaactgtggccgctgtgactgcaaggccggctggtacggcaagaagtgtgagcacccccagagctgcaccctgtctgctgaggagagcatcaggaagtgccagggcagcagtgacctgccctgcagcggccggggcaaatgtgaatgtgggaagtgcacctgctacccacctggggaccggcgggtgtatggcaagacctgtgaatgtgatgaccggcgctgtgaggacctggatggagtggtgtgtggcggccacggcacctgcagctgtggccgctgtgtgtgtgagcggggctggtttgggaagctgtgccagcaccccaggaagtgcaacatgacagaggagcagagcaagaacctgtgtgagagcgcagatggcatcctgtgcagcggcaagggcagctgccactgtgggaagtgcatctgcagcgctgaggagtggtacatcagcggggagttctgtgactgtgatgaccgggactgtgacaagcatgatggcctcatctgcacaggaaatggcatctgcagctgtggcaactgtgagtgctgggatggctggaatggaaatgcctgtgagatctggctgggcagcgagtacccctag

SEQ ID NO: 156189 - DNA, 1209 bp, synthetic construct
  misc_feature 1..1209: note = Description of Artificial Sequence: Synthetic coding sequence
  source 1..1209: mol_type = other DNA
atgagcggctgtgcccggcccaccactggagcccctgtgcaggccatggtgtctgtgacaggcaagtgcaagtgtgaccagggctggtatggagatgcctgccagtaccccaccaactgtgacctgaccaagaagaagagcaaccagatgtgcaagaacagccaggacatcatctgcagcaatgccggcacctgccactgcggccgctgcaagtgtgacaacagtgatggcagcggcctggtgtatggcaagttctgtgaatgtgatgaccgggagtgcattgatgatgaaacagaggagatctgtggcggccacggcaagtgctactgcggcaactgctactgcaaggccggctggcacggggacaagtgtgagttccagtgtgacatcaccccctgggagagcaagaggcgctgcaccagcccagatggcaagatctgcagcaacagaggcacctgtgtgtgtggagaatgtacctgccatgatgtggaccccaccggggactggggagacatccatggagacacctgtgaatgtgatgagcgggactgcagagctgtgtatgaccgctacagtgatgacttctgcagcggccacggccagtgcaactgtggccgctgtgactgcaaggccggctggtacggcaagaagtgtgagcacccccagagctgcaccctgtctgctgaggagagcatcaggaagtgccagggcagcagtgacctgccctgcagcggccggggcaaatgtgaatgtgggaagtgcacctgctacccacctggggaccggcgggtgtatggcaagacctgtgaatgtgatgaccggcgctgtgaggacctggatggagtggtgtgtggcggccacggcacctgcagctgtggccgctgtgtgtgtgagcggggctggtttgggaagctgtgccagcaccccaggaagtgcaacatgacagaggagcagagcaagaacctgtgtgagagcgcagatggcatcctgtgcagcggcaagggcagctgccactgtgggaagtgcatctgcagcgctgaggagtggtacatcagcggggagttctgtgactgtgatgaccgggactgtgacaagcatgatggcctcatctgcacaggaaatggcatctgcagctgtggcaactgtgagtgctgggatggctggaatggaaatgcctgtgagatctggctgggcagcgagtacccctag

SEQ ID NO: 156190 - DNA, 1062 bp, synthetic construct
  misc_feature 1..1062: note = Description of Artificial Sequence: Synthetic coding sequence
  source 1..1062: mol_type = other DNA
atgtgcaagaacagccaggacatcatctgcagcaatgccggcacctgccactgcggccgctgcaagtgtgacaacagtgatggcagcggcctggtgtatggcaagttctgtgaatgtgatgacagagaatgtattgatgatgaaacagaggagatctgtggcggccacggcaagtgctactgcggcaactgctactgcaaggccggctggcatggagacaagtgtgagttccagtgtgacatcaccccctgggagagcaagaggcgctgcaccagcccagatggcaagatctgcagcaacagaggcacctgtgtgtgtggggagtgcacctgccatgatgtggaccccactggagactggggagacatccacggggacacctgtgaatgtgatgagcgggactgcagagctgtgtatgaccgctacagtgatgacttctgcagcggccacggccagtgcaactgtggccgctgtgactgcaaggccggctggtacggcaagaagtgtgagcacccccagagctgcaccctgtctgctgaggagagcatcaggaagtgccagggcagcagtgacctgccctgcagcggccggggcaaatgtgaatgtgggaagtgcacctgctacccacctggggacagaagagtgtatggcaagacctgtgaatgtgatgacagaagatgtgaggacctggatggagtggtgtgtggcggccacggcacctgcagctgtggccgctgtgtgtgtgagcggggctggtttgggaagctgtgccagcaccccaggaagtgcaacatgacagaggagcagagcaagaacctgtgtgagagcgcagatggcatcctgtgcagcggcaagggcagctgccactgtgggaagtgcatctgcagcgctgaggagtggtacatctctggagagttctgtgactgtgatgaccgggactgtgacaagcatgatggcctcatctgcacaggaaatggcatctgcagctgtggcaactgtgagtgctgggatggctggaatggaaatgcctgtgagatctggctgggcagcgagtacccctag

SEQ ID NO: 156191 - DNA, 1062 bp, synthetic construct; identical to SEQ ID NO: 156190
  misc_feature 1..1062: note = Description of Artificial Sequence: Synthetic coding sequence
  source 1..1062: mol_type = other DNA

SEQ ID NO: 156192 - DNA, 903 bp, synthetic construct
  misc_feature 1..903: note = Description of Artificial Sequence: Synthetic coding sequence
  source 1..903: mol_type = other DNA
atggccaactgtgagttcagccctgtgtctggggacaagccctgctgccgcctgagccggcgggcccagctgtgcctgggcgtgtccatcctggtgctgatcctggtggtggtgctggccgtggtggtgccccgctggaggcagcagtggagcggccctggcaccaccaagcgcttccctgagaccgtgctggcccgctgtgtgaagtacacagagatccaccctgagatgagacatgtggactgccagagcgtgtgggatgccttcaagggggccttcatcagcaagcacccctgcaacatcacagaggaggactaccagcccctgatgaagctgggcacccagacagtgccctgcaacaagatcctgctgtggagccgcatcaaggacctggcccaccagttcacccaggtgcagagggacatgttcaccctggaggacaccctgctgggctacctggctgatgacctgacctggtgtggggagttcaacaccagcaagatcaactaccagagctgcccagactggaggaaggactgcagcaacaaccctgtgtctgtgttctggaagacagtgagccgccgctttgctgaggccgcctgtgatgtggtgcacgtgatgctgaatggcagccgcagcaagatctttgacaagaacagcaccttcggctctgtggaggtgcacaacctgcagcctgagaaggtgcagaccctggaggcctgggtgatccacggcggccgggaggacagccgggacctgtgccaggaccccaccatcaaggagctggagagcatcatcagcaagaggaacatccagttcagctgcaagaacatctacagaccagacaagttcctgcagtgtgtgaagaaccctgaggacagcagctgcaccagcgagatctag

SEQ ID NO: 156193 - DNA, 942 bp, synthetic construct
  misc_feature 1..942: note = Description of Artificial Sequence: Synthetic coding sequence
  source 1..942: mol_type = other DNA
atgaaccagctgtccttcctgctcttcctgattgccaccacccggggctggagcacagatgaggccaacacctacttcaaggagtggacctgcagcagcagccccagcctgcccaggagctgcaaggagatcaaggatgaatgtcccagcgcctttgatggcctgtacttcctgaggacagaaaatggagtcatctaccagaccttctgtgacatgaccagcggcggcggcggctggaccctggtggcctctgtgcatgaaaatgacatgagaggaaaatgtactgtgggggaccgctggagcagccagcagggcagcaaggctgtgtacccagaaggagatggcaactgggccaactacaacacctttggatctgctgaggccgccaccagtgatgactacaagaaccctggctactatgacatccaggccaaggacctgggcatctggcacgtgcccaacaagagccccatgcagcactggaggaacagcagcctgctgcgctacagaacagacaccggcttcctgcagaccctgggccacaacctgtttggcatctaccagaagtaccctgtgaagtacggggagggcaagtgctggacagacaatggacctgtgattcctgtggtgtatgactttggagatgcccagaagacagccagctactacagcccctacggccagcgggagttcaccgctggctttgtgcagttccgggtcttcaacaatgaaagagctgccaatgccctgtgtgccggcatgagggtgacaggctgcaacacagagcaccactgcatcggcggcggcggctacttccctgaggccagcccccagcagtgtggggacttcagcggctttgactggagcggctacggcacccacgtgggctacagcagcagccgggagatcacagaggccgctgtgctgctcttctacagatag

SEQ ID NO: 156194 - DNA, 978 bp, synthetic construct
  misc_feature 1..978: note = Description of Artificial Sequence: Synthetic coding sequence
  source 1..978: mol_type = other DNA
atgctgtccatgctgcggaccatgacccggctgtgcttcctgctcttcttctctgtggccaccagcggctgcagcgctgctgctgccagcagcctggagatgctgagccgggagtttgagacctgtgccttctccttcagcagcctgcccaggagctgcaaggagatcaaggagcgctgccacagcgctggagatggcctgtacttcctgcggaccaagaatggagtggtgtaccagaccttctgtgacatgaccagcggcggcggcggctggaccctggtggcctctgtgcatgaaaatgacatgagaggaaaatgtactgtgggggaccgctggagcagccagcagggcaacaaggctgactacccagaaggagatggcaactgggccaactacaacacctttggatctgctgaggccgccaccagtgatgactacaagaaccctggctactatgacatccaggccaaggacctgggcatctggcacgtgcccaacaagagccccatgcagcactggaggaacagcgccctgctgcgctaccgcaccaacacaggcttcctgcagaggctgggccacaacctgtttggcatctaccagaagtaccctgtgaagtaccgcagcggcaagtgctggaatgacaatggacctgccatccctgtggtgtatgactttggagatgccaagaagacagccagctactacagcccctacggccagcgggagtttgtggccggctttgtgcagttccgggtcttcaacaatgaaagagctgccaatgccctgtgtgccggcatcaaggtgacaggctgcaacacagagcaccactgcatcggcggcggcggcttcttcccccagggcaagccccggcagtgtggggacttcagcgcctttgactgggatggctacggcacccacgtgaagagcagctgcagccgggagatcacagaggccgctgtgctgctcttctacagatag

SEQ ID NO: 156195 - DNA, 2736 bp, synthetic construct
  misc_feature 1..2736: note = Description of Artificial Sequence: Synthetic coding sequence
  source 1..2736: mol_type = other DNA
atggatggagccatgggcccccggggcctgctgctgtgcatgtacctggtgtccctgctgatcctgcaggccatgcctgccctgggcagcgccaccggccgcagcaagagcagcgagaagaggcaggccgtggacacagctgtggatggagtcttcatccgcagcctgaaggtgaactgcaaggtgaccagcagatttgcccactacgtggtgaccagccaggtggtgaacacagccaatgaggcccgggaggtggcctttgacctggagatccccaagacagccttcatcagtgactttgctgtgacagcagatggaaatgccttcatcggggacatcaaggacaaggtgacagcctggaagcagtacaggaaggccgccatctctggagaaaatgccggcctggtgcgggccagcggccgcaccatggagcagttcaccatccacctgactgtgaacccccagagcaaggtgaccttccagctgacctatgaggaggtgctgaagaggaaccacatgcagtatgaaattgtcatcaaggtgaagcccaagcagctggtgcaccactttgaaattgatgtggacatctttgagccccagggcatcagcaagctggatgcccaggccagcttcctgcccaaggagctggccgcccagaccatcaagaagagcttcagcggcaagaagggccacgtgctcttccggcccaccgtgtcccagcagcagagctgccccacctgcagcaccagcctgctgaatggccacttcaaggtgacctatgatgtgtcccgggacaagatctgtgacctgctggtggccaacaaccactttgcccacttctttgccccccagaacctgaccaacatgaacaagaatgtggtgtttgtgattgacatcagcggctccatgaggggccagaaggtgaagcagaccaaggaggccctgctgaagatcctgggggacatgcagcccggggactactttgacctggtgctgtttggcaccagggtgcagagctggaagggcagcctggtgcaggccagcgaggccaacctgcaggccgcccaggactttgtgcggggcttcagcctggatgaggccaccaacctgaatggaggcctgctgcggggcatcgagatcctgaaccaggtgcaggagagcctgcctgagctgagcaaccacgccagcatcctgatcatgctgacagatggagaccccacagaaggagtgacagacaggagccagatcctgaagaatgtgagaaatgccatccggggccgcttccccctgtacaacctgggcttcggccacaacgtggacttcaacttcctggaggtgatgtccatggagaacaacggccgggcccagaggatctatgaggaccatgatgccacccagcagctgcagggcttctacagccaggtggccaagcccctgctggtggatgtggacctgcagtacccccaggatgctgtgctggccctgacccagaaccaccacaagcagtactatgagggcagcgagatcgtggtggccggcagaattgctgacaacaagcagagcagcttcaaggcagatgtgcaggcccacggggagggccaggagttcagcatcacctgcctggtggatgaggaggagatgaagaagctgctgcgggagcggggccacatgctggagaaccacgtggagcggctgtgggcctacctgaccatccaggagctgctggccaagaggatgaaggtggaccgggaggagcgggccaacctgagcagccaggccctgcagatgagcctggactatggctttgtgacccccctgacctccatgagcatccggggcatggctgaccaggacggcctgaagcccaccatcgacaagcccagcgaggacagcccccccctggagatgctgggccccaggaggacctttgtgctgagcgccctgcagcccagccccacccacagcagcagcaacacccagaggctgcctgacagagtgactggagtggacacagacccccacttcatcatccacgtgccccagaaggaggacaccctgtgcttcaacatcaatgaggagcccggggtcatcctgagcctggtgcaggaccccaacacaggcttctctgtgaatggccagctgattggcaacaaggcccggagccctggccagcatgatggcacctacttcggccgcctgggcatcgccaacccagccacagacttccagctggaggtgaccccccagaacatcaccctgaaccctggctttggaggccctgtgttctcctggagggaccaggccgtgctgcggcaggatggagtggtggtgaccatcaacaagaagaggaacctggtggtgtctgtggatgatggcggcacctttgaggtggtgctgcaccgggtgtggaagggcagctctgtgcaccaggacttcctgggcttctacgtgctggacagccacaggatgtctgcccggacccacggcctgctgggccagttcttccaccccatcggctttgaggtgtctgacatccaccctggcagtgaccccaccaagccagatgccaccatggtggtgaggaacagaaggctgactgtgacccggggcctgcagaaggactacagcaaggacccctggcatggagctgaggtgtcctgctggttcatccacaacaatggagctggcctgattgatggagcctacacagactacatcgtgcctgacatcttctag

SEQ ID NO: 156196 - DNA, 1872 bp, synthetic construct
  misc_feature 1..1872: note = Description of Artificial Sequence: Synthetic coding sequence
  source 1..1872: mol_type = other DNA
atgaacaagaatgtggtgtttgtgattgacatcagcggctccatgaggggccagaaggtgaagcagaccaaggaggccctgctgaagatcctgggggacatgcagcccggggactactttgacctggtgctgtttggcaccagggtgcagagctggaagggcagcctggtgcaggccagcgaggccaacctgcaggccgcccaggactttgtgcggggcttcagcctggatgaggccaccaacctgaatggaggcctgctgcggggcatcgagatcctgaaccaggtgcaggagagcctgcctgagctgagcaaccacgccagcatcctgatcatgctgacagatggagaccccacagaaggagtgacagacaggagccagatcctgaagaatgtgagaaatgccatccggggccgcttccccctgtacaacctgggcttcggccacaacgtggacttcaacttcctggaggtgatgtccatggagaacaacggccgggcccagaggatctatgaggaccatgatgccacccagcagctgcagggcttctacagccaggtggccaagcccctgctggtggatgtggacctgcagtacccccaggatgctgtgctggccctgacccagaaccaccacaagcagtactatgagggcagcgagatcgtggtggccggcagaattgctgacaacaagcagagcagcttcaaggcagatgtgcaggcccacggggagggccaggagttcagcatcacctgcctggtggatgaggaggagatgaagaagctgctgcgggagcggggccacatgctggagaaccacgtggagcggctgtgggcctacctgaccatccaggagctgctggccaagaggatgaaggtggaccgggaggagcgggccaacctgagcagccaggccctgcagatgagcctggactatggctttgtgacccccctgacctccatgagcatccggggcatggctgaccaggacggcctgaagcccaccatcgacaagcccagcgaggacagcccccccctggagatgctgggccccaggaggacctttgtgctgagcgccctgcagcccagccccacccacagcagcagcaacacccagaggctgcctgacagagtgactggagtggacacagacccccacttcatcatccacgtgccccagaaggaggacaccctgtgcttcaacatcaatgaggagcccggggtcatcctgagcctggtgcaggaccccaacacaggcttctctgtgaatggccagctgattggcaacaaggcccggagccctggccagcatgatggcacctacttcggccgcctgggcatcgccaacccagccacagacttccagctggaggtgaccccccagaacatcaccctgaaccctggctttggaggccctgtgttctcctggagggaccaggccgtgctgcggcaggatggagtggtggtgaccatcaacaagaagaggaacctggtggtgtctgtggatgatggcggcacctttgaggtggtgctgcaccgggtgtggaagggcagctctgtgcaccaggacttcctgggcttctacgtgctggacagccacaggatgtctgcccggacccacggcctgctgggccagttcttccaccccatcggctttgaggtgtctgacatccaccctggcagtgaccccaccaagccagatgccaccatggtggtgaggaacagaaggctgactgtgacccggggcctgcagaaggactacagcaaggacccctggcatggagctgaggtgtcctgctggttcatccacaacaatggagctggcctgattgatggagcctacacagactacatcgtgcctgacatcttctag

SEQ ID NO: 156197 - DNA, 2310 bp, synthetic construct
  misc_feature 1..2310: note = Description of Artificial Sequence: Synthetic coding sequence
  source 1..2310: mol_type = other DNA
atggagcagttcaccatccacctgactgtgaacccccagagcaaggtgaccttccagctgacctatgaggaggtgctgaagaggaaccacatgcagtatgaaattgtcatcaaggtgaagcccaagcagctggtgcaccactttgaaattgatgtggacatctttgagccccagggcatcagcaagctggatgcccaggccagcttcctgcccaaggagctggccgcccagaccatcaagaagagcttcagcggcaagaagggccacgtgctcttccggcccaccgtgtcccagcagcagagctgccccacctgcagcaccagcctgctgaatggccacttcaaggtgacctatgatgtgtcccgggacaagatctgtgacctgctggtggccaacaaccactttgcccacttctttgccccccagaacctgaccaacatgaacaagaatgtggtgtttgtgattgacatcagcggctccatgaggggccagaaggtgaagcagaccaaggaggccctgctgaagatcctgggggacatgcagcccggggactactttgacctggtgctgtttggcaccagggtgcagagctggaagggcagcctggtgcaggccagcgaggccaacctgcaggccgcccaggactttgtgcggggcttcagcctggatgaggccaccaacctgaatggaggcctgctgcggggcatcgagatcctgaaccaggtgcaggagagcctgcctgagctgagcaaccacgccagcatcctgatcatgctgacagatggagaccccacagaaggagtgacagacaggagccagatcctgaagaatgtgagaaatgccatccggggccgcttccccctgtacaacctgggcttcggccacaacgtggacttcaacttcctggaggtgatgtccatggagaacaacggccgggcccagaggatctatgaggaccatgatgccacccagcagctgcagggcttctacagccaggtggccaagcccctgctggtggatgtggacctgcagtacccccaggatgctgtgctggccctgacccagaaccaccacaagcagtactatgagggcagcgagatcgtggtggccggcagaattgctgacaacaagcagagcagcttcaaggcagatgtgcaggcccacggggagggccaggagttcagcatcacctgcctggtggatgaggaggagatgaagaagctgctgcgggagcggggccacatgctggagaaccacgtggagcggctgtgggcctacctgaccatccaggagctgctggccaagaggatgaaggtggaccgggaggagcgggccaacctgagcagccaggccctgcagatgagcctggactatggctttgtgacccccctgacctccatgagcatccggggcatggctgaccaggacggcctgaagcccaccatcgacaagcccagcgaggacagcccccccctggagatgctgggccccaggaggacctttgtgctgagcgccctgcagcccagccccacccacagcagcagcaacacccagaggctgcctgacagagtgactggagtggacacagacccccacttcatcatccacgtgccccagaaggaggacaccctgtgcttcaacatcaatgaggagcccggggtcatcctgagcctggtgcaggaccccaacacaggcttctctgtgaatggccagctgattggcaacaaggcccggagccctggccagcatgatggcacctacttcggccgcctgggcatcgccaacccagccacagacttccagctggaggtgaccccccagaacatcaccctgaaccctggctttggaggccctgtgttctcctggagggaccaggccgtgctgcggcaggatggagtggtggtgaccatcaacaagaagaggaacctggtggtgtctgtggatgatggcggcacctttgaggtggtgctgcaccgggtgtggaagggcagctctgtgcaccaggacttcctgggcttctacgtgctggacagccacaggatgtctgcccggacccacggcctgctgggccagttcttccaccccatcggctttgaggtgtctgacatccaccctggcagtgaccccaccaagccagatgccaccatggtggtgaggaacagaaggctgactgtgacccggggcctgcagaaggactacagcaaggacccctggcatggagctgaggtgtcctgctggttcatccacaacaatggagctggcctgattgatggagcctacacagactacatcgtgcctgacatcttctag

SEQ ID NO: 156198 - DNA, 1938 bp, synthetic construct
  misc_feature 1..1938: note = Description of Artificial Sequence: Synthetic coding sequence
  source 1..1938: mol_type = other DNA
atggatggagccatgggcccccggggcctgctgctgtgcatgtacctggtgtccctgctgatcctgcaggccatgcctgccctgggcagcgccaccggccgcagcaagagcagcgagaagaggcaggccgtggacacagctgtggatggagtcttcatccgcagcctgaaggtgaactgcaaggtgaccagcagatttgcccactacgtggtgaccagccaggtggtgaacacagccaatgaggcccgggaggtggcctttgacctggagatccccaagacagccttcatcagtgactttgctgtgacagcagatggaaatgccttcatcggggacatcaaggacaaggtgacagcctggaagcagtacaggaaggccgccatctctggagaaaatgccggcctggtgcgggccagcggccgcaccatggagcagttcaccatccacctgactgtgaacccccagagcaaggtgaccttccagctgacctatgaggaggtgctgaagaggaaccacatgcagtatgaaattgtcatcaaggtgaagcccaagcagctggtgcaccactttgaaattgatgtggacatctttgagccccagggcatcagcaagctggatgcccaggccagcttcctgcccaaggagctggccgcccagaccatcaagaagagcttcagcggcaagaagggccacgtgctcttccggcccaccgtgtcccagcagcagagctgccccacctgcagcaccagcctgctgaatggccacttcaaggtgacctatgatgtgtcccgggacaagatctgtgacctgctggtggccaacaaccactttgcccacttctttgccccccagaacctgaccaacatgaacaagaatgtggtgtttgtgattgacatcagcggctccatgaggggccagaaggtgaagcagaccaaggaggccctgctgaagatcctgggggacatgcagcccggggactactttgacctggtgctgtttggcaccagggtgcagagctggaagggcagcctggtgcaggccagcgaggccaacctgcaggccgcccaggactttgtgcggggcttcagcctggatgaggccaccaacctgaatggaggcctgctgcggggcatcgagatcctgaaccaggtgcaggagagcctgcctgagctgagcaaccacgccagcatcctgatcatgctgacagatggagaccccacagaaggagtgacagacaggagccagatcctgaagaatgtgagaaatgccatccggggccgcttccccctgtacaacctgggcttcggccacaacgtggacttcaacttcctggaggtgatgtccatggagaacaacggccgggcccagaggatctatgaggaccatgatgccacccagcagctgcagggcttctacagccaggtggccaagcccctgctggtggatgtggacctgcagtacccccaggatgctgtgctggccctgacccagaaccaccacaagcagtactatgagggcagcgagatcgtggtggccggcagaattgctgacaacaagcagagcagcttcaaggcagatgtgcaggcccacggggagggccaggagttcagcatcacctgcctggtggatgaggaggagatgaagaagctgctgcgggagcggggccacatgctggagaaccacgtggagcggctgtgggcctacctgaccatccaggagctgctggccaagaggatgaaggtggaccgggaggagcgggccaacctgagcagccaggccctgcagatgagcctggactatggctttgtgacccccctgacctccatgagcatccggggcatggctgaccaggacggcctgaagcccaccatcgacaagcccagcctgcaccacccccgggcccctgagcggggccaccctgtgctgcagcaccagtag

SEQ ID NO: 156199 - DNA, 2841 bp, synthetic construct
  misc_feature 1..2841: note = Description of Artificial Sequence: Synthetic coding sequence
  source 1..2841: mol_type = other DNA
atgaagaggctgacctgcttcttcatctgcttcttcctgtctgaggtgtctggctttgagatccccatcaatggcctgtctgaatttgtggactatgaggacctggtggagctggcccctgggaagttccagctggtggccgagaacagacgctaccagaggagcctgcctggagagagcgaggagatgatggaggaggtggaccaggtgaccctgtacagctacaaggtgcagagcaccatcaccagcaggatggccaccaccatgatccagagcaaggtggtgaacaacagcccccagccccagaatgtggtgtttgatgtgcagatccccaagggggccttcatcagcaacttctccatgacagtggatggcaagaccttccgcagcagcatcaaggagaagacagtgggccgggccctgtatgcccaggcccgggccaagggcaagacagctggcctggtgcgcagcagcgccctggacatggagaacttcagaacagaggtgaatgtgctgcccggggccaaggtgcagtttgagctgcactaccaggaggtgaagtggaggaagctgggcagctatgagcaccgcatctacctgcagcccggccgcctggccaagcacctggaggtggatgtgtgggtgattgagccccagggcctgcgcttcctgcacgtgcctgacacctttgagggccactttgatggagtgcctgtgatcagcaagggccagcagaaggcccacgtgtccttcaagcccaccgtggcccagcagaggatctgccccaactgccgggagacagctgtggatggagagctggtggtgctgtatgatgtgaagcgggaggagaaggccggggagctggaggtgttcaacggctactttgtgcacttctttgccccagacaacctggaccccatccccaagaacatcctgtttgtgattgatgtgtctggctccatgtggggcgtgaagatgaagcagacagtggaggccatgaagaccatcctggatgacctgcgggcagaggaccacttctctgtgattgacttcaaccagaacatccgcacctggagaaatgacctgatcagcgccaccaagacccaggtggctgatgccaagcgctacatcgagaagatccagcccagcggcggcaccaacatcaatgaggccctgctgcgggccatcttcatcctgaatgaggccaacaacctgggcctgctggaccccaacagcgtgtccctcatcatcctggtgtctgatggagaccccaccgtgggggagctgaagctgagcaagatccagaagaatgtgaaggagaacatccaggacaacatcagcctcttcagcctgggcatgggctttgatgtggactatgacttcctgaagaggctgagcaatgaaaaccacggcatcgcccagaggatctacggcaaccaggacaccagcagccagctgaagaagttctacaaccaggtgtccacccccctgctgagaaatgtgcagttcaactacccccacacctctgtgacagatgtgacccagaacaacttccacaactactttggaggcagcgagatcgtggtggccggcaagtttgatcctgccaagctggaccagattgaatctgtcatcacagccaccagcgccaacacccagctggtgctggagaccctggcccagatggatgacctgcaggacttcctgagcaaggacaagcatgctgaccctgacttcaccaggaagctgtgggcctacctgaccatcaaccagctgctggccgagaggagcctggcccccacagctgctgccaagaggcgcatcaccaggagcatcctgcagatgagcctggaccaccacatcgtgacccccctgaccagcctggtgattgaaaatgaggccggagatgagaggatgctggctgatgccccaccccaggaccccagctgctgcagcggggccctgtactacggcagcaaggtggtgcctgacagcacccccagctgggccaaccccagccccacccctgtgatctccatgctggcccagggcagccaggtgctggagagcaccccacctcctcatgtgatgagggtggagaatgacccccacttcatcatctacctgcccaagagccagaagaacatctgcttcaacatcgacagcgagcccgggaagatcctgaacctggtgtctgaccctgagagcggcatcgtggtgaatggccagctggtgggcgccaagaagcccaacaacgggaagctgagcacctactttgggaagctgggcttctacttccagagcgaggacatcaagattgagatcagcacagagaccatcaccctgagccacggcagcagcaccttcagcctgtcctggagcgacacagcccaggtgaccaaccagagggtgcagatctctgtgaagaaggagaaggtggtgaccatcaccctggacaaggagatgtccttctctgtgctgctgcaccgggtgtggaagaagcaccctgtgaatgtggacttcctgggcatctacatcccccccaccaacaagttcagccccaaggcccacggcctcatcggccagttcatgcaggagcccaagatccacatcttcaatgaaagacctgggaaggaccctgagaagccagaggcctccatggaggtgaagggccagaagctgatcatcacccggggcctgcagaaggactacagaacagacctggtgtttggaacagatgtgacctgctggtttgtgcacaacagcggcaagggcttcattgatggccactacaaggactactttgtgccccagctgtacagcttcctgaagaggccctag

SEQ ID NO: 156200 - DNA, 2658 bp, synthetic construct
  misc_feature 1..2658: note = Description of Artificial Sequence: Synthetic coding sequence
  source 1..2658: mol_type = other DNA
atggtggccctgagccacctgggcagcgccctgcagctgggcagcctcttccccaggagccccttccggctgctgggcaagaggagcctgcctgagggcgtggccaacggcatcgaggtgtacagcaccaagatcaacagcaaggtgaccagcagatttgcccacaacgtggtgaccatgagagctgtgaacagagctgacacagccaaggaggtgtcctttgatgtggagctgcccaagacagccttcatcaccaacttcaccctgaccattgatggagtgacctacccaggaaatgtgaaggagaaggaggtggccaagaagcagtatgagaaggctgtgtcccagggcaagacagctggcctggtgaaggccagcggcaggaagctggagaagttcaccgtgtctgtgaatgtggccgccggcagcaaggtgacctttgagctgacctatgaggagctgctgaagaggcacaagggcaagtatgagatgtacctgaaggtgcagcccaagcagctggtgaagcactttgaaattgaggtggacatctttgagccccagggcatctccatgctggatgctgaggccagcttcatcaccaatgacctgctgggcagcgccctgaccaagagcttcagcggcaagaagggccacgtgtccttcaagcccagcctggaccagcagaggagctgccccacctgcacagacagcctgctgaatggagacttcaccatcacctatgatgtgaaccgggagagccctggaaatgtgcagatcgtgaatggctactttgtgcacttctttgccccccagggcctgcctgtggtgcccaagaatgtggccttcgtcatcgacatcagcggctccatggccggcaggaagctggagcagaccaaggaggccctgctgcgcatcctggaggacatgcaggaggaggactacctgaacttcatcctcttctctggagatgtgtccacctggaaggagcacctggtgcaggccaccccagagaacctgcaggaggcccggacctttgtgaagtccatggaggacaagggcatgaccaacatcaatgatggcctgctgcggggcatctccatgctgaacaaggcccgggaggagcaccgcatccctgagaggagcaccagcatcgtcatcatgctgacagatggagatgccaacgtgggggagagcaggcctgagaagatccaggagaatgtgagaaatgccatcggcggcaagttccccctgtacaacctgggcttcggcaacaacctgaactacaacttcctggagaacatggccctggagaaccacggctttgcccggcgcatctatgaagattctgatgctgacctgcagctgcagggcttctatgaggaggtggccaaccccctgctgactggagtggagatggagtacccagaaaatgccatcctggacctgacccagaacacctaccagcacttctatgatggcagcgagatcgtggtggccggccgcctggtggatgaggacatgaacagcttcaaggcagatgtgaagggccatggagccaccaatgacctgaccttcacagaggaggtggacatgaaggagatggagaaggccctgcaggagcgggactacatctttggaaactacatcgagcggctgtgggcctacctgaccatcgagcagctgctggagaagaggaagaatgcccatggagaggagaaggagaacctgacagcccgggccctggacctgagcctgaagtaccactttgtgacccccctgacctccatggtggtgaccaagccagaggacaatgaagatgagcgggccatcgctgacaagccaggagagggcttcagcgccacccctgtgtccccagccatgagctacctgaccagctaccagcccccccagaacccctactactacgtggatggagacccccacttcatcatccagatccctgagaaggatgatgccctgtgcttcaacattgatgaggcccctggcaccgtgctgcggctcatccaggatgctgtgacaggcctgactgtgaatggccagatcactggagacaagaggggcagcccagacagcaagaccaggaagacctactttgggaagctgggcatcgccaatgcccagatggacttccaggtggaggtgaccacagagaagatcaccctgtggaacagagctgtgcccagcaccttctcctggctggacacagtgacagtgacccaggacggcctgtccatgatgatcaacaggaagaacatggtggtgtcctttggagatggagtgacctttgtggtggtgctgcaccaggtgtggaagaagcaccctgtgcaccgggacttcctgggcttctacgtggtggacagccacaggatgtctgcccagacccacggcctgctgggccagttcttccagccctttgacttcaaggtgtctgacatccggcccggcagtgaccccaccaagccagatgccaccctggtggtgaagaaccaccagctgattgtgacccggggcagccagaaggactacaggaaggatgccagcatcggcaccaaggtggtgtgctggtttgtgcacaacaatggagagggcctgattgatggagtgcacacagactacatcgtgcccaacctcttctag

SEQ ID NO: 156201 - DNA, 2013 bp, synthetic construct
  misc_feature 1..2013: note = Description of Artificial Sequence: Synthetic coding sequence
  source 1..2013: mol_type = other DNA
atggcctttgcctggtggccctgcctgatcctggccctgctgagcagcctggccgccagcggcttccccaggagccccttccggctgctgggcaagaggagcctgcctgagggcgtggccaatggaattgaggtgtacagcaccaagatcaacagcaaggtgaccagcagatttgcccacaacgtggtgaccatgagagctgtgaacagagctgacacagccaaggaggtgtcctttgatgtggagctgcccaagacagccttcatcaccaacttcaccctgaccattgatggagtgacctacccaggaaatgtgaaggagaaggaggtggccaagaagcagtatgagaaggctgtgtcccagggcaagacagctggcctggtgaaggccagcggcaggaagctggagaagttcaccgtgtctgtgaatgtggccgccggcagcaaggtgacctttgagctgacctatgaggagctgctgaagaggcacaagggcaagtatgagatgtacctgaaggtgcagcccaagcagctggtgaagcactttgaaattgaggtggacatctttgagccccagggcatctccatgctggatgctgaggccagcttcatcaccaatgacctgctgggcagcgccctgaccaagagcttcagcggcaagaagggccacgtgtccttcaagcccagcctggaccagcagaggagctgccccacctgcacagacagcctgctgaatggagacttcaccatcacctatgatgtgaaccgggagagccctggaaatgtgcagatcgtgaatggctactttgtgcacttctttgccccccagggcctgcctgtggtgcccaagaatgtggcctttgtgattgacatcagcggctccatggccggcaggaagctggagcagaccaaggaggccctgctgcgcatcctggaggacatgcaggaggaggactacctgaacttcatcctcttctctggagatgtgtccacctggaaggagcacctggtgcaggccaccccagagaacctgcaggaggcccggacctttgtgaagtccatggaggacaagggcatgaccaacatcaatgatggcctgctgcggggcatctccatgctgaacaaggcccgggaggagcaccgcatccctgagaggagcaccagcatcgtcatcatgctgacagatggagatgccaacgtgggggagagcaggcctgagaagatccaggagaatgtgagaaatgccatcggcggcaagttccccctgtacaacctgggctttggaaacaacctgaactacaacttcctggagaacatggccctggagaaccacggctttgcccggcgcatctatgaggacagtgatgctgacctgcagctgcagggcttctatgaggaggtggccaaccccctgctgactggagtggagatggagtacccagaaaatgccatcctggacctgacccagaacacctaccagcacttctatgatggcagcgagatcgtggtggccggccgcctggtggatgaggacatgaacagcttcaaggcagatgtgaagggccacggggccaccaatgacctgaccttcacagaggaggtggacatgaaggagatggagaaggccctgcaggagcgggactacatcttcggcaactacatcgagcggctgtgggcctacctgaccatcgagcagctgctggagaagaggaagaatgcccacggggaggagaaggagaacctgacagcccgggccctggacctgagcctgaagtaccactttgtgacccccctgacctccatggtggtgaccaagccagaagataatgaagatgagcgggccatcgctgacaagccaggagagggcggggacagccacactggagagcccaggcatgtgctgcctgaccagctgcctgccagcagcaagcccctgctgctgtgtggccggggcagccccctgcaccaccccaacagcggggagcggcgctgccccctgctgcagcacaggtag

SEQ ID NO: 156202 - DNA, 2673 bp, synthetic construct
  misc_feature 1..2673: note = Description of Artificial Sequence: Synthetic coding sequence
  source 1..2673: mol_type = other DNA
atggcctttgcctggtggccctgcctgatcctggccctgctgagcagcctggccgccagcggcttccccaggagccccttccggctgctgggcaagaggagcctgcctgagggcgtggccaatggaattgaggtgtacagcaccaagatcaacagcaaggtgaccagcagatttgcccacaacgtggtgaccatgagagctgtgaacagagctgacacagccaaggaggtgtcctttgatgtggagctgcccaagacagccttcatcaccaacttcaccctgaccattgatggagtgacctacccaggaaatgtgaaggagaaggaggtggccaagaagcagtatgagaaggctgtgtcccagggcaagacagctggcctggtgaaggccagcggcaggaagctggagaagttcaccgtgtctgtgaatgtggccgccggcagcaaggtgacctttgagctgacctatgaggagctgctgaagaggcacaagggcaagtatgagatgtacctgaaggtgcagcccaagcagctggtgaagcactttgaaattgaggtggacatctttgagccccagggcatctccatgctggatgctgaggccagcttcatcaccaatgacctgctgggcagcgccctgaccaagagcttcagcggcaagaagggccacgtgtccttcaagcccagcctggaccagcagaggagctgccccacctgcacagacagcctgctgaatggagacttcaccatcacctatgatgtgaaccgggagagccctggaaatgtgcagatcgtgaatggctactttgtgcacttctttgccccccagggcctgcctgtggtgcccaagaatgtggcctttgtgattgacatcagcggctccatggccggcaggaagctggagcagaccaaggaggccctgctgcgcatcctggaggacatgcaggaggaggactacctgaacttcatcctcttctctggagatgtgtccacctggaaggagcacctggtgcaggccaccccagagaacctgcaggaggcccggacctttgtgaagtccatggaggacaagggcatgaccaacatcaatgatggcctgctgcggggcatctccatgctgaacaaggcccgggaggagcaccgcatccctgagaggagcaccagcatcgtcatcatgctgacagatggagatgccaacgtgggggagagcaggcctgagaagatccaggagaatgtgagaaatgccatcggcggcaagttccccctgtacaacctgggctttggaaacaacctgaactacaacttcctggagaacatggccctggagaaccacggctttgcccggcgcatctatgaggacagtgatgctgacctgcagctgcagggcttctatgaggaggtggccaaccccctgctgactggagtggagatggagtacccagaaaatgccatcctggacctgacccagaacacctaccagcacttctatgatggcagcgagatcgtggtggccggccgcctggtggatgaggacatgaacagcttcaaggcagatgtgaagggccacggggccaccaatgacctgaccttcacagaggaggtggacatgaaggagatggagaaggccctgcaggagcgggactacatcttcggcaactacatcgagcggctgtgggcctacctgaccatcgagcagctgctggagaagaggaagaatgcccacggggaggagaaggagaacctgacagcccgggccctggacctgagcctgaagtaccactttgtgacccccctgacctccatggtggtgaccaagccagaagataatgaagatgagcgggccatcgctgacaagccaggagaagatgctgaggccacccctgtgtccccagccatgagctacctgaccagctaccagcccccccagaacccctactactacgtggatggagacccccacttcatcatccagatccctgagaaggatgatgccctgtgcttcaacattgatgaggcccctggcaccgtgctgcggctcatccaggatgctgtgacaggcctgactgtgaatggccagatcaccggggacaagaggggcagcccagacagcaagaccaggaagacctactttgggaagctgggcatcgccaatgcccagatggacttccaggtggaggtgaccacagagaagatcaccctgtggaacagagctgtgcccagcaccttctcctggctggacacagtgacagtgacccaggacggcctgtccatgatgatcaacaggaagaacatggtggtgtcctttggagatggagtgacctttgtggtggtgctgcaccaggtgtggaagaagcaccctgtgcaccgggacttcctgggcttctacgtggtggacagccacaggatgtctgcccagacccacggcctgctgggccagttcttccagccctttgacttcaaggtgtctgacatccggcccggcagtgaccccaccaagccagatgccaccctggtggtgaagaaccaccagctgattgtgacccggggcagccagaaggactacaggaaggatgccagcatcggcaccaaggtggtgtgctggtttgtgcacaacaacggggagggcctgattgatggagtgcacacagactacatcgtgcccaacctcttctag

SEQ ID NO: 156203 - DNA, 1977 bp, synthetic construct
  misc_feature 1..1977: note = Description of Artificial Sequence: Synthetic coding sequence
  source 1..1977: mol_type = other DNA
atggcctttgcctggtggccctgcctgatcctggccctgctgagcagcctggccgccagcggcttccccaggagccccttccggctgctgggcaagaggagcctgcctgagggcgtggccaatggaattgaggtgtacagcaccaagatcaacagcaaggtgaccagcagatttgcccacaacgtggtgaccatgagagctgtgaacagagctgacacagccaaggaggtgtcctttgatgtggagctgcccaagacagccttcatcaccaacttcaccctgaccattgatggagtgacctacccaggaaatgtgaaggagaaggaggtggccaagaagcagtatgagaaggctgtgtcccagggcaagacagctggcctggtgaaggccagcggcaggaagctggagaagttcaccgtgtctgtgaatgtggccgccggcagcaagaggcacaagggcaagtatgagatgtacctgaaggtgcagcccaagcagctggtgaagcactttgaaattgaggtggacatctttgagccccagggcatctccatgctggatgctgaggccagcttcatcaccaatgacctgctgggcagcgccctgaccaagagcttcagcggcaagaagggccacgtgtccttcaagcccagcctggaccagcagaggagctgccccacctgcacagacagcctgctgaatggagacttcaccatcacctatgatgtgaaccgggagagccctggaaatgtgcagatcgtgaatggctactttgtgcacttctttgccccccagggcctgcctgtggtgcccaagaatgtggcctttgtgattgacatcagcggctccatggccggcaggaagctggagcagaccaaggaggccctgctgcgcatcctggaggacatgcaggaggaggactacctgaacttcatcctcttctctggagatgtgtccacctggaaggagcacctggtgcaggccaccccagagaacctgcaggaggcccggacctttgtgaagtccatggaggacaagggcatgaccaacatcaatgatggcctgctgcggggcatctccatgctgaacaaggcccgggaggagcaccgcatccctgagaggagcaccagcatcgtcatcatgctgacagatggagatgccaacgtgggggagagcaggcctgagaagatccaggagaatgtgagaaatgccatcggcggcaagttccccctgtacaacctgggctttggaaacaacctgaactacaacttcctggagaacatggccctggagaaccacggctttgcccggcgcatctatgaggacagtgatgctgacctgcagctgcagggcttctatgaggaggtggccaaccccctgctgactggagtggagatggagtacccagaaaatgccatcctggacctgacccagaacacctaccagcacttctatgatggcagcgagatcgtggtggccggccgcctggtggatgaggacatgaacagcttcaaggcagatgtgaagggccacggggccaccaatgacctgaccttcacagaggaggtggacatgaaggagatggagaaggccctgcaggagcgggactacatcttcggcaactacatcgagcggctgtgggcctacctgaccatcgagcagctgctggagaagaggaagaatgcccacggggaggagaaggagaacctgacagcccgggccctggacctgagcctgaagtaccactttgtgacccccctgacctccatggtggtgaccaagccagaagataatgaagatgagcgggccatcgctgacaagccaggagagggcggggacagccacactggagagcccaggcatgtgctgcctgaccagctgcctgccagcagcaagcccctgctgctgtgtggccggggcagccccctgcaccaccccaacagcggggagcggcgctgccccctgctgcagcacaggtag

SEQ ID NO: 156204 - DNA, 2793 bp, synthetic construct
  misc_feature 1..2793: note = Description of Artificial Sequence: Synthetic coding sequence
  source 1..2793: mol_type = other DNA
atgaagccacccaggcctgtgaggacctgcagcaaggtgctggtgctgctgagcctgctggccatccaccagaccaccacagctgagaagaatggaattgacatctacagcctgactgtggacagccgggtgagcagcagatttgcccacacagtggtgaccagccgggtggtgaacagagccaacacagtgcaggaggccaccttccagatggagctgcccaagaaggccttcatcaccaacttctccatgatcattgatggcatgacctacccaggcatcatcaaggagaaggccgaggcccaggcccagtacagcgctgctgtggccaagggcaagtctgctggcctggtgaaggccactggaagaaacatggagcagttccaggtgtctgtgtctgtggccccaaatgccaagatcacctttgagctggtgtatgaggagctgctgaagaggcggctgggcgtgtatgagctgctgctgaaggtgcggccccagcagctggtgaagcacctgcagatggacatccacatctttgagccccagggcatctccttcctggagacagagagcaccttcatgaccaaccagctggtggatgccctgaccacctggcagaacaagaccaaggcccacatccgcttcaagcccaccctgagccagcagcagaagagccctgagcagcaggagaccgtgctggatggcaacctgatcatccgctatgatgtggaccgggccatcagcggcggcagcatccagattgaaaatggctactttgtgcactactttgcccctgagggcctgaccaccatgcccaagaatgtggtgtttgtgattgacaagagcggctccatgagcggcaggaagatccagcagacccgggaggccctgatcaagatcctggatgacctgagcccccgggaccagttcaacctgattgtgttcagcacagaggccacccagtggaggcccagcctggtgcctgccagcgcagaaaatgtgaacaaggcccggagctttgctgctggcatccaggccctgggcggcaccaacatcaatgatgccatgctgatggctgtgcagctgctggacagcagcaaccaggaggagcggctgcctgagggctctgtgtccctcatcatcctgctgacagatggagaccccaccgtgggggagaccaaccccaggagcatccagaacaacgtgcgggaggccgtgtctggccgctacagcctcttctgcctgggctttggatttgatgtgtcctatgccttcctggagaagctggccctggacaatggaggcctggcccggcgcatccacgaggacagcgacagcgccctgcagctgcaggacttctaccaggaggtggccaaccccctgctgacagctgtgacctttgagtaccccagcaatgctgtggaggaggtgacccagaacaacttccggctgctcttcaagggcagcgagatggtggtggccggcaagctgcaggaccggggcccagatgtgctgacagccaccgtgtctgggaagctgcccacccagaacatcaccttccagacagagagctctgtggccgagcaggaggccgagttccagagccccaagtacatcttccacaacttcatggagcggctgtgggcctacctgaccatccagcagctgctggagcagacagtgtctgccagtgatgctgaccagcaggccctgaggaaccaggccctgaacctgagcctggcctacagctttgtgacccccctgacctccatggtggtgaccaagccagatgaccaggagcagagccaggtggccgagaagcccatggagggggagagcaggaacagaaatgtgcacagcggcagcaccttcttcaagtactacctgcagggcgccaagatccccaagccagaggccagcttcagcccccggcggggctggaaccggcaggccggggccgccggcagcaggatgaacttccggcctggggtgctgagcagccggcagctgggcctgcccggccccccagatgtgcctgaccacgccgcctaccaccccttccggcggctggccatcctgcctgccagcgcccccccagccaccagcaacccagaccctgctgtgtcccgggtgatgaacatgaagattgaggagaccaccatgaccacccagaccccagcccccatccaggcccccagcgccatcctgcccctgcccggccagagcgtggagcggctgtgtgtggaccccaggcaccggcagggccctgtgaacctgctgagtgaccctgagcagggcgtggaggtgacaggccagtatgagcgggagaaggccggcttctcctggattgaggtgaccttcaagaaccccctggtgtgggtgcacgccagccctgagcacgtggtggtgaccaggaacagaagaagcagcgcctacaagtggaaggagaccctcttctctgtgatgcctggcctgaagatgaccatggacaagacaggcctgctgctgctgagtgaccctgacaaggtgaccatcggcctgctcttctgggatggccgcggggagggcctgcggctgctgctgcgggacacagaccgcttcagcagccacgtgggcggcaccctgggccagttctaccaggaggtgctgtggggcagccctgctgccagtgatgatggccgccgcaccctgcgggtgcagggcaatgaccacagcgccacccgggagcggcggctggactaccaggagggccccccaggagtggagatcagctgctggagcgtggagctgtag

SEQ ID NO: 156205 - DNA, 2745 bp, synthetic construct
  misc_feature 1..2745: note = Description of Artificial Sequence: Synthetic coding sequence
  source 1..2745: mol_type = other DNA
atgaagccacccaggcctgtgaggacctgcagcaaggtgctggtgctgctgagcctgctggccatccaccagaccaccacagctgagaagaatggaattgacatctacagcctgactgtggacagccgggtgagcagcagatttgcccacacagtggtgaccagccgggtggtgaacagagccaacacagtgcaggaggccaccttccagatggagctgcccaagaaggccttcatcaccaacttctccatgatcattgatggcatgacctacccaggcatcatcaaggagaaggccgaggcccaggcccagtacagcgctgctgtggccaagggcaagtctgctggcctggtgaaggccactggaagaaacatggagcagttccaggtgtctgtgtctgtggccccaaatgccaagatcacctttgagctggtgtatgaggagctgctgaagaggcggctgggcgtgtatgagctgctgctgaaggtgcggccccagcagctggtgaagcacctgcagatggacatccacatctttgagccccagggcatctccttcctggagacagagagcaccttcatgaccaaccagctggtggatgccctgaccacctggcagaacaagaccaaggcccacatccgcttcaagcccaccctgagccagcagcagaagagccctgagcagcaggagaccgtgctggatggcaacctgatcatccgctatgatgtggaccgggccatcagcggcggcagcatccagattgaaaatggctactttgtgcactactttgcccctgagggcctgaccaccatgcccaagaatgtggtgtttgtgattgacaagagcggctccatgagcggcaggaagatccagcagacccgggaggccctgatcaagatcctggatgacctgagcccccgggaccagttcaacctgattgtgttcagcacagaggccacccagtggaggcccagcctggtgcctgccagcgcagaaaatgtgaacaaggcccggagctttgctgctggcatccaggccctgggcggcaccaacatcaatgatgccatgctgatggctgtgcagctgctggacagcagcaaccaggaggagcggctgcctgagggctctgtgtccctcatcatcctgctgacagatggagaccccaccgtgggggagaccaaccccaggagcatccagaacaacgtgcgggaggccgtgtctggccgctacagcctcttctgcctgggctttggatttgatgtgtcctatgccttcctggagaagctggccctggacaatggaggcctggcccggcgcatccacgaggacagcgacagcgccctgcagctgcaggacttctaccaggaggtggccaaccccctgctgacagctgtgacctttgagtaccccagcaatgctgtggaggaggtgacccagaacaacttccggctgctcttcaagggcagcgagatggtggtggccggcaagctgcaggaccggggcccagatgtgctgacagccaccgtgtctgggaagctgcccacccagaacatcaccttccagacagagagctctgtggccgagcaggaggccgagttccagagccccaagtacatcttccacaacttcatggagcggctgtgggcctacctgaccatccagcagctgctggagcagacagtgtctgccagtgatgctgaccagcaggccctgaggaaccaggccctgaacctgagcctggcctacagctttgtgacccccctgacctccatggtggtgaccaagccagatgaccaggagcagagccaggtggccgagaagcccatggagggggagagcaggaacagaaatgtgcacagcgctggagctgctggcagcaggatgaacttccggcctggggtgctgagcagccggcagctgggcctgcccggccccccagatgtgcctgaccacgccgcctaccaccccttccggcggctggccatcctgcctgccagcgcccccccagccaccagcaacccagaccctgctgtgtcccgggtgatgaacatgaagattgaggagaccaccatgaccacccagaccccagcctgccccagctgcagccgcagccgggccccagctgtgcctgcccccatccaggcccccagcgccatcctgcccctgcccggccagagcgtggagcggctgtgtgtggaccccaggcaccggcagggccctgtgaacctgctgagtgaccctgagcagggcgtggaggtgacaggccagtatgagcgggagaaggccggcttctcctggattgaggtgaccttcaagaaccccctggtgtgggtgcacgccagccctgagcacgtggtggtgaccaggaacagaagaagcagcgcctacaagtggaaggagaccctcttctctgtgatgcctggcctgaagatgaccatggacaagacaggcctgctgctgctgagtgaccctgacaaggtgaccatcggcctgctcttctgggatggccgcggggagggcctgcggctgctgctgcgggacacagaccgcttcagcagccacgtgggcggcaccctgggccagttctaccaggaggtgctgtggggcagccctgctgccagtgatgatggccgccgcaccctgcgggtgcagggcaatgaccacagcgccacccgggagcggcggctggactaccaggagggccccccaggagtggagatcagctgctggagcgtggagctgtag

SEQ ID NO: 156206 - DNA, 2703 bp, synthetic construct
  misc_feature 1..2703: note = Description of Artificial Sequence: Synthetic coding sequence
  source 1..2703: mol_type = other DNA
atgaagccacccaggcctgtgaggacctgcagcaaggtgctggtgctgctgagcctgctggccatccaccagaccaccacagctgagaagaatggaattgacatctacagcctgactgtggacagccgggtgagcagcagatttgcccacacagtggtgaccagccgggtggtgaacagagccaacacagtgcaggaggccaccttccagatggagctgcccaagaaggccttcatcaccaacttctccatgatcattgatggcatgacctacccaggcatcatcaaggagaaggccgaggcccaggcccagtacagcgctgctgtggccaagggcaagtctgctggcctggtgaaggccactggaagaaacatggagcagttccaggtgtctgtgtctgtggccccaaatgccaagatcacctttgagctggtgtatgaggagctgctgaagaggcggctgggcgtgtatgagctgctgctgaaggtgcggccccagcagctggtgaagcacctgcagatggacatccacatctttgagccccagggcatctccttcctggagacagagagcaccttcatgaccaaccagctggtggatgccctgaccacctggcagaacaagaccaaggcccacatccgcttcaagcccaccctgagccagcagcagaagagccctgagcagcaggagaccgtgctggatggcaacctgatcatccgctatgatgtggaccgggccatcagcggcggcagcatccagattgaaaatggctactttgtgcactactttgcccctgagggcctgaccaccatgcccaagaatgtggtgtttgtgattgacaagagcggctccatgagcggcaggaagatccagcagacccgggaggccctgatcaagatcctggatgacctgagcccccgggaccagttcaacctgattgtgttcagcacagaggccacccagtggaggcccagcctggtgcctgccagcgcagaaaatgtgaacaaggcccggagctttgctgctggcatccaggccctgggcggcaccaacatcaatgatgccatgctgatggctgtgcagctgctggacagcagcaaccaggaggagcggctgcctgagggctctgtgtccctcatcatcctgctgacagatggagaccccaccgtgggggagaccaaccccaggagcatccagaacaacgtgcgggaggccgtgtctggccgctacagcctcttctgcctgggctttggatttgatgtgtcctatgccttcctggagaagctggccctggacaatggaggcctggcccggcgcatccacgaggacagcgacagcgccctgcagctgcaggacttctaccaggaggtggccaaccccctgctgacagctgtgacctttgagtaccccagcaatgctgtggaggaggtgacccagaacaacttccggctgctcttcaagggcagcgagatggtggtggccggcaagctgcaggaccggggcccagatgtgctgacagccaccgtgtctgggaagctgcccacccagaacatcaccttccagacagagagctctgtggccgagcaggaggccgagttccagagccccaagtacatcttccacaacttcatggagcggctgtgggcctacctgaccatccagcagctgctggagcagacagtgtctgccagtgatgctgaccagcaggccctgaggaaccaggccctgaacctgagcctggcctacagctttgtgacccccctgacctccatggtggtgaccaagccagatgaccaggagcagagccaggtggccgagaagcccatggagggggagagcaggaacagaaatgtgcacagcgctggagctgctggcagcaggatgaacttccggcctggggtgctgagcagccggcagctgggcctgcccggccccccagatgtgcctgaccacgccgcctaccaccccttccggcggctggccatcctgcctgccagcgcccccccagccaccagcaacccagaccctgctgtgtcccgggtgatgaacatgaagattgaggagaccaccatgaccacccagaccccagcccccatccaggcccccagcgccatcctgcccctgcccggccagagcgtggagcggctgtgtgtggaccccaggcaccggcagggccctgtgaacctgctgagtgaccctgagcagggcgtggaggtgacaggccagtatgagcgggagaaggccggcttctcctggattgaggtgaccttcaagaaccccctggtgtgggtgcacgccagccctgagcacgtggtggtgaccaggaacagaagaagcagcgcctacaagtggaaggagaccctcttctctgtgatgcctggcctgaagatgaccatggacaagacaggcctgctgctgctgagtgaccctgacaaggtgaccatcggcctgctcttctgggatggccgcggggagggcctgcggctgctgctgcgggacacagaccgcttcagcagccacgtgggcggcaccctgggccagttctaccaggaggtgctgtggggcagccctgctgccagtgatgatggccgccgcaccctgcgggtgcagggcaatgaccacagcgccacccgggagcggcggctggactaccaggagggccccccaggagtggagatcagctgctggagcgtggagctgtag

SEQ ID NO: 156207 - DNA, 1683 bp, synthetic construct
  misc_feature 1..1683: note = Description of Artificial Sequence: Synthetic coding sequence
  source 1..1683: mol_type = other DNA
atgacctacccaggcatcatcaaggagaaggccgaggcccaggcccagtacagcgctgctgtggccaagggcaagtctgctggcctggtgaaggccactggaagaaacatggagcagttccaggtgtctgtgtctgtggccccaaatgccaagatcacctttgagctggtgtatgaggagctgctgaagaggcggctgggcgtgtatgagctgctgctgaaggtgcggccccagcagctggtgaagcacctgcagatggacatccacatctttgagccccagggcatctccttcctggagacagagagcaccttcatgaccaaccagctggtggatgccctgaccacctggcagaacaagaccaaggcccacatccgcttcaagcccaccctgagccagcagcagaagagccctgagcagcaggagaccgtgctggatggcaacctgatcatccgctatgatgtggaccgggccatcagcggcggcagcatccagattgaaaatggctactttgtgcactactttgcccctgagggcctgaccaccatgcccaagaatgtggtgtttgtgattgacaagagcggctccatgagcggcaggaagatccagcagacccgggaggccctgatcaagatcctggatgacctgagcccccgggaccagttcaacctgattgtgttcagcacagaggccacccagtggaggcccagcctggtgcctgccagcgcagaaaatgtgaacaaggcccggagctttgctgctggcatccaggccctgggcggcaccaacatcaatgatgccatgctgatggctgtgcagctgctggacagcagcaaccaggaggagcggctgcctgagggctctgtgtccctcatcatcctgctgacagatggagaccccaccgtgggggagaccaaccccaggagcatccagaacaacgtgcgggaggccgtgtctggccgctacagcctcttctgcctgggctttggatttgatgtgtcctatgccttcctggagaagctggccctggacaatggaggcctggcccggcgcatccacgaggacagcgacagcgccctgcagctgcaggacttctaccaggaggtggccaaccccctgctgacagctgtgacctttgagtaccccagcaatgctgtggaggaggtgacccagaacaacttccggctgctcttcaagggcagcgagatggtggtggccggcaagctgcaggaccggggcccagatgtgctgacagccaccgtgtctgggaagctgcccacccagaacatcaccttccagacagagagctctgtggccgagcaggaggccgagttccagagccccaagtacatcttccacaacttcatggagcggctgtgggcctacctgaccatccagcagctgctggagcagacagtgtctgccagtgatgctgaccagcaggccctgaggaaccaggccctgaacctgagcctggcctacagctttgtgacccccctgacctccatggtggtgaccaagccagatgaccaggagcagagccaggtggccgagaagcccatggagggggagagcaggaacagaaatgtgcacagcggcagcaccttcttcaagtactacctgcagggcgccaagatccccaagccaggggacaaggtgggcggcggcggccgcggggactag

SEQ ID NO: 156208 - DNA, 2667 bp, synthetic construct
  misc_feature 1..2667: note = Description of Artificial Sequence: Synthetic coding sequence
  source 1..2667: mol_type = other DNA
atgaagccacccaggcctgtgaggacctgcagcaaggtgctggtgctgctgagcctgctggccatccaccagaccaccacagctgagaagaatggaattgacatctacagcctgactgtggacagccgggtgagcagcagatttgcccacacagtggtgaccagccgggtggtgaacagagccaacacagtgcaggaggccaccttccagatggagctgcccaagaaggccttcatcaccaacttctccatgatcattgatggcatgacctacccaggcatcatcaaggagaaggccgaggcccaggcccagtacagcgctgctgtggccaagggcaagtctgctggcctggtgaaggccactggaagaaacatggagcagttccaggtgtctgtgtctgtggccccaaatgccaagaggcggctgggcgtgtatgagctgctgctgaaggtgcggccccagcagctggtgaagcacctgcagatggacatccacatctttgagccccagggcatctccttcctggagacagagagcaccttcatgaccaaccagctggtggatgccctgaccacctggcagaacaagaccaaggcccacatccgcttcaagcccaccctgagccagcagcagaagagccctgagcagcaggagaccgtgctggatggcaacctgatcatccgctatgatgtggaccgggccatcagcggcggcagcatccagattgaaaatggctactttgtgcactactttgcccctgagggcctgaccaccatgcccaagaatgtggtgtttgtgattgacaagagcggctccatgagcggcaggaagatccagcagacccgggaggccctgatcaagatcctggatgacctgagcccccgggaccagttcaacctgattgtgttcagcacagaggccacccagtggaggcccagcctggtgcctgccagcgcagaaaatgtgaacaaggcccggagctttgctgctggcatccaggccctgggcggcaccaacatcaatgatgccatgctgatggctgtgcagctgctggacagcagcaaccaggaggagcggctgcctgagggctctgtgtccctcatcatcctgctgacagatggagaccccaccgtgggggagaccaaccccaggagcatccagaacaacgtgcgggaggccgtgtctggccgctacagcctcttctgcctgggctttggatttgatgtgtcctatgccttcctggagaagctggccctggacaatggaggcctggcccggcgcatccacgaggacagcgacagcgccctgcagctgcaggacttctaccaggaggtggccaaccccctgctgacagctgtgacctttgagtaccccagcaatgctgtggaggaggtgacccagaacaacttccggctgctcttcaagggcagcgagatggtggtggccggcaagctgcaggaccggggcccagatgtgctgacagccaccgtgtctgggaagctgcccacccagaacatcaccttccagacagagagctctgtggccgagcaggaggccgagttccagagccccaagtacatcttccacaacttcatggagcggctgtgggcctacctgaccatccagcagctgctggagcagacagtgtctgccagtgatgctgaccagcaggccctgaggaaccaggccctgaacctgagcctggcctacagctttgtgacccccctgacctccatggtggtgaccaagccagatgaccaggagcagagccaggtggccgagaagcccatggagggggagagcaggaacagaaatgtgcacagcgctggagctgctggcagcaggatgaacttccggcctggggtgctgagcagccggcagctgggcctgcccggccccccagatgtgcctgaccacgccgcctaccaccccttccggcggctggccatcctgcctgccagcgcccccccagccaccagcaacccagaccctgctgtgtcccgggtgatgaacatgaagattgaggagaccaccatgaccacccagaccccagcccccatccaggcccccagcgccatcctgcccctgcccggccagagcgtggagcggctgtgtgtggaccccaggcaccggcagggccctgtgaacctgctgagtgaccctgagcagggcgtggaggtgacaggccagtatgagcgggagaaggccggcttctcctggattgaggtgaccttcaagaaccccctggtgtgggtgcacgccagccctgagcacgtggtggtgaccaggaacagaagaagcagcgcctacaagtggaaggagaccctcttctctgtgatgcctggcctgaagatgaccatggacaagacaggcctgctgctgctgagtgaccctgacaaggtgaccatcggcctgctcttctgggatggccgcggggagggcctgcggctgctgctgcgggacacagaccgcttcagcagccacgtgggcggcaccctgggccagttctaccaggaggtgctgtggggcagccctgctgccagtgatgatggccgccgcaccctgcgggtgcagggcaatgaccacagcgccacccgggagcggcggctggactaccaggagggccccccaggagtggagatcagctgctggagcgtggagctgtag

SEQ ID NO: 156209 - DNA, 2871 bp, synthetic construct
  misc_feature 1..2871: note = Description of Artificial Sequence: Synthetic coding sequence
  source 1..2871: mol_type = other DNA
atgctgctgctgctgggcctgtgcctgggcctgagcctgtgtgtgggcagccaggaggaggcccagagctggggccacagcagcgagcaggacggcctgcgggtgccccggcaggtgcggctgctgcagaggctgaagaccaagcccctgatgacagagttctctgtgaagagcaccatcatcagccgctatgccttcaccaccgtgtcctgcaggatgctgaacagagccagcgaggaccaggacatcgagttccagatgcagatcccagctgctgccttcatcaccaacttcaccatgctgattggagacaaggtgtaccagggcgagatcacagagcgggagaagaagagcggggacagagtgaaggagaagaggaacaagaccacagaggagaatggagagaagggcacagagatcttccgggccagcgctgtgatccccagcaaggacaaggccgccttcttcctgtcctatgaggagctgctgcagaggcggctgggcaagtatgagcacagcatctctgtgcggccccagcagctgagcggccgcctgtctgtggatgtgaacatcctggagagcgctggcatcgccagcctggaggtgctgcccctgcacaacagccggcagaggggcagcggcagaggagaagatgacagcggccccccacccagcaccgtcatcaaccagaatgagacctttgccaacatcatcttcaagcccaccgtggtgcagcaggccagaattgcccagaatggcatcctgggggacttcatcatccgctatgatgtgaaccgggagcagagcatcggggacatccaggtgctgaatggctactttgtgcactactttgcccccaaggacctgccccccctgcccaagaatgtggtgtttgtgctggacagcagcgcctccatggtgggcaccaagctgcggcagaccaaggatgccctcttcaccatcctgcatgacctgcggccccaggaccgcttcagcatcatcggcttcagcaaccgcatcaaggtgtggaaggaccacctgatctctgtgaccccagacagcatcagagatggcaaggtgtacatccaccacatgagccccaccggcggcacagacatcaacggggccctgcagagggccatccggctgctgaacaagtatgtggcccacagcggcattggagacagatctgtgtccctgattgtgttcctgacagatggcaagcccaccgtgggggagacccacaccctgaagatcctgaacaacacccgggaggccgcccggggccaggtgtgcatcttcaccatcggcattggaaatgatgtggacttccggctgctggagaagctgagcctggagaactgtggcctgaccaggagagtgcatgaggaggaggatgctggcagccagctgattggcttctatgatgagatccgcacccccctgctgagtgacatcagaattgactacccacccagctctgtggtgcaggccaccaagaccctcttccccaactacttcaacggcagcgagatcatcatcgccggcaagctggtggacaggaagctggaccacctgcacgtggaggtgacagccagcaacagcaagaagttcatcatcctgaagacagatgtgcctgtgcggccccagaaggccggcaaggatgtgacaggcagccccaggcctggaggagatggagagggggacaccaaccacatcgagcggctgtggagctacctgaccaccaaggagctgctgagctcctggctgcagagtgatgatgagcctgagaaggagcggctgcggcagagggcccaggccctggccgtgtcctaccgcttcctgacccccttcacctccatgaagctgcggggccctgtgcccaggatggatggcctggaggaggcccacggcatgtctgctgccatgggccctgagcctgtggtgcagagcgtgagaggagctggcacccagcccggccccctgctgaagaagccctaccagccccgcatcaagatcagcaagacctctgtggatggagacccccactttgtggtggacttccccctgagccggctgactgtgtgcttcaacattgatggccagcccggggacatcctgcggctggtgtctgaccaccgggacagcggcgtgacagtgaatggagagctgattggagccccagccccacccaacggccacaagaagcagaggacctacctgcggaccatcaccatcctgatcaacaagccagagaggagctacctggagatcacccccagcagggtcatcctggatggaggagaccggctggtgctgccctgcaaccagagcgtggtggtgggctcctggggcctggaggtgtctgtgtctgccaatgccaacgtgacagtgaccatccagggcagcatcgccttcgtcatcctgatccacctgtacaagaagccagcccccttccagaggcaccacctgggcttctacatcgccaacagcgagggcctgagcagcaactgccacggcctgctgggccagttcctgaaccaggatgcccggctgacagaggaccctgctggccccagccagaacctgacccaccccctgctgctgcaggtgggggagggccctgaggccgtgctgactgtgaagggccaccaggtgcctgtggtgtggaagcagaggaagatctacaatggagaggagcagattgactgctggtttgccaggaacaatgctgccaagctgattgatggagagtacaaggactacctggccttccacccctttgacaccggcatggacacctggccaggaaatgtgcagggcgccctgaagctggccgccctgaagatgcaggtgcatgagggccagtag

SEQ ID NO: 156210 - DNA, 2229 bp, synthetic construct
  misc_feature 1..2229: note = Description of Artificial Sequence: Synthetic coding sequence
  source 1..2229: mol_type = other DNA
atgaggaactatgacagcggccccccacccagcaccgtcatcaaccagaatgagacctttgccaacatcatcttcaagcccaccgtggtgcagcaggccagaattgcccagaatggcatcctgggggacttcatcatccgctatgatgtgaaccgggagcagagcatcggggacatccaggtgctgaatggctactttgtgcactactttgcccccaaggacctgccccccctgcccaagaatgtggtgtttgtgctggacagcagcgcctccatggtgggcaccaagctgcggcagaccaaggatgccctcttcaccatcctgcatgacctgcggccccaggaccgcttcagcatcatcggcttcagcaaccgcatcaaggtgtggaaggaccacctgatctctgtgaccccagacagcatcagagatggcaaggtgtacatccaccacatgagccccaccggcggcacagacatcaacggggccctgcagagggccatccggctgctgaacaagtatgtggcccacagcggcattggagacagatctgtgtccctgattgtgttcctgacagatggcaagcccaccgtgggggagacccacaccctgaagatcctgaacaacacccgggaggccgcccggggccaggtgtgcatcttcaccatcggcattggaaatgatgtggacttccggctgctggagaagctgagcctggagaactgtggcctgaccaggagagtgcatgaggaggaggatgctggcagccagctgattggcttctatgatgagatccgcacccccctgctgagtgacatcagaattgactacccacccagctctgtggtgcaggccaccaagaccctcttccccaactacttcaacggcagcgagatcatcatcgccggcaagctggtggacaggaagctggaccacctgcacgtggaggtgacagccagcaacagcaagaagttcatcatcctgaagacagatgtgcctgtgcggccccagaaggccggcaaggatgtgacaggcagccccaggcctggaggagatggagagggggacaccaaccacatcgagcggctgtggagctacctgaccaccaaggagctgctgagctcctggctgcagagtgatgatgagcctgagaaggagcggctgcggcagagggcccaggccctggccgtgtcctaccgcttcctgacccccttcacctccatgaagctgcggggccctgtgcccaggatggatggcctggaggaggcccacggcatgtctgctgccatgggccctgagcctgtggtgcagagcgtgagaggagctggcacccagcccggccccctgctgaagaagccctaccagccccgcatcaagatcagcaagacctctgtggatggagacccccactttgtggtggacttccccctgagccggctgactgtgtgcttcaacattgatggccagcccggggacatcctgcggctggtgtctgaccaccgggacagcggcgtgacagtgaatggagagctgattggagccccagccccacccaacggccacaagaagcagaggacctacctgcggaccatcaccatcctgatcaacaagccagagaggagctacctggagatcacccccagcagggtcatcctggatggaggagaccggctggtgctgccctgcaaccagagcgtggtggtgggctcctggggcctggaggtgtctgtgtctgccaatgccaacgtgacagtgaccatccagggcagcatcgccttcgtcatcctgatccacctgtacaagaagccagcccccttccagaggcaccacctgggcttctacatcgccaacagcgagggcctgagcagcaactgccacggcctgctgggccagttcctgaaccaggatgcccggctgacagaggaccctgctggccccagccagaacctgacccaccccctgctgctgcaggtgggggagggccctgaggccgtgctgactgtgaagggccaccaggtgcctgtggtgtggaagcagaggaagatctacaatggagaggagcagattgactgctggtttgccaggaacaatgctgccaagctgattgatggagagtacaaggactacctggccttccacccctttgacaccggcatggacacctggccaggaaatgtgcagggcgccctgaagctggccgccctgaagatgcaggtgcatgagggccagtag

SEQ ID NO: 156211 - DNA, 2109 bp, synthetic construct
  misc_feature 1..2109: note = Description of Artificial Sequence: Synthetic coding sequence
  source 1..2109: mol_type = other DNA
atgctgctgctgctgggcctgtgcctgggcctgagcctgtgtgtgggcagccaggaggaggcccagagctggggccacagcagcgagcaggacggcctgcgggtgccccggcaggtgcggctgctgcagaggctgaagaccaagcccctgatgacagagttctctgtgaagagcaccatcatcagccgctatgccttcaccaccgtgtcctgcaggatgctgaacagagccagcgaggaccaggacatcgagttccagatgcagatcccagctgctgccttcatcaccaacttcaccatgctgattggagacaaggtgtaccagggcgagatcacagagcgggagaagaagagcggggacagagtgaaggagaagaggaacaagaccacagaggagaatggagagaagggcacagagatcttccgggccagcgctgtgatccccagcaaggacaaggccgccttcttcctgtcctatgaggagctgctgcagaggcggctgggcaagtatgagcacagcatctctgtgcggccccagcagctgagcggccgcctgtctgtggatgtgaacatcctggagagcgctggcatcgccagcctggaggtgctgcccctgcacaacagccggcagaggggcagcggcagaggagaagatgacagcggccccccacccagcaccgtcatcaaccagaatgagacctttgccaacatcatcttcaagcccaccgtggtgcagcaggccagaattgcccagaatggcatcctgggggacttcatcatccgctatgatgtgaaccgggagcagagcatcggggacatccaggtgctgaatggctactttgtgcactactttgcccccaaggacctgccccccctgcccaagaatgtggtgtttgtgctggacagcagcgcctccatggtgggcaccaagctgcggcagaccaaggatgccctcttcaccatcctgcatgacctgcggccccaggaccgcttcagcatcatcggcttcagcaaccgcatcaaggtgtggaaggaccacctgatctctgtgaccccagacagcatcagagatggcaaggtgtacatccaccacatgagccccaccggcggcacagacatcaacggggccctgcagagggccatccggctgctgaacaagtatgtggcccacagcggcattggagacagatctgtgtccctgattgtgttcctgacagatggcaagcccaccgtgggggagacccacaccctgaagatcctgaacaacacccgggaggccgcccggggccaggtgtgcatcttcaccatcggcattggaaatgatgtggacttccggctgctggagaagctgagcctggagaactgtggcctgaccaggagagtgcatgaggaggaggatgctggcagccagctgattggcttctatgatgagatccgcacccccctgctgagtgacatcagaattgactacccacccagctctgtggtgcaggccaccaagaccctcttccccaactacttcaacggcagcgagatcatcatcgccggcaagctggtggacaggaagctggaccacctgcacgtggaggtgacagccagcaacagcaagaagttcatcatcctgaagacagatgtgcctgtgcggccccagaaggccggcaaggatgtgacaggcagccccaggcctggaggagatggagagggggacaccaaccacatcgagcggctgtggagctacctgaccaccaaggagctgctgagctcctggctgcagagtgatgatgagcctgagaaggagcggctgcggcagagggcccaggccctggccgtgtcctaccgcttcctgacccccttcacctccatgaagctgcggggccctgtgcccaggatggatggcctggaggaggcccacggcatgtctgctgccatgggccctgagcctgtggtgcagagcgtgagaggagctggcacccagcccggccccctgctgaagaagccctaccagccccgcatcaagatcagcaagacctctgtgcggggcttccggcgggaggagcagatcttcagcaatgtgatgaagttcccctttgccagcatcctggagctgtag

SEQ ID NO: 156212 - DNA, 2088 bp, synthetic construct
  misc_feature 1..2088: note = Description of Artificial Sequence: Synthetic coding sequence
  source 1..2088: mol_type = other DNA
atgctgctgctgctgggcctgtgcctgggcctgagcctgtgtgtgggcagccaggaggaggcccagagctggggccacagcagcgagcaggacggcctgcgggtgccccggcaggtgcggctgctgcagaggctgaagaccaagcccctgatgacagagttctctgtgaagagcaccatcatcagccgctatgccttcaccaccgtgtcctgcaggatgctgaacagagccagcgaggaccaggacatcgagttccagatgcagatcccagctgctgccttcatcaccaacttcaccatgctgattggagacaaggtgtaccagggcgagatcacagagcgggagaagaagagcggggacagagtgaaggagaagaggaacaagaccacagaggagaatggagagaagggcacagagatcttccgggccagcgctgtgatccccagcaaggacaaggccgccttcttcctgtcctatgaggagctgctgcagaggcggctgggcaagtatgagcacagcatctctgtgcggccccagcagctgagcggccgcctgtctgtggatgtgaacatcctggagagcgctggcatcgccagcctggaggtgctgcccctgcacaacagccggcagaggggcagcggcagaggagaagatgacagcggccccccacccagcaccgtcatcaaccagaatgagacctttgccaacatcatcttcaagcccaccgtggtgcagcaggccagaattgcccagaatggcatcctgggggacttcatcatccgctatgatgtgaaccgggagcagagcatcggggacatccaggtgctgaatggctactttgtgcactactttgcccccaaggacctgccccccctgcccaagaatgtggtgtttgtgctggacagcagcgcctccatggtgggcaccaagctgcggcagaccaaggatgccctcttcaccatcctgcatgacctgcggccccaggaccgcttcagcatcatcggcttcagcaaccgcatcaaggtgtggaaggaccacctgatctctgtgaccccagacagcatcagagatggcaaggtgtacatccaccacatgagccccaccggcggcacagacatcaacggggccctgcagagggccatccggctgctgaacaagtatgtggcccacagcggcattggagacagatctgtgtccctgattgtgttcctgacagatggcaagcccaccgtgggggagacccacaccctgaagatcctgaacaacacccgggaggccgcccggggccaggtgtgcatcttcaccatcggcattggaaatgatgtggacttccggctgctggagaagctgagcctggagaactgtggcctgaccaggagagtgcatgaggaggaggatgctggcagccagctgattggcttctatgatgagatccgcacccccctgctgagtgacatcagaattgactacccacccagctctgtggtgcaggccaccaagaccctcttccccaactacttcaacggcagcgagatcatcatcgccggcaagctggtggacaggaagctggaccacctgcacgtggaggtgacagccagcaacagcaagaagttcatcatcctgaagacagatgtgcctgtgcggccccagaaggccggcaaggatgtgacaggcagccccaggcctggaggagatggagagggggacaccaaccacatcgagcggctgtggagctacctgaccaccaaggagctgctgagctcctggctgcagagtgatgatgagcctgagaaggagcggctgcggcagagggcccaggccctggccgtgtcctaccgcttcctgacccccttcacctccatgaagctgcggggccctgtgcccaggatggatggcctggaggaggcccacggcatgtctgctgccatgggccctgagcctgtggtgcagagcgtgagaggagctggcacccagcccggccccctgctgaagaagccacccaacagcgtgaagaagaagcagaacaagaccaagaagagacatggaagagatggagtcttccccctgcaccacctgggcatcagatag

SEQ ID NO: 156213 - DNA, 2172 bp, synthetic construct
  misc_feature 1..2172: note = Description of Artificial Sequence: Synthetic coding sequence
  source 1..2172: mol_type = other DNA
gacagcggccccccacccagcaccgtcatcaaccagaatgagacctttgccaacatcatcttcaagcccaccgtggtgcagcaggccagaattgcccagaatggcatcctgggggacttcatcatccgctatgatgtgaaccgggagcagagcatcggggacatccaggtgctgaatggctactttgtgcactactttgcccccaaggacctgccccccctgcccaagaatgtggtgtttgtgctggacagcagcgcctccatggtgggcaccaagctgcggcagaccaaggatgccctcttcaccatcctgcatgacctgcggccccaggaccgcttcagcatcatcggcttcagcaaccgcatcaaggtgtggaaggaccacctgatctctgtgaccccagacagcatcagagatggcaaggtgtacatccaccacatgagccccaccggcggcacagacatcaacggggccctgcagagggccatccggctgctgaacaagtatgtggcccacagcggcattggagacagatctgtgtccctgattgtgttcctgacagatggcaagcccaccgtgggggagacccacaccctgaagatcctgaacaacacccgggaggccgcccggggccaggtgtgcatcttcaccatcggcattggaaatgatgtggacttccggctgctggagaagctgagcctggagaactgtggcctgaccaggagagtgcatgaggaggaggatgctggcagccagctgattggcttctatgatgagatccgcacccccctgctgagtgacatcagaattgactacccacccagctctgtggtgcaggccaccaagaccctcttccccaactacttcaacggcagcgagatcatcatcgccggcaagctggtggacaggaagctggaccacctgcacgtggaggtgacagccagcaacagcaagaagttcatcatcctgaagacagatgtgcctgtgcggccccagaaggccggcaaggatgtgacaggcagccccaggcctggaggagatggagagggggacaccaaccacatcgagcggctgtggagctacctgaccaccaaggagctgctgagctcctggctgcagagtgatgatgagcctgagaaggagcggctgcggcagagggcccaggccctggccgtgtcctaccgcttcctgacccccttcacctccatgaagctgcggggccctgtgcccaggatggatggcctggaggaggcccacggcatgtctgctgccatgggccctgagcctgtggtgcagagcgtgagaggagctggcacccagcccggccccctgctgaagaagccctaccagccccgcatcaagatcagcaagacctctgtggatggagacccccactttgtggtggacttccccctgagccggctgactgtgtgcttcaacattgatggccagcccggggacatcctgcggctggtgtctgaccaccgggacagcggcgtgacagtgaatggagagctgattggagccccagccccacccaacggccacaagaagcagaggacctacctgcggaccatcaccatcctgatcaacaagccagagaggagctacctggagatcacccccagcagggtcatcctggatggaggagaccggctggtgctgccctgcaaccagagcgtggtggtgggctcctggggcctggaggtgtctgtgtctgccaatgccaacgtgacagtgaccatccagggcagcatcgccttcgtcatcctgatccacctgtacaagaagccagcccccttccagaggcaccacctgggcttctacatcgccaacagcgagggcctgagcagcaactgccacggcctgctgggccagttcctgaaccaggatgcccggctgacagaggaccctgctggccccagccagaacctgacccaccccctgctgctgcaggtgggggagggccctgaggccgtgctgactgtgaagggccaccaggtgcctgtggtgtggaagcagaggaagatctacaatggagaggagcagattgactgctggtttgccaggaacaatgctgccaagctgattgatggagagtacaaggactacctggccttccacccctttgacaccggcatgctgggccggggcatgagccgggagctgtag

SEQ ID NO: 156214 - DNA, 1599 bp, synthetic construct
  misc_feature 1..1599: note = Description of Artificial Sequence: Synthetic coding sequence
  source 1..1599: mol_type = other DNA
atggcccccagcagccccaggcctgccctgcctgccctgctggtgctgctgggcgccctcttccctggccctggaaatgcccagacctctgtgagccccagcaaggtgatcctgccccggggcggctctgtgctggtgacctgcagcaccagctgtgaccagcccaagctgctgggcatcgagacccccctgcccaagaaggagctgctgctgcccggcaacaacaggaaggtgtatgagctgagcaatgtgcaggaggacagccagcccatgtgctacagcaactgcccagatggccagagcacagccaagaccttcctgactgtgtactggaccccagagcgggtggagctggcccccctgcccagctggcagcctgtgggcaagaacctgaccctgcgctgccaggtggagggcggggccccccgggccaacctgactgtggtgctgctgcggggggagaaggagctgaagcgggagcctgctgtgggggagcctgctgaggtgaccaccaccgtgctggtgcggcgggaccaccacggggccaacttcagctgcaggacagagctggacctgcggccccagggcctggagctgtttgagaacaccagcgccccctaccagctgcagacctttgtgctgcctgccaccccaccccagctggtgagcccccgggtgctggaggtggacacccagggcaccgtggtgtgcagcctggatggcctcttccctgtgtctgaggcccaggtgcacctggccctgggggaccagaggctgaaccccaccgtgacctatggaaatgacagcttcagcgccaaggcctctgtgtctgtgacagcagaagatgagggcacccagaggctgacctgtgctgtgatcctgggcaaccagagccaggagaccctgcagacagtgaccatctacagcttccctgcccccaacgtcatcctgaccaagccagaggtgtctgagggcacagaggtgacagtgaagtgtgaggcccacccccgggccaaggtgaccctgaatggagtgcctgcccagcccctgggcccccgggcccagctgctgctgaaggccaccccagaagataatggccgctccttcagctgcagcgccaccctggaggtggccggccagctgatccacaagaaccagacccgggagctgcgggtgctgtatggcccccggctggatgagcgggactgccccggcaactggacctggccagagaacagccagcagacccccatgtgccaggcctggggcaaccccctgcctgagctgaagtgcctgaaggatggcaccttccccctgcccatcggggagagcgtgacagtgacccgggacctggagggcacctacctgtgccgggcccggagcacccagggcgaggtgaccaggaaggtgacagtgaatgtgctgagccccaggtatgaaattgtcatcatcaccgtggtggccgccgccgtcatcatgggcacagctggcctgagcacctacctgtacaaccggcagaggaagatcaagaagtaccgcctgcagcaggcccagaagggcacccccatgaagcccaacacccaggccaccccaccctag

SEQ ID NO: 156215 - DNA, 933 bp, synthetic construct
  misc_feature 1..933: note = Description of Artificial Sequence: Synthetic coding sequence
  source 1..933: mol_type = other DNA
atggcccccagcagccccaggcctgccctgcctgccctgctggtgctgctgggcgccctcttccctgtgtctgaggcccaggtgcacctggccctgggggaccagaggctgaaccccaccgtgacctatggaaatgacagcttcagcgccaaggcctctgtgtctgtgacagcagaagatgagggcacccagaggctgacctgtgctgtgatcctgggcaaccagagccaggagaccctgcagacagtgaccatctacagcttccctgcccccaacgtcatcctgaccaagccagaggtgtctgagggcacagaggtgacagtgaagtgtgaggcccacccccgggccaaggtgaccctgaatggagtgcctgcccagcccctgggcccccgggcccagctgctgctgaaggccaccccagaagataatggccgctccttcagctgcagcgccaccctggaggtggccggccagctgatccacaagaaccagacccgggagctgcgggtgctgtatggcccccggctggatgagcgggactgccccggcaactggacctggccagagaacagccagcagacccccatgtgccaggcctggggcaaccccctgcctgagctgaagtgcctgaaggatggcaccttccccctgcccatcggggagagcgtgacagtgacccgggacctggagggcacctacctgtgccgggcccggagcacccagggcgaggtgaccaggaaggtgacagtgaatgtgctgagccccaggtatgaaattgtcatcatcaccgtggtggccgccgccgtcatcatgggcacagctggcctgagcacctacctgtacaaccggcagaggaagatcaagaagtaccgcctgcagcaggcccagaagggcacccccatgaagcccaacacccaggccaccccaccctag

SEQ ID NO: 156216 - DNA, 828 bp, synthetic construct
  misc_feature 1..828: note = Description of Artificial Sequence: Synthetic coding sequence
  source 1..828: mol_type = other DNA
atgagcagctttggctaccgcaccctgactgtggccctcttcaccctcatctgctgccccggcagtgatgagaaggtgtttgaggtgcacgtgcggcccaagaagctggccgtggagcccaagggcagcctggaggtgaactgcagcaccacctgcaaccagcctgaggtgggcggcctggagaccagcctggacaagatcctgctggatgagcaggcccagtggaagcactacctggtgagcaacatcagccatgacacagtgctgcagtgccacttcacctgcagcggcaagcaggagagcatgaacagcaatgtgtctgtgtaccagcccccccggcaggtgatcctgaccctgcagcccaccctggtggccgtgggcaagagcttcaccattgaatgtcgggtgcccaccgtggagcccctggacagcctgaccctcttcctgttcagaggaaatgagaccctgcactatgagaccttcggcaaggccgccccagccccccaggaggccacagccaccttcaacagcacagctgaccgggaggatggccacaggaacttcagctgcctggccgtgctggacctgatgagccggggcggcaacatcttccacaagcacagcgcccccaagatgctggagatctatgagcctgtgtctgacagccagatggtgatcatcgtgacagtggtgtctgtgctgctgagcctgtttgtgacctctgtgctgctgtgcttcatcttcggccagcacctgcggcagcagaggatgggcacctacggcgtgcgggccgcctggaggcggctgccccaggccttccggccctag

SEQ ID NO: 156217 - DNA, 828 bp, synthetic construct; identical to SEQ ID NO: 156216
  misc_feature 1..828: note = Description of Artificial Sequence: Synthetic coding sequence
  source 1..828: mol_type = other DNA

SEQ ID NO: 156218 - DNA, 828 bp, synthetic construct; identical to SEQ ID NO: 156216
  misc_feature 1..828: note = Description of Artificial Sequence: Synthetic coding sequence
  source 1..828: mol_type = other DNA

SEQ ID NO: 156219 - DNA, 828 bp, synthetic construct; identical to SEQ ID NO: 156216
  misc_feature 1..828: note = Description of Artificial Sequence: Synthetic coding sequence
  source 1..828: mol_type = other DNA

SEQ ID NO: 156220 - DNA, 828 bp, synthetic construct; identical to SEQ ID NO: 156216
  misc_feature 1..828: note = Description of Artificial Sequence: Synthetic coding sequence
  source 1..828: mol_type = other DNA

SEQ ID NO: 156221 - DNA, 1644 bp, synthetic construct
  misc_feature 1..1644: note = Description of Artificial Sequence: Synthetic coding sequence
  source 1..1644: mol_type = other DNA
atggccaccatggtgcccagcgtgctgtggccccgggcctgctggaccctgctggtgtgctgcctgctgaccccaggagtgcagggccaggagttcctgctgcgggtggagccccagaaccctgtgctgtctgctgggggcagcctgtttgtgaactgcagcacagactgccccagcagcgagaagatcgccctggagaccagcctgagcaaggagctggtggccagcggcatgggctgggccgccttcaacctgagcaatgtgactggaaacagccgcatcctgtgcagcgtgtactgcaatggcagccagatcaccggcagcagcaacatcaccgtgtaccgcctgcctgagcgggtggagctggcccccctgcccccctggcagcctgtgggccagaacttcaccctgcgctgccaggtggaggatggcagccccaggaccagcctgactgtggtgctgctgcgctgggaggaggagctgagccggcagcctgctgtggaggagcctgctgaggtgacagccaccgtgctggccagcagagatgaccacggggcccccttcagctgcaggacagagctggacatgcagccccagggcctgggcctgtttgtgaacaccagcgccccccggcagctgcggacctttgtgctgcctgtgaccccaccccggctggtggccccccgcttcctggaggtggagacctcctggcctgtggactgcaccctggatggcctcttccctgccagcgaggcccaggtgtacctggccctgggggaccagatgctgaatgccaccgtgatgaaccacggggacaccctgacagccacagccacagccacagcccgggctgaccaggagggcgcccgggagatcgtgtgcaatgtgaccctgggcggggagcggcgggaggcccgggagaacctgaccgtcttctccttcctgggccccatcgtgaacctgtctgagcccacagcccacgagggcagcacagtgacagtgtcctgcatggccggggcccgggtgcaggtgaccctggatggagtgcctgctgctgcccctggccagcctgcccagctgcagctgaatgccacagaaagtgatgatggccgctccttcttctgcagcgccaccctggaggtggatggagagttcctgcacaggaacagctctgtgcagctgcgggtgctgtatggccccaagattgaccgggccacctgcccccagcacctgaagtggaaggacaagaccaggcatgtgctgcagtgccaggcccggggcaacccctacccagagctgcgctgcctgaaggagggcagcagccgggaggtgcctgtgggcatccccttctttgtgaatgtgacccacaacggcacctaccagtgccaggccagcagcagccggggcaagtacaccctggtggtggtgatggacattgaagctggcagcagccactttgtgcctgtgtttgtggccgtgctgctgaccctgggcgtggtgaccatcgtgctggccctgatgtatgtgttccgggagcaccagaggagcggcagctaccacgtgcgggaggagagcacctacctgcccctgacctccatgcagcccacagaggccatgggagaggagcccagcagagctgagtag

SEQ ID NO: 156222 - DNA, 819 bp, synthetic construct
  misc_feature 1..819: note = Description of Artificial Sequence: Synthetic coding sequence
  source 1..819: mol_type = other DNA
atgggcagcctcttccccctgagcctgctcttcttcctggccgccgcctacccaggagtgggcagcgccctgggccgccgcaccaagagggcccagagccccaagggcagccccctggcccccagcggcacctctgtgcccttctgggtgaggatgagccctgagtttgtggccgtgcagcccgggaagtctgtgcagctgaactgcagcaacagctgcccccagccccagaacagcagcctgcggacccccctgcggcagggcaagaccctgcggggccctggctgggtgtcctaccagctgctggatgtgcgggcctggagcagcctggcccactgcctggtgacctgtgccggcaagacccgctgggccaccagccgcatcacagcctacagcgtgcctgggggcctgctgggcggggaccctgaggcctggaagccaggccacctgttcaggaagccaggggccctgcaccggcccggcagcggccagagggacctggacctgcgggtgtgctgctggaccccccggctgctggccgcccgggacctgccccgggccccccagagcagaagacctgggggcccccagcagctgggcacccactacacagatgcccggctggagccccgggcccacagctttggcctgcgcttccaccgctgcccctgccgggaccccccccactgcggccgctgtgtgcccatgcaggtgcccagctatgaggtgcctggggtgaagggagatgtgctgtgccgcctgtctgagaagaagaggaacatgaagcagagcggggagatggccatccacggcggctag

SEQ ID NO: 156223 - DNA, 816 bp, synthetic construct
  misc_feature 1..816: note = Description of Artificial Sequence: Synthetic coding sequence
  source 1..816: mol_type = other DNA
atgggcagcctcttccccctgagcctgctcttcttcctggccgccgcctacccaggagtgggcagcgccctgggccgccgcaccaagagggcccagagccccaagggcagccccctggcccccagcggcacctctgtgcccttctgggtgaggatgagccctgagtttgtggccgtgcagcccgggaagtctgtgcagctgaactgcagcaacagctgcccccagccccagaacagcagcctgcggacccccctgcggcagggcaagaccctgcggggccctggctgggtgtcctaccagctgctggatgtgcgggcctggagcagcctggcccactgcctggtgacctgtgccggcaagacccgctgggccaccagccgcatcacagcctacaagccaccccacagcgtcatcctggagccccctgtgctgaagggcaggaagtacaccctgcgctgccacgtgacccaggtgtttcctgtgggctacctggtggtgaccctgcggcacggcagcagggtcatctacagcgagagcctggagcgcttcaccggcctggacctggccaacgtgaccctgacctatgaatttgctgctggcccccgggacttctggcagcctgtgatctgccacgcccggctgaacctggatggcctggtggtgaggaacagcagcgcccccatcaccctgatgctggcctggagccctgcccccacagccctggccagcggcagcattgctgccctggtgggcatcctgctgactgtgggcgccgcctacctgtgcaagtgcctggccatgaagagccaggcctag

SEQ ID NO: 156224 - DNA, 714 bp, synthetic construct
  misc_feature 1..714: note = Description of Artificial Sequence: Synthetic coding sequence
  source 1..714: mol_type = other DNA
atgggcagcctcttccccctgagcctgctcttcttcctggccgccgcctacccaggagtgggcagcgccctgggccgccgcaccaagagggcccagagccccaagggcagccccctggcccccagcggcacctctgtgcccttctgggtgaggatgagccctgagtttgtggccgtgcagcccgggaagtctgtgcagctgaactgcagcaacagctgcccccagccccagaacagcagcctgcggacccccctgcggcagggcaagaccctgcggggccctggctgggtgtcctaccagctgctggatgtgcgggcctggagcagcctggcccactgcctggtgacctgtgccggcaagacccgctgggccaccagccgcatcacagcctacaagccaccccacagcgtcatcctggagccccctgtgctgaagggcaggaagtacaccctgcgctgccacgtgacccaggtgtttcctgtgggctacctggtggtgaccctgcggcacggcagcagggtcatctacagcgagagcctggagcgcttcaccggcctggacctggccaacgtgaccctgacctatgaatttgctgctggcccccgggacttctggcagcctgtgatctgccacgcccggctgaacctggatggcctggtggtgaggaacagcagcgcccccatcaccctgatgctgggggaggcccccctgtag

SEQ ID NO: 156225 - DNA, 498 bp, synthetic construct
  misc_feature 1..498: note = Description of Artificial Sequence: Synthetic coding sequence
  source 1..498: mol_type = other DNA
atggagctgtgccgcagcctggccctgctgggcggcagcctgggcctgatgttctgcctgattgccctgagcacagacttctggtttgaagctgtgggccccacccacagcgcccacagcggcctgtggcccactggacatggagacatcatcagcggctacatccacgtgacccagaccttcagcatcatggctgtgctgtgggccctggtgtctgtgtccttcctggtgctgagctgcttccccagcctcttccccccaggccacggccccctggtgtccaccacagctgcctttgctgctgccatctccatggtggtggccatggctgtgtacaccagcgagcgctgggaccagcccccccacccccagatccagaccttcttctcctggagcttctacctgggctgggtgtctgccatcctgctgctgtgcaccggggccctgagcctgggcgcccactgcggcggcccccggcccggctatgagaccctgtag

SEQ ID NO: 156226 - DNA, 1674 bp, synthetic construct
  misc_feature 1..1674: note = Description of Artificial Sequence: Synthetic coding sequence
  source 1..1674: mol_type = other DNA
atgatggtggtgctgctgggcgccaccaccctggtgctggtggccgtggccccctgggtgctgtctgctgctgctgggggcaagaacctgaagagcccccagaaggtggaggtggacatcattgatgacaacttcatcctgcgctggaacagaagtgatgaatctgtgggcaatgtgaccttctcctttgactaccagaagacaggcatggacaactggatcaagctgagcggctgccagaacatcaccagcaccaagtgcaacttcagcagcctgaagctgaatgtgtatgaggagatcaagctgcgcatccgggcagagaaggagaacaccagctcctggtatgaggtggacagcttcacccccttcaggaaggcccagatcggccccccagaggtgcacctggaggccgaggacaaggccatcgtcatccacatcagccctggcaccaaggacagcgtgatgtgggccctggatggcctgtccttcacctacagcctggtgatctggaagaacagcagcggcgtggaggagagaattgagaacatctacagccgccacaagatctacaagctgagccctgagaccacctactgcctgaaggtgaaggccgccctgctgacctcctggaagattggagtgtacagccctgtgcactgcatcaagaccaccgtggagaatgagctgcccccaccagaaaatattgaggtgtctgtgcagaaccagaactacgtgctgaagtgggactacacctacgccaacatgaccttccaggtgcagtggctgcacgccttcctgaagaggaaccctggcaaccacctgtacaagtggaagcagatcccagactgtgaaaatgtgaagaccacccagtgtgtgttcccccagaatgtgttccagaagggcatctacctgctgcgggtgcaggccagtgatggcaacaacaccagcttctggagcgaggagatcaagtttgacacagagatccaggccttcctgctgccccctgtgttcaacatccgcagcctgagtgacagcttccacatctacatcggggcccccaagcagagcggcaacacccctgtgatccaggactaccccctcatctatgagatcatcttctgggagaacaccagcaatgctgagaggaagatcatcgagaagaagacagatgtgacagtgcccaacctgaagcccctgactgtgtactgtgtgaaggcccgggcccacaccatggatgagaagctgaacaagagctctgtgttcagtgatgctgtgtgtgagaagaccaagccaggcaacaccagcaagatctggctgattgtgggcatctgcatcgccctgtttgccctgcccttcgtcatctatgctgccaaggtgttcctgcgctgcatcaactacgtgttcttccccagcctgaagcccagcagcagcattgatgagtacttcagcgagcagcccctgaagaacctgctgctgagcaccagcgaggagcagatcgagaagtgcttcatcatcgagaacatcagcaccatcgccaccgtggaggagaccaaccagacagatgaggaccacaagaagtacagcagccagaccagccaggacagcggcaactacagcaatgaagatgagagcgagagcaagaccagcgaggagctgcagcaggactttgtgtag

SEQ ID NO: 156227 - DNA, 1467 bp, synthetic construct
  misc_feature 1..1467: note = Description of Artificial Sequence: Synthetic coding sequence
  source 1..1467: mol_type = other DNA
atggacaactggatcaagctgagcggctgccagaacatcaccagcaccaagtgcaacttcagcagcctgaagctgaatgtgtatgaggagatcaagctgcgcatccgggcagagaaggagaacaccagctcctggtatgaggtggacagcttcacccccttcaggaaggcccagatcggccccccagaggtgcacctggaggccgaggacaaggccatcgtcatccacatcagccctggcaccaaggacagcgtgatgtgggccctggatggcctgtccttcacctacagcctggtgatctggaagaacagcagtggagtggaggagagaattgagaacatctacagccgccacaagatctacaagctgagccctgagaccacctactgcctgaaggtgaaggccgccctgctgacctcctggaagattggagtgtacagccctgtgcactgcatcaagaccaccgtggagaatgagctgcccccacctgagaacatcgaggtgtctgtgcagaaccagaactacgtgctgaagtgggactacacctacgccaacatgaccttccaggtgcagtggctgcacgccttcctgaagagaaatcctggcaaccacctgtacaagtggaagcagatcccagactgtgaaaatgtgaagaccacccagtgtgtgttcccccagaatgtgttccagaagggcatctacctgctgcgggtgcaggccagtgatggcaacaacaccagcttctggagcgaggagatcaagtttgacacagagatccaggccttcctgctgccccctgtgttcaacatccgcagcctgagtgacagcttccacatctacatcggggcccccaagcagagcggcaacacccctgtgatccaggactaccccctcatctatgagatcatcttctgggagaacaccagcaatgctgagaggaagatcatcgagaagaagacagatgtgacagtgcccaacctgaagcccctgactgtgtactgtgtgaaggcccgggcccacaccatggatgagaagctgaacaagagcagcgtcttcagtgatgctgtgtgtgagaagaccaagccaggcaacaccagcaagatctggctgattgtgggcatctgcatcgccctgtttgccctgccctttgtgatctatgctgccaaggtgttcctgcgctgcatcaactacgtgttcttccccagcctgaagcccagcagcagcattgatgagtacttcagcgagcagcccctgaagaacctgctgctgagcaccagcgaggagcagatcgagaagtgcttcatcatcgagaacatcagcaccatcgccaccgtggaggagaccaaccagacagatgaggaccacaagaagtacagcagccagaccagccaggacagcggcaactacagcaatgaagatgaaagtgagagcaagaccagcgaggagctgcagcaggactttgtgtag

SEQ ID NO: 156228 - DNA, 1491 bp, synthetic construct
  misc_feature 1..1491: note = Description of Artificial Sequence: Synthetic coding sequence
  source 1..1491: mol_type = other DNA
atgatggtggtgctgctgggcgccaccaccctggtgctggtggccgtggccccctgggtgctgtctgctgctgctgggggcaagaacctgaagagcccccagaaggtggaggtggacatcattgatgacaacttcatcctgcgctggaacagaagtgatgaatctgtgggcaatgtgaccttctcctttgactaccagaagacaggcatggacaactggatcaagctgagcggctgccagaacatcaccagcaccaagtgcaacttcagcagcctgaagctgaatgtgtatgaggagatcaagctgcgcatccgggcagagaaggagaacaccagctcctggtatgaggtggacagcttcacccccttcaggaaggcccagatcggccccccagaggtgcacctggaggccgaggacaaggccatcgtcatccacatcagccctggcaccaaggacagcgtgatgtgggccctggatggcctgtccttcacctacagcctggtgatctggaagaacagcagcggcgtggaggagagaattgagaacatctacagccgccacaagatctacaagctgagccctgagaccacctactgcctgaaggtgaaggccgccctgctgacctcctggaagattggagtgtacagccctgtgcactgcatcaagaccaccgtggagaatgagctgcccccaccagaaaatattgaggtgtctgtgcagaaccagaactacgtgctgaagtgggactacacctacgccaacatgaccttccaggtgcagtggctgcacgccttcctgaagaggaaccctggcaaccacctgtacaagtggaagcagatcccagactgtgaaaatgtgaagaccacccagtgtgtgttcccccagaatgtgttccagaagggcatctacctgctgcgggtgcaggccagtgatggcaacaacaccagcttctggagcgaggagatcaagtttgacacagagatccaggccttcctgctgccccctgtgttcaacatccgcagcctgagtgacagcttccacatctacatcggggcccccaagcagagcggcaacacccctgtgatccaggactaccccctcatctatgagatcatcttctgggagaacaccagcaatgctgagaggaagatcatcgagaagaagacagatgtgacagtgcccaacctgaagcccctgactgtgtactgtgtgaaggcccgggcccacaccatggatgaaaatgatgctgtgtgtgagtacttcagcgagcagcccctgaagaacctgctgctgagcaccagcgaggagcagatcgagaagtgcttcatcatcgagaacatcagcaccatcgccaccgtggaggagaccaaccagacagatgaggaccacaagaagtacagcagccagaccagccaggacagcggcaactacagcaatgaagatgaaagtgagagcaagaccagcgaggagctgcagcaggactttgtgtag

SEQ ID NO: 156229 - DNA, 1548 bp, synthetic construct
  misc_feature 1..1548: note = Description of Artificial Sequence: Synthetic coding sequence
  source 1..1548: mol_type = other DNA
atgctgctgagccagaatgccttcatcttccgcagcctgaacctggtgctgatggtgtacatcagcctggtgtttggcatctcctatgacagcccagactacacagatgagagctgcaccttcaagatcagcctgaggaacttccgcagcatcctgtcctgggagctgaagaaccacagcatcgtgcccacccactacaccctgctgtacaccatcatgagcaagccagaggacctgaaggtggtgaagaactgtgccaacaccaccaggagcttctgtgacctgacagatgagtggaggagcacccatgaggcctacgtgacagtgctggagggcttcagcggcaacaccaccctcttcagctgcagccacaacttctggctggccatcgacatgagctttgagcccccagagtttgaaattgtgggcttcaccaaccacatcaacgtgatggtgaagttccccagcatcgtggaggaggagctgcagtttgacctgagcctggtgattgaggagcagagcgagggcatcgtgaagaagcacaagccagagatcaagggcaacatgagcggcaacttcacctacatcatcgacaagctgatccccaacaccaactactgtgtgtctgtgtacctggagcacagtgatgagcaggccgtcatcaagagccccctgaagtgcaccctgctgcccccaggccaggagagcgagagcgctgagagcgccaagattggaggcatcatcaccgtcttcctgattgccctggtgctgaccagcaccatcgtgaccctgaagtggattggctacatctgcctgaggaacagcctgcccaaggtgctgaacttccacaacttcctggcctggcccttccccaacctgccccccctggaggccatggacatggtggaggtgatctacatcaacaggaagaagaaggtgtgggactacaactatgatgatgaaagtgacagcgacacagaggccgcccccaggaccagcggcggcggctacaccatgcacggcctgactgtgcggcccctgggccaggccagcgccaccagcacagagagccagctgattgatcctgagagcgaggaggagccagacctgcctgaggtggatgtggagctgcccaccatgcccaaggacagcccccagcagctggagctgctgagcggcccctgtgaaagaaggaagagccccctgcaggaccccttccctgaggaggactacagcagcacagagggcagcggcggccgcatcaccttcaacgtggacctgaacagcgtcttcctgcgggtgctggatgatgaggacagtgatgacctggaggcccccctgatgctgagcagccacctggaggagatggtggaccctgaggaccctgacaacgtgcagagcaaccacctgctggccagcggggagggcacccagcccaccttccccagccccagcagcgagggcctgtggagcgaagatgcccccagcgaccagagcgacaccagcgagagtgatgtggacctgggagatggctacatcatgaggtag

SEQ ID NO: 156230 - DNA, 1548 bp, synthetic construct; identical to SEQ ID NO: 156229
  misc_feature 1..1548: note = Description of Artificial Sequence: Synthetic coding sequence
  source 1..1548: mol_type = other DNA

SEQ ID NO: 156231 - DNA, 996 bp, synthetic construct
  misc_feature 1..996: note = Description of Artificial Sequence: Synthetic coding sequence
  source 1..996: mol_type = other DNA
atgctgctgagccagaatgccttcatcttccgcagcctgaacctggtgctgatggtgtacatcagcctggtgtttggcatctcctatgacagcccagactacacagatgagagctgcaccttcaagatcagcctgaggaacttccgcagcatcctgtcctgggagctgaagaaccacagcatcgtgcccacccactacaccctgctgtacaccatcatgagcaagccagaggacctgaaggtggtgaagaactgtgccaacaccaccaggagcttctgtgacctgacagatgagtggaggagcacccatgaggcctacgtgacagtgctggagggcttcagcggcaacaccaccctcttcagctgcagccacaacttctggctggccatcgacatgagctttgagcccccagagtttgaaattgtgggcttcaccaaccacatcaacgtgatggtgaagttccccagcatcgtggaggaggagctgcagtttgacctgagcctggtgattgaggagcagagcgagggcatcgtgaagaagcacaagccagagatcaagggcaacatgagcggcaacttcacctacatcatcgacaagctgatccccaacaccaactactgtgtgtctgtgtacctggagcacagtgatgagcaggccgtcatcaagagccccctgaagtgcaccctgctgcccccaggccaggagagcgagagcgctgagagcgccaagattggaggcatcatcaccgtcttcctgattgccctggtgctgaccagcaccatcgtgaccctgaagtggattggctacatctgcctgaggaacagcctgcccaaggtgctgcggcagggcctggccaagggctggaatgctgtggccatccaccgctgcagccacaatgccctgcagagcgagaccccagagctgaagcagagcagctgcctgtccttccccagctcctgggactacaagagggccagcctgtgccccagcgactag

SEQ ID NO: 156232 - DNA, 996 bp, synthetic construct; identical to SEQ ID NO: 156231
  misc_feature 1..996: note = Description of Artificial Sequence: Synthetic coding sequence
  source 1..996: mol_type = other DNA

SEQ ID NO: 156233 - DNA, 561 bp, synthetic construct
  misc_feature 1..561: note = Description of Artificial Sequence: Synthetic coding sequence
  source 1..561: mol_type = other DNA
atgctgctgaagagccctgagaacagcctgctgcagttccagttcaagtatggagtgcccacccccaccaacgtgaccatcgagagctacaacatgaaccccatcgtgtactgggagtaccagatcatgccccaggtgcctgtgttcaccgtggaggtgaagaactacggcgtgaagaacagcgagtggattgatgcctgcatcaacatcagccaccactactgcaacatcagtgaccacgtgggggaccccagcaacagcctgtgggtgcgggtgaaggcccgggtgggccagaaggagagcgcctatgccaagtctgaggagtttgctgtgtgcagagatggcaagattggcccccccaagctggacatcaggaaggaggagaagcagatcatgattgacatcttccaccccagcgtgtttgtgaatggagatgagcaggaggtggactatgaccctgagaccacctgctacatccgggtgtacaacgtgtatgtgaggatgaatggaagtgagatcaagaggagctgtgccttcagcctcttctccttcttcatctag

SEQ ID NO: 156234 - DNA, 1470 bp, synthetic construct
  misc_feature 1..1470: note = Description of Artificial Sequence: Synthetic coding sequence
  source 1..1470: mol_type = other DNA
atggccctgctcttcctgctgcccctggtgatgcagggcgtgtccagagctgagatgggcacagctgacctgggccccagctctgtgcccacccccaccaacgtgaccatcgagagctacaacatgaaccccatcgtgtactgggagtaccagatcatgccccaggtgcctgtgttcaccgtggaggtgaagaactacggcgtgaagaacagcgagtggattgatgcctgcatcaacatcagccaccactactgcaacatcagtgaccacgtgggggaccccagcaacagcctgtgggtgcgggtgaaggcccgggtgggccagaaggagagcgcctatgccaagtctgaggagtttgctgtgtgcagagatggcaagattggcccccccaagctggacatcaggaaggaggagaagcagatcatgattgacatcttccaccccagcgtgtttgtgaatggagatgagcaggaggtggactatgaccctgagaccacctgctacatccgggtgtacaacgtgtatgtgaggatgaatggaagtgagatccagtacaagatcctgacccagaaggaggatgactgtgatgagatccagtgccagctggccatccctgtgagcagcctgaacagccagtactgtgtgtctgctgagggcgtgctgcacgtgtggggcgtgaccacagagaagagcaaggaggtgtgcatcaccatcttcaacagcagcatcaagggcagcctgtggatccctgtggtggccgccctgctgctcttcctggtgctgagcctggtgttcatctgcttctacatcaagaagatcaaccccctgaaggagaagagcatcatcctgcccaagagcctcatctctgtggtgcgcagcgccaccctggagaccaagccagagagcaaatatgtgtccctcatcaccagctaccagcccttcagcctggagaaggaggtggtgtgtgaggagcccctgagccctgccaccgtgcccggcatgcacacagaggacaaccctgggaaggtggagcacacagaggagctgagcagcatcacagaggtggtgaccacagaggagaacatcccagatgtggtgcccggcagccacctgacccccatcgagcgggagagcagcagccccctgagcagcaaccagagcgagcccggcagcatcgccctgaacagctaccacagcaggaactgcagcgagagtgaccacagcagaaatggatttgacacagacagcagctgcctggagagccacagcagcctgagtgacagcgagttcccccccaacaacaagggggagatcaagacagagggccaggagctgatcaccgtcatcaaggcccccaccagctttggctatgacaagccccacgtgctggtggacctgctggtggatgattctgggaaggagagcctgattggctaccggcccacagaggacagcaaggagttctcctag

SEQ ID NO: 156235 - DNA, 486 bp, synthetic construct
  misc_feature 1..486: note = Description of Artificial Sequence: Synthetic coding sequence
  source 1..486: mol_type = other DNA
atgctgctgaagagccctgagaacagcctgctgcagttccagttcaagtatggagtgcccacccccaccaacgtgaccatcgagagctacaacatgaaccccatcgtgtactgggagtaccagatcatgccccaggtgcctgtgttcaccgtggaggtgaagaactacggcgtgaagaacagcgagtggattgatgcctgcatcaacatcagccaccactactgcaacatcagtgaccacgtgggggaccccagcaacagcctgtgggtgcgggtgaaggcccgggtgggccagaaggagagcgcctatgccaagtctgaggagtttgctgtgtgcagagatggcaagattggcccccccaagctggacatcaggaaggaggagaagcagatcatgattgacatcttccaccccagcgtgtttgtgaatggagatgagcaggaggtggactatgaccctgagaccacctgctacatccgggtgtag

SEQ ID NO: 156236 - DNA, 825 bp, synthetic construct
  misc_feature 1..825: note = Description of Artificial Sequence: Synthetic coding sequence
  source 1..825: mol_type = other DNA
atggccctgctcttcctgctgcccctggtgatgcagggcgtgtccagagctgagatgggcacagctgacctgggccccagctctgtgcccacccccaccaacgtgaccatcgagagctacaacatgaaccccatcgtgtactgggagtaccagatcatgccccaggtgcctgtgttcaccgtggaggtgaagaactacggcgtgaagaacagcgagtggattgatgcctgcatcaacatcagccaccactactgcaacatcagtgaccacgtgggggaccccagcaacagcctgtgggtgcgggtgaaggcccgggtgggccagaaggagagcgcctatgccaagtctgaggagtttgctgtgtgcagagatggcaagattggcccccccaagctggacatcaggaaggaggagaagcagatcatgattgacatcttccaccccagcgtgtttgtgaatggagatgagcaggaggtggactatgaccctgagaccacctgctacatccgggtgtacaacgtgtatgtgaggatgaatggaagtgagatccagtacaagatcctgacccagaaggaggatgactgtgatgagatccagtgccagctggccatccctgtgagcagcctgaacagccagtactgtgtgtctgctgagggcgtgctgcacgtgtggggcgtgaccacagagaagagcaaggaggtgtgcatcaccatcttcaacagcagcatcaagggcagcctgtggatccctgtggtggccgccctgctgctcttctgcctggcctggtacagctctgtgttcatcctgaggaagctgatccactag

SEQ ID NO: 156237 - DNA, 633 bp, synthetic construct
  misc_feature 1..633: note = Description of Artificial Sequence: Synthetic coding sequence
  source 1..633: mol_type = other DNA
atggccctgctcttcctgctgcccctggtgatgcagggcgtgtccagagctgagatgggcacagctgacctgggccccagctctgtgcccacccccaccaacgtgaccatcgagagctacaacatgaaccccatcgtgtactgggagtaccagatcatgccccaggtgcctgtgttcaccgtggaggtgaagaactacggcgtgaaggcccgggtgggccagaaggagagcgcctatgccaagtctgaggagtttgctgtgtgcagagatggcaagattggcccccccaagctggacatcaggaaggaggagaagcagatcatgattgacatcttccaccccagcgtgtttgtgaatggagatgagcaggaggtggactatgaccctgagaccacctgctacatccgggtgtacaacgtgtatgtgaggatgaatggaagtgagatccagtacaagatcctgacccagaaggaggatgactgtgatgagatccagtgccagctggccatccctgtgagcagcctgaacagccagtactgtgtgtctgctgagggcgtgctgcacgtgtggggcgtgaccacagagaagagcaaggaggtgtgcatcaccatcttcaacagcagcatcaagtag

SEQ ID NO: 156238 - DNA, 1386 bp, synthetic construct
  misc_feature 1..1386: note = Description of Artificial Sequence: Synthetic coding sequence
  source 1..1386: mol_type = other DNA
atgcccacccccaccaacgtgaccatcgagagctacaacatgaaccccatcgtgtactgggagtaccagatcatgccccaggtgcctgtgttcaccgtggaggtgaagaactacggcgtgaagaacagcgagtggattgatgcctgcatcaacatcagccaccactactgcaacatcagtgaccacgtgggggaccccagcaacagcctgtgggtgcgggtgaaggcccgggtgggccagaaggagagcgcctatgccaagtctgaggagtttgctgtgtgcagagatggcaagattggcccccccaagctggacatcaggaaggaggagaagcagatcatgattgacatcttccaccccagcgtgtttgtgaatggagatgagcaggaggtggactatgaccctgagaccacctgctacatccgggtgtacaacgtgtatgtgaggatgaatggaagtgagatccagtacaagatcctgacccagaaggaggatgactgtgatgagatccagtgccagctggccatccctgtgagcagcctgaacagccagtactgtgtgtctgctgagggcgtgctgcacgtgtggggcgtgaccacagagaagagcaaggaggtgtgcatcaccatcttcaacagcagcatcaagggcagcctgtggatccctgtggtggccgccctgctgctcttcctggtgctgagcctggtgttcatctgcttctacatcaagaagatcaaccccctgaaggagaagagcatcatcctgcccaagagcctcatctctgtggtgcgcagcgccaccctggagaccaagccagagagcaaatatgtgtccctcatcaccagctaccagcccttcagcctggagaaggaggtggtgtgtgaggagcccctgagccctgccaccgtgcccggcatgcacacagaggacaaccctgggaaggtggagcacacagaggagctgagcagcatcacagaggtggtgaccacagaggagaacatcccagatgtggtgcccggcagccacctgacccccatcgagcgggagagcagcagccccctgagcagcaaccagagcgagcccggcagcatcgccctgaacagctaccacagcaggaactgcagcgagagtgaccacagcagaaatggatttgacacagacagcagctgcctggagagccacagcagcctgagtgacagcgagttcccccccaacaacaagggggagatcaagacagagggccaggagctgatcaccgtcatcaaggcccccaccagctttggctatgacaagccccacgtgctggtggacctgctggtggatgattctgggaaggagagcctgattggctaccggcccacagaggacagcaaggagttctcctag

SEQ ID NO: 156239 - DNA, 1014 bp, synthetic construct
  misc_feature 1..1014: note = Description of Artificial Sequence: Synthetic coding sequence
  source 1..1014: mol_type = other DNA
atgaggcccaccctgctgtggagcctgctgctgctgctgggcgtgtttgctgctgctgctgctgcccccccagaccccctgagccagctgcctgccccccagcaccccaagatccggctgtacaatgctgagcaggtgctgtcctgggagcctgtggccctgagcaacagcaccaggcctgtggtgtaccaggtgcagttcaagtacacagacagcaagtggttcaccgctgacatcatgagcattggagtgaactgcacccagatcacagccacagaatgtgacttcaccgctgccagccccagcgctggcttccccatggacttcaacgtgaccctgcggctgcgggcagagctgggcgccctgcacagcgcctgggtgaccatgccctggttccagcactacagaaatgtgacagtgggccccccagagaacatcgaggtgaccccaggagagggcagcctcatcatccgcttcagcagcccctttgatattgctgacaccagcacagccttcttctgctactacgtgcactactgggagaagggcggcatccagcaggtgaagggccccttccgcagcaacagcatcagcctggacaacctgaagcccagccgggtgtactgcctgcaggtgcaggcccagctgctgtggaacaagagcaacatcttccgggtgggccacctgagcaacatcagctgctatgagaccatggctgatgccagcacagagctgcagcaggtgatcctgatctctgtgggcaccttcagcctgctgtctgtgctggccggggcctgcttcttcctggtgctgaagtaccggggcctcatcaagtactggttccacaccccacccagcatccccctgcagatcgaggagtacctgaaggaccccacccagcccatcctggaggccctggacaaggacagcagccccaaggatgatgtgtgggacagcgtgtccatcatctccttccctgagaaggagcaggaggatgtgctgcagaccctgtag

SEQ ID NO: 156240 - DNA, 378 bp, synthetic construct
  misc_feature 1..378: note = Description of Artificial Sequence: Synthetic coding sequence
  source 1..378: mol_type = other DNA
atgcacaaggaggagcacgaggtggccgtgctgggccccccacccagcaccatcctgcccaggagcaccgtcatcaacatccacagcgagacctctgtgcctgaccacgtggtgtggagcctcttcaacaccctcttcctgaactggtgctgcctgggcttcatcgcctttgcctacagcgtgaagagccgggacaggaagatggtgggagatgtgactggagcccaggcctatgccagcacagccaagtgcctgaacatctgggccctgatcctgggcatcctgatgaccatcggcttcatcctgctgctggtgtttggatctgtgacagtgtaccacatcatgctgcagatcatccaggagaagaggggctactag

SEQ ID NO: 156241 - DNA, 378 bp, synthetic construct; identical to SEQ ID NO: 156240
  misc_feature 1..378: note = Description of Artificial Sequence: Synthetic coding sequence
  source 1..378: mol_type = other DNA

SEQ ID NO: 156242 - DNA, 300 bp, synthetic construct
  misc_feature 1..300: note = Description of Artificial Sequence: Synthetic coding sequence
  source 1..300: mol_type = other DNA
ccccagagccagaagatgcacaaggaggagcacgaggtggccgtgctgggccccccacccagcaccatcctgcccaggagcaccgtcatcaacatccacagcgagacctctgtgcctgaccacgtggtggtgcctgtgcagcaccccctgctggagtgctgcctgggcttcatcgcctttgcctacagcgtgaagagccgggacaggaagatggtgggagatgtgactggagcccaggccctgcaccggcaggtgcctgagcacctgggcccagattctggccacccccatgaccactag

SEQ ID NO: 156243 - DNA, 378 bp, synthetic construct; identical to SEQ ID NO: 156240
  misc_feature 1..378: note = Description of Artificial Sequence: Synthetic coding sequence
  source 1..378: mol_type = other DNA

SEQ ID NO: 156244 - DNA, 495 bp, synthetic construct
  misc_feature 1..495: note = Description of Artificial Sequence: Synthetic coding sequence
  source 1..495: mol_type = other DNA
atgaaccacatcgtgcagaccttcagccctgtgaacagcggccagccccccaactatgagatgctgaaggaggagcaggaggtggccatgctgggcgtgccccacaacccagccccacccatgagcaccgtcatccacatccgctctgagacctctgtgcctgaccacgtggtggtgcctgtgcagcaccccctgcacgagtgctgcctgggcttcatcgcctttgcctacagcgtgaagagccgggacaggaagatggtgggagatgtgactggagcccaggccctgcaccggcaggtgcctgagcacctgggccctgactttggccacctgcatgaccacagcgcccaccaccaccccagcgtgggccggcccggccctgccatcgaccaggaggccagcctgcggcctggggccctgcctgtgacctgcatccccaggaccctgagcagcatccccaggcctgccccccggggccaggagctgtgcccctag

SEQ ID NO: 156245 - DNA, 399 bp, synthetic construct
  misc_feature 1..399: note = Description of Artificial Sequence: Synthetic coding sequence
  source 1..399: mol_type = other DNA
atgaaccacatcgtgcagaccttcagccctgtgaacagcggccagccccccaactatgagatgctgaaggaggagcaggaggtggccatgctgggcgtgccccacaacccagccccacccatgagcaccgtcatccacatccgctctgagacctctgtgcctgaccacgtggtgtggagcctcttcaacaccctcttcatgaacacctgctgcctgggcttcatcgcctttgcctacagcgtgaagagccgggacaggaagatggtgggagatgtgactggagcccaggcctatgccagcacagccaagtgcctgaacatctgggccctgatcctgggcatcttcatgaccatcctgctgatcatcatccctgtgctggtggtgcaggcccagaggtag

SEQ ID NO: 156246 - DNA, 447 bp, synthetic construct
  misc_feature 1..447: note = Description of Artificial Sequence: Synthetic coding sequence
  source 1..447: mol_type = other DNA
cctcccaactatgagatgctgaaggaggagcacgaggtggccgtgctgggcgccccccacaacccagccccacccaccagcaccgtcatccacatccgctctgagacctctgtgcctgaccacgtggtggtgcctgtgcagcaccccctgcacgagtgctgcctgggcttcatcgcctttgcctacagcgtgaagagccgggacaggaagatggtgggagatgtgactggagcccaggccctgcaccggcaggtgcctgagcacctgggcccagattctggccacccccatgaccacagcgcccaccgccaccccagcgctgacctgcccggcctgtggattgaccaggaggccagcctgcggcctggggccctgcccatgacctgcatccccaggacccccaccagcatccccaggcctgcccctggagctgagagctgcatctag

SEQ ID NO: 156247 - DNA, 402 bp, synthetic construct
  misc_feature 1..402: note = Description of Artificial Sequence: Synthetic coding sequence
  source 1..402: mol_type = other DNA
atgaaccacacagtgcagaccttcttcagccctgtgaacagcggccagccccccaactatgagatgctgaaggaggagcacgaggtggccgtgctgggcgccccccacaacccagccccacccaccagcaccgtcatccacatccgctctgagacctctgtgcctgaccacgtggtgtggagcctcttcaacaccctcttcatgaacccctgctgcctgggcttcatcgcctttgcctacagcgtgaagagccgggacaggaagatggtgggagatgtgactggagcccaggcctatgccagcacagccaagtgcctgaacatctgggccctgatcctgggcatcctgatgaccatcctgctgattgtcatccctgtgctgatcttccaggcctacggctag

SEQ ID NO: 156248 - DNA, 3078 bp, synthetic construct
  misc_feature 1..3078: note = Description of Artificial Sequence: Synthetic coding sequence
  source 1..3078: mol_type = other DNA
atgagcaatggctacagcacagatgagaacttccgctacctgatcagctgcttccgggcccgggtgaagatgtacatccaggtggagcctgtgctggactacctgaccttcctgcctgctgaggtgaaggagcagatccagaggacagtggccaccagcggcaacatgcaggccgtggagctgctgctgagcaccctggagaagggcgtgtggcacctgggctggacccgggagtttgtggaggccctgcggaggacaggcagccccctggccgcccgctacatgaaccctgagctgacagacctgcccagccccagctttgaaaatgcccatgatgagtacctgcagctgctgaacctgctgcagcccaccctggtggacaagctgctggtgagagatgtgctggacaagtgcatggaggaggagctgctgaccattgaagatagaaacagaattgctgctgctgagaacaatggaaatgaaagtggagtgcgggagctgctgaagagaattgtgcagaaggagaactggttcagcgccttcctgaatgtgctgcggcagacaggcaacaatgagctggtgcaggagctgaccggcagtgactgcagcgagagcaatgctgagattgagaacctgagccaggtggatggcccccaggtggaggagcagctgctgagcaccaccgtgcagcccaacctggagaaggaggtgtggggcatggagaacaacagcagcgagagcagctttgctgacagctctgtggtgtctgagagtgacaccagcctggccgagggctctgtgtcctgcctggatgagagcctgggccacaacagcaacatgggcagtgacagcggcaccatgggcagtgacagtgatgaggagaatgtggccgcccgggccagccctgagcctgagctgcagctgcggccctaccagatggaggtggcccagcctgccctggagggcaagaacatcatcatctgcctgcccactggaagtggcaagaccagggtggccgtgtacatcgccaaggaccacctggacaagaagaagaaggccagcgagcccgggaaggtgattgtgctggtgaacaaggtgctgctggtggagcagctgttcaggaaggagttccagcccttcctgaagaagtggtacagagtcatcggcctgagcggggacacccagctgaagatctccttccctgaggtggtgaagagctgtgacatcatcatcagcacagcccagatcctggagaacagcctgctgaacctggagaatggagaagatgctggggtgcagctgagtgacttcagcctcatcatcattgatgagtgccaccacaccaacaaggaggccgtgtacaacaacatcatgaggcactacctgatgcagaagctgaagaacaaccggctgaagaaggagaacaagcctgtgatccccctgccccagatcctgggcctgacagccagccctggggtgggcggggccaccaagcaggccaaggccgaggagcacatcctgaagctgtgtgccaacctggatgccttcaccatcaagacagtgaaggagaacctggaccagctgaagaaccagatccaggagccctgcaagaagtttgccatcgcagatgccacccgggaggaccccttcaaggagaagctgctggagatcatgacccgcatccagacctactgccagatgagccccatgtctgactttggcacccagccctatgagcagtgggccatccagatggagaagaaggccgccaaggagggcaacaggaaggagcgggtgtgtgccgagcacctgaggaagtacaatgaggccctgcagatcaatgacaccatccgcatgattgatgcctacacccacctggagaccttctacaatgaggagaaggacaagaagtttgctgtgattgaagatgacagtgatgagggcggagatgatgagtactgtgatggagatgaagatgaagatgacctgaagaagcccctgaagctggatgaaacagaccgcttcctgatgaccctcttctttgagaacaacaagatgctgaagaggctggccgagaacccagaatatgaaaatgagaagctgaccaagctgaggaacaccatcatggagcagtacaccaggacagaggagagcgcccggggcatcatcttcaccaagacccggcagagcgcctatgccctgagccagtggatcacagaaaatgagaagtttgctgaggtgggcgtgaaggcccaccacctgattggagctggccacagcagcgagttcaagcccatgacccagaatgagcagaaggaggtgatcagcaagttcagaacaggcaagatcaacctgctgattgccaccaccgtggccgaggagggcctggacatcaaggagtgcaacatcgtcatccgctatggcctggtgaccaatgagatcgccatggtgcaggcccggggccgggcccgggcagatgagagcacctacgtgctggtggcccacagcggcagcggcgtgattgaacatgaaacagtgaatgacttccgggagaagatgatgtacaaggccatccactgtgtgcagaacatgaagccagaggagtatgcccacaagatcctggagctgcagatgcagagcatcatggagaagaagatgaagaccaagaggaacatcgccaagcactacaagaacaaccccagcctcatcaccttcctgtgcaagaactgcagcgtgctggcctgcagcggggaggacatccacgtgattgagaagatgcaccacgtgaacatgaccccagagttcaaggagctgtacatcgtgcgggagaacaaggccctgcagaagaagtgtgccgactaccagatcaatggagagatcatctgcaagtgtggccaggcctggggcaccatgatggtgcacaagggcctggacctgccctgcctgaagatccggaactttgtggtggtgttcaagaacaacagcaccaagaagcagtacaagaagtgggtggagctgcccatcaccttccccaacctggactacagcgagtgctgcctcttcagtgatgaggactag

SEQ ID NO: 156249 - DNA, 666 bp, synthetic construct
  misc_feature 1..666: note = Description of Artificial Sequence: Synthetic coding sequence
  source 1..666: mol_type = other DNA
atgagcaatggctacagcacagatgagaacttccgctacctgatcagctgcttccgggcccgggtgaagatgtacatccaggtggagcctgtgctggactacctgaccttcctgcctgctgaggtgaaggagcagatccagaggacagtggccaccagcggcaacatgcaggccgtggagctgctgctgagcaccctggagaagggcgtgtggcacctgggctggacccgggagtttgtggaggccctgcggaggacaggcagccccctggccgcccgctacatgaaccctgagctgacagacctgcccagccccagctttgaaaatgcccatgatgagtacctgcagctgctgaacctgctgcagcccaccctggtggacaagctgctggtgagagatgtgctggacaagtgcatggaggaggagctgctgaccattgaagatagaaacagaattgctgctgctgagaacaatggaaatgaaagtggagtgcgggagctgctgaagagaattgtgcagaaggagaactggttcagcgccttcctgaatgtgctgcggcagacaggcaacaatgagctggtgcaggagctgaccggcagtgactgcagcgagagcaatgccggcatctgcaacttcacagaggaggacagcagcaacagcgcctag

SEQ ID NO: 156250 - DNA, 3078 bp, synthetic construct; identical to SEQ ID NO: 156248
  misc_feature 1..3078: note = Description of Artificial Sequence: Synthetic coding sequence
  source 1..3078: mol_type = other DNA

SEQ ID NO: 156251 - DNA, 1050 bp, synthetic construct
  misc_feature 1..1050: note = Description of Artificial Sequence: Synthetic coding sequence
  source 1..1050: mol_type = other DNA
atgcctgtggagaggatgaggatgaggccctggctggaggagcagatcaacagcaacaccatccctggcctgaagtggctgaacaaggagaagaagatcttccagatcccctggatgcatgctgcccggcacggctgggatgtggagaaggatgcccccctcttcaggaactgggccatccacacaggcaagcaccagcccggggtggacaagccagaccccaagacctggaaggccaacttccgctgtgccatgaacagcctgcctgacatcgaggaggtgaaggacaagagcatcaagaagggcaacaatgccttccgggtgtacaggatgctgcccctgtctgagcggcccagcaagaagggcaagaagcccaagacagagaaggaggacaaggtgaagcacatcaagcaggagcctgtggagagcagcctgggcctgagcaatggagtgtctgacctgagcccagaatatgctgtgctgaccagcaccatcaagaatgaggtggacagcacagtgaacatcatcgtggtgggccagagccacctggacagcaacatcgagaaccaggagatcgtgaccaaccccccagacatctgccaggtggtggaggtgaccacagaaagtgatgagcagcctgtgtccatgtctgagctgtaccccctgcagatcagccctgtgtcctcctatgcagagagcgagaccacagacagcgtgcccagtgatgaggagagcgctgagggccggccccactggaggaagagaaatattgagggcaagcagtacctgagcaacatgggcacccggggcagctacctgctgcccggcatggccagctttgtgaccagcaacaagccagacctgcaggtgaccatcaaggaggagagcaaccctgtgccctacaacagctcctggccacccttccaggacctgcccctgagcagctccatgaccccagccagcagcagcagcaggccagaccgggagacccgggccagcgtcatcaagaagaccagtgacatcacccaggcccgggtgaagagctgctag

SEQ ID NO: 156252 - DNA, 414 bp, synthetic construct
  misc_feature 1..414: note = Description of Artificial Sequence: Synthetic coding sequence
  source 1..414: mol_type = other DNA
atgcctgtggagaggatgaggatgaggccctggctggaggagcagatcaacagcaacaccatccctggcctgaagtggctgaacaaggagaagaagatcttccagatcccctggatgcatgctgcccggcacggctgggatgtggagaaggatgcccccctcttcaggaactgggccatccacacaggcaagcaccagcccggggtggacaagccagaccccaagacctggaaggccaacttccgctgtgccatgaacagcctgcctgacatcgaggaggtgaaggacaagagcatcaagaagggcaacaatgccttccgggtgtacaggatgctgcccctgtctgagcggcccagcaagaagggcaagaagcccaagacagagaaggaggacaaggtgaagcacatcaagtag

SEQ ID NO: 156253 - DNA, 414 bp, synthetic construct; identical to SEQ ID NO: 156252
  misc_feature 1..414: note = Description of Artificial Sequence: Synthetic coding sequence
  source 1..414: mol_type = other DNA

SEQ ID NO: 156254 - DNA, 531 bp, synthetic construct
  misc_feature 1..531: note = Description of Artificial Sequence: Synthetic coding sequence
  source 1..531: mol_type = other DNA
atgcctgtggagaggatgaggatgaggccctggctggaggagcagatcaacagcaacaccatccctggcctgaagtggctgaacaaggagaagaagatcttccagatcccctggatgcatgctgcccggcacggctgggatgtggagaaggatgcccccctcttcaggaactgggccatccacacaggcaagcaccagcccggggtggacaagccagaccccaagacctggaaggccaacttccgctgtgccatgaacagcctgcctgacatcgaggaggtgaaggacaagagcatcaagaagggcaacaatgccttccgggtgtacaggatgctgcccctgtctgagcggcccagcaagaagggcaagaagcccaagacagagaaggaggacaaggtgaagcacatcaagcaggagcctgtggagagcagcctgggcctgagcaatggagtgtctgacctgagcccagaatatgctgtgctgaccagcaccatcaagaatgaggtggacagcacagtgaacatcatctag

SEQ ID NO: 156255 - DNA, 486 bp, synthetic construct
  misc_feature 1..486: note = Description of Artificial Sequence: Synthetic coding sequence
  source 1..486: mol_type = other DNA
atgcctgtggagaggatgaggatgaggccctggctggaggagcagatcaacagcaacaccatccctggcctgaagtggctgaacaaggagaagaagatcttccagatcccctggatgcatgctgcccggcacggctgggatgtggagaaggatgcccccctcttcaggaactgggccatccacacaggcaagcaccagcccggggtggacaagccagaccccaagacctggaaggccaacttccgctgtgccatgaacagcctgcctgacatcgaggaggtgaaggacaagagcatcaagaagggcaacaatgccttccgggtgtacaggatgctgcccctgtctgagcggcccagcaagaagggcaagaagcccaagacagagaaggaggacaaggtgaagcacatcaagcaggagcctgtggagagcagcctgggcctgagcaatggagtgtctgacctgagcccagaatatgctgtgctgtag

SEQ ID NO: 156256 - DNA, 1284 bp, synthetic construct
  misc_feature 1..1284: note = Description of Artificial Sequence: Synthetic coding sequence
  source 1..1284: mol_type = other DNA
atgggcacccccaagccccgcatcctgccctggctggtgtcccagctggacctgggccagctggagggcgtggcctgggtgaacaagagcaggacccgcttccgcatcccctggaagcacggcctgcggcaggatgcccagcaggaggactttggcatcttccaggcctgggccgaggccactggagcctacgtgcccggccgggacaagccagacctgcccacctggaagaggaacttccgcagcgccctgaacaggaaggagggcctgcggctggccgaggacaggagcaaggacccccatgacccccacaagatctatgaatttgtgaacagcggcgtgggggacttcagccagcctgacaccagcccagacaccaatggaggcggcagcaccagtgacacccaggaggacatcctggatgagctgctgggcaacatggtgctggcccccctgcctgaccccggcccccccagcctggccgtggcccctgagccctgcccccagcccctgcggagccccagcctggacaaccccacccccttccccaacctgggccccagcgagaaccccctgaagaggctgctggtgcctggagaggagtgggagtttgaggtgacagccttctaccggggccggcaggtgttccagcagaccatcagctgcccagagggcctgcggctggtgggcagcgaggtgggggacaggaccctgcccggctggcctgtgaccctgcctgaccccggcatgagcctgacagaccggggcgtgatgtcctatgtgagacatgtgctgagctgcctgggcggcggcctggccctgtggagggctggccagtggctgtgggcccagaggctgggccactgccacacctactgggccgtgtctgaggagctgctgcccaacagcggccacggcccagatggagaggtgcccaaggacaaggagggcggcgtgtttgacctgggccccttcatcgtggacctgatcaccttcacagagggcagcggccgcagccccaggtatgccctgtggttctgtgtgggggagagctggccccaggaccagccctggaccaagaggctggtgatggtgaaggtggtgcccacctgcctgcgggccctggtggagatggcccgggtgggcggggccagcagcctggagaacacagtggacctgcacatcagcaacagccaccccctgagcctgaccagtgaccagtacaaggcctacctgcaggacctggtggagggcatggacttccagggccctggagagagctag

SEQ ID NO: 156257 - DNA, 903 bp, synthetic construct
  misc_feature 1..903: note = Description of Artificial Sequence: Synthetic coding sequence
  source 1..903: mol_type = other DNA
atgggcacccccaagccccgcatcctgccctggctggtgtcccagctggacctgggccagctggagggcgtggcctgggtgaacaagagcaggacccgcttccgcatcccctggaagcacggcctgcggcaggatgcccagcaggaggactttggcatcttccaggcctgggccgaggccactggagcctacgtgcccggccgggacaagccagacctgcccacctggaagaggaacttccgcagcgccctgaacaggaaggagggcctgcggctggccgaggacaggagcaaggacccccatgacccccacaagatctatgaatttgtgaacagcggcgtgggggacttcagccagcctgacaccagcccagacaccaatggaggcggcagcaccagtgacacccaggaggacatcctggatgagctgctgggcaacatggtgctggcccccctgcctgaccccggcccccccagcctggccgtggcccctgagccctgcccccagcccctgcggagccccagcctggacaaccccacccccttccccaacctgggccccagcgagaaccccctgaagaggctgctggtgcctggagaggacctgatcaccttcacagagggcagcggccgcagccccaggtatgccctgtggttctgtgtgggggagagctggccccaggaccagccctggaccaagaggctggtgatggtgaaggtggtgcccacctgcctgcgggccctggtggagatggcccgggtgggcggggccagcagcctggagaacacagtggacctgcacatcagcaacagccaccccctgagcctgaccagtgaccagtacaaggcctacctgcaggacctggtggagggcatggacttccagggccctggagagagctag

SEQ ID NO: 156258 - DNA, 1284 bp, synthetic construct; identical to SEQ ID NO: 156256
  misc_feature 1..1284: note = Description of Artificial Sequence: Synthetic coding sequence
  source 1..1284: mol_type = other DNA

SEQ ID NO: 156259 - DNA, 315 bp, synthetic construct
  misc_feature 1..315: note = Description of Artificial Sequence: Synthetic coding sequence
  source 1..315: mol_type = other DNA
atgggcacccccaagccccgcatcctgccctggctggtgtcccagctggacctgggccagctggagggcgtggcctgggtgaacaagagcaggacccgcttccgcatcccctggaagcacggcctgcggcaggatgcccagcaggaggactttggcatcttccaggagctgggcaccttccccagccagacccccctgcggacccccatggtggaggccgtgctgctgatccccaggaagaccttctggatgagctactgggtgacctggtgctggccccacagccagatccgggacccccaggcctggctgtag

SEQ ID NO: 156260 - DNA, 846 bp, synthetic construct
  misc_feature 1..846: note = Description of Artificial Sequence: Synthetic coding sequence
  source 1..846: mol_type = other DNA
atggtgctggcccccctgcctgaccccggcccccccagcctggccgtggcccctgagccctgcccccagcccctgcggagccccagcctggacaaccccacccccttccccaacctgggccccagcgagaaccccctgaagaggctgctggtgcctggagaggagtgggagtttgaggtgacagccttctaccggggccggcaggtgttccagcagaccatcagctgcccagagggcctgcggctggtgggcagcgaggtgggggacaggaccctgcccggctggcctgtgaccctgcctgaccccggcatgagcctgacagaccggggcgtgatgtcctatgtgagacatgtgctgagctgcctgggcggcggcctggccctgtggagggctggccagtggctgtgggcccagaggctgggccactgccacacctactgggccgtgtctgaggagctgctgcccaacagcggccacggcccagatggagaggtgcccaaggacaaggagggcggcgtgtttgacctgggccccttcatcgtggacctgatcaccttcacagagggcagcggccgcagccccaggtatgccctgtggttctgtgtgggggagagctggccccaggaccagccctggaccaagaggctggtgatggtgaaggtggtgcccacctgcctgcgggccctggtggagatggcccgggtgggcggggccagcagcctggagaacacagtggacctgcacatcagcaacagccaccccctgagcctgaccagtgaccagtacaaggcctacctgcaggacctggtggagggcatggacttccagggccctggagagagctag

SEQ ID NO: 156261 - DNA, 465 bp, synthetic construct
  misc_feature 1..465: note = Description of Artificial Sequence: Synthetic coding sequence
  source 1..465: mol_type = other DNA
atggtgctggcccccctgcctgaccccggcccccccagcctggccgtggcccctgagccctgcccccagcccctgcggagccccagcctggacaaccccacccccttccccaacctgggccccagcgagaaccccctgaagaggctgctggtgcctggagaggacctgatcaccttcacagagggcagcggccgcagccccaggtatgccctgtggttctgtgtgggggagagctggccccaggaccagccctggaccaagaggctggtgatggtgaaggtggtgcccacctgcctgcgggccctggtggagatggcccgggtgggcggggccagcagcctggagaacacagtggacctgcacatcagcaacagccaccccctgagcctgaccagtgaccagtacaaggcctacctgcaggacctggtggagggcatggacttccagggccctggagagagctag

SEQ ID NO: 156262 - DNA, 846 bp, synthetic construct; identical to SEQ ID NO: 156260
  misc_feature 1..846: note = Description of Artificial Sequence: Synthetic coding sequence
  source 1..846: mol_type = other DNA

SEQ ID NO: 156263 - DNA, 903 bp, synthetic construct; identical to SEQ ID NO: 156257
  misc_feature 1..903: note = Description of Artificial Sequence: Synthetic coding sequence
  source 1..903: mol_type = other DNA

SEQ ID NO: 156264 - DNA, 465 bp, synthetic construct; identical to SEQ ID NO: 156261
  misc_feature 1..465: note = Description of Artificial Sequence: Synthetic coding sequence
  source 1..465: mol_type = other DNA

SEQ ID NO: 156265 - DNA, 1404 bp, synthetic construct
  misc_feature 1..1404: note = Description of Artificial Sequence: Synthetic coding sequence
  source 1..1404: mol_type = other DNA
atggccctgcacccccggcgggtgcggctgaagccctggctggtggcccaggtggacagcggcctgtacccaggcctcatctggctgcaccgggacagcaagcgcttccagatcccctggaagcacgccaccaggcacagcccccagcaggaggaggagaacaccatcttcaaggcctgggccgtggagaccgggaagtaccaggagggcgtggatgatcctgaccctgccaagtggaaggcccagctgcgctgtgccctgaacaagagccgggagttcaacctgatgtatgatggcaccaaggaggtgcccatgaaccctgtgaagatctaccaggtgtgtgacatcccccagccccagggcagcatcatcaaccctggcagcactggaagtgccccctgggatgagaaggacaatgatgtggatgaggaggatgaagaagatgagctggaccagagccagcaccacgtgcccatccaggacaccttccccttcctgaacatcaatggcagccccatggccccagcctctgtgggcaactgcagcgtgggcaactgcagccctgaggccgtgtggcccaagacagagcccctggagatggaggtgccccaggcccccatccagcccttctacagcagccctgagctgtggatcagcagcctgcccatgacagacctggacatcaagttccagtaccggggcaaggagtatggccagaccatgacagtgagcaacccccagggctgccgcctcttctatggagacctgggccccatgccagaccaggaggagctgtttggacctgtgtccctggagcaggtgaagtttcctggccctgagcacatcaccaatgagaagcagaagctgttcaccagcaagctgctggatgtgatggaccggggcctcatcctggaggtgtctggccacgccatctatgccatccggctgtgccagtgcaaggtgtactggagcggcccctgtgcccccagcctggtggcccccaacctgattgagcggcagaagaaggtgaagctgttctgcctggagaccttcctgagtgacctgattgcccaccagaagggccagatcgagaagcagcccccatttgagatctacctgtgctttggagaggagtggccagatggcaagcccctggagaggaagctgatcctggtgcaggtgattcctgtggtggccaggatgatctatgagatgttttctggggacttcaccaggagctttgacagcggctctgtgcggctgcagatcagcaccccagacatcaaggacaacatcgtggcccagctgaagcagctgtaccgcatcctgcagacccaggagagctggcagcccatgcagcccacccccagcatgcagctgcccccagccctgcccccccagtag

SEQ ID NO: 156266 - DNA, 831 bp, synthetic construct
  misc_feature 1..831: note = Description of Artificial Sequence: Synthetic coding sequence
  source 1..831: mol_type = other DNA
atggccctgcacccccggcgggtgcggctgaagccctggctggtggcccaggtggacagcggcctgtacccaggcctcatctggctgcaccgggacagcaagcgcttccagatcccctggaagcacgccaccaggcacagcccccagcaggaggaggagaacaccatcttcaaggcctgggccgtggagaccgggaagtaccaggagggcgtggatgatcctgaccctgccaagtggaaggcccagctgcgctgtgccctgaacaagagccgggagttcaacctgatgtatgatggcaccaaggaggtgcccatgaaccctgtgaagatctaccaggtgtgtgacatcccccagccccagggcagcatcatcaaccctggcagcactggaagtgccccctgggatgagaaggacaatgatgtggatgaggaggatgaagaagatgagctggaccagagccagcaccacgtgcccatccaggacaccttccccttcctgaacatcaatggcagccccatggccccagcctctgtgggcaactgcagcgtgggcaactgcagccctgaggccgtgtggcccaagacagagcccctggagatggaggtgccccaggcccccatccagcccttctacagcagccctgagctgtggatcagcagcctgcccatgacagacctggacatcaagttccagtaccggggcaaggagtatggccagaccatgacagtgagcaacccccagggctgccgcctcttctatggagacctgggccccatgccagaccaggaggagctgtttggacctgtgtccctggagcaggtgaagttctag

SEQ ID NO: 156267 - DNA, 1119 bp, synthetic construct
  misc_feature 1..1119: note = Description of Artificial Sequence: Synthetic coding sequence
  source 1..1119: mol_type = other DNA
atgtatgatggcaccaaggaggtgcccatgaaccctgtgaagatctaccaggtgtgtgacatcccccagccccagggcagcatcatcaaccctggcagcacaggcagcgccccctgggatgagaaggacaatgatgtggatgaagaagatgaggaggatgagctggaccagagccagcaccacgtgcccatccaggacaccttccccttcctgaacatcaatggcagccccatggccccagcctctgtgggcaactgcagcgtgggcaactgcagccctgaggccgtgtggcccaagacagagcccctggagatggaggtgccccaggcccccatccagcccttctacagcagccctgagctgtggatcagcagcctgcccatgacagacctggacatcaagttccagtaccggggcaaggagtatggccagaccatgacagtgagcaacccccagggctgccgcctcttctacggggacctgggccccatgccagaccaggaggagctgtttggacctgtgtccctggagcaggtgaagtttcctggccctgagcacatcaccaatgagaagcagaagctgttcaccagcaagctgctggatgtgatggaccggggcctcatcctggaggtgtctggccacgccatctatgccatccggctgtgccagtgcaaggtgtactggagcggcccctgtgcccccagcctggtggcccccaacctgattgaaaggcagaagaaggtgaagctgttctgcctggagaccttcctgagtgacctgattgcccaccagaagggccagatcgagaagcagcccccatttgagatctacctgtgcttcggggaggagtggccagatggcaagcccctggagaggaagctgatcctggtgcaggtgattcctgtggtggccaggatgatctatgagatgttcagcggggacttcaccaggagctttgattctggctctgtgcggctgcagatcagcaccccagacatcaaggacaacatcgtggcccagctgaagcagctgtaccgcatcctgcagacccaggagagctggcagcccatgcagcccacccccagcatgcagctgcccccagccctgcccccccagtag

SEQ ID NO: 156268 - DNA, 1281 bp, synthetic construct
  misc_feature 1..1281: note = Description of Artificial Sequence: Synthetic coding sequence
  source 1..1281: mol_type = other DNA
atgtgtgacagaaatggaggccggcggctgcggcagtggctgattgagcagattgacagctccatgtacccaggcctcatctgggagaatgaggagaagtccatgttccgcatcccctggaagcatgctgggaagcaggactacaaccaggaggtggatgccagcatcttcaaggcctgggccgtgttcaagggcaagttcaaggagggggacaaggccgagcccgccacctggaagacccggctgcgctgtgccctgaacaagagcccagactttgaggaggtgacagacaggagccagctggacatcagcgagccctacaaggtgtaccgcatcgtgcctgaggaggagcagaagtgcaagctgggcgtggccacagctggctgtgtgaatgaggtgacagagatggagtgtggccgctcagaaattgatgagctgatcaaggagcccagcgtggatgactacatgggcatgatcaagaggagccccagccccccagaggcctgccgcagccagctgctgcctgactggtgggcccagcagcccagcactggagtgcccctggtgacaggctacaccacctatgatgcccaccacagcgccttcagccagatggtgatctccttctactatggaggcaagctggtgggccaggccaccaccacctgcccagagggctgccgcctgagcctgagccagcccggcctgcccggcaccaagctgtatggccctgagggcctggagctggtgcgcttccccccagcagatgccatccccagcgagcggcagaggcaggtgaccaggaagctgtttggccacctggagcggggcgtgctgctgcacagcagccggcagggcgtgtttgtgaagaggctgtgccagggccgggtcttctgcagcggaaatgctgtggtgtgcaagggccggcccaacaagctggagagagatgaggtggtgcaggtgtttgacaccagccagttcttccgggagctgcagcagttctacaacagccagggccgcctgcctgatggccgggtggtgctgtgcttcggggaggagttcccagacatggcccccctgcggagcaagctgatcctggtgcagatcgagcagctgtatgtgcggcagctggccgaggaggccggcaagagctgtggggccggctctgtgatgcaggcccctgaggagcccccaccagaccaggtgttcaggatgtttcctgacatctgtgccagccaccagaggagcttcttccgggagaaccagcagatcaccgtgtag

SEQ ID NO: 156269 - DNA, 546 bp, synthetic construct
  misc_feature 1..546: note = Description of Artificial Sequence: Synthetic coding sequence
  source 1..546: mol_type = other DNA
atggccggcagccgggaggtggtggccatggactgtgagatggtgggcctgggcccccaccgggagagcggcctggcccgctgcagcctggtgaatgtgcacggggctgtgctgtatgacaagttcatccggcctgagggggagatcacagactaccgcaccagggtgtctggagtgaccccccagcacatggtgggcgccaccccatttgctgtggcccggctggagatcctgcagctgctgaagggcaagctggtggtgggccatgacctgaagcatgacttccaggccctgaaggaggacatgagcggctacaccatctatgacaccagcacagaccggctgctgtggagggaggccaagctggaccactgccggcgggtgtccctgcgggtgctgtctgagcggctgctgcacaagagcatccagaacagcctgctgggccacagctctgtggaggatgcccgggccaccatggagctgtaccagatcagccagaggatccgggcccggcggggcctgccccggctggccgtgtctgactag

SEQ ID NO: 156270 - DNA, 546 bp, synthetic construct; identical to SEQ ID NO: 156269
  misc_feature 1..546: note = Description of Artificial Sequence: Synthetic coding sequence
  source 1..546: mol_type = other DNA

SEQ ID NO: 156271 - DNA, 1062 bp, synthetic construct
  misc_feature 1..1062: note = Description of Artificial Sequence: Synthetic coding sequence
  source 1..1062: mol_type = other DNA
atgagcaccctgctgctgaacctggactttggagagcccccacccaagaaggccctggagggcaatgccaagcacaggaactttgtgaagaagaggcggctgctggagcggcggggcttcctgagcaagaagaaccagccccccagcaaggcccccaagctgcacagcgagcccagcaagaagggggagacccccaccgtggatggcacctggaagacccccagcttccccaagaagaagacagctgccagcagcaatggcagcggccagcccctggacaagaaggctgctgtgtcctggctgaccccagcccccagcaagaaggctgacagcgtggccgccaaggtggacctgctgggggagttccagagcgccctgcccaagatcaacagccaccccaccaggagccagaagaagagcagccagaagaagagcagcaagaagaaccacccccagaagaatgccccccagaacagcacccaggcccacagtgaaaataaatgttctggggccagccagaagctgcccaggaagatggtggccatcgactgtgagatggtgggcaccggccccaagggccacgtgagcagcctggcccgctgcagcatcgtgaactacaatggagatgtgctgtatgatgagtacatcctgcccccctgccacatcgtggactaccgcacccgctggagcggcatcaggaagcagcacatggtgaatgccacccccttcaagatcgcccggggccagatcctgaagatcctgaccgggaagatcgtggtgggccacgccatccacaatgacttcaaggccctgcagtacttccaccccaagagcctgacccgggacaccagccacatcccccccctgaacaggaaggctgactgcccagaaaatgccaccatgagcctgaagcacctgaccaagaagctgctgaacagagacatccaggtgggcaagagcggccacagctctgtggaggatgcccaggccaccatggagctgtacaagctggtggaggtggagtgggaggagcacctggccaggaaccccccaacagactag

SEQ ID NO: 156272 - DNA, 1062 bp, synthetic construct; identical to SEQ ID NO: 156271
  misc_feature 1..1062: note = Description of Artificial Sequence: Synthetic coding sequence
  source 1..1062: mol_type = other DNA

SEQ ID NO: 156273 - DNA, 360 bp, synthetic construct
  misc_feature 1..360: note = Description of Artificial Sequence: Synthetic coding sequence
  source 1..360: mol_type = other DNA
atggaggccagcgccctgaccagcagcgctgtgacctctgtggccaaggtggtgcgggtggccagcggcagcgctgtggtgctgcccctggccagaattgccaccgtggtgattggaggagtggtggccgtgcccatggtgctgagcgccatgggcttcaccgctgctggcatcgccagcagcagcattgctgccaagatgatgtctgctgctgccatcgccaatggaggcggcgtggccagcggcagcctggtggccaccctgcagagcctgggcgccaccggcctgagcggcctgaccaagttcatcctgggcagcatcggcagcgccatcgctgctgtgattgcccgcttctactag

SEQ ID NO: 156274 - DNA, 369 bp, synthetic construct
  misc_feature 1..369: note = Description of Artificial Sequence: Synthetic coding sequence
  source 1..369: mol_type = other DNA
atggaggccagcgccctgaccagcagcgctgtgacctctgtggccaaggtggtgcgggtggccagcggcagcgctgtggtgctgcccctggccagaattgccaccgtggtgattggaggaggagagagcgtggtggccgtgcccatggtgctgagcgccatgggcttcaccgctgctggcatcgccagcagcagcattgctgccaagatgatgtctgctgctgccatcgccaacggcggcggcgtggccagcggcagcctggtggccaccctgcagagcctgggcgccaccggcctgagcggcctgaccaagttcatcctgggcagcatcggcagcgccatcgccgccgtcatcgcccgcttctactag

SEQ ID NO: 156275 - DNA, 369 bp, synthetic construct
  misc_feature 1..369: note = Description of Artificial Sequence: Synthetic coding sequence
  source 1..369: mol_type = other DNA
atggaggccagcgccctgaccagcagcgctgtgacctctgtggccaaggtggtgcgggtggccagcggcagcgctgtggtgctgcccctggccagaattgccaccgtggtgattggaggagtggccagcatcgtggccgtgcccatggtgctgagcgccatgggcttcaccgctgctggcatcgccagcagcagcattgctgccaagatgatgtctgctgctgccatcgccaacggcggcggcgtggccagcggcagcctggtggccaccctgcagagcctgggcgccaccggcctgagcggcctgaccaagttcatcctgggcagcatcggcagcgccatcgccgccgtcatcgcccgcttctactag

SEQ ID NO: 156276 - DNA, 189 bp, synthetic construct
  misc_feature 1..189: note = Description of Artificial Sequence: Synthetic coding sequence
  source 1..189: mol_type = other DNA
atggaggccagcgccctgaccagcagcgctgtgacctctgtggccaaggtggtgcgggtggccagcggcagcgctgtggtgctgcccctggccagaattgccaccgtggtgattggaggagtggtggccgtgcccatggtgctgagcgccatgggcttcaccgctgctggcatcgccagcagcagctag

SEQ ID NO: 156277 - DNA, 174 bp, synthetic construct
  misc_feature 1..174: note = Description of Artificial Sequence: Synthetic coding sequence
  source 1..174: mol_type = other DNA
atggaggccagcgccctgaccagcagcgctgtgacctctgtggccaaggtggtgcgggtggccagcggcagcgctgtggtgctgcccctggccagaattgccaccgtggtgattggaggagtggtggccgtgcccatggtgctgagcgccatgggcttcaccgctgctggatag

SEQ ID NO: 156278 - DNA, 360 bp, synthetic construct; identical to SEQ ID NO: 156273
  misc_feature 1..360: note = Description of Artificial Sequence: Synthetic coding sequence
  source 1..360: mol_type = other DNA

SEQ ID NO: 156279 - DNA, 123 bp, synthetic construct
  misc_feature 1..123: note = Description of Artificial Sequence: Synthetic coding sequence
  source 1..123: mol_type = other DNA
atggaggccagcgccctgaccagcagcgctgtgacctctgtggccaaggtggtgcgggtggccagcggcagcgctgtggtgctgcccctggccagaattgccaccgtggtgattggaggatag

SEQ ID NO: 156280 - DNA, 282 bp, synthetic construct
  misc_feature 1..282: note = Description of Artificial Sequence: Synthetic coding sequence
  source 1..282: mol_type = other DNA
atggaggccagcgccctgaccagcagcgctgtgacctctgtggccaaggtggtgcgggtggccagcggcagcgctgtggtgctgcccctggccagaattgccaccgtggtgattggaggagtggtggccgtgcccatggtgctgagcgccatgggcttcaccgctgctggcatcgccagcagcagcattgctgccaagatgatgtctgctgctgccatcgccaatggaggcggcgtggccagcggcagcctggtggccaccctgcagagcctgggcgcctag

SEQ ID NO: 156281 - DNA, 2358 bp, synthetic construct
  misc_feature 1..2358: note = Description of Artificial Sequence: Synthetic coding sequence
  source 1..2358: mol_type = other DNA
atgggcaagaagtacaagaacatcgtgctgctgaagggcctggaggtgatcaatgactaccacttcaggatggtgaagagcctgctgagcaatgacctgaagctgaacctgaagatgagggaggagtatgacaagatccagattgctgacctgatggaggagaagttcagaggagatgctggcctgggcaagctgatcaagatctttgaggacatccccaccctggaggacctggccgagaccctgaagaaggagaagctgaaggtgaagggccctgccctgagcaggaagaggaagaaggaggtggatgccaccagccctgcccccagcaccagcagcacagtgaagacagaaggagctgaggccacccctggggcccagaagaggaagaagagcaccaaggagaaggccggccccaagggcagcaaggtgtctgaggagcagacccagccccccagccctgctggagctggcatgagcacagccatgggccgcagccccagccccaagaccagcctgagcgccccacccaacagcagcagcacagagaaccccaagacagtggccaagtgccaggtgacccccaggagaaatgtgctgcagaagaggcctgtgattgtgaaggtgctgagcaccaccaagccctttgaatatgagaccccagagatggagaagaagatcatgttccacgccaccgtggccacccagacccagttcttccacgtgaaggtgctgaacaccagcctgaaggagaagttcaacgggaagaagatcatcatcatcagtgactacctggagtatgacagcctgctggaggtgaatgaggagagcacagtgtctgaggccggccccaaccagacctttgaggtgcccaacaagatcatcaacagagccaaggagaccctgaagattgacatcctgcacaagcaggccagcggcaacatcgtgtatggagtcttcatgctgcacaagaagacagtgaaccagaagaccaccatctatgagatccaggatgaccggggcaagatggatgtggtgggcaccggccagtgccacaacatcccctgtgaggagggggacaagctgcagctgttctgcttccggctgaggaagaagaaccagatgagcaagctgatcagcgagatgcacagcttcatccagatcaagaagaagaccaaccccagaaataatgaccccaagtccatgaagctgccccaggagcagaggcagctgccctaccccagcgaggccagcaccaccttccctgagagccacctgcggaccccccagatgccacccaccacccccagcagcagcttcttcaccaagaagtctgaggacaccatcagcaagatgaatgacttcatgaggatgcagatcctgaaggagggcagccacttccctggccccttcatgaccagcatcggccctgctgagagccacccccacaccccccagatgccacccagcacccccagcagcagcttcctgaccaccaagtctgaggacaccatcagcaagatgaatgacttcatgaggatgcagatcctgaaggagggcagccacttccctggccccttcatgaccagcatcggccctgctgagagccacccccacaccccccagatgccacccagcacccccagcagcagcttcctgaccaccctgaagccccggctgaagacagagcctgaggaggtgtccattgaggacagcgcccagagcgacctgaaggaggtgatggtgctgaatgccacagagagctttgtgtatgagcccaaggagcagaagaagatgtttcatgccaccgtggccacagaaaatgaggtgttccgggtgaaggtgttcaacatcgacctgaaggagaagttcacccccaagaagatcatcgccatcgccaactacgtgtgcagaaatggcttcctggaggtgtaccccttcaccctggtggctgatgtgaatgctgacaggaacatggagatccccaagggcctcatccgcagcgcctctgtgacccccaagatcaaccagctgtgcagccagaccaagggcagctttgtgaatggagtgtttgaggtgcacaagaagaatgtgcggggggagttcacctactatgagatccaggacaacacaggcaagatggaggtggtggtgcacggccgcctgaccaccatcaactgtgaggagggggacaagctgaagctgacctgctttgagctggcccccaagagcggcaacacaggagagctgcggagcgtcatccacagccacatcaaggtgatcaagaccaggaagaacaagaaggacatcctgaacccagacagctccatggagaccagcccagacttcttcttctag

SEQ ID NO: 156282 - DNA, 2022 bp, synthetic construct
  misc_feature 1..2022: note = Description of Artificial Sequence: Synthetic coding sequence
  source 1..2022: mol_type = other DNA
atgggcaagaagtacaagaacatcgtgctgctgaagggcctggaggtgatcaatgactaccacttcaggatggtgaagagcctgctgagcaatgacctgaagctgaacctgaagatgagggaggagtatgacaagatccagattgctgacctgatggaggagaagttcagaggagatgctggcctgggcaagctgatcaagatctttgaggacatccccaccctggaggacctggccgagaccctgaagaaggagaagctgaaggtgaagggccctgccctgagcaggaagaggaagaaggaggtggatgccaccagccctgcccccagcaccagcagcacagtgaagacagaaggagctgaggccacccctggggcccagaagaggaagaagagcaccaaggagaaggccggccccaagggcagcaaggtgtctgaggagcagacccagccccccagccctgctggagctggcatgagcacagccatgggccgcagccccagccccaagaccagcctgagcgccccacccaacagcagcagcacagagaaccccaagacagtggccaagtgccaggtgacccccaggagaaatgtgctgcagaagaggcctgtgattgtgaaggtgctgagcaccaccaagccctttgaatatgagaccccagagatggagaagaagatcatgttccacgccaccgtggccacccagacccagttcttccacgtgaaggtgctgaacaccagcctgaaggagaagttcaacgggaagaagatcatcatcatcagtgactacctggagtatgacagcctgctggaggtgaatgaggagagcacagtgtctgaggccggccccaaccagacctttgaggtgcccaacaagatcatcaacagagccaaggagaccctgaagattgacatcctgcacaagcaggccagcggcaacatcgtgtatggagtcttcatgctgcacaagaagacagtgaaccagaagaccaccatctatgagatccaggatgaccggggcaagatggatgtggtgggcaccggccagtgccacaacatcccctgtgaggagggggacaagctgcagctgttctgcttccggctgaggaagaagaaccagatgagcaagctgatcagcgagatgcacagcttcatccagatcaagaagaagaccaaccccagaaataatgaccccaagtccatgaagctgccccaggagcagaggcagctgccctaccccagcgaggccagcaccaccttccctgagagccacctgcggaccccccagatgccacccaccacccccagcagcagcttcttcaccaagctgaagccccggctgaagacagagcctgaggaggtgtccattgaggacagcgcccagagcgacctgaaggaggtgatggtgctgaatgccacagagagctttgtgtatgagcccaaggagcagaagaagatgtttcatgccaccgtggccacagaaaatgaggtgttccgggtgaaggtgttcaacatcgacctgaaggagaagttcacccccaagaagatcatcgccatcgccaactacgtgtgcagaaatggcttcctggaggtgtaccccttcaccctggtggctgatgtgaatgctgacaggaacatggagatccccaagggcctcatccgcagcgcctctgtgacccccaagatcaaccagctgtgcagccagaccaagggcagctttgtgaatggagtgtttgaggtgcacaagaagaatgtgcggggggagttcacctactatgagatccaggacaacacaggcaagatggaggtggtggtgcacggccgcctgaccaccatcaactgtgaggagggggacaagctgaagctgacctgctttgagctggcccccaagagcggcaacacaggagagctgcggagcgtcatccacagccacatcaaggtgatcaagaccaggaagaacaagaaggacatcctgaacccagacagctccatggagaccagcccagacttcttcttctag

SEQ ID NO: 156283 - DNA, 1245 bp, synthetic construct
  misc_feature 1..1245: note = Description of Artificial Sequence: Synthetic coding sequence
  source 1..1245: mol_type = other DNA
atgggcaagaagtacaagaacatcgtgctgctgaagggcctggaggtgatcaatgactaccacttcaggatggtgaagagcctgctgagcaatgacctgaagctgaacctgaagatgagggaggagtatgacaagatccagattgctgacctgatggaggagaagttcagaggagatgctggcctgggcaagctgatcaagatctttgaggacatccccaccctggaggacctggccgagaccctgaagaaggagaagctgaaggtgaagggccctgccctgagcaggaagaggaagaaggaggtggatgccaccagccctgcccccagcaccagcagcacagtgaagacagaaggagctgaggccacccctggggcccagaagaggaagaagagcaccaaggagaaggccggccccaagggcagcaaggtgtctgaggagcagacccagccccccagccctgctggagctggcatgagcacagccatgggccgcagccccagccccaagaccagcctgagcgccccacccaacagcagcagcacagagaaccccaagacagtggccaagtgccaggtgacccccaggagaaatgtgctgcagaagaggcctgtgattgtgaaggtgctgagcaccaccaagccctttgaatatgagaccccagagatggagaagaagatcatgttccacgccaccgtggccacccagacccagttcttccacgtgaaggtgctgaacaccagcctgaaggagaagttcacccccaagaagatcatcgccatcgccaactacgtgtgcagaaatggcttcctggaggtgtaccccttcaccctggtggctgatgtgaatgctgacaggaacatggagatccccaagggcctcatccgcagcgcctctgtgacccccaagatcaaccagctgtgcagccagaccaagggcagctttgtgaatggagtgtttgaggtgcacaagaagaatgtgcggggggagttcacctactatgagatccaggacaacacaggcaagatggaggtggtggtgcacggccgcctgaccaccatcaactgtgaggagggggacaagctgaagctgacctgctttgagctggcccccaagagcggcaacacaggagagctgcggagcgtcatccacagccacatcaaggtgatcaagaccaggaagaacaagaaggacatcctgaacccagacagctccatggagaccagcccagacttcttcttctag

SEQ ID NO: 156284 - DNA, 2190 bp, synthetic construct
  misc_feature 1..2190: note = Description of Artificial Sequence: Synthetic coding sequence
  source 1..2190: mol_type = other DNA
atgggcaagaagtacaagaacatcgtgctgctgaagggcctggaggtgatcaatgactaccacttcaggatggtgaagagcctgctgagcaatgacctgaagctgaacctgaagatgagggaggagtatgacaagatccagattgctgacctgatggaggagaagttcagaggagatgctggcctgggcaagctgatcaagatctttgaggacatccccaccctggaggacctggccgagaccctgaagaaggagaagctgaaggtgaagggccctgccctgagcaggaagaggaagaaggaggtggatgccaccagccctgcccccagcaccagcagcacagtgaagacagaaggagctgaggccacccctggggcccagaagaggaagaagagcaccaaggagaaggccggccccaagggcagcaaggtgtctgaggagcagacccagccccccagccctgctggagctggcatgagcacagccatgggccgcagccccagccccaagaccagcctgagcgccccacccaacagcagcagcacagagaaccccaagacagtggccaagtgccaggtgacccccaggagaaatgtgctgcagaagaggcctgtgattgtgaaggtgctgagcaccaccaagccctttgaatatgagaccccagagatggagaagaagatcatgttccacgccaccgtggccacccagacccagttcttccacgtgaaggtgctgaacaccagcctgaaggagaagttcaacgggaagaagatcatcatcatcagtgactacctggagtatgacagcctgctggaggtgaatgaggagagcacagtgtctgaggccggccccaaccagacctttgaggtgcccaacaagatcatcaacagagccaaggagaccctgaagattgacatcctgcacaagcaggccagcggcaacatcgtgtatggagtcttcatgctgcacaagaagacagtgaaccagaagaccaccatctatgagatccaggatgaccggggcaagatggatgtggtgggcaccggccagtgccacaacatcccctgtgaggagggggacaagctgcagctgttctgcttccggctgaggaagaagaaccagatgagcaagctgatcagcgagatgcacagcttcatccagatcaagaagaagaccaaccccagaaataatgaccccaagtccatgaagctgccccaggagcagaggcagctgccctaccccagcgaggccagcaccaccttccctgagagccacctgcggaccccccagatgccacccaccacccccagcagcagcttcttcaccaagaagtctgaggacaccatcagcaagatgaatgacttcatgaggatgcagatcctgaaggagggcagccacttccctggccccttcatgaccagcatcggccctgctgagagccacccccacaccccccagatgccacccagcacccccagcagcagcttcctgaccaccctgaagccccggctgaagacagagcctgaggaggtgtccattgaggacagcgcccagagcgacctgaaggaggtgatggtgctgaatgccacagagagctttgtgtatgagcccaaggagcagaagaagatgtttcatgccaccgtggccacagaaaatgaggtgttccgggtgaaggtgttcaacatcgacctgaaggagaagttcacccccaagaagatcatcgccatcgccaactacgtgtgcagaaatggcttcctggaggtgtaccccttcaccctggtggctgatgtgaatgctgacaggaacatggagatccccaagggcctcatccgcagcgcctctgtgacccccaagatcaaccagctgtgcagccagaccaagggcagctttgtgaatggagtgtttgaggtgcacaagaagaatgtgcggggggagttcacctactatgagatccaggacaacacaggcaagatggaggtggtggtgcacggccgcctgaccaccatcaactgtgaggagggggacaagctgaagctgacctgctttgagctggcccccaagagcggcaacacaggagagctgcggagcgtcatccacagccacatcaaggtgatcaagaccaggaagaacaagaaggacatcctgaacccagacagctccatggagaccagcccagacttcttcttctag

SEQ ID NO: 156285 - DNA, 2190 bp, synthetic construct; identical to SEQ ID NO: 156284
  misc_feature 1..2190: note = Description of Artificial Sequence: Synthetic coding sequence
  source 1..2190: mol_type = other DNA

SEQ ID NO: 156286 - DNA, 384 bp, synthetic construct
  misc_feature 1..384: note = Description of Artificial Sequence: Synthetic coding sequence
  source 1..384: mol_type = other DNA
atgggcaagaagtacaagaacatcgtgctgctgaagggcctggaggtgatcaatgactaccacttcaggatggtgaagagcctgctgagcaatgacctgaagctgaacctgaagatgagggaggagtatgacaagatccagattgctgacctgatggaggagaagttcagaggagatgctggcctgggcaagctgatcaagatctttgaggacatccccaccctggaggacctggccgagaccctgaagaaggagaagctgaaggtgaagggccctgccctgagcaggaagaggaagaaggaggtggatgccaccagccctgcccccagcaccagcagcacagtgaagacagaaggagctgaggccacccctggggcccagtag

SEQ ID NO: 156287 - DNA, 2202 bp, synthetic construct
  misc_feature 1..2202: note = Description of Artificial Sequence: Synthetic coding sequence
  source 1..2202: mol_type = other DNA
atgtctgtgaagatgggcaagaagtacaagaacatcgtgctgctgaagggcctggaggtgatcaatgactaccacttcaggatggtgaagagcctgctgagcaatgacctgaagctgaacctgaagatgagggaggagtatgacaagatccagattgctgacctgatggaggagaagttcagaggagatgctggcctgggcaagctgatcaagatctttgaggacatccccaccctggaggacctggccgagaccctgaagaaggagaagctgaaggtgaagggccctgccctgagcaggaagaggaagaaggaggtggatgccaccagccctgcccccagcaccagcagcacagtgaagacagaaggagctgaggccacccctggggcccagaaccccaagacagtggccaagtgccaggtgacccccaggagaaatgtgctgcagaagaggcctgtgattgtgaaggtgctgagcaccaccaagccctttgaatatgagaccccagagatggagaagaagatcatgttccacgccaccgtggccacccagacccagttcttccacgtgaaggtgctgaacaccagcctgaaggagaagttcaacgggaagaagatcatcatcatcagtgactacctggagtatgacagcctgctggaggtgaatgaggagagcacagtgtctgaggccggccccaaccagacctttgaggtgcccaacaagatcatcaacagagccaaggagaccctgaagattgacatcctgcacaagcaggccagcggcaacatcgtgtatggagtcttcatgctgcacaagaagacagtgaaccagaagaccaccatctatgagatccaggatgaccggggcaagatggatgtggtgggcaccggccagtgccacaacatcccctgtgaggagggggacaagctgcagctgttctgcttccggctgaggaagaagaaccagatgagcaagctgatcagcgagatgcacagcttcatccagatcaagaagaagaccaaccccagaaataatgaccccaagtccatgaagctgccccaggagcagaggcagctgccctaccccagcgaggccagcaccaccttccctgagagccacctgcggaccccccagatgccacccaccacccccagcagcagcttcttcaccaagaagtctgaggacaccatcagcaagatgaatgacttcatgaggatgcagatcctgaaggagggcagccacttccctggccccttcatgaccagcatcggccctgctgagagccacccccacaccccccagatgccacccagcacccccagcagcagcttcctgaccaccaagtctgaggacaccatcagcaagatgaatgacttcatgaggatgcagatcctgaaggagggcagccacttccctggccccttcatgaccagcatcggccctgctgagagccacccccacaccccccagatgccacccagcacccccagcagcagcttcctgaccaccctgaagccccggctgaagacagagcctgaggaggtgtccattgaggacagcgcccagagcgacctgaaggaggtgatggtgctgaatgccacagagagctttgtgtatgagcccaaggagcagaagaagatgtttcatgccaccgtggccacagaaaatgaggtgttccgggtgaaggtgttcaacatcgacctgaaggagaagttcacccccaagaagatcatcgccatcgccaactacgtgtgcagaaatggcttcctggaggtgtaccccttcaccctggtggctgatgtgaatgctgacaggaacatggagatccccaagggcctcatccgcagcgcctctgtgacccccaagatcaaccagctgtgcagccagaccaagggcagctttgtgaatggagtgtttgaggtgcacaagaagaatgtgcggggggagttcacctactatgagatccaggacaacacaggcaagatggaggtggtggtgcacggccgcctgaccaccatcaactgtgaggagggggacaagctgaagctgacctgctttgagctggcccccaagagcggcaacacaggagagctgcggagcgtcatccacagccacatcaaggtgatcaagaccaggaagaacaagaaggacatcctgaacccagacagctccatggagaccagcccagacttcttcttctag

SEQ ID NO: 156288 - DNA, 543 bp, synthetic construct
  misc_feature 1..543: note = Description of Artificial Sequence: Synthetic coding sequence
  source 1..543: mol_type = other DNA
atgggcaagaagtacaagaacatcgtgctgctgaagggcctggaggtgatcaatgactaccacttcaggatggtgaagagcctgctgagcaatgacctgaagctgaacctgaagatgagggaggagtatgacaagatccagattgctgacctgatggaggagaagttcagaggagatgctggcctgggcaagctgatcaagatctttgaggacatccccaccctggaggacctggccgagaccctgaagaaggagaagctgaaggtgaagggccctgccctgagcaggaagaggaagaaggaggtggatgccaccagccctgcccccagcaccagcagcacagtgaagacagaaggagctgaggccacccctggggcccagaagaggaagaagagcaccaaggagaaggccggccccaagggcagcaaggtgtctgaggagcagacccagccccccagccctgctggagctggcatgagcacagccatgggccgcagccccagccccaagaccagcctgagcgccccacccaacagcagctag

SEQ ID NO: 156289 - DNA, 1485 bp, synthetic construct
  misc_feature 1..1485: note = Description of Artificial Sequence: Synthetic coding sequence
  source 1..1485: mol_type = other DNA
tgaagcacagagaaccccaagacagtggccaagtgccaggtgaccccaagaagaaatgtgctgcagaagaggcctgtgattgtgaaggtgctgagcaccaccaagccctttgaatatgagaccccagagatggagaagaagatcatgtttcatgccaccgtggccacccagacccagttcttccacgtgaaggtgctgaacaccagcctgaaggagaagttcaacgggaagaagatcatcatcatcagtgactacctggagtatgacagcctgctggaggtgaatgaggagagcacagtgtctgaggccggccccaaccagacctttgaggtgcccaacaagatcatcaacagagccaaggagaccctgaagattgacatcctgcacaagcaggccagcggcaacatcgtgtatggagtcttcatgctgcacaagaagacagtgaaccagaagaccaccatctatgagatccaggatgaccggggcaagatggatgtggtgggcaccggccagtgccacaacatcccctgtgaggagggggacaagctgcagctgttctgcttccggctgaggaagaagaaccagatgagcaagctgatcagcgagatgcacagcttcatccagatcaagaagaagaccaaccccaggaacaatgaccccaagtccatgaagctgccccaggagcagaggcagctgccctaccccagcgaggccagcaccaccttccctgagagccacctgcggaccccccagatgccacccaccacccccagcagcagcttcttcaccaagctgaagccccggctgaagacagagcctgaggaggtgtccattgaagattctgcccagagcgacctgaaggaggtgatggtgctgaatgccacagagagctttgtgtatgagcccaaggagcagaagaagatgttccacgccaccgtggccacagaaaatgaggtgttccgggtgaaggtgttcaacatcgacctgaaggagaagttcacccccaagaagatcatcgccatcgccaactacgtgtgcagaaatggcttcctggaggtgtaccccttcaccctggtggctgatgtgaatgctgacaggaacatggagatccccaagggcctcatccgcagcgcctctgtgacccccaagatcaaccagctgtgcagccagaccaagggcagctttgtgaatggagtgtttgaggtgcacaagaagaatgtgcggggggagttcacctactatgagatccaggacaacacaggcaagatggaggtggtggtgcacggccgcctgaccaccatcaactgtgaggagggggacaagctgaagctgacctgctttgagctggcccccaagagcggcaacacaggagagctgcggagcgtcatccacagccacatcaaggtgatcaagaccaggaagaacaagaaggacatcctgaacccagacagctccatggagaccagcccagacttcttcttctag

SEQ ID NO: 156290 - DNA, 753 bp, synthetic construct
  misc_feature 1..753: note = Description of Artificial Sequence: Synthetic coding sequence
  source 1..753: mol_type = other DNA
atgaccctgagccccctgctgctcttcctgccccccctgctgctgctgctggatgtgcccacagctgctgtgcaggccagccccctgcaggccctggacttctttggaaatggacctcctgtgaactacaagacaggcaacctgtacctgcggggccccctgaagaagagcaatgcccccctggtgaatgtgaccctgtactatgaggccctgtgtggcggctgccgggccttcctgatccgggagctgttccccacctggctgctggtgatggagatcctgaatgtgaccctggtgccctatggaaatgcccaggagcagaatgtgtctggccgctgggagttcaagtgccagcacggggaggaggagtgcaagttcaacaaggtggaggcctgtgtgctggatgagctggacatggagctggccttcctgaccatcgtgtgcatggaggagtttgaggacatggagaggagcctgcccctgtgcctgcagctgtatgcccctggcctgagcccagacaccatcatggagtgtgccatgggagaccggggcatgcagctgatgcacgccaatgcccagaggacagatgccctgcagccccctcatgaatatgtgccctgggtgacagtgaatggcaagcccctggaggaccagacccagctgctgaccctggtgtgccagctgtaccagggcaagaagccagatgtgtgccccagcagcaccagcagcctgcggtctgtgtgcttcaagtag

SEQ ID NO: 156291 - DNA, 588 bp, synthetic construct
  misc_feature 1..588: note = Description of Artificial Sequence: Synthetic coding sequence
  source 1..588: mol_type = other DNA
atggccctgctcttccccctgctggccgccctggtgatgaccagctacagccctgtgggcagcctgggctgtgacctgccccagaaccacggcctgctgagcaggaacaccctggtgctgctgcaccagatgaggcgcatcagccccttcctgtgcctgaaggaccggcgggacttccgcttcccccaggagatggtgaagggcagccagctgcagaaggcccacgtgatgtctgtgctgcacgagatgctgcagcagatcttcagcctcttccacacagagaggagcagcgctgcctggaacatgaccctgctggaccagctgcacacaggcctgcaccagcagctgcagcacctggagacctgcctgctgcaggtggtgggggagggggagagcgctggggccatcagcagccctgccctgaccctgcggcgctacttccagggcatccgggtgtacctgaaggagaagaagtacagcgactgtgcctgggaggtggtgaggatggagatcatgaagagcctcttcctgagcaccaacatgcaggagcggctgcggagcaaggaccgggacctgggcagcagctag

SEQ ID NO: 156292 - DNA, 861 bp, synthetic construct
  misc_feature 1..861: note = Description of Artificial Sequence: Synthetic coding sequence
  source 1..861: mol_type = other DNA
atgtctgcccccctggatgctgccctgcacgccctgcaggaggagcaggcccggctgaagatgaggctgtgggacctgcagcagctgaggaaggagctgggggacagccccaaggacaaggtgcccttctctgtgcccaagatccccctggtgttccggggccacacccagcaggaccctgaggtgcccaagagcctggtgagcaacctgcgcatccactgccccctgctggccggcagcgccctgatcacctttgatgaccccaaggtggccgagcaggtgctgcagcagaaggagcacaccatcaacatggaggagtgccgcctgcgggtgcaggtgcagcccctggagctgcccatggtgaccaccatccagatgagcagccagctgtctggaagaagagtgctggtgacaggcttccctgccagcctgcggctgtctgaggaggagctgctggacaagctggagatcttcttcggcaagaccagaaatggaggaggagatgtggatgtgcgggagctgctgcccggctctgtgatgctgggctttgccagagatggagtggcccagaggctgtgccagatcggccagttcaccgtgcccctgggcggccagcaggtgcccctgcgggtgagcccctacgtgaatggagagatccagaaggccgagatccgcagccagcctgtgcccaggtctgtgctggtgctgaacatcccagacatcctggatggccctgagctgcatgatgtgctggagatccacttccagaagcccacccggggcggcggggaggtggaggccctgactgtggtgccccagggccagcagggcctggccgtgttcaccagcgagagcggctag

SEQ ID NO: 156293 - DNA, 867 bp, synthetic construct
  misc_feature 1..867: note = Description of Artificial Sequence: Synthetic coding sequence
  source 1..867: mol_type = other DNA
atgtctgcccccctggatgctgccctgcacgccctgcaggaggagcaggcccggctgaagatgaggctgtgggacctgcagcagctgaggaaggagctgggggacagccccaaggacaaggtgcccttctctgtgcccaagatccccctggtgttccggggccacacccagcaggaccctgaggtgcccaagagcctggtgagcaacctgcgcatccactgccccctgctggccggcagcgccctgatcacctttgatgaccccaaggtggccgagcaggtgctgcagcagaaggagcacaccatcaacatggaggagtgccgcctgcgggtgcaggtgcagcccctggagctgcccatggtgaccaccatccaggtgatgatgagcagccagctgtctggaagaagagtgctggtgacaggcttccctgccagcctgcggctgtctgaggaggagctgctggacaagctggagatcttcttcggcaagaccagaaatggaggaggagatgtggatgtgcgggagctgctgcccggctctgtgatgctgggctttgccagagatggagtggcccagaggctgtgccagatcggccagttcaccgtgcccctgggcggccagcaggtgcccctgcgggtgagcccctacgtgaatggagagatccagaaggccgagatccgcagccagcctgtgcccaggtctgtgctggtgctgaacatcccagacatcctggatggccctgagctgcatgatgtgctggagatccacttccagaagcccacccggggcggcggggaggtggaggccctgactgtggtgccccagggccagcagggcctggccgtgttcaccagcgagagcggctag

SEQ ID NO: 156294 - DNA, 1335 bp, synthetic construct
  misc_feature 1..1335: note = Description of Artificial Sequence: Synthetic coding sequence
  source 1..1335: mol_type = other DNA
atggctgtgaccacccggctgacctggctgcacgagaagatcctgcagaaccactttggaggcaagaggctgagcctgctgtacaagggctctgtgcacggcttcagaaatggagtgctgctggaccgctgctgcaaccagggccccaccctgaccgtcatctacagcgaggaccacatcattggagcctatgcagaggagagctaccaggagggcaagtatgccagcatcatcctgtttgccctgcaggacaccaagatcagcgagtggaagctgggcctgtgcaccccagagaccctcttctgctgtgatgtgaccaagtacaacagccccaccaacttccagattgatggaagaaacaggaaggtgatcatggacctgaagaccatggagaacctgggcctggcccagaactgcaccatcagcatccaggactatgaggtgttccgctgtgaggacagcctggatgagaggaagatcaagggcgtcatcgagctgaggaagagcctgctgagcgccctgcggacctatgagccctacggcagcctggtgcagcagatccgcatcctgctgctgggccccatcggggccggcaagagcagcttcttcaacagcgtgcgcagcgtcttccagggccacgtgacccaccaggccctggtgggcaccaacaccaccggcatcagcgagaagtaccgcacctacagcatcagagatggcaaggatggcaagtacctgcccttcatcctgtgtgacagcctgggcctgtctgagaaggagggcggcctgtgcagagatgacatcttctacatcctgaatggaaacatccgggaccgctaccagttcaaccccatggagagcatcaagctgaaccaccacgactacatcgacagccccagcctgaaggaccgcatccactgtgtggcctttgtgtttgatgccagcagcatccagtacttcagcagccagatgattgtgaagatcaagaggatcagaagagagctggtgaatgccggcgtggtgcacgtggccctgctgacccacgtggacagcatggacctgatcaccaagggggacctgattgaaattgaaagatgtgagcctgtgcgcagcaagctggaggaggtgcagaggaagctgggctttgccctgagtgacatctctgtggtgagcaactacagcagcgagtgggagctggaccctgtgaaggatgtgctgatcctgagcgccctgcggaggatgctgtgggccgcagatgacttcctggaggacctgccctttgagcagatcggcaacctgcgggaggagatcatcaactgtgcccagggcaagaagtag

SEQ ID NO: 156295 - DNA, 588 bp, synthetic construct
  misc_feature 1..588: note = Description of Artificial Sequence: Synthetic coding sequence
  source 1..588: mol_type = other DNA
atggacctgaagaccatggagaacctgggcctggcccagaactgcaccatcagcatccaggactatgaggtgttccgctgtgaggacagcctggatgagaggaagatcaagggcgtcatcgagctgaggaagagcctgctgagcgccctgcggacctatgagccctacggcagcctggtgcagcagatccgcatcctgctgctgggccccatcggggccggcaagagcagcttcttcaacagcgtgcgcagcgtcttccagggccacgtgacccaccaggccctggtgggcaccaacaccaccggcatcagcgagaagtaccgcacctacagcatcagagatggcaaggatggcaagtacctgcccttcatcctgtgtgacagcctgggcctgtctgagaaggagggcggcctgtgcagagatgacatcttctacatcctgaatggaaacatccgggaccgctaccagttcaaccccatggagagcatcaagctgaaccaccacgactacatcgacagccccagcctgaaggaccgcatccactgtgtggcctttgtgtttgatgccagcagcatccagtacttctag

SEQ ID NO: 156296 - DNA, 231 bp, synthetic construct
  misc_feature 1..231: note = Description of Artificial Sequence: Synthetic coding sequence
  source 1..231: mol_type = other DNA
tgactgagtgacatctctgtggtgagcaactacagcagcgagtgggagctggaccctgtgaaggatgtgctgatcctgagcgccctgcggaggatgctgtgggccgcagatgacttcctggaggacctgccctttgagcagatcggccgctggtttggaggagtggaggcctggaagaggagcggcaacctgcgggaggagatcatcaactgtgcccagggcaagaagtag

SEQ ID NO: 156297 - DNA, 390 bp, synthetic construct
  misc_feature 1..390: note = Description of Artificial Sequence: Synthetic coding sequence
  source 1..390: mol_type = other DNA
atggagagcatcaagctgaaccaccacgactacatcgacagccccagcctgaaggaccgcatccactgtgtggcctttgtgtttgatgccagcagcatccagtacttcagcagccagatgattgtgaagatcaagaggatccggcgggagctggtgaatgctggggtggtgcacgtggccctgctgacccacgtggacagcatggacctgatcaccaagggggacctgattgaaattgagcgctgtgagcctgtgcgcagcaaggtgatgaatgatgccctgaggaagcacatcttctggggcatgctgctgcagagccacacctctgtgtacaagaacaagaacaagcagctgctgggcctgcggcgcatcaccaagctgctgaagtag

SEQ ID NO: 156298 - DNA, 585 bp, synthetic construct
  misc_feature 1..585: note = Description of Artificial Sequence: Synthetic coding sequence
  source 1..585: mol_type = other DNA
atgctgtgtgacaccatgggcctggatggagctgagggcgccggcctgtgcatggatgacatcccccacatcctgaagggctgcatgccagaccgctaccagttcaacagcaggaagcccatcaccccagagcacagcaccttcatcaccagccccagcctgaaggaccgcatccactgtgtggcctacgtgctggacatcaacagcattgacaacctgtacagcaagatgctggccaaggtgaagcaggtgcacaaggaggtgctgaactgtggcatcgcctacgtggccctgctgaccaaggtggatgactgcagcgaggtgctgcaggacaacttcctgaacatgagccgctccatgaccagccagagccgggtgatgaatgtgcacaagatgctgggcatccccatcagcaacatcctgatggtgggcaactatgccagtgacctggagctggaccccatgaaggacatcctgatcctgagcgccctgcggcagatgctgcgggctgctgatgacttcctggaggacctgcccctggaggagactggagccatcgagcgggccctgcagccctgcatctag

SEQ ID NO: 156299 - DNA, 1359 bp, synthetic construct
  misc_feature 1..1359: note = Description of Artificial Sequence: Synthetic coding sequence
  source 1..1359: mol_type = other DNA
atggaggtgaccacccggctgacctggaatgatgagaaccacctgaggaagctgctgggcaatgtgtccctgagcctgctgtacaagagctctgtgcatggaggcagcattgaggacatggtggagcgctgcagccggcagggctgcaccatcaccatggcctacatcgactacaacatgattgtggccttcatgctgggcaactacatcaacctgcacgagagcagcacagagcccaatgacagcctgtggttcagcctgcagaagaagaatgacaccacagaaattgagaccctgctgctgaacacagcccccaagatcattgatgagcagctggtgtgccgcctgagcaagacagacatcttcatcatctgccgggacaacaagatctacctggacaagatgatcaccaggaacctgaagctgcgcttctacggccaccggcagtacctggagtgtgaggtgttccgggtggagggcatcaaggacaacctggatgacatcaagaggatcatcaaggcccgggagcacaggaaccggctgctggccgacatccgggactaccggccctatgctgacctggtgtctgagatccgcatcctgctggtgggccctgtgggcagcggcaagagcagcttcttcaacagcgtgaagagcatcttccacggccacgtgacaggccaggccgtggtgggcagtgacatcaccagcatcacagagcgctaccgcatctacagcgtgaaggatggcaagaatggcaagagcctgcccttcatgctgtgtgacaccatgggcctggatggagctgagggcgccggcctgtgcatggatgacatcccccacatcctgaagggctgcatgccagaccgctaccagttcaacagcaggaagcccatcaccccagagcacagcaccttcatcaccagccccagcctgaaggaccgcatccactgtgtggcctacgtgctggacatcaacagcattgacaacctgtacagcaagatgctggccaaggtgaagcaggtgcacaaggaggtgctgaactgtggcatcgcctacgtggccctgctgaccaaggtggatgactgcagcgaggtgctgcaggacaacttcctgaacatgagccgctccatgaccagccagagccgggtgatgaatgtgcacaagatgctgggcatccccatcagcaacatcctgatggtgggcaactatgccagtgacctggagctggaccccatgaaggacatcctgatcctgagcgccctgcggcagatgctgcgggctgctgatgacttcctggaggacctgcccctggaggagactggagccatcgagcgggccctgcagccctgcatctag

SEQ ID NO: 156300 - DNA, 294 bp, synthetic construct
  misc_feature 1..294: note = Description of Artificial Sequence: Synthetic coding sequence
  source 1..294: mol_type = other DNA
atggaggtgaccacccggctgacctggaatgatgagaaccacctgaggaagctgctgggcaatgtgtccctgagcctgctgtacaagagctctgtgcatggaggcagcattgaggacatggtggagcgctgcagccggcagggctgcaccatcaccatggcctacatcgactacaacatgattgtggccttcatgctgggcaactacatcaacctgcacgagagcagcacagagcccaatgacagcctgtggttcagcctgcagaagaagaatgacaccacagaaattgaatag

SEQ ID NO: 156301 - DNA, 1437 bp, synthetic construct
  misc_feature 1..1437: note = Description of Artificial Sequence: Synthetic coding sequence
  source 1..1437: mol_type = other DNA
atgagcaccaatggagatgaccaccaggtgaaggacagcctggagcagctgcgctgccacttcacctgggagctgagcattgatgatgatgagatgccagacctggagaacagagtgctggaccagatcgagttcctggacaccaagtacagcgtgggcatccacaacctgctggcctacgtgaagcacctgaagggccagaatgaggaggccctgaagagcctgaaggaggccgagaacctgatgcaggaggagcatgacaaccaggccaacgtgcgcagcctggtgacctggggcaactttgcctggatgtactaccacatgggccgcctggccgaggcccagacctacctggacaaggtggagaacatctgcaagaagctgagcaaccccttccgctacaggatggagtgcccagaaattgactgtgaggagggctgggccctgctgaagtgtggcggcaagaactatgagcgggccaaggcctgctttgagaaggtgctggaggtggaccctgaaaatcctgagagcagcgctggctacgccatcagcgcctaccgcctggatggcttcaagctggccaccaagaaccacaagcccttcagcctgctgcccctgcggcaggccgtgcggctgaacccagacaatggctacatcaaggtgctgctggccctgaagctgcaggatgagggccaggaggccgagggggagaagtacatcgaggaggccctggccaacatgagcagccagacctacgtgttccgctatgctgccaagttctacagaaggaagggctctgtggacaaggccctggagctgctgaagaaggccctgcaggagacccccacctctgtgctgctgcaccaccagatcggcctgtgctacaaggcccagatgatccagatcaaggaggccaccaagggccagccccggggccagaaccgggagaagctggacaagatgatccgcagcgccatcttccactttgaatctgctgtggagaagaagcccacctttgaggtggcccacctggacctggccaggatgtacattgaagctggcaaccacaggaaggccgaggagaacttccagaagctgctgtgcatgaagcctgtggtggaggagaccatgcaggacatccacttccactacggccgcttccaggagttccagaagaagagtgatgtgaatgccatcatccactacctgaaggccatcaagattgagcaggccagcctgacccgggacaagagcatcaacagcctgaagaagctggtgctgaggaagctgcggaggaaggccctggacctggagagcctgagcctgctgggctttgtgtacaagctggagggcaacatgaatgaggccctggagtactatgaaagagccctgcggctggccgctgactttgaaaattctgtgcggcagggcccctag

SEQ ID NO: 156302 - DNA, 1344 bp, synthetic construct
  misc_feature 1..1344: note = Description of Artificial Sequence: Synthetic coding sequence
  source 1..1344: mol_type = other DNA
atgccagacctggagaacagagtgctggaccagatcgagttcctggacaccaagtacagcgtgggcatccacaacctgctggcctacgtgaagcacctgaagggccagaatgaggaggccctgaagagcctgaaggaggccgagaacctgatgcaggaggagcatgacaaccaggccaacgtgcgcagcctggtgacctggggcaactttgcctggatgtactaccacatgggccgcctggccgaggcccagacctacctggacaaggtggagaacatctgcaagaagctgagcaaccccttccgctacaggatggagtgcccagaaattgactgtgaggagggctgggccctgctgaagtgtggcggcaagaactatgaaagagccaaggcctgctttgagaaggtgctggaggtggaccctgagaaccctgagagcagcgctggctacgccatcagcgcctaccgcctggatggcttcaagctggccaccaagaaccacaagcccttcagcctgctgcccctgcggcaggccgtgcggctgaacccagacaatggctacatcaaggtgctgctggccctgaagctgcaggatgagggccaggaggccgagggggagaagtacatcgaggaggccctggccaacatgagcagccagacctacgtgttccgctatgctgccaagttctacagaagaaaaggatctgtggacaaggccctggagctgctgaagaaggccctgcaggagacccccacctctgtgctgctgcaccaccagatcggcctgtgctacaaggcccagatgatccagatcaaggaggccaccaagggccagccccggggccagaaccgggagaagctggacaagatgatccgcagcgccatcttccactttgagagcgctgtggagaagaagcccacctttgaggtggcccacctggacctggccaggatgtacatcgaggccggcaaccacaggaaggccgaggagaacttccagaagctgctgtgcatgaagcctgtggtggaggagaccatgcaggacatccacttccactacggccgcttccaggagttccagaagaagagtgatgtgaatgccatcatccactacctgaaggccatcaagattgagcaggccagcctgacccgggacaagagcatcaacagcctgaagaagctggtgctgaggaagctgcggaggaaggccctggacctggagagcctgagcctgctgggctttgtgtacaagctggagggcaacatgaatgaggccctggagtactatgagcgggccctgcggctggccgctgactttgagaacagcgtgcggcagggcccctag

SEQ ID NO: 156303 - DNA, 1419 bp, synthetic construct
  misc_feature 1..1419: note = Description of Artificial Sequence: Synthetic coding sequence
  source 1..1419: mol_type = other DNA
atgtctgagaacaacaagaacagcctggagagcagcctgcggcagctgaagtgccacttcacctggaacctgatggagggggagaacagcctggatgactttgaggacaaggtgttctacagaacagagttccagaaccgggagttcaaggccaccatgtgcaacctgctggcctacctgaagcacctgaagggccagaatgaagctgccctggagtgcctgaggaaggccgaggagctgatccagcaggagcacgccgaccaggccgagatccgcagcctggtgacctggggcaactatgcctgggtgtactaccacatgggccgcctgagtgatgtgcagatctacgtggacaaggtgaagcacgtgtgtgagaagttcagcagcccctacagaattgagagccctgagctggactgtgaggagggctggacccggctgaagtgtggcggcaaccagaatgaaagagccaaggtgtgctttgagaaggccctggagaagaagcccaagaaccctgagttcaccagcggcctggccatcgccagctaccgcctggacaactggccacccagccagaatgccatcgaccccctgcggcaggccatccggctgaacccagacaaccagtacctgaaggtgctgctggccctgaagctgcacaagatgagggaggagggggaggaggagggggagggggagaagctggtggaggaggccctggagaaggcccctggggtgacagatgtgctgcggtctgctgccaagttctacagaaggaaggatgagccagacaaggccatcgagctgctgaagaaggccctggagtacatccccaacaatgcctacctgcactgccagatcggctgctgctaccgggccaaggtgttccaggtgatgaacctgagagaaaatggcatgtatggcaagaggaagctgctggagctgattggacatgctgtggcccacctgaagaaggcagatgaggccaatgacaacctcttccgggtgtgcagcatcctggccagcctgcacgccctggccgaccagtatgaagatgctgagtactacttccagaaggagttcagcaaggagctgacccctgtggccaagcagctgctgcacctgcgctatggcaacttccagctgtaccagatgaagtgtgaggacaaggccatccaccacttcatcgagggcgtgaagatcaaccagaagagccgggagaaggagaagatgaaggacaagctgcagaagatcgccaagatgaggctgagcaagaatggagctgacagcgaggccctgcacgtgctggccttcctgcaggagctgaatgagaagatgcagcaggctgatgaagattctgagcggggcctggagagcggcagcctcatccccagcgccagctcctggaatggagagtag

SEQ ID NO: 156304 - DNA, 1356 bp, synthetic construct
  misc_feature 1..1356: note = Description of Artificial Sequence: Synthetic coding sequence
  source 1..1356: mol_type = other DNA
atgcccaagaacaagaagaggaacaccccccaccggggcagcagcgctgggggcggcggcagcggggctgctgctgccacagctgccacagctgggggccagcacagaaatgtgcagcccttcagtgatgaagatgccagcattgagaccatgagccactgcagcggctacagcgaccccagcagctttgctgaagatggccctgaggtgctggatgaggagggcacccaggaggacctggagtacaagctgaagggcctgattgacctgaccctggacaagagcgccaagacccggcaggccgccctggagggcatcaagaatgccctggccagcaagatgctgtatgagttcatcctggagaggaggatgaccctgacagacagcattgagcgctgcctgaagaagggcaagagtgatgagcagagagctgctgctgccctggcctctgtgctgtgcatccagctgggccctggcatcgagagcgaggagatcctgaagaccctgggccccatcctgaagaagatcatctgtgatggcagcgcctccatgcaggcccggcagacctgtgccacctgcttcggcgtgtgctgcttcatcgccacagatgacatcacagagctgtacagcaccctggagtgcctggagaacatcttcaccaagagctacctgaaggagaaggacaccaccgtcatctgcagcacccccaacacagtgctgcacatcagcagcctgctggcctggaccctgctgctgaccatctgccccatcaatgaggtgaagaagaagctggagatgcacttccacaagctgcccagcctgctgagctgtgatgatgtgaacatgagaattgctgctggggagagcctggccctgctgtttgagctggcccggggcatcgagagtgacttcttctatgaggacatggagagcctgacccagatgctgcgggccctggccacagatggcaacaagcaccgggccaaggtggacaagaggaagcagaggtctgtgttcagagatgtgctgcgggctgtggaggagcgggacttccccacagagaccatcaagtttggacctgagaggatgtacatcgactgctgggtgaagaagcacacctatgacaccttcaaggaggtgctgggcagcggcatgcagtaccacctgcagagcaatgagttcctgagaaatgtgtttgagctgggcccccctgtgatgctggatgctgccaccctgaagaccatgaagatcagcagatttgagcggcacctgtacaacagcgctgccttcaaggcccggaccaaggcccggagcaaatgtcgggacaagagagcagatgtgggggagttcttctag

SEQ ID NO: 156305 - DNA, 1356 bp, synthetic construct; identical to SEQ ID NO: 156304
  misc_feature 1..1356: note = Description of Artificial Sequence: Synthetic coding sequence
  source 1..1356: mol_type = other DNA

SEQ ID NO: 156306 - DNA, 57 bp, synthetic construct
  misc_feature 1..57: note = Description of Artificial Sequence: Synthetic coding sequence
  source 1..57: mol_type = other DNA
atgcccaagaacaagaagaggaacaccccccaccggggcagcagcgctgggggctag

SEQ ID NO: 156307 - DNA, 96 bp, synthetic construct
  misc_feature 1..96: note = Description of Artificial Sequence: Synthetic coding sequence
  source 1..96: mol_type = other DNA
atgcccaagaacaagaagaggaacaccccccaccggggcagcagcgctgggggcggcggcagcggggctgctgctgccacagctgccacagcctag

SEQ ID NO: 156308 - DNA, 189 bp, synthetic construct
  misc_feature 1..189: note = Description of Artificial Sequence: Synthetic coding sequence
  source 1..189: mol_type = other DNA
atgcccaagaacaagaagaggaacaccccccaccggggcagcagcgctgggggcggcggcagcggggctgctgctgccacagctgccacagctgggggccagcacagaaatgtgcagcccttcagtgatgaagatgccagcattgagaccatgagccactgcagcggctacagcgaccccagcagctag

SEQ ID NO: 156309 - DNA, 1206 bp, synthetic construct
  misc_feature 1..1206: note = Description of Artificial Sequence: Synthetic coding sequence
  source 1..1206: mol_type = other DNA
atgagccactgcagcggctacagcgaccccagcagctttgctgaagatggccctgaggtgctggatgaggagggcacccaggaggacctggagtacaagctgaagggcctgattgacctgaccctggacaagagcgccaagacccggcaggccgccctggagggcatcaagaatgccctggccagcaagatgctgtatgagttcatcctggagaggaggatgaccctgacagacagcattgagcgctgcctgaagaagggcaagagtgatgagcagagagctgctgctgccctggcctctgtgctgtgcatccagctgggccctggcatcgagagcgaggagatcctgaagaccctgggccccatcctgaagaagatcatctgtgatggcagcgcctccatgcaggcccggcagacctgtgccacctgcttcggcgtgtgctgcttcatcgccacagatgacatcacagagctgtacagcaccctggagtgcctggagaacatcttcaccaagagctacctgaaggagaaggacaccaccgtcatctgcagcacccccaacacagtgctgcacatcagcagcctgctggcctggaccctgctgctgaccatctgccccatcaatgaggtgaagaagaagctggagatgcacttccacaagctgcccagcctgctgagctgtgatgatgtgaacatgagaattgctgctggggagagcctggccctgctgtttgagctggcccggggcatcgagagtgacttcttctatgaggacatggagagcctgacccagatgctgcgggccctggccacagatggcaacaagcaccgggccaaggtggacaagaggaagcagaggtctgtgttcagagatgtgctgcgggctgtggaggagcgggacttccccacagagaccatcaagtttggacctgagaggatgtacatcgactgctgggtgaagaagcacacctatgacaccttcaaggaggtgctgggcagcggcatgcagtaccacctgcagagcaatgagttcctgagaaatgtgtttgagctgggcccccctgtgatgctggatgctgccaccctgaagaccatgaagatcagcagatttgagcggcacctgtacaacagcgctgccttcaaggcccggaccaaggcccggagcaaatgtcgggacaagagagcagatgtgggggagttcttctag

SEQ ID NO: 156310 - DNA, 474 bp, synthetic construct
  misc_feature 1..474: note = Description of Artificial Sequence: Synthetic coding sequence
  source 1..474: mol_type = other DNA
atgcacttccacaagctgcccagcctgctgagctgtgatgatgtgaacatgagaattgctgctggggagagcctggccctgctgtttgagctggcccggggcattgaaagtgacttcttctatgaggacatggagagcctgacccagatgctgcgggccctggccacagatggcaacaagcaccgggccaaggtggacaagaggaagcagaggagcgtcttcagagatgtgctgcgggctgtggaggagcgggacttccccacagagaccatcaagtttggacctgagaggatgtacatcgactgctgggtgaagaagcacacctatgacaccttcaaggaggtgctgggcagcggcatgcagtaccacctgcagagcaatgagttcctgagaaatgtgtttgagctgggcccccctgtgatgctggatgctgccaccctgaagaccatgaagatcagcagatttgaaagatag

SEQ ID NO: 156311 - DNA, 1827 bp, synthetic construct
  misc_feature 1..1827: note = Description of Artificial Sequence: Synthetic coding sequence
  source 1..1827: mol_type = other DNA
atgggccccaagaagtcctggaggagccacttcttccccctgcctgaggtgtggctgctgctgctgctgagccaggccctgagccccagccacggcccccagacccaggccggcgtgggcctggtgtggagcgtgcccctgcccagcgccctgcggagccagagctgcctgggcgcccccctgagagatgccagcgagctgaccaccgtgcacctgttccccacccggggctggggcgcccggcgggccctgtgggtgcacagcagcgccagcgccagcagcgctgccagcagaagaaggctgcgggcccaggccagcggcatcagcagcttcagcctggtggatggaggagcccccagagaagatggaggagcccggggcgtgtggctgcccagcagcggccaggtgtctgcccagaggactggaagaaggctggtgggcctggagcccacccccaccggcagcctgaccccccggccccccaggcctgtgcccggcatgccccgggccaggaagggcaacaccctgaggaagggcggccagaggcggggcggcggggcccggagcagcgcccaggccgacagcggcagcagtgatgatgaggccgccagcgaggcccggagcacagccagcgagtgccccagcctgctgagcaccacagctgaggacagcctgggcggagatgtggtggatgagcagggccagcaggaggacctggaggagaagctgaaggagtatgtggactgcctgacagacaagagcgccaagacccggcagggcgccctggagagcctgcggctggccctggccagccggctgctgcctgacttcctgctggagcggcggctgaccctggctgatgccctggagaagtgcctgaagaagggcaaaggagaggagcaggccctggccgctgctgtgctgggcctgctgtgtgtgcagctgggccctggccccaagggggaggagctgttccacagcctgcagcccctgctggtgtctgtgctgagtgacagcacagccagccctgctgcccggctgcactgtgccagcgccctgggcctgggctgctacgtggccgctgctgacatccaggacctggtgtcctgcctggcctgcctggagagcgtcttcagccgcttctacggcctgggcggcagcagcaccagccctgtggtgcctgccagcctgcacggcctgctgtctgctgccctgcaggcctgggccctgctgctgaccatctgccccagcacccagatcagccacatcctggaccggcagctgccccggctgccccagctgctgagcagcgagagcgtgaacctgagaattgctgctggggagaccatcgccctgctgtttgagctggcccgggacctggaggaggagtttgtgtatgaggacatggaggccctgtgcagcgtgctgcggaccctggccacagacagcaacaagtaccgggccaaggctgacagaagacggcagaggagcaccttccgggctgtgctgcacagcgtggagggcggggagtgtgaggaggagatcgtgcgcttcggctttgaggtgctgtacatggacagctgggcccggcaccgcatctatgctgccttcaaggaggtgctgggcagcggcatgcaccaccacctgcagaacaatgagctgctgcgggacatcttcggcctgggccctgtgctgctgctggatgccacagccctgaaggcctgcaaggtgcccaggtttgagaagcacctgtacaatgctgctgccttcaaggcccggaccaaggcccggagccgggtgcgggacaagagagctgacatcctgtag

SEQ ID NO: 156312 - DNA, 1329 bp, synthetic construct
  misc_feature 1..1329: note = Description of Artificial Sequence: Synthetic coding sequence
  source 1..1329: mol_type = other DNA
atgccccgggccaggaagggcaacaccctgaggaagggcggccagaggcggggcggcggggcccggagcagcgcccaggccgacagcggcagcagtgatgatgaggccgccagcgaggcccggagcacagccagcgagtgccccagcctgctgagcaccacagctgaggacagcctgggcggagatgtggtggatgagcagggccagcaggaggacctggaggagaagctgaaggagtatgtggactgcctgacagacaagagcgccaagacccggcagggcgccctggagagcctgcggctggccctggccagccggctgctgcctgacttcctgctggagcggcggctgaccctggctgatgccctggagaagtgcctgaagaagggcaaaggagaggagcaggccctggccgctgctgtgctgggcctgctgtgtgtgcagctgggccctggccccaagggggaggagctgttccacagcctgcagcccctgctggtgtctgtgctgagtgacagcacagccagccctgctgcccggctgcactgtgccagcgccctgggcctgggctgctacgtggccgctgctgacatccaggacctggtgtcctgcctggcctgcctggagagcgtcttcagccgcttctacggcctgggcggcagcagcaccagccctgtggtgcctgccagcctgcacggcctgctgtctgctgccctgcaggcctgggccctgctgctgaccatctgccccagcacccagatcagccacatcctggaccggcagctgccccggctgccccagctgctgagcagcgagagcgtgaacctgagaattgctgctggggagaccatcgccctgctgtttgagctggcccgggacctggaggaggagtttgtgtatgaggacatggaggccctgtgcagcgtgctgcggaccctggccacagacagcaacaagtaccgggccaaggctgacagaagacggcagaggagcaccttccgggctgtgctgcacagcgtggagggcggggagtgtgaggaggagatcgtgcgcttcggctttgaggtgctgtacatggacagctgggcccggcaccgcatctatgctgccttcaaggaggtgctgggcagcggcatgcaccaccacctgcagaacaatgagctgctgcgggacatcttcggcctgggccctgtgctgctgctggatgccacagccctgaaggcctgcaaggtgcccaggtttgagaagcacctgtacaatgctgctgccttcaaggcccggaccaaggcccggagccgggtgcgggacaagagagctgacatcctgtag

SEQ ID NO: 156313 - DNA, 1521 bp, synthetic construct
  misc_feature 1..1521: note = Description of Artificial Sequence: Synthetic coding sequence
  source 1..1521: mol_type = other DNA
atggcctggaacagccccagccggcggcctgtgtggcagggcggggcccccagagaagatggaggagcccggggcgtgtggctgcccagcagcggccaggtgtctgcccagaggactggaagaaggctggtgggcctggagcccacccccaccggcagcctgaccccccggccccccaggcctgtgcccggcatgccccgggccaggaagggcaacaccctgaggaagggcggccagaggcggggcggcggggcccggagcagcgcccaggccgacagcggcagcagtgatgatgaggccgccagcgaggcccggagcacagccagcgagtgccccagcctgctgagcaccacagctgaggacagcctgggcggagatgtggtggatgagcagggccagcaggaggacctggaggagaagctgaaggagtatgtggactgcctgacagacaagagcgccaagacccggcagggcgccctggagagcctgcggctggccctggccagccggctgctgcctgacttcctgctggagcggcggctgaccctggctgatgccctggagaagtgcctgaagaagggcaaaggagaggagcaggccctggccgctgctgtgctgggcctgctgtgtgtgcagctgggccctggccccaagggggaggagctgttccacagcctgcagcccctgctggtgtctgtgctgagtgacagcacagccagccctgctgcccggctgcactgtgccagcgccctgggcctgggctgctacgtggccgctgctgacatccaggacctggtgtcctgcctggcctgcctggagagcgtcttcagccgcttctacggcctgggcggcagcagcaccagccctgtggtgcctgccagcctgcacggcctgctgtctgctgccctgcaggcctgggccctgctgctgaccatctgccccagcacccagatcagccacatcctggaccggcagctgccccggctgccccagctgctgagcagcgagagcgtgaacctgagaattgctgctggggagaccatcgccctgctgtttgagctggcccgggacctggaggaggagtttgtgtatgaggacatggaggccctgtgcagcgtgctgcggaccctggccacagacagcaacaagtaccgggccaaggctgacagaagacggcagaggagcaccttccgggctgtgctgcacagcgtggagggcggggagtgtgaggaggagatcgtgcgcttcggctttgaggtgctgtacatggacagctgggcccggcaccgcatctatgctgccttcaaggaggtgctgggcagcggcatgcaccaccacctgcagaacaatgagctgctgcgggacatcttcggcctgggccctgtgctgctgctggatgccacagccctgaaggcctgcaaggtgcccaggtttgagaagcacctgtacaatgctgctgccttcaaggcccggaccaaggcccggagccgggtgcgggacaagagagctgacatcctgtag

SEQ ID NO: 156314 - DNA, 1329 bp, synthetic construct; identical to SEQ ID NO: 156312
  misc_feature 1..1329: note = Description of Artificial Sequence: Synthetic coding sequence
  source 1..1329: mol_type = other DNA

SEQ ID NO: 156315 - DNA, 1713 bp, synthetic construct
  misc_feature 1..1713: note = Description of Artificial Sequence: Synthetic coding sequence
  source 1..1713: mol_type = other DNA
atgaccctgctgtggtgtgtggtgtccctgtacttctacggcatcctgcagagtgatgccagcgagcgctgtgatgactggggcctggacaccatgaggcagatccaggtgtttgaagatgagcccgcccgcatcaagtgccccctgtttgagcacttcctgaagttcaactacagcacagcccacagcgctggcctgaccctcatctggtactggacccggcaggaccgggacctggaggagcccatcaacttccggctgcctgaaaatcgcatcagcaaggagaaggatgtgctgtggttccggcccaccctgctgaatgacaccggcaactacacctgcatgctgaggaacaccacctactgcagcaaggtggccttccccctggaggtggtgcagaaggacagctgcttcaacagccccatgaagctgcctgtgcacaagctgtacattgaatatggcatccagaggatcacctgccccaacgtggatggctacttccccagctctgtgaagcccaccatcacctggtacatgggctgctacaagatccagaacttcaacaacgtcatccctgagggcatgaacctgtccttcctgattgccctgatcagcaacaatggaaactacacctgtgtggtgacctacccagaaaatggaagaaccttccacctgaccaggaccctgactgtgaaggtggtgggcagccccaagaatgctgtgccccctgtgatccacagccccaatgaccacgtggtgtatgagaaggagcccggggaggagctgctgatcccctgcaccgtgtacttctccttcctgatggacagcagaaatgaggtgtggtggaccattgatggcaagaagccagatgacatcaccattgatgtgaccatcaatgaaagcatcagccacagcaggacagaagatgagaccaggacccagatcctgagcatcaagaaggtgaccagcgaggacctgaagaggagctatgtgtgccacgcccggagcgccaagggggaggtggccaaggccgccaaggtgaagcagaaggtgcctgccccccgctacacagtggagctggcctgtggctttggagccaccgtgctgctggtggtgatcctgattgtggtgtaccacgtgtactggctggagatggtgctcttctaccgggcccactttggaacagatgagaccatcctggatggcaaggagtatgacatctacgtgtcctatgccagaaatgctgaggaggaggagtttgtgctgctgaccctgcggggcgtgctggagaatgaatttggctacaagctgtgcatctttgaccgggacagcctgcccggcggcatcgtgacagatgagaccctgtccttcatccagaagagccggcggctgctggtggtgctgagccccaactacgtgctgcagggcacccaggccctgctggagctgaaggccggcctggagaacatggccagccggggcaacatcaacgtcatcctggtgcagtacaaggctgtgaaggagaccaaggtgaaggagctgaagagggccaagacagtgctgaccgtcatcaagtggaagggggagaagagcaagtacccccagggccgcttctggaagcagctgcaggtggccatgcctgtgaagaagagccccaggaggagcagcagtgatgagcagggcctgagctacagcagcctgaagaatgtgtag

SEQ ID NO: 156316 - DNA, 2064 bp, synthetic construct
  misc_feature 1..2064: note = Description of Artificial Sequence: Synthetic coding sequence
  source 1..2064: mol_type = other DNA
atgaccctgctgtggtgtgtggtgtccctgtacttctacggcatcctgcagagtgatgccagcgagcgctgtgatgactggggcctggacaccatgaggcagatccaggtgtttgaagatgagcccgcccgcatcaagtgccccctgtttgagcacttcctgaagttcaactacagcacagcccacagcgctggcctgaccctcatctggtactggacccggcaggaccgggacctggaggagcccatcaacttccggctgcctgaaaatcgcatcagcaaggagaaggatgtgctgtggttccggcccaccctgctgaatgacaccggcaactacacctgcatgctgaggaacaccacctactgcagcaaggtggccttccccctggaggtggtgcagaaggacagctgcttcaacagccccatgaagctgcctgtgcacaagctgtacattgaatatggcatccagaggatcacctgccccaacgtggatggctacttccccagctctgtgaagcccaccatcacctggtacatgggctgctacaagatccagaacttcaacaacgtcatccctgagggcatgaacctgtccttcctgattgccctgatcagcaacaatggaaactacacctgtgtggtgacctacccagaaaatggaagaaccttccacctgaccaggaccctgactgtgaaggtggtgggcagccccaagaatgctgtgccccctgtgatccacagccccaatgaccacgtggtgtatgagaaggagcccggggaggagctgctgatcccctgcaccgtgtacttctccttcctgatggacagcagaaatgaggtgtggtggaccattgatggcaagaagccagatgacatcaccattgatgtgaccatcaatgaaagcatcagccacagcaggacagaagatgagaccaggacccagatcctgagcatcaagaaggtgaccagcgaggacctgaagaggagctatgtgtgccacgcccggagcgccaagggggaggtggccaaggccgccaaggtgaagcagaaggtgcctgccccccgctacacagtggagctggcctgtggctttggagccaccgtgctgctggtggtgatcctgattgtggtgtaccacgtgtactggctggagatggtgctcttctaccgggcccactttggaacagatgagaccatcctggatggcaaggagtatgacatctacgtgtcctatgccagaaatgctgaggaggaggagtttgtgctgctgaccctgcggggcgtgctggagaatgaatttggctacaagctgtgcatctttgaccgggacagcctgcccggcggcaacacagtggaggccgtgtttgacttcatccagaggagcaggaggatgattgtggtgctgagcccagactatgtgacagagaagagcatctccatgctggagttcaagctgggcgtgatgtgccagaacagcatcgccaccaagctgattgtggtggagtaccggcccctggagcacccccaccctggcatcctgcagctgaaggagagcgtgtcctttgtgtcctggaagggggagaagagcaagcacagcggcagcaagttctggaaggccctgcggctggccctgcccctgcggagcctgagcgccagcagcggctggaatgaaagctgcagcagccagagcgacatcagcctggaccacgtgcagaggagaagaagccggctgaaggagcccccagagctgcagagcagcgagagagctgctggcagccccccagcccctggcaccatgagcaagcaccggggcaagagcagcgccacctgccgctgctgcgtgacctactgtgagggggagaaccacctgaggaacaagagcagagctgagatccacaaccagccccagtgggagacccacctgtgcaagcctgtgccccaggagagcgagacccagtggatccagaatggcacccggctggagcccccagccccccagatcagcgccctggccctgcaccacttcacagacctgagcaacaacaatgacttctacatcctgtag

SEQ ID NO: 156317 - DNA, 1713 bp, synthetic construct; identical to SEQ ID NO: 156315
  misc_feature 1..1713: note = Description of Artificial Sequence: Synthetic coding sequence
  source 1..1713: mol_type = other DNA

SEQ ID NO: 156318 - DNA, 1071 bp, synthetic construct
  misc_feature 1..1071: note = Description of Artificial Sequence: Synthetic coding sequence
  source 1..1071: mol_type = other DNA
atgaccctgctgtggtgtgtggtgtccctgtacttctacggcatcctgcagagtgatgccagcgagcgctgtgatgactggggcctggacaccatgaggcagatccaggtgtttgaagatgagcccgcccgcatcaagtgccccctgtttgagcacttcctgaagttcaactacagcacagcccacagcgctggcctgaccctcatctggtactggacccggcaggaccgggacctggaggagcccatcaacttccggctgcctgaaaatcgcatcagcaaggagaaggatgtgctgtggttccggcccaccctgctgaatgacaccggcaactacacctgcatgctgaggaacaccacctactgcagcaaggtggccttccccctggaggtggtgcagaaggacagctgcttcaacagccccatgaagctgcctgtgcacaagctgtacattgaatatggcatccagaggatcacctgccccaacgtggatggctacttccccagctctgtgaagcccaccatcacctggtacatgggctgctacaagatccagaacttcaacaacgtcatccctgagggcatgaacctgtccttcctgattgccctgatcagcaacaatggaaactacacctgtgtggtgacctacccagaaaatggaagaaccttccacctgaccaggaccctgactgtgaaggtggtgggcagccccaagaatgctgtgccccctgtgatccacagccccaatgaccacgtggtgtatgagaaggagcccggggaggagctgctgatcccctgcaccgtgtacttctccttcctgatggacagcagaaatgaggtgtggtggaccattgatggcaagaagccagatgacatcaccattgatgtgaccatcaatgaaagcatcagccacagcaggacagaagatgagaccaggacccagatcctgagcatcaagaaggtgaccagcgaggacctgaagaggagctatgtgtgccacgcccggagcgccaagggggaggtggccaaggccgccaaggtgaagcagaagggcaacagatgtggccagtag

SEQ ID NO: 156319 - DNA, 342 bp, synthetic construct
  misc_feature 1..342: note = Description of Artificial Sequence: Synthetic coding sequence
  source 1..342: mol_type = other DNA
atgaccctgctgtggtgtgtggtgtccctgtacttctacggcatcctgcagagtgatgccagcgagcgctgtgatgactggggcctggacaccatgaggcagatccaggtgtttgaagatgagcccgcccgcatcaagtgccccctgtttgagcacttcctgaagttcaactacagcacagcccacagcgctggcctgaccctcatctggtactggacccggcaggaccgggacctggaggagcccatcaacttccggctgcctgaaaatcgcatcagcaaggagaaggatgtgctgtggttccggcccaccctgctgaatgacaccggcaactacacctag

SEQ ID NO: 156320 - DNA, 1071 bp, synthetic construct; identical to SEQ ID NO: 156318
  misc_feature 1..1071: note = Description of Artificial Sequence: Synthetic coding sequence
  source 1..1071: mol_type = other DNA

SEQ ID NO: 156321 - DNA, 1713 bp, synthetic construct; identical to SEQ ID NO: 156315
  misc_feature 1..1713: note = Description of Artificial Sequence: Synthetic coding sequence
  source 1..1713: mol_type = other DNA

SEQ ID NO: 156322 - DNA, 2064 bp, synthetic construct; identical to SEQ ID NO: 156316
  misc_feature 1..2064: note = Description of Artificial Sequence: Synthetic coding sequence
  source 1..2064: mol_type = other DNA

SEQ ID NO: 156323 - DNA, 1713 bp, synthetic construct; identical to SEQ ID NO: 156315
  misc_feature 1..1713: note = Description of Artificial Sequence: Synthetic coding sequence
  source 1..1713: mol_type = other DNA

SEQ ID NO: 156324 - DNA, 438 bp, synthetic construct
  misc_feature 1..438: note = Description of Artificial Sequence: Synthetic coding sequence
  source 1..438: mol_type = other DNA
atgaccctgctgtggtgtgtggtgtccctgtacttctacggcatcctgcagagtgatgccagcgagcgctgtgatgactggggcctggacaccatgaggcagatccaggtgtttgaagatgagcccgcccgcatcaagtgccccctgtttgagcacttcctgaagttcaactacagcacagcccacagcgctggcctgaccctcatctggtactggacccggcaggaccgggacctggaggagcccatcaacttccggctgcctgaaaatcgcatcagcaaggagaaggatgtgctgtggttccggcccaccctgctgaatgacaccggcaactacacctgcatgctgaggaacaccacctactgcagcaaggtggccttccccctggaggtggtgcagaaggacagctgcttcaacagccccatgaagctgccctag

SEQ ID NO: 156325 - DNA, 2091 bp, synthetic construct
  misc_feature 1..2091: note = Description of Artificial Sequence: Synthetic coding sequence
  source 1..2091: mol_type = other DNA
atgaaggcccccatcccccacctgatcctgctgtatgccaccttcacccagagcctgaaggtggtgaccaagaggggcagcgcagatggctgcacagactggagcattgacatcaagaagtaccaggtgctggtgggggagcctgtgcgcatcaagtgtgccctcttctacggctacatccgcaccaactacagcctggcccagagcgctggcctgagcctgatgtggtacaagagcagcggccctggggactttgaggagcccatcgcctttgatggcagcaggatgagcaaggaggaggacagcatctggttccggcccaccctgctgcaggacagcggcctgtatgcctgcgtcatccggaacagcacctactgcatgaaggtgtccatcagcctgactgtgggagaaaatgacaccggcctgtgctacaacagcaagatgaagtactttgagaaggccgagctgagcaagagcaaggagatcagctgccgggacatcgaggacttcctgctgcccacccgggagcctgagatcctgtggtacaaggagtgcaggaccaagacctggaggcccagcatcgtgttcaagagggacaccctgctgatccgggaggtgcgggaggatgacatcggcaactacacctgtgagctgaagtatggaggctttgtggtgcggaggaccacagagctgactgtgacagcccccctgacagacaagccacccaagctgctgtaccccatggagagcaagctgaccatccaggagacccagctgggggacagcgccaacctgacctgccgggccttcttcggctacagcggagatgtgagccccctcatctactggatgaagggggagaagttcatcgaggacctggatgaaaatagagtgtgggagagtgacatccgcatcctgaaggagcacctgggggagcaggaggtgtccatcagcctcatcgtggacagcgtggaggagggggacctgggcaactacagctgctacgtggagaatggaaatggaagaagacatgcctctgtgctgctgcacaagcgggagctgatgtacacagtggagctggccggcggcctgggcgccatcctgctgctgctggtgtgcctggtgaccatctacaagtgctacaagattgagatcatgctgttctacagaaaccactttggagctgaggagctggatggagacaacaaggactatgatgcctacctgagctacaccaaggtggaccctgaccagtggaaccaggagactggagaggaggagagatttgccctggagatcctgcctgacatgctggagaagcactacggctacaagctgttcatcccagaccgggacctgatccccaccggcacctacattgaagatgtggcccgctgtgtggaccagagcaagaggctcatcatcgtgatgacccccaactacgtggtgcggcggggctggagcatctttgagctggagacccggctgaggaacatgctggtgactggagagatcaaggtgatcctgattgaatgttctgagctgcggggcatcatgaactaccaggaggtggaggccctgaagcacaccatcaagctgctgaccgtcatcaagtggcacggccccaagtgcaacaagctgaacagcaagttctggaagaggctgcagtatgagatgcccttcaagagaattgagcccatcacccatgagcaggccctggatgtgtctgagcagggcccctttggagagctgcagacagtgtctgccatctccatggccgccgccaccagcacagccctggccacagcccacccagacctgcggagcaccttccacaacacctaccacagccagatgaggcagaagcactactaccgctcctatgaatatgatgtgcccccaacaggcaccctgcccctgaccagcatcggcaaccagcacacctactgcaacatccccatgaccctcatcaatggccagaggccccagaccaagagcagccgggagcagaacccagatgaggcccacaccaacagcgccatcctgcccctgctgccccgggagaccagcatcagcagcgtcatctggtag

SEQ ID NO: 156326 - DNA, 2091 bp, synthetic construct; identical to SEQ ID NO: 156325
  misc_feature 1..2091: note = Description of Artificial Sequence: Synthetic coding sequence
  source 1..2091: mol_type = other DNA

SEQ ID NO: 156327 - DNA, 2061 bp, synthetic construct
  misc_feature 1..2061: note = Description of Artificial Sequence: Synthetic coding sequence
  source 1..2061: mol_type = other DNA
atgaagccacccttcctgctggccctggtggtgtgcagcgtggtgtccaccaacctgaagatggtgtccaagagaaattctgtggatggctgcatcgactggagcgtggacctgaagacctacatggccctggccggggagcctgtgcgggtgaagtgtgccctcttctacagctacatccgcaccaactacagcacagcccagagcacaggcctgcggctgatgtggtacaagaacaagggggacctggaggagcccatcatcttcagcgaggtgaggatgagcaaggaggaggacagcatctggttccacagcgctgaggcccaggacagcggcttctacacctgtgtgctgaggaacagcacctactgcatgaaggtgtccatgagcctgactgtggctgaaaatgaaagtggcctgtgctacaacagccgcatccgctacctggagaagtctgaggtgaccaagaggaaggagatcagctgcccagacatggatgacttcaagaagagtgaccaggagccagatgtggtgtggtacaaggagtgcaagcccaagatgtggaggagcatcatcatccagaagggaaatgccctgctgatccaggaggtgcaggaggaggatggcggcaactacacctgtgagctgaagtatgagggcaagctggtgcggaggaccacagagctgaaggtgacagccctgctgacagacaagccacccaagcccctcttccccatggagaaccagcccagcgtgattgatgtgcagctgggcaagcccctgaacatcccctgcaaggccttcttcggcttcagcggggagagcggccccatgatctactggatgaagggggagaagttcatcgaggagctggccggccacatccgggagggggagatccggctgctgaaggagcacctgggggagaaggaggtggagctggccctgatctttgacagcgtggtggaggccgacctggccaactacacctgccacgtggagaacagaaatggaaggaagcacgcctctgtgctgctgaggaagaaggacctgatctacaagattgagctggccggcggcctgggcgccatcttcctgctgctggtgctgctggtggtgatctacaagtgctacaacatcgagctgatgctgttctaccggcagcactttggagcagatgagaccaatgatgacaacaaggagtatgatgcctacctgagctacaccaaggtggaccaggacaccctggactgtgacaaccctgaggaggagcagtttgccctggaggtgctgcctgatgtgctggagaagcactacggctacaagctgttcatccctgagcgggacctgatccccagcggcacctacatggaggacctgaccaggtatgtggagcagagccggcggctcatcatcgtgctgaccccagactacatcctgcggcggggctggagcatctttgagctggagagccggctgcacaacatgctggtgtctggagagatcaaggtgatcctgattgagtgcacagagctgaagggcaaggtgaactgccaggaggtggagagcctgaagaggagcatcaagctgctgagcctcatcaagtggaagggcagcaagagcagcaagctgaacagcaagttctggaagcacctggtgtatgagatgcccatcaagaagaaggagatgctgccccgctgccacgtgctggacagcgctgagcagggcctgtttggagagctgcagcccatccccagcatcgccatgaccagcaccagcgccaccctggtgagcagccaggccgacctgcctgagttccaccccagcgacagcatgcagatccgccactgctgccggggctacaagcatgagatcccagccaccaccctgcctgtgcccagcctgggcaaccaccacacctactgcaacctgcccctgaccctgctgaatggccagctgcccctgaacaacaccctgaaggacacccaggagttccacaggaacagcagcctgctgcccctgagcagcaaggagctgtccttcaccagtgacatctggtag

SEQ ID NO: 156328 - DNA, 2061 bp, synthetic construct; identical to SEQ ID NO: 156327
  misc_feature 1..2061: note = Description of Artificial Sequence: Synthetic coding sequence
  source 1..2061: mol_type = other DNA

SEQ ID NO: 156329 - DNA, 876 bp, synthetic construct
  misc_feature 1..876: note = Description of Artificial Sequence: Synthetic coding sequence
  source 1..876: mol_type = other DNA
atgagggacaacaaggagtatgatgcctacctgagctacaccaaggtggaccaggacaccctggactgtgacaaccctgaggaggagcagtttgccctggaggtgctgcctgatgtgctggagaagcactacggctacaagctgttcatccctgagcgggacctgatccccagcggcacctacatggaggacctgacccgctacgtggagcagagcagaagactcatcatcgtgctgaccccagactacatcctgcggcggggctggagcatctttgagctggagagccggctgcacaacatgctggtgtctggagagatcaaggtgatcctgattgaatgtacagagctgaagggcaaggtgaactgccaggaggtggagagcctgaagaggagcatcaagctgctgagcctcatcaagtggaagggcagcaagagcagcaagctgaacagcaagttctggaagcacctggtgtatgagatgcccatcaagaagaaggagatgctgccccgctgccacgtgctggacagcgctgagcagggcctgtttggagagctgcagcccatccccagcatcgccatgaccagcaccagcgccaccctggtgagcagccaggccgacctgcctgagttccaccccagcgacagcatgcagatccgccactgctgccggggctacaagcatgagatcccagccaccaccctgcctgtgcccagcctgggcaaccaccacacctactgcaacctgcccctgaccctgctgaatggccagctgcccctgaacaacaccctgaaggacacccaggagttccacaggaacagcagcctgctgcccctgagcagcaaggagctgtccttcaccagtgacatctggtag

SEQ ID NO: 156330 - DNA, 1197 bp, synthetic construct
  misc_feature 1..1197: note = Description of Artificial Sequence: Synthetic coding sequence
  source 1..1197: mol_type = other DNA
atgctgcggctgtatgtgctggtgatgggcgtgtctgccttcaccctgcagcctgctgcccacactggagctgcccggagctgccgcttccggggccgccactacaagcgggagttccggctggagggggagcctgtggccctgcgctgcccccaggtgccctactggctgtgggcctctgtgagcccccgcatcaacctgacctggcacaagaatgacagcgccaggacagtgcctggagaggaggagaccaggatgtgggcccaggatggagccctgtggctgctgcctgccctgcaggaggacagcggcacctacgtgtgcaccaccagaaatgccagctactgtgacaagatgagcattgagctgcgggtgtttgaaaatacagatgccttcctgcccttcatctcctacccccagatcctgaccctgagcaccagcggcgtgctggtgtgcccagacctgtctgagttcacccgggacaagacagatgtgaagatccagtggtacaaggacagcctgctgctggacaaggacaatgagaagttcctgtctgtgcggggcaccacccacctgctggtgcatgatgtggccctggaggatgctggctactaccgctgtgtgctgacctttgcccacgagggccagcagtacaacatcaccaggagcattgagctgcgcatcaagaagaagaaggaggagaccatccctgtgatcatcagccccctgaagaccatcagcgccagcctgggcagccggctgaccatcccctgcaaggtgttcctgggcaccggcacccccctgaccaccatgctgtggtggacagccaatgacacccacattgaaagtgcctacccaggcggccgggtgacagagggcccccggcaggagtacagcgagaacaatgaaaactacatcgaggtgcccctcatctttgatcctgtgacccgggaggacctgcacatggacttcaagtgtgtggtgcacaacaccctgtccttccagaccctgcggaccaccgtgaaggaggccagcagcaccttctcctggggcatcgtgctggcccccctgagcctggccttcctggtgctgggcggcatctggatgcaccggcgctgcaagcacaggacaggcaaggcagatggcctgactgtgctgtggccccaccaccaggacttccagagctaccccaagtag

SEQ ID NO: 156331 - DNA, 1197 bp, synthetic construct; identical to SEQ ID NO: 156330
  misc_feature 1..1197: note = Description of Artificial Sequence: Synthetic coding sequence
  source 1..1197: mol_type = other DNA

SEQ ID NO: 156332 - DNA, 690 bp, synthetic construct
  misc_feature 1..690: note = Description of Artificial Sequence: Synthetic coding sequence
  source 1..690: mol_type = other DNA
atgctgcggctgtatgtgctggtgatgggcgtgtctgccttcaccctgcagcctgctgcccacactggagctgcccggagctgccgcttccggggccgccactacaagcgggagttccggctggagggggagcctgtggccctgcgctgcccccaggtgccctactggctgtgggcctctgtgagcccccgcatcaacctgacctggcacaagaatgacagcgccaggacagtgcctggagaggaggagaccaggatgtgggcccaggatggagccctgtggctgctgcctgccctgcaggaggacagcggcacctacgtgtgcaccaccagaaatgccagctactgtgacaagatgagcattgagctgcgggtgtttgaaaatacagatgccttcctgcccttcatctcctacccccagatcctgaccctgagcaccagcggcgtgctggtgtgcccagacctgtctgagttcacccgggacaagacagatgtgaagatccagtggtacaaggacagcctgctgctggacaaggacaatgagaagttcctgtctgtgcggggcaccacccacctgctggtgcatgatgtggccctggaggatgctggctactaccgctgtgtgctgacctttgcccacgagggccagcagtacaacatcaccaggagcattgagctgcgcatcaagtag

SEQ ID NO: 156333 - DNA, 1098 bp, synthetic construct
  misc_feature 1..1098: note = Description of Artificial Sequence: Synthetic coding sequence
  source 1..1098: mol_type = other DNA
atgctgccccccctgcccagccggctgggcctgctgctgctgctgctgctgtgcccagcccacgtgggcggcctgtggtgggccgtgggcagccccctggtgatggaccccaccagcatctgcaggaaggcccggcggctggccggccggcaggccgagctgtgccaggccgagcctgaggtggtggccgagctggcccggggggcccggctgggcgtgcgggagtgccagttccagttccgcttccgccgctggaactgcagcagccacagcaaggccttcggccgcatcctgcagcaggacatccgggagacagcctttgtgtttgccatcacagctgctggggccagccatgctgtgacccaggcctgcagcatgggagagctgctgcagtgtggctgccaggccccccggggccgggccccaccccggcccagcggcctgcccggcaccccaggccccccaggccctgctggcagccctgagggcagcgctgcctgggagtggggcggctgtggagatgatgtggactttggagatgagaagagccgcctcttcatggatgcccggcacaagaggggccgcggggacatccgggccctggtgcagctgcacaacaatgaagctggccgcctggccgtgcgcagccacaccaggacagaatgtaaatgtcatggcctgagcggcagctgtgccctgcggacctgctggcagaagctgccccccttccgggaggtgggcgcccggctgctggagcgcttccatggagccagccgggtgatgggcaccaatgatggcaaggccctgctgcctgctgtgaggaccctgaagcccccaggccgggctgacctgctgtatgctgctgacagcccagacttctgtgcccccaacagaagaacaggcagccctggcacccggggccgggcctgcaacagcagcgccccagacctgagcggctgtgacctgctgtgctgcggccggggccaccggcaggagagcgtgcagctggaggagaactgcctgtgccgcttccactggtgctgcgtggtgcagtgccaccgctgccgggtgaggaaggagctgagcctgtgcctgtag

SEQ ID NO: 156334 - DNA, 987 bp, synthetic construct
  misc_feature 1..987: note = Description of Artificial Sequence: Synthetic coding sequence
  source 1..987: mol_type = other DNA
atgggcttctggatcctggccatcctgaccatcctgatgtacagcacagctgccaagttcagcaagcagagctggggcctggagaatgaggccctgattgtgcgctgcccccggcagggcaagcccagctacacagtggactggtactacagccagaccaacaagagcatccccacccaggagaggaacagagtgtttgccagcggccagctgctgaagttcctgcctgctgctgtggccgacagcggcatctacacctgcatcgtgcgcagccccaccttcaacagaacaggctacgccaacgtgaccatctacaagaagcagagcgactgcaatgtgcctgactacctgatgtacagcacagtgtctggcagcgagaagaacagcaagatctactgccccaccatcgacctgtacaactggacagcccccctggagtggttcaagaactgccaggccctgcagggcagccgctaccgggcccacaagagcttcctggtgattgacaacgtgatgacagaagatgctggggactacacctgcaagttcatccacaatgaaaatggagccaactacagcgtgacagccaccaggagcttcaccgtgaaggatgagcagggcttcagcctcttccctgtgattggagccccagcccagaatgagatcaaggaggtggagatcggcaagaatgccaacctgacctgcagcgcctgcttcggcaagggcacccagttcctggccgctgtgctgtggcagctgaatggcaccaagatcacagactttggagagccccgcatccagcaggaggagggccagaaccagagcttcagcaatggcctggcctgcctggacatggtgctgagaattgctgatgtgaaggaggaggacctgctgctgcagtatgactgcctggccctgaacctgcacggcctgcggcggcacacagtgcggctgagcaggaagaaccccagcaaggagtgcttctag

SEQ ID NO: 156335 - DNA, 780 bp, synthetic construct
  misc_feature 1..780: note = Description of Artificial Sequence: Synthetic coding sequence
  source 1..780: mol_type = other DNA
atgggcttctggatcctggccatcctgaccatcctgatgtacagcacagctgccaagttcagcaagcagagctggggcctggagaatgaggccctgattgtgcgctgcccccggcagggcaagcccagctacacagtggactggtactacagccagaccaacaagagcatccccacccaggagaggaacagagtgtttgccagcggccagctgctgaagttcctgcctgctgctgtggccgacagcggcatctacacctgcatcgtgcgcagccccaccttcaacagaacaggctacgccaacgtgaccatctacaagaagcagagcgactgcaatgtgcctgactacctgatgtacagcacagtgtctggcagcgagaagaacagcaagatctactgccccaccatcgacctgtacaactggacagcccccctggagtggttcaagaactgccaggccctgcagggcagccgctaccgggcccacaagagcttcctggtgattgacaacgtgatgacagaagatgctggggactacacctgcaagttcatccacaatgaaaatggagccaactacagcgtgacagccaccaggagcttcaccgtgaaggtgtggtgccagagcttctgcaagctgaagaagagcctcatcttcagcaacacccactggatccagagcctgatgaggggctttgtgatggtgtactacggcgtgcacaagtgctgccgggtggtgttcaacctgtgcctgcagtacttccagcaccaccagtggccctag

SEQ ID NO: 156336 - DNA, 636 bp, synthetic construct
  misc_feature 1..636: note = Description of Artificial Sequence: Synthetic coding sequence
  source 1..636: mol_type = other DNA
atgtacagcacagtgtctggcagcgagaagaacagcaagatctactgccccaccatcgacctgtacaactggacagcccccctggagtggttcaagaactgccaggccctgcagggcagccgctaccgggcccacaagagcttcctggtgattgacaacgtgatgacagaagatgctggggactacacctgcaagttcatccacaatgaaaatggagccaactacagcgtgacagccaccaggagcttcaccgtgaaggatgagcagggcttcagcctcttccctgtgattggagccccagcccagaatgagatcaaggaggtggagatcggcaagaatgccaacctgacctgcagcgcctgcttcggcaagggcacccagttcctggccgctgtgctgtggcagctgaatggcaccaagatcacagactttggagagccccgcatccagcaggaggagggccagaaccagagcttcagcaatggcctggcctgcctggacatggtgctgagaattgctgatgtgaaggaggaggacctgctgctgcagtatgactgcctggccctgaacctgcacggcctgcggcggcacacagtgcggctgagcaggaagaaccccagcaaagaatgcttctag

SEQ ID NO: 156337 - DNA, 945 bp, synthetic construct
  misc_feature 1..945: note = Description of Artificial Sequence: Synthetic coding sequence
  source 1..945: mol_type = other DNA
atgggcttctggatcctggccatcctgaccatcctgatgtacagcacagctgccaagttcagcaagcagagctggggcctggagaatgaggccctgattgtgcgctgcccccggcagggcaagcccagctacacagtggactggtactacagccagaccaacaagagcatccccacccaggagaggaacagagtgtttgccagcggccagctgctgaagttcctgcctgctgctgtggccgacagcggcatctacacctgcatcgtgcgcagccccaccttcaacagaacaggctacgccaacgtgaccatctacaagaagcagagcgactgcaatgtgcctgactacctgatgtacagcacagtgtctggcagcgagaagaacagcaagatctactgccccaccatcgacctgtacaactggacagcccccctggagtggttcaagaactgccaggccctgcagggcagccgctaccgggcccacaagagcttcctggtgattgacaacgtgatgacagaagatgctggggactacacctgcaagttcatccacaatgaaaatggagccaactacagcgtgacagccaccaggagcttcaccgtgaaggatgagcagggcttcagcctcttccctgtgattggagccccagcccagaatgagatcaaggaggtggagatcggcacccagttcctggccgctgtgctgtggcagctgaatggcaccaagatcacagactttggagagccccgcatccagcaggaggagggccagaaccagagcttcagcaatggcctggcctgcctggacatggtgctgagaattgctgatgtgaaggaggaggacctgctgctgcagtatgactgcctggccctgaacctgcacggcctgcggcggcacacagtgcggctgagcaggaagaaccccagcaaggagtgcttctag

SEQ ID NO: 156338 - DNA, 117 bp, synthetic construct
  misc_feature 1..117: note = Description of Artificial Sequence: Synthetic coding sequence
  source 1..117: mol_type = other DNA
atgggcttctggatcctggccatcctgaccatcctgatgtacagcacagctgccaagttcagcaagcagagctggggcctggagaatgaggccctgattgtgcgctgccccaggtag

SEQ ID NO: 156339 - DNA, 1728 bp, synthetic construct
  misc_feature 1..1728: note = Description of Artificial Sequence: Synthetic coding sequence
  source 1..1728: mol_type = other DNA
atgtggagcctgctgctgtgtggcctgagcatcgccctgcccctgtctgtgacagcagatggctgcaaggacatcttcatgaagaatgagatcctgagcgccagccagccctttgccttcaactgcaccttcccccccatcaccagcggggaggtgtctgtgacctggtacaagaacagcagcaagatccctgtgtccaagatcatccagagccgcatccaccaggatgagacctggatcctcttcctgcccatggagtggggagacagcggcgtgtaccagtgtgtgatcaagggccgggacagctgccaccgcatccacgtgaacctgactgtgtttgagaagcactggtgtgacaccagcatcggcggcctgcccaacctgagtgatgagtacaagcagatcctgcacctgggcaaggatgacagcctgacctgccacctgcacttccccaagagctgtgtgctgggccccatcaagtggtacaaggactgcaatgagatcaagggggagcgcttcaccgtgctggagacccggctgctggtgtccaatgtgtctgctgaggaccggggcaactatgcctgccaggccatcctgacccacagcggcaagcagtatgaggtgctgaatggcatcaccgtgtccatcacagagcgggccggctacggcggctctgtgcccaagatcatctaccccaagaaccacagcattgaggtgcagctgggcaccaccctcatcgtggactgcaatgtgacagacaccaaggacaacaccaacctgcgctgctggagggtgaacaacaccctggtggatgactactatgatgagagcaagaggatccgggagggcgtggagacccacgtgtccttccgggagcacaacctgtacacagtgaacatcaccttcctggaggtgaagatggaggactatggcctgcccttcatgtgccacgccggcgtgtccacagcctacatcatcctgcagctgcctgccccagacttccgggcctacctgattggaggcctgattgccctggtggccgtggccgtgtctgtggtgtacatctacaacatcttcaagattgatattgtgctgtggtacagaagtgccttccacagcacagagaccatcgtggatggcaagctgtatgatgcctacgtgctgtaccccaagccccacaaggagagccagagacatgctgtggatgccctggtgctgaacatcctgcctgaggtgctggagcggcagtgtggctacaagctgttcatcttcggcagagatgagttccctggccaggccgtggccaacgtgattgatgaaaatgtgaagctgtgccggcggctgattgtgattgtggtgcctgagagcctgggcttcggcctgctgaagaacctgtctgaggagcagattgctgtgtacagcgccctgatccaggacggcatgaaggtgatcctgattgagctggagaagattgaggactacacagtgatgcctgagagcatccagtacatcaagcagaagcacggggccatccgctggcacggggacttcacagagcagagccagtgcatgaagaccaagttctggaagacagtgcgctaccacatgccaccccggcgctgccggcccttcccccctgtgcagctgctgcagcacaccccctgctacagaacagctggccctgagctgggcagcaggaggaagaagtgcaccctgaccaccggctag

SEQ ID NO: 156340 - DNA, 519 bp, synthetic construct
  misc_feature 1..519: note = Description of Artificial Sequence: Synthetic coding sequence
  source 1..519: mol_type = other DNA
atgtggagcctgctgctgtgtggcctgagcatcgccctgcccctgtctgtgacagcagatggctgcaaggacatcttcatgaagaatgagatcctgagcgccagccagccctttgccttcaactgcaccttcccccccatcaccagcggggaggtgtctgtgacctggtacaagaacagcagcaagatccctgtgtccaagatcatccagagccgcatccaccaggatgagacctggatcctcttcctgcccatggagtggggagacagcggcgtgtaccagtgtgtgatcaagggccgggacagctgccaccgcatccacgtgaacctgactgtgtttgagaagcactggtgtgacaccagcatcggcggcctgcccaacctgagtgatgagtacaagcagatcctgcacctgggcaaggatgacagcctgacctgccacctgcacttccccaagagctgtgtgctgggccccatcaagtggtacaaggactgcaatgagatcaagggggagaggtag

SEQ ID NO: 156341 - DNA, 1374 bp, synthetic construct
  misc_feature 1..1374: note = Description of Artificial Sequence: Synthetic coding sequence
  source 1..1374: mol_type = other DNA
atgacaggcctggtgtccctgagctacttccccctgagcaccaggagctgtgccctgcagagctgcagccctgtgtggggctgcggcccctgctgcagcgctggctgccccagccccttccactgcctgagccagcaggactgcaatgagatcaagggggagcgcttcaccgtgctggagacccggctgctggtgtccaatgtgtctgcagaagatcggggcaactatgcctgccaggccatcctgacccacagcggcaagcagtatgaggtgctgaatggcatcaccgtgtccatcaagagagctggctacggcggctctgtgcccaagatcatctaccccaagaaccacagcattgaggtgcagctgggcaccaccctcatcgtggactgcaatgtgacagacaccaaggacaacaccaacctgcgctgctggagggtgaacaacaccctggtggatgactactatgatgagagcaagaggatccgggagggcgtggagacccacgtgtccttccgggagcacaacctgtacacagtgaacatcaccttcctggaggtgaagatggaggactatggcctgcccttcatgtgccacgccggcgtgtccacagcctacatcatcctgcagctgcctgccccagacttccgggcctacctgattggaggcctgattgccctggtggccgtggccgtgtctgtggtgtacatctacaacatcttcaagattgatattgtgctgtggtacagaagtgccttccacagcacagagaccatcgtggatggcaagctgtatgatgcctacgtgctgtaccccaagccccacaaggagagccagagacatgctgtggatgccctggtgctgaacatcctgcctgaggtgctggagcggcagtgtggctacaagctgttcatcttcggcagagatgagttccctggccaggccgtggccaacgtgattgatgaaaatgtgaagctgtgccggcggctgattgtgattgtggtgcctgagagcctgggcttcggcctgctgaagaacctgtctgaggagcagattgctgtgtacagcgccctgatccaggacggcatgaaggtgatcctgattgagctggagaagattgaggactacacagtgatgcctgagagcatccagtacatcaagcagaagcacggggccatccgctggcacggggacttcacagagcagagccagtgcatgaagaccaagttctggaagacagtgcgctaccacatgccaccccggcgctgccggcccttcccccctgtgcagctgctgcagcacaccccctgctacagaacagctggccctgagctgggcagcaggaggaagaagtgcaccctgaccaccggctag

SEQ ID NO: 156342 - DNA, 1728 bp, synthetic construct; identical to SEQ ID NO: 156339
  misc_feature 1..1728: note = Description of Artificial Sequence: Synthetic coding sequence
  source 1..1728: mol_type = other DNA

SEQ ID NO: 156343 - DNA, 300 bp, synthetic construct
  misc_feature 1..300: note = Description of Artificial Sequence: Synthetic coding sequence
  source 1..300: mol_type = other DNA
atgcagccccgggtgctgctggtggtggccctgctggccctgctggccagcgcccgggccagcgaggccgaggatgccagcctgctgtccttcatgcagggctacatgaagcacgccaccaagacagccaaggatgccctgagctctgtgcaggagagccaggtggcccagcaggcccggggctgggtgacagatggcttcagcagcctgaaggactactggagcacagtgaaggacaagttcagcgagttctgggacctggaccctgaggtgcggcccaccagcgctgtggccgcctag

SEQ ID NO: 156344 - DNA, 1500 bp, synthetic construct
  misc_feature 1..1500: note = Description of Artificial Sequence: Synthetic coding sequence
  source 1..1500: mol_type = other DNA
atgagcaggacagagctgcccagccccccatctgtgtggtttgaggccgagttcttccaccacatcctgcactggacccccatccccaaccagagcgagagcacctgctatgaggtggccctgctgcgctatggcatcgagagctggaacagcatcagcaactgcagccagaccctgtcctatgacctgacagctgtgaccctggacctgtaccacagcaatggctaccgggcccgggtgcgggctgtggatggcagccgccacagcaactggacagtgaccaacacccgcttctctgtggatgaggtgaccctgactgtgggctctgtgaacctggagatccacaacggcttcatcctgggcaagatccagctgccccggcccaagatggccccagccaatgacacctatgagagcatcttcagccacttccgggagtatgaaattgccatcaggaaggtgcccggcaacttcaccttcacccacaagaaggtgaagcatgagaacttcagcctgctgaccagcggggaggtgggggagttctgtgtgcaggtgaagcccagcgtggccagccgcagcaacaagggcatgtggagcaaggaggagtgcatcagcctgacccggcagtacttcaccgtgaccaacgtcatcatcttctttgcctttgtgctgctgctgagcggggccctggcctactgcctggccctgcagctgtatgtgagaagaaggaagaagctgcccagcgtgctgctcttcaagaagcccagccccttcatcttcatcagccagaggcccagccctgagacccaggacaccatccaccccctggatgaggaggccttcctgaaggtgtccccagagctgaagaacctggacctgcacggcagcacagattctggcttcggcagcaccaagcccagcctgcagacagaggagccccagttcctgctgcctgacccccacccccaggccgacaggaccctgggcaaccgggagccccctgtgctgggggacagctgcagcagcggcagcagcaacagcacagacagcggcatctgcctgcaggagcccagcctgagccccagcacaggccccacctgggagcagcaggtgggcagcaacagccggggccaggatgattctggaattgacctggtgcagaacagcgagggccgggccggggacacccagggcggcagcgccctgggccaccacagccccccagagcctgaggtgcctggagaggaggaccctgctgctgtggccttccagggctacctgcggcagacccgctgtgccgaggagaaggccaccaagacaggctgcctggaggaggagagccccctgacagatggcctgggccccaagtttggccgctgcctggtggatgaagctggcctgcaccccccagccctggccaagggctacctgaagcaggaccccctggagatgaccctggccagcagcggccccaacggcaccgtggagcccgcccactag

SEQ ID NO: 156345 - DNA, 1677 bp, synthetic construct
  misc_feature 1..1677: note = Description of Artificial Sequence: Synthetic coding sequence
  source 1..1677: mol_type = other DNA
atgagcaggacagagctgcccagccccccatctgtgtggtttgaggccgagttcttccaccacatcctgcactggacccccatccccaaccagagcgagagcacctgctatgaggtggccctgctgcgctatggcatcgagagctggaacagcatcagcaactgcagccagaccctgtcctatgacctgacagctgtgaccctggacctgtaccacagcaatggctaccgggcccgggtgcgggctgtggatggcagccgccacagcaactggacagtgaccaacacccgcttctctgtggatgaggtgaccctgactgtgggctctgtgaacctggagatccacaacggcttcatcctgggcaagatccagctgccccggcccaagatggccccagccaatgacacctatgagagcatcttcagccacttccgggagtatgaaattgccatcaggaaggtgcccggcaacttcaccttcacccacaagaaggtgaagcatgagaacttcagcctgctgaccagcggggaggtgggggagttctgtgtgcaggtgaagcccagcgtggccagccgcagcaacaagggcatgtggagcaaggaggagtgcatcagcctgacccggcagtacttcaccgtgaccaacgtcatcatcttctttgcctttgtgctgctgctgagcggggccctggcctactgcctggccctgcagctgtatgtgagaagaaggaagaagctgcccagcgtgctgctcttcaagaagcccagccccttcatcttcatcagccagaggcccagccctgagacccaggacaccatccaccccctggatgaggaggccttcctgaaggtgtccccagagctgaagaacctggacctgcacggcagcacagattctggcttcggcagcaccaagcccagcctgcagacagaggagccccagttcctgctgcctgacccccacccccaggccgacaggaccctgggcaaccgggagccccctgtgctgggggacagctgcagcagcggcagcagcaacagcacagacagcggcatctgcctgcaggagcccagcctgagccccagcacaggccccacctgggagcagcaggtgggcagcaacagccggggccaggatgattctggaattgacctggtgcagaacagcgagggccgggccggggacacccagggcggcagcgccctgggccaccacagccccccagagcctgaggtgcctggagaggaggaccctgctgctgtggccttccagggctacctgcggcagacccgctgtgccgaggagaaggccaccaagacaggctgcctggaggaggagagccccctgacagatggcctgggccccaagtttggccgctgcctggtggatgaagctggcctgcaccccccagccctggccaagggctacctgaagcaggaccccctggagatgaccctggccagcagcggggcccccaccggccagtggaaccagcccacagaggagtggagcctgctggccctgagcagctgcagcgacctgggcatcagtgactggagctttgcccatgacctggcccccctgggctgtgtggccgcccctgggggcctgctgggcagcttcaacagcgacctggtgaccctgcccctcatcagcagcctgcagagcagcgagtag

SEQ ID NO: 156346 - DNA, 1290 bp, synthetic construct
  misc_feature 1..1290: note = Description of Artificial Sequence: Synthetic coding sequence
  source 1..1290: mol_type = other DNA
atggccccagccaatgacacctatgagagcatcttcagccacttccgggagtatgagatcgccatcaggaaggtgcccggcaacttcaccttcacccacaagaaggtgaagcatgagaacttcagcctgctgaccagcggggaggtgggggagttctgtgtgcaggtgaagcccagcgtggccagccgcagcaacaagggcatgtggagcaaggaggagtgcatcagcctgacccggcagtacttcaccgtgaccaacgtcatcatcttctttgcctttgtgctgctgctgagcggggccctggcctactgcctggccctgcagctgtatgtgagaagaaggaagaagctgcccagcgtgctgctcttcaagaagcccagccccttcatcttcatcagccagaggcccagccctgagacccaggacaccatccaccccctggatgaggaggccttcctgaaggtgtccccagagctgaagaacctggacctgcacggcagcacagacagcggcttcggcagcaccaagcccagcctgcagacagaggagccccagttcctgctgcctgacccccacccccaggccgacaggaccctgggcaaccgggagccccctgtgctgggggacagctgcagcagcggcagcagcaacagcacagattctggcatctgcctgcaggagcccagcctgagccccagcacaggccccacctgggagcagcaggtgggcagcaacagccggggccaggatgacagcggcatcgacctggtgcagaacagcgagggccgggccggggacacccagggcggcagcgccctgggccaccacagccccccagagcctgaggtgcctggagaagaagatcctgctgctgtggccttccagggctacctgcggcagacccgctgtgccgaggagaaggccaccaagacaggctgcctggaggaggagagccccctgacagatggcctgggccccaagtttggccgctgcctggtggatgaggccggcctgcaccccccagccctggccaagggctacctgaagcaggaccccctggagatgaccctggccagcagcggggcccccaccggccagtggaaccagcccacagaggagtggagcctgctggccctgagcagctgcagcgacctgggcatcagtgactggagctttgcccatgacctggcccccctgggctgtgtggccgcccctgggggcctgctgggcagcttcaacagcgacctggtgaccctgcccctcatcagcagcctgcagagcagcgagtag

SEQ ID NO: 156347 - DNA, 1269 bp, synthetic construct
  misc_feature 1..1269: note = Description of Artificial Sequence: Synthetic coding sequence
  source 1..1269: mol_type = other DNA
atgagcagcagctgcagcggcctgagccgggtgctggtggccgtggccacagccctggtgtctgccagcagcccctgcccccaggcctggggccccccaggagtgcagtatggccagcccggccgctctgtgaagctgtgctgccctggggtgacagctggggaccctgtgtcctggttcagagatggagagcccaagctgctgcagggcccagattctggcctgggccacgagctggtgctggcccaggccgacagcacagatgagggcacctacatctgccagaccctggatggagccctgggcggcaccgtgaccctgcagctgggctaccccccagcccggcctgtggtgtcctgccaggccgctgactatgagaacttcagctgcacctggagccccagccagatcagcggcctgcccacccgctacctgaccagctacaggaagaagacagtgctgggcgctgacagccagaggaggagccccagcacaggcccctggccctgcccccaggaccccctgggcgccgcccgctgtgtggtgcatggagctgagttctggagccagtaccgcatcaacgtgacagaggtgaaccccctgggcgccagcacccggctgctggatgtgtccctgcagagcatcctgcggccagaccccccccagggcctgcgggtggagagcgtgcccggctacccccggcggctgcgggcctcctggacctacccagcctcctggccctgccagccccacttcctgctgaagttccggctgcagtacagacctgcccagcacccagcctggagcacagtggagcccgccggcctggaggaggtgatcacagatgctgtggccggcctgccccatgctgtgcgggtgtctgcccgggacttcctggatgctggcacctggagcacctggagccctgaggcctggggcacccccagcacaggcaccatccccaaggagatcccagcctggggccagctgcacacccagcctgaggtggagccccaggtggacagccctgccccaccccggcccagcctgcagccccacccccggctgctggaccaccgggacagcgtggagcaggtggccgtgctggccagcctgggcatcctgtccttcctgggcctggtggccggggccctggccctgggcctgtggctgcggctgcggcggggcggcaaggatggcagccccaagccaggcttcctggccagcgtcatccctgtggacagaagacctggggcccccaacctgtag

SEQ ID NO: 156348 - DNA, 1173 bp, synthetic construct
  misc_feature 1..1173: note = Description of Artificial Sequence: Synthetic coding sequence
  source 1..1173: mol_type = other DNA
atgagcagcagctgcagcggcctgagccgggtgctggtggccgtggccacagccctggtgtctgccagcagcccctgcccccaggcctggggccccccaggagtgcagtatggccagcccggccgctctgtgaagctgtgctgccctggggtgacagctggggaccctgtgtcctggttcagagatggagagcccaagctgctgcagggcccagattctggcctgggccacgagctggtgctggcccaggccgacagcacagatgagggcacctacatctgccagaccctggatggagccctgggcggcaccgtgaccctgcagctgggctaccccccagcccggcctgtggtgtcctgccaggccgctgactatgagaacttcagctgcacctggagccccagccagatcagcggcctgcccacccgctacctgaccagctacaggaagaagacagtgctgggcgctgacagccagaggaggagccccagcacaggcccctggccctgcccccaggaccccctgggcgccgcccgctgtgtggtgcatggagctgagttctggagccagtaccgcatcaacgtgacagaggtgaaccccctgggcgccagcacccggctgctggatgtgtccctgcagagcatcctgcggccagaccccccccagggcctgcgggtggagagcgtgcccggctacccccggcggctgcgggcctcctggacctacccagcctcctggccctgccagccccacttcctgctgaagttccggctgcagtacagacctgcccagcacccagcctggagcacagtggagcccgccggcctggaggaggtgatcacagatgctgtggccggcctgccccatgctgtgcgggtgtctgcccgggacttcctggatgctggcacctggagcacctggagccctgaggcctggggcacccccagcacaggcaccatccccaaggagatcccagcctggggccagctgcacacccagcctgaggtggagccccaggtggacagccctgccccaccccggcccagcctgcagccccacccccggctgctggaccaccgggacagcgtggagcaggtggccgtgctggccagcctgggcatcctgtccttcctgggcctggtggccggggccctggccctgggcctgtggtag

SEQ ID NO: 156349 - DNA, 1269 bp, synthetic construct; identical to SEQ ID NO: 156347
  misc_feature 1..1269: note = Description of Artificial Sequence: Synthetic coding sequence
  source 1..1269: mol_type = other DNA

SEQ ID NO: 156350 - DNA, 1269 bp, synthetic construct; identical to SEQ ID NO: 156347
  misc_feature 1..1269: note = Description of Artificial Sequence: Synthetic coding sequence
  source 1..1269: mol_type = other DNA

SEQ ID NO: 156351 - DNA, 813 bp, synthetic construct
  misc_feature 1..813: note = Description of Artificial Sequence: Synthetic coding sequence
  source 1..813: mol_type = other DNA
atgagcagcagctgcagcggcctgagccgggtgctggtggccgtggccacagccctggtgtctgccagcagcccctgcccccaggcctggggccccccaggagtgcagtatggccagcccggccgctctgtgaagctgtgctgccctggggtgacagctggggaccctgtgtcctggttcagagatggagagcccaagctgctgcagggcccagattctggcctgggccacgagctggtgctggcccaggccgacagcacagatgagggcacctacatctgccagaccctggatggagccctgggcggcaccgtgaccctgcagctgggctaccccccagcccggcctgtggtgtcctgccaggccgctgactatgagaacttcagctgcacctggagccccagccagatcagcggcctgcccacccgctacctgaccagctacaggaagaagacagtgctgggcgctgacagccagaggaggagccccagcacaggcccctggccctgcccccaggaccccctgggcgccgcccgctgtgtggtgcatggagctgagttctggagccagtaccgcatcaacgtgacagaggtgaaccccctgggcgccagcacccggctgctggatgtgtccctgcagagcatcctgcggccagaccccccccagggcctgcgggtggagagcgtgcccggctacccccggcggctgcgggcctcctggacctacccagcctcctggccctgccagccccacttcctgctgaagttccggctgcagtacagacctgcccagcacccagcctggagcacctag

SEQ ID NO: 156352 - DNA, 504 bp, synthetic construct
  misc_feature 1..504: note = Description of Artificial Sequence: Synthetic coding sequence
  source 1..504: mol_type = other DNA
atgagcagcagctgcagcggcctgagccgggtgctggtggccgtggccacagccctggtgtctgccagcagcccctgcccccaggcctggggccccccaggagtgcagtatggccagcccggccgctctgtgaagctgtgctgccctggggtgacagctggggaccctgtgtcctggttcagagatggagagcccaagctgctgcagggcccagattctggcctgggccacgagctggtgctggcccaggccgacagcacagatgagggcacctacatctgccagaccctggatggagccctgggcggcaccgtgaccctgcagctgggctaccccccagcccggcctgtggtgtcctgccaggccgctgactatgagaacttcagctgcacctggagccccagccagatcagcggcctgcccacccgctacctgaccagctacaggaagaagacagtgctgggcgctgacagccagaggaggagccccagcacaggcccctag

SEQ ID NO: 156353 - DNA, 420 bp, synthetic construct
  misc_feature 1..420: note = Description of Artificial Sequence: Synthetic coding sequence
  source 1..420: mol_type = other DNA
atgagcagcagctgcagcggcctgagccgggtgctggtggccgtggccacagccctggtgtctgccagcagcccctgcccccaggcctggggccccccaggagtgcagtatggccagcccggccgctctgtgaagctgtgctgccctggggtgacagctggggaccctgtgtcctggttcagagatggagagcccaagctgctgcagggcccagattctggcctgggccacgagctggtgctggcccaggccgacagcacagatgagggcacctacatctgccagaccctggatggagccctgggcggcaccgtgaccctgcagctgggctaccccccagcccggcctgtggtgtcctgccaggccgctgactatgagaacttcagctgcacctggagccccagccagatcagcggctag

SEQ ID NO: 156354 - DNA, 1989 bp, synthetic construct
  misc_feature 1..1989: note = Description of Artificial Sequence: Synthetic coding sequence
  source 1..1989: mol_type = other DNA
atggagcccctggtgacctgggtggtgcccctgctcttcctgttcctgctgagccggcagggcgccgcctgcaggaccagcgagtgctgcttccaggaccccccctacccagatgctgacagcggcagcgccagcggcccccgggacctgcgctgctaccgcatcagcagtgacagatatgaatgttcctggcagtatgagggccccacagctggggtgagccacttcctgcgctgctgcctgagcagcggccgctgctgctactttgctgctggcagcgccacccggctgcagttcagtgaccaggccggcgtgtctgtgctgtacacagtgaccctgtgggtggagagctgggccaggaaccagacagagaagagccctgaggtgaccctgcagctgtacaacagcgtgaagtatgagccccccctgggggacatcaaggtgtccaagctggccggccagctgaggatggagtgggagaccccagacaaccaggtgggcgctgaggtgcagttccgccacaggacccccagcagcccctggaagctgggggactgtggcccccaggatgatgacacagagagctgcctgtgccccctggagatgaatgtggcccaggagttccagctgcggcggcggcagctgggcagccagggcagctcctggagcaagtggagcagccctgtgtgtgtgcccccagagaaccccccccagccccaggtgcgcttctctgtggagcagctgggccaggatggaagaagaaggctgaccctgaaggagcagcccacccagctggagctgcctgagggctgccagggcctggcccctggaacagaggtgacctaccgcctgcagctgcacatgctgagctgcccctgcaaggccaaggccaccaggaccctgcacctgggcaagatgccctacctgagcggggccgcctacaacgtggccgtcatcagcagcaaccagtttggacctggcctgaaccagacctggcacatcccagctgacacccacacagagcctgtggccctgaacatctctgtgggcaccaacggcaccaccatgtactggccagcccgggcccagagcatgacctactgcatcgagtggcagcctgtgggccaggacggcggcctggccacctgcagcctgacagccccccaggaccctgaccctgctggcatggccacctacagctggagccgggagagcggggccatgggccaggagaagtgctactacatcaccatctttgccagcgcccaccctgagaagctgaccctgtggagcacagtgctgagcacctaccactttggaggaaatgccagcgctgctggcaccccccaccacgtgtctgtgaagaaccacagcctggacagcgtgtctgtggactgggcccccagcctgctgagcacctgccctggggtgctgaaggagtatgtggtgcgctgcagagatgaggacagcaagcaggtgtctgagcaccctgtgcagcccacagagacccaggtgaccctgagcggcctgcgggccggcgtggcctacacagtgcaggtgcgggctgacacagcctggctgcggggcgtgtggagccagccccagcgcttcagcattgaggtgcaggtgtctgactggctgatcttctttgccagcctgggcagcttcctgagcatcctgctggtgggcgtgctgggctacctgggcctgaacagagctgcccggcacctgtgcccccccctgcccaccccctgtgccagcagcgccatcgagttccctgggggcaaggagacctggcagtggatcaaccctgtggacttccaggaggaggccagcctgcaggaggccctggtggtggagatgtcctgggacaagggggagaggacagagcccctggagaagacagagctgcctgagggcgcccctgagctggccctggacacagagctgagcctggaggatggagaccgctgcaaggccaagatgtag

SEQ ID NO: 156355 - DNA, 1146 bp, synthetic construct
  misc_feature 1..1146: note = Description of Artificial Sequence: Synthetic coding sequence
  source 1..1146: mol_type = other DNA
atggagcccctggtgacctgggtggtgcccctgctcttcctgttcctgctgagccggcagggcgccgcctgcaggaccagcgagtgctgcttccaggaccccccctacccagatgctgacagcggcagcgccagcggcccccgggacctgcgctgctaccgcatcagcagtgacagatatgaatgttcctggcagtatgagggccccacagctggggtgagccacttcctgcgctgctgcctgagcagcggccgctgctgctactttgctgctggcagcgccacccggctgcagttcagtgaccaggccggcgtgtctgtgctgtacacagtgaccctgtgggtggagagctgggccaggaaccagacagagaagagccctgaggtgaccctgcagctgtacaacagcgtgaagtatgagccccccctgggggacatcaaggtgtccaagctggccggccagctgaggatggagtgggagaccccagacaaccaggtgggcgctgaggtgcagttccgccacaggacccccagcagcccctggaagctgggggactgtggcccccaggatgatgacacagagagctgcctgtgccccctggagatgaatgtggcccaggagttccagctgcggcggcggcagctgggcagccagggcagctcctggagcaagtggagcagccctgtgtgtgtgcccccagagaaccccccccagccccaggtgcgcttctctgtggagcagctgggccaggatggaagaagaaggctgaccctgaaggagcagcccacccagctggagctgcctgagggctgccagggcctggcccctggaacagaggtgacctaccgcctgcagctgcacatgctgagctgcccctgcaaggccaaggccaccaggaccctgcacctgggcaagatgccctacctgagcggggccgcctacaacgtggccgtcatcagcagcaaccagtttggacctggcctgaaccagacctggcacatcccagctgacacccacacagatggcatgatcagcgcccactgcaacctgcggctgcctgacagccgggacagccctgccagcgccagccgggtggccggcatcaccggcatctgccaccacaccaggctcatcctgtacttctag

SEQ ID NO: 156356 - DNA, 1989 bp, synthetic construct; identical to SEQ ID NO: 156354
  misc_feature 1..1989: note = Description of Artificial Sequence: Synthetic coding sequence
  source 1..1989: mol_type = other DNA

SEQ ID NO: 156357 - DNA, 2589 bp, synthetic construct
  misc_feature 1..2589: note = Description of Artificial Sequence: Synthetic coding sequence
  source 1..2589: mol_type = other DNA
atggcccacaccttccggggctgcagcctggccttcatgttcatcatcacctggctgctgatcaaggccaagattgatgcctgcaagagaggagatgtgacagtgaagcccagccacgtgatcctgctgggcagcacagtgaacatcacctgcagcctgaagccccggcagggctgcttccactacagcagaagaaacaagctgatcctgtacaagtttgaccggcgcatcaacttccaccacggccacagcctgaacagccaggtgacaggcctgcccctgggcaccaccctgtttgtgtgcaagctggcctgcatcaacagtgatgagatccagatctgtggggctgagatctttgtgggcgtggcccctgagcagccccagaacctgagctgcatccagaagggggagcagggcaccgtggcctgcacctgggagcggggccgggacacccacctgtacacagagtacaccctgcagctgagcggccccaagaacctgacctggcagaagcagtgcaaggacatctactgtgactacctggactttggcatcaacctgaccccagagagccctgagagcaacttcaccgccaaggtgacagctgtgaacagcctgggcagcagcagcagcctgcccagcaccttcaccttcctggacatcgtgcggcccctgcccccctgggacatccgcatcaagttccagaaggcctctgtgagccgctgcaccctgtactggagagatgagggcctggtgctgctgaaccggctgcgctaccggcccagcaacagccggctgtggaacatggtgaatgtgaccaaggccaagggcagacatgacctgctggacctgaagcccttcacagaatatgagttccagatcagcagcaagctgcacctgtacaagggctcctggagcgactggagcgagagcctgcgggcccagaccccagaggaggagcccaccggcatgctggatgtgtggtacatgaagaggcacatcgactacagccggcagcagatcagcctcttctggaagaacctgtctgtgtctgaggcccggggcaagatcctgcactaccaggtgaccctgcaggagctgaccggcggcaaggccatgacccagaacatcaccggccacacctcctggaccaccgtcatccccaggacaggcaactgggccgtggccgtgtctgctgccaacagcaagggcagcagcctgcccacccgcatcaacatcatgaacctgtgtgaggccggcctgctggccccccggcaggtgtctgccaacagcgagggcatggacaacatcctggtgacctggcagccccccaggaaggaccccagcgctgtgcaggagtatgtggtggagtggagggagctgcaccctggaggagacacccaggtgcccctgaactggctgcggagccggccctacaacgtgtctgccctgatcagcgagaacatcaagagctacatctgctatgagatccgggtgtatgccctgagcggggaccagggcggctgcagcagcatcctgggcaacagcaagcacaaggcccccctgagcggcccccacatcaatgccatcacagaggagaagggcagcatcctgatctcctggaacagcatccctgtgcaggagcagatgggctgcctgctgcactaccgcatctactggaaggagcgggacagcaacagccagccccagctgtgtgagatcccctacagagtgtcccagaacagccaccccatcaacagcctgcagccccgggtgacctacgtgctgtggatgacagccctgacagctgctggggagagcagccatggaaatgaaagagagttctgcctgcagggcaaggccaactggatggcctttgtggcccccagcatctgcatcgccatcatcatggtgggcatcttcagcacccactacttccagcagaaggtgtttgtgctgctggccgccctgcggccccagtggtgcagccgggagatcccagaccctgccaacagcacctgtgccaagaagtaccccatcgccgaggagaagacccagctgcccctggaccggctgctgattgactggcccaccccagaggaccctgagcccctggtgatcagcgaggtgctgcaccaggtgacccctgtgttccgccaccccccctgcagcaactggccccagcgggagaagggcatccagggccaccaggccagcgagaaggacatgatgcacagcgccagcagccccccaccaccccgggccctgcaggccgagagccggcagctggtggacctgtacaaggtgctggagagccggggcagtgaccccaagccagagaacccagcctgcccctggacagtgctgcctgctggggacctgcccacccatgatggctacctgcccagcaacattgatgacctgcccagccatgaggcccccctggccgacagcctggaggagctggagccccagcacatcagcctgagcgtcttccccagcagcagcctgcaccccctgaccttcagctgtggggacaagctgaccctggaccagctgaagatgagatgtgacagcctgatgctgtag
